United States Patent Application Publication US 2023/0235365 A1 - sequence listing, part 3

SEQ ID NO: 7471 - RNA, 2157 nt, synthetic construct
  source 1..2157: mol_type = other RNA
atgaagatagaatacaagtacatcaaacagatcaaggaacagtttgccaatatacagaacaagcaggaccttgctaacttactgtcgtttgccaataaaattctctacggaaataagagcaagccaattaagttaaacgccttaacctattacgccaatccctctatttgcaaaaaccggtactacagtttctcaatcaaaaagaagtccggtgataagcggattatccatgctccgtcaaaaggactcaagactatcctgcaaacactcaattttgtgttccagtgtctctattcaccaccaaaggtggctactggcttcgtaaccggcaaaagcattgtggataatgctaggaaacacgaaggacatcggtatatcctcaatttggacttgaaagacttcttctattcctttgacaggaatagggtgaaattggcgtttatgtatgagcctttcaatcttatcggcgagaaggagccactggcctttttactggcttccctgtgtacccatcctatcgaagttaacggtgaaacaaaggttgttttgccccaagggagccccgcatctcctattttaactaatatcctgtgcaagaagctggaccgacgtctaaacggattggctaaaaggtttggggcctcttactcccgttatgcggacgatatcacattcagctcgcagtacaacttctacaataacaaagagttcgtagacgagctgaatcggatcatcgagatcgaccagaaacttaacataaattccaagaagatccggattcagaagtccactttcagacaggaagtcactggactgattgtgaatgaaaaggtaaatgtgcgccgccgctatattaagctcattcgcatgtggctctattattgggagaagtacggctatgacaaagcagagcagatatttcaaaaagattacatcgcggacaagggacatgtcaaaaaaggcaatgccaagctaatcgacgtgctgaaaggcaaactggcattcgtcaaaatggtgaaggggtacgaggacactacctatcagaaattgaaaaagcgatttgacagcctcataaaaaacaagatcatccaaaacctgaacaagaataaagtcgtgggcatgaaattggagaacaacaagtcatcaaatagtatcctcagcgagagcctgctggaatatctggaaaagcatctcaaggagttcctaaataaaaagacctacccgattattcacacacctcagaaaacgattgagatcctgaagctgttcagctcaaacgacaaacacctgaaatataccacccactcttgggaagaggaaaaatacgagacgtataacaactttatgggcaagatcaaagatgaatgggaggatattgataagaaccttaaagggctgtcaaaccgccttcacgccaagataagtaacttcctgttcaacaagaagctcggccaaaagaaatctaagggcgattatataagctggggtgacaaaaggctgaagtttgggtggagttccaaagagctcatggagtttatgaaaaagaacccctctagctctccattcgattgtcccattccagagaacattaagaacctggataatgattacggaaagttcttcagagactatgtcgatgtgttcaagaatgaaattgagtttcgggaggacaccaaatacttcaaaaatatggtcatcagtctgtatgaagacatccttagacctaacggattttccattgagggtcttgaaaacctggacggctttagttgctataccgatacgcagcagatcaagaatgcaattaagagaatattcgagatgttcgtgaatggggaatacaagaactacaacaagatcatcatagaaaggagttccaatctgacagggcagtcctttcacttgataaagattactcaactgaactctttcatcaagagatctggggatgaccccaaaattaaagagcctacaggtgatttggggaatatcatcgaactgctcaaaaatcttgcagactactccattgttagcaagtttaataacaaggattgctaccgaattaactacctaagcgccgatcagaaagatcagatcgaaaagattgactgtaacgagataaatggctttacacacgagatcaagttttacctttga

SEQ ID NO: 7472 - RNA, 1203 nt, synthetic construct
  source 1..1203: mol_type = other RNA
atgactttcgagaaaacatacatagaccagatcaaggaagattttgccaatatgcaagacgtttcggacctggccgtggtgctgtctaaagctcgaaatattctgtacgataaagagtgtaaaccattcaacagcgagacactgtattattttgcctacccccagaactgcaagcatcggttcaaagagttttcaatcaagaagaagagtggcgctattcgcacgatacactcacccactcgggaacttaagtctatcttacgcgccctcaattttgtgtttcaatgtatcttcaccccgcatagtgcagctactggcttcgtccctaagaaatctatcgtcgacaacgcaaaaaagcacacaggaaaacactacgtgctcaatatggacatgaaggattttttctactccttcgatcggaatagggttaagatggggttcctggcggagcccttcaacctcaagggaaccaaggagccaattgccttcctgattgcttgcctttgcactcatcctgtcgaaataggaagcgaaatcattcacgtgctcccacagggaagcccttgctcccctattgtgaccaacatcctctgtgcccgcctggatagaaggctaaagggattggcaaacaggcatggtgtggtctacagccgctatgcagacgacattacgttttcctcactgcacaacgcctttaacagagaagcggagcccgtgatcggcgagaagggtcactataataacttcatcgccgagttcgagcgtctgattgggcaggagaagttgaatattaaccacaagaaaactcgtcttcaaaagagtggctactgtcaggaagctaccggcttgatcgtgaatgagaaagtcaacgttagacgacggtatgtaaagcagttgaggatgtggttatattactgggagaaatatggctacgaaaaagcagaacagattttcaagagggattacataaccgacaaaggccacgtgaaaaatatcaacgcgcatctggtgaatgttctggatggtaaactagagtttctgaagatggtaaagggggccgaagacggtacatataaagggctgaaggaaagatttgacatcttagtagggtttacagatccaataaatcagatccttaacgcttggcaaaccgaggggattgatcaggccatgtccatctattacaaggacaaactcgaatga

SEQ ID NO: 7473 - RNA, 1203 nt, synthetic construct
  source 1..1203: mol_type = other RNA
atgaagatcgaacaggccaacatcaatcaaatccgcaaacagttctcggagctccaaacaagagaggacttagccaaacttttgtccgacgccaagaatatgctgtacggggaaaaatgctctcctgttcagctgaaatcactcacatactacgctaacccgcttatatgcaacgatagatacactaccttttctatccggaaaaagagtggggcatcccgaacaattcacgccccagtcaaaggcctaaaatcaattctccgcgctctcaattttgtgctccagtgcatgaccgaaccccatgccgccgcaaccggatttgtacccgacaagagcattgtcgataacgctgctcgccacgtgggtcatagatacgtgtacaacttagacttgcgtgactttttccatagctttgaccggaaccgcgttaaactggcctttatgaatgagcctttcaatctacgggatggccgcgaacccctcgcattcttgctggcttctttgtgtacgcaccctatggagatagagggggaaatcaaaagtgtgctgcctcaaggatctcccactagcccaacactaactaacatcctgtgtaaaaagcttgaccgtagactgtccggtctggccaagaggttcggagcaacctatacccgatacgctgatgatatcaccttctccgctgatagaaacgtgttcaatgatgaggagttccttaatgagctgcgccgtatcatcgaggacgaccaaaagcttgctattaacccacagaagaccaggctgcagaaagccgattataggcaggaagcgacagggttggtagttaatgaaaaggtgaacgtgaggcgacggtacgtcaagcagattaggatgtggttgtattattgggaaaagtatggctatgagactgcatcacggcactttggcaagttttacagagcggacaagggccaccttaaaaagagtaatgcccagctcatcaacgtcctggatggaaagctggaattcctcaagatggtcaagggagcggacgatagcacttacaaagcactgaaaaagcggctggataagttaacaggcattaagcagaaaactgacgcagagaaggtggatctggacttagttgtggacacgatactgattaaaggtctggatgccgggatagagctgtatgagaggttcaagaataccctcaacgacggctga

SEQ ID NO: 7474 - RNA, 1170 nt, synthetic construct
  source 1..1170: mol_type = other RNA
atgcagatcgagcagaagcatatcgacacacttcgggcccactttgcagagatgcagaacaaggaggagttggctctcttactgtcagccgccaagaatatcctctatgggaaagtgtgtaagcccatttccgttaagagcctcaattattacgctaaccccgaatattgcaaacagcgctacaaaaccttcgccataaaaaaaaagagtgggggaactcgcactatacacgcacctgttgaaggactcaagactaagttgagagctctaaactttgccctgcaatgtttgtatgatccccataaggctgcaaccggattcgtcagggaaaagagcattgtggacaacgctaagtgccacgtggggcacaattacgtgttcaacatcgacctgaaagatttcttccattctttcgaccgcaacagagttaaaattggctttatgtctgaacctttcaacctgaatggcgaaaaagagccacttgcgtttctcttggcctccctgtgtactcacccttttgagatcgacggtatccaacagatcgtgctgccccaaggttctccaacctcacctaccataacgaatattctgtgccggaagctggatcataggctgagcggactagccaaacggttcggtgcgacatatactaggtatgccgatgacatgaccttttcgtccgaccacaacatttatgggaatgaagacttccggaacgagcttgtgcgaataattgaggaggaccagaagctgaagattaatccagataaaacacgtctccagaagacaggctatcgccaggagacaacaggtttagtcgtcaatgataaggtgaatgtaacccgtcgatacgttaagcaaatcagaatgtacatctactactgggaaaaatacggatacgagaaggccgagcaggtctttaaaaaggattacaccttagacaaagggtcaactaaaaagaaaaccccaagccttatcaatgtgattgatggcaaactgaacttcctgaaaatggtcaagggaagtgaagatggcacgtataagggcttgagggggagattcgattccctcgcaggcgtatttgacccgattaacgaggtgcttgacgcgtgggaaaagaacggcatcgatgaagcagtgagtctgtactttaaactgaatgctgactga

SEQ ID NO: 7475 - RNA, 1275 nt, synthetic construct
  source 1..1275: mol_type = other RNA
atgaaaatagaacaacagcacattgactttgtgaaagaggagttcgccaagatccagacgaaagaggatctgctgtgtctcctgaacaatgctaagaagatcatttataagggtaagtgcactcccatctccctgagacagctaacctacttcgctaatcctaacttttgcaaagaacggtataggagcttcacaattaaaaagaagagtggcgccgaccgtctcattcatgcgccagagaagggactaaagtccatcctgcggcctcttaacttcattttgcagtgtatagacgacccccacaagagcgcaacaggcttcgtgctggacaagtcaatcgttgataatgcaaaaaagcatatcgacaagccttacgtctacaacatcgacatcaaggactttttccattcgtttaccaaatcttgggttaaatatgggttcatgacggctccatttaacctgggtaaggaaaaagaagatctcgcctttttgctggcctctctgtgtacccacccatttgaaattgacggcaagatacagaacgtacttccgcaggggtcacccactagcccgacaatcactaacatattatgcaaaaggctggatcgccgcttgtccggattggctaaaaggtttggcgctacctacacaagatatgcggatgatatcacattctctgccatgtacaacatcttcaaggaggaggaaaatcctcaacttaatgaaaagggtcgttacgacaacttcattgcagaattagagaggctcattacccaggaaaatctcatcataaaggaagagaaggtcagactgcagaataaagacgcacggcaggaggtgactggactcgttgtcaacgataaagtcaatgtgagacgccggtacgtgaaacaattgcgaatgtggctgtactattgggagaagtacgggtataacaaggcaagtgaaatcttttcccgagactataaggccgacaaaggacacgtaaagaaagggaccccaaatttcgctaatgtcctggatggcaaactgcagtttttaaaaatggtgaaaggggagcaggatgcgacctataaaaaacttaaagagaggttcgatgtgcttaaggccgagattgaccctattaacgaggttctcgatatttgggaggaggaaggaatcgagaaggccatggatttttacagcaagcgcaaaaaaacacaacccaagaagaagaagaatcccgtggtgcggactatgaccatggaaaaactgatggccctattcggcaagtga

SEQ ID NO: 7476 - RNA, 1179 nt, synthetic construct
  source 1..1179: mol_type = other RNA
atgaatattgagcaggccaaggtcgacgagatcaagaagctctttgccgagatgcagaccaaggaggacctcgtttccttgctgaactttgccaataacttgctgtacgacaatgagtgtctgctgataaatcccaagacgctttcttactacgcaaaccctctgatatccaaaaaccgttacagggagtttaccatcaagaagaaatcaggctctaataggactatacatgccccggtgaaggaacttaaacatattctgagaagcttgaacctcgtattacagtgcgtcagcgatcctcacccgagcgcaacagggttcgtactgaacaagagtattatcgacaacgccaaaaaacacgtgggtcaccgctatgtgtataatctggacctgaaggactttttctattcctttgatggaaattccctaaaactagctttcatgtacaagccttttaatctcaatggagaacgggagtacctcgctttcttgctggcctcactgtgcactcaccctatcgaaattgatggcgagatcaagttcgtgcttccccaggggagtccaacctcaccaacactcactaacattttatgccgaaggctggacaggcggctttccggtctggctaaaagattcggcgcagtgtacactagatatgcggatgatattacgttctcgagctatcacaacatttttaagaaggatgagaaccctcagctcaatgacagagggtgttacgataattttatcgcggaactggaaagactcctgcaggaggagggcctcaaaataaatccacaaaaaactcgcttgcagaagtctggctggcatcaagaagctacagggctagtggtcaacgaaaaggttaacgtcaaacggcgatatgtgaaacaattaaggatgtggttgtactattgggaaaagtatgggtacaaaaaggcagagcagatcttcatccaagactatatctctgatcgaggacatgtcaaaaaacgcaagcccaatcttgccaacgtgatcaagggtaagattgaattccttaaaatggtgaaaggctgtgaagacagtacataccagggactgcgcgagcggtttgataaactggttctgaaccagccacccaagaagaccgaaaaaaagaccatcacaaccaatgttttccgtcccagcaacgagtga

SEQ ID NO: 7477 - RNA, 1200 nt, synthetic construct
  source 1..1200: mol_type = other RNA
atgaaaccggaaccgcaccaaaatcagcaaatcagagaggcctttgcagctttgcgaacgaaaaaggatctcgcagagttgctgaacctggctaatcaatttctctatggggaagaggccgctcccctttacctaaaaactctgacctattatgccgatccacgcaaggcaaaggaccggtatcagacgtttactatacaaaagaagtcaggtgctgaaaggctaatacacgctcccgtgaagggactgaagacaatccttcgcgccttaaatttcatcctgcagtgcattcactcccctcatcaagctgccacgggttttgtcactgataagagtatcgtcgacaacgcgaggcagcatattggatctccatacgtttacaatctcgacctcaaggacttttttcacagcttcgacagaaaccgggtgaagctggggctcatgtatgcccccttccatcttaacggccctcgggagccccttgccttccttctagcaagcttgtgcacccaccctctggactgtgacggagaggtgcgcacagtactgccacagggttctcctacctcgccaaccctcacaaatattctgtgccagaaactggaccatcgtctcaacggtctggcgaaaagattcggcctcgtgtacacaagatacgccgatgatattactttttcatccgggtacgattgtttccgaaatcccgagttccagtccgaactgcgtcggataatcgaggaggaccagcagctgcgcatccaccctgacaaaactcgtttgcagcgccttggctatcgacaggaagcaacaggcctgattgttaacgaaaaggttaacgtccgcagaaggtacgtgaagcagctgagaatgtggatttacttttgggagcggtacggatacgctaaagcccaacagatcttcctcagggattatttaagggacaaagggcatctgaaggatgtgagtaccagctctcttcagcaagtctgtagtgggaagctcgaattcttgaagatggtgaagggaccagaggatagcacataccagcagttagcttcccggtttcacgccctgaccaccaaagagaaagcgtctgcctcaggagcaactaatctggaaagggtagtggatacaatcttaggccagggcctggagcagggcctgagattgtatgacagcttcaaaaccaacaaaaggtga

SEQ ID NO: 7478 - RNA, 1173 nt, synthetic construct
  source 1..1173: mol_type = other RNA
atgaacattacgcccgagcaagtcaagcagattacaacccagctggctgccgtggaaacaaagactgatcttgctgcccttttatccgaggctcagaatattttacatggtaagacatgcaagccgatcacagccacagctttcgcctaccacatgaatccctacatgaacaaaaatcgatataggaacttcaccatcaaaaagaagagcggaggagcaagagtgatatatgccccaactaacgacttgaaggcaatcttgagagccctaaacctgattctgcaatgcatgtatacgccagctcgcgtagttacgggtttcgttccagggcgctctatagtggacaatgccaaatgccacatcggacacaggtatgtgtacaatattgacgtcaaggacttctttcactcctttgacagaaatcgggtgaaattggccttcatgtatgctccctttaaccttagagacaaacgggaaccgttggcgttctttctagcaagtctctgtactcaggcgttccgctttcccggcgaggtggtaaaggccatcctggttcagggctctccaaccagccctaccctcactaacatcatctgtgctaccttggacaggcgcttaaccgggctcgctagaaggttcggggtcacctatagtagatacgcagatgatattacattcagctccgaacattgtccttacaaccgagaggacttccagcgggagcttctccgaatcattgaggggcagggcctgacactgaaccctgataaaacccgactgcaaaatcttgcacaccggcaggaagtgaccggcctgatcgtcaacgagaaggttaatgtgcggcggcgttacgtgaagcagctgcgcatgtatctgtattacctggaaaagtacgggttttacaaagccgaggccatttttctcagagattacctcgcagacaggaagcataacgtgaaaggcaatcctcaaatgctcaatgtactagggggcaagctggactttctgaggatggtcaaaggtcaggaggattcaacttacatatcgctcctgcagcgttttcagaggtttgatttccgccccactaaaatatcaaaaaccctggatgcgtgggaaatgggaggaatcaaggagggtatgaagatctactatggccaagataaggaaaaatga

SEQ ID NO: 7479 - RNA, 1332 nt, synthetic construct
  source 1..1332: mol_type = other RNA
atgaaagcaacggaagcacagcgcgaggagatcaaatcactggtggcggagctgtcctctaaaaagggccttgttaaccttctgtctaaggccaggacgatgctatacgggcaggaaactaagccagtcaaactcaaactgctgacatactatgccaatccaactatttgtcctcgaagatacagaaagagtacaatccctaagaagtccggcggtgtccgcacaatacacgccccagtgaaagggctcaaagcgatcttacagcccctgaatttcgtactacagtgcatgcacacaccccactgtgctgctaccggtttcgtccaggggcgcagcatcgtcgataatgccaggaaacatgttggacaaaactacgtactcaatttggacctaaaagacttcttccactccttcaaccggaatcgagtgaagctggggtttatgtttggtcctttgcagctcaacggcagcaaggagccactggcctttctgctcgcatcgctgtgcacacagcctctgtacgaaaacggagatattaaggttggtcatcgccccccgagccggtttgtgggagagtcaatttttatgtccgaagacgatcctaattacgagcttatcatgcagattctgcaggagaacgaggtcataaactccaaacgtagagtgaagcttaggattgctagaggcgctgtgaagactgtcctgccacaaggaagtccgacctcaccaaccatcaccaatatgttgtgcgagaaattagatcgaagattaactggcctgggcaaccggtttggagcaacgtattctcgctatgctgacgacatcaccttcagttctctccataacatttataaccaggacgaattcaacgatgagttagtgaggatcatcgaagaggaccaggggttcaaaatcaatcccaaaaagacccggctgcagcgcaggggatactgtcaagaagtgaccgggttgagcgtcagtgagaaggtgaatgtgaggcggaggtatgttaagcaacttcgtatgtggctttattattgggagaaatacgggatcgagaaggcagaagatatatttgctcgggattatgtgggagacaaaggccatgttaagatgcacgtgcccgaaatgagcagagtgataggagggaagctggaattcttgcgtatggtaaagggcgaaacagatagcacctatctgggcctgaaggacagatacgaaaagttgatgctccccctcgaccctctcactaagattctcgatctgtgggaagagaaaggtattgacgccgccatgaatgcctactacggcgaggaggtaactgaggagtga

SEQ ID NO: 7480 - RNA, 1191 nt, synthetic construct
  source 1..1191: mol_type = other RNA
atgccaatcaaccaggaggataaggcatacattcgagacaaattcgcggcgatgcagaccaaagaggaccttgttaatctcctgtcggaagccaaggatatgcgttatagagagaggaccaagcctttcaaactgaactactttacatactatgctaacccgaagctgtgcaagcaacggtacaagacttttacgatatcaaaaaagtccggcggacaaagggtcattcatgccccagtaatgggccttaattttctgcttcagagtgtcaatttcgtgctcaattgtatgtacgagccccacaaagctgccacaggttttgtgcctgaaaaatcaatcgtggataatgccagaggacatgccgagaaaccttttgtgtataacattgatctgcaggacttctttcacagctttggcaaaccacgggtgaagtacggcttcatgcgctccccgttcaacctcaacggcgacagggagtatctggcattcttgctcgccagcctatgcacacatcctttcgaagtgaacggggaggtgaagcgagtgctccctatgggatctcccacctctccaaccattacgaatattctctgtcacactctggacaggcgcttaaacgggctcgcaaagcgcttcggcgcaacatactcccggtatgctgatgatataaccttcagtagcatccacaacatctatcgcaaaaaggacttccaaaaggaactttacagaatcgtggaggctaaccaagggttgaagatcaaacccgaaaaaactcgtttgcagaaagagggttacagaaaggaagctaccggattggttgttaacgagaaagttaatgtgaaacggaggtacgtcaaggatttacgaaagtggctgtacctgtgggagaagtatgggaatgagaaggcccagcagctgtttaccaaagactacgtagccgataagggacacgtcaagaaaggagaacccaaccttgaaaatgtcttggacggcaaactggactttatgaagatggtgaagggcgtgcaagacgggacatatctaaagctgcgggaccgctttgataaactaactcagcagtcctcaacatctaatagtaagaaggtaagcttagacgatgtcctggatactatactcaatcagggtctgatccaggggattgacctgtatcagaagctgagaaaaccctga

SEQ ID NO: 7481 - RNA, 1176 nt, synthetic construct
  source 1..1176: mol_type = other RNA
atgaagctggaaaagcagcatactgagcagctgattaaacaattccgcagcctcaaaacaaaggatgatctgctggttctgatcaacaaggtaaatcttctgttgtacggtgatgactttaaaagtcttacactgaagggcctcaactactacacaaatccaaactatagtgataagcgttactcgtcattctctatcaaaaagaagtctggcggtgagagaataatcaactctcctgtgaatggactgaagcatatactcaagcccctcaacgttattttaaattgcattgccaccccacacccaaaggctactggcttcgtcttaggcaagtctattgtggacaacgctaaacaacacgtgggcaaccattatgtgtacaacattgatctgaaagactttttccacagctttgaccgcaaccgggtcaagctgggcttcatgtaccccccttttaatctcagtggagacttggagcccctggcttttctgttggcctccctgtgcactcaccccttcgaagtagagggtaaattgaaaacagtacttcctcaaggagccccgacctcccctaccatcactaacatcttatgtgtcaaactagacagaagactcaatgggcttgctaaacggttcaaggtgaattatagcaggtatgcagacgatatcactttttccagccatgtgaatgttttcaagaatgaggtcttcctgaaagaactgaatcgaatcatcgtggaggaccagaatctaattctcaacgataagaagaccaggcttcagcagactggtacgaggcaggaggtcacaggcctgactgtcaatacgaaagttaacgtgaattccaagtacattaagcagctgcgcatgtggctttattattgggaaaaatacgggttcaacaaagcggagtcaatatttctgagggactacgcaaaggataaagggcacataaagacagggaaaccaaattttcagaacgtgctaatgggaaaactcgaatacctgaagatggtgaaggggcacggagactcaacctatgtgaagttaaatgcaagatttacccgattgacccggacagaaagcatgctcgaaaaaaccttgatggcctgggaagagaacggaatcgagaaagccatggagatctataagttcaacaacacgaccatgttttga

SEQ ID NO: 7482 - RNA, 1170 nt, synthetic construct
  source 1..1170: mol_type = other RNA
atgaagctcgagaaacaacacacggagcagatcatcaaacagtttaaagcgctgcgcactaaggacgatttggttgtcctcattaataaagtcaacctaatcctgtatggcgataagtttatcagtcttacagtgaagggacttaattattacgccaaccccgaatattctgataagaggtactcatctttcagcataaagaaaaagagtgggggtgaaagaatcatcaacgccccagtgaatggacttaaacatatcttgcggccactgaatattattctcaactcaatagccatgcctcatgctaaggcaactgggttcgttctggggaaatctatagtcgacaacgcccaggcacatgtggggtataactacgtatataacatagacctcaaggacttcttccactcgttcgatcgcaaccgtgtgaagctcggctttatctgtgcaccctttaatttaaatggcttgctcgagccaattgctttccttctggcctccttgtgcacacacccgtttgaaattgatggcgtcattaataccgtcctccctcaaggagctcccacatcccctaccataactaatattctctgcgtgaagctggataggcggctgaatggcctagcaaaaagatttaaagccaactacacacggtatgcggacgatattaccttcagctgtaacgtgaacatctttaagaacgacgagtttttaaaggagctgaacagaattatcgctgaggaccagaatctgattctgaatgacaaaaagaccaggctgcaacagactggtaatcgacaggccgttactggactaaccgtaaacacgaaggtgaacgtgaatagcaagtacattaaacagctgcgcatgtggctgtactattgggagaagtacggttttaataaagcagaaagtatcttcctccgagattacgccgtggagaaggggcagttgaagaaaggaaagcccaacttcaagtcagttctgggtgggaaactggagtatctgaaaatggtgaagggcttcaatgactccacctacttaaagttgaacaccaggttcacaaaactgtccaaaacagaaagcaaacttgagcagaccctgaaagcttgggaaaacaacggcatcgaaaaggctatggaaatctacaagcttgccaagatcaattga

SEQ ID NO: 7483 - RNA, 1188 nt, synthetic construct
  source 1..1188: mol_type = other RNA
atgggctttaagtcctttataaacctcatcatgaagacaaccaaagaggacatcgccctgatccgagaaaagtttaattccttgtctaccaaagaagacctggtgaatttgcttaatgtggccaatgtattgctgtatggtgaggacgcgttcactctgaaagagtcgacactggcctattatgctaatcccgctttctgcacggaacgatataccagcttcgaaataaataagaagtctggtggaacacgcacaataaacgctcccgtgaagggccttaaaagcattctcaaaactctgaactttgttctgcagtgtatcagcgaacctcatcacaaagcaacggggttcgtcatcaataagtccgtagtgacaaacgcaaagtttcatgtggggaaccattacgtctataatatcgacctaaaggattttttccacagcttcgatcgcaatagagttaaactcgggtttatgcaaaaaccttttaacctcaacaaggatagagagcctattgccttcctattgtcatgtctctgcactcacccgttcaaagtcgacgataatctcaagatagtgctaccccagggagcaccaactagccccaccatttccaacatcctgtgctctaccctggacaggcggttaaatggacttgccaaaaagtttaagatcaactacagtcgttacgccgatgacataacattcagctcacaggtgagtgtgtttaaacgtaaagattttcagaaggagcttctcagaattatcactgaggatcagggcctcgttctgaatgaaaaaaaaaccaggctgcaacagtctggctacaggcaggaggtaactggtttgatcgtcaacgagaaggtgaatgtgtcccggcgctacatcaagaaccttcggatgtggttatactactgggaaaaatatggcttcaagcgggcggagattattttcaagaagaattacatcctggacagaggacacattaaaaagtccgaaccaaacttcattaacgtcatcaccgggaaactggagtatctgaaaatggtgaagggcccattcgactcaaccttcattaagttaaacagtaggtttgaactgctgcttcagaatgagtcaatgctggagcagatcctcaaggtttgggagaaccaaggaattgaaaaggctatggagttgtacaacaagtga

SEQ ID NO: 7484 - RNA, 1395 nt, synthetic construct
  source 1..1395: mol_type = other RNA
atgaataacgacaacaaggattaccaggttagtattctcaaagagttcataaagatcgacaaaatggagattcagcagaagcacatagagaaaatgaagtcactgttttctaagatggagaacaaacaagatttggttaacctgctgaacggcgtctataacctcctatataagaagaacgaaacgaccgacaattcctatgatcctttcaagattgtatctgacaccaagaccgtgtattttaatttgatgttctcagaggaggagttcaatctgaaatccaagaccaagaagaacacttatattcagctgtccagtcttagctactatgccaattatagcctgtgcaagaaaagatactcccagttcaaaattaagaagaaaagtggggcagagcggattatcaatgctcccgtggaagggcttaagatcatcttgaaactgctcaattttgttctgcagcacgtgtacaaaccgcataaatccgccaccggattcgtgctcaataaatcaatcgtcgacaacgccaaaaaacacatagactcgaattacgtttacaacatcgacctgaaagattttttccacagctttgatatcaagcgcgtaaagctcggtttcatggaagagctgttcaatagcaaaaccgacagagaacccctcgcctttctgttagcttgtctctgcacacatccattcgaggtcgctggagaaattaagaacgtgctaccacagggctctcctacatcccccactatcaccaacattctctgtaaaactctggataatcgactgactgggctggcaaatcgatttggcttgaggtacacacggtatgccgacgatataaccttttcttctcagcataatgtgtacaacaaggaagattttcagaaggaactcaagcgcatcatcgagaataaccaaaatcttctgatcaaccacaaaaaaacgagactgcagaagagggggtacaagcaggaggtaacaggattagtggtgaatgacaaagtcaatgtgaggaaacggtacgtgaaacaagtcgacaagtatctttacttgtgggagaaatatagtttcgagaaggccaaacagatcttcatccgtgaatatccacaggagaaagcgcatttaagaaactacaagcccaatctcacaaacgtcctgcgcggcaaattagactttcttaaaatggtgaagggagcggaagatagcacatacctaaagctgaagaagcggtttgataagcttactggtaagcagaaccctatcaacgagattctggacatctgggagaaagaaggcattgagcaagctattaaggcatttgaaattgccactgaagtgaatcaaaacagcatagatttgtcaaagttcttcaagaacgaaagggattga

SEQ ID NO: 7485 - RNA, 1554 nt, synthetic construct
  source 1..1554: mol_type = other RNA
atgaaaattgaacagcagcatattgagttgattcgcacaactttctctacactgcagacgaaagaagatctgcttagcctgttgaacctggccaacacactgctctatccaaagaactcattcaaattcgagttgaaacagctcacctactttgcaaatcctaagctggttaaaaacaggtacgccgagttcaccataaaaaaaaaaagtggcgccaatcgaatcattaatgctcccacccaggggcttaaatccatcctaaagacattgaatttcgttttgcagtgcatgtgtgaaccgcacaaggccgctaccgggtttgtaagaggtaagtccattaccgataatgcgaaaaagcacatcgacagcaactatgtctacaacatcgatctgaaggactttttccattccttcgatcttaacagagtcaaactgggatttatgcagaccccctttaatttacgcaatgagtcgtttccaatagcatttattctggcctgcctgtctacttatacattcaagattgacggtgaaatcaagcaggtgctacctcagggatcccctacctcaccaacgataactaatattctttgtaggaggctggacaaacgcttaactggcctagccaatcggtttgggcttaggtacacacgttatgctgatgatatcaccttctcctcacagcacaacgtatacaacaaggaggatttccagaatgaactgcacaaaatcatagtgaccgacgagaagttcgcttttaatacaaagaagaccagactgcagaagcatggctaccagcaagaggttacgggcctcatcgtgaatgaaaaagtgaacgtgcggtcccgttacgtaaaacaagtgagaatgtggctctactattgggagaaatatggatacaacaaggcagaacaagtcttccggaaagattacatcaaggataaaggacatgtcaagaaaacccttcccaacctggacaatgtcttagaggggaaactcctctttttgaaaatggtgaaaggcgagtacgacggcacttacatgaaactccaaaacagattcgagaagctcaataggaagcaaaatcatattgacgagattctggcgttatgggactctaagggaatcgatctcgccaagaacaaattctataacaacgacgatgacgatgaaaatagccacaacactatagtgactgacacagagaagctgagtaagatcaacgaaacagataagcaatatgacattgccaatttttgctttcggaacattacagggttcaagaagctatacctgaagaaagtgattatcgaccacgatatcctgtataagtattgggagaactcatctcgcacgatgatcctggtttcggaagaagcttttaaggtgctcagtgaagcaagcaattttgacagcaaaaatatcgtccagagcatcgaaaagtacaacatcagtgagaataagaagaccaaaaagactgagaagggtgactacaaccagcgatctttctttgtgaaaaagaagagcatagagaagtataagctgatgttctga

SEQ ID NO: 7486 - RNA, 1212 nt, synthetic construct
  source 1..1212: mol_type = other RNA
atgaagactaacccagatcagaaaacctacatacgaaagaagtttgctgccatgacctgtaagagggaccttctggttttacttaatgaggcccaggggatgatgtacggagagaaaggtaggcacttcaggctgaaagacctgacttactacgcgaaccccgatttgtgtaaaaaacgctattccacgttcattatagccaaaaagaacgggggagagcgtacaattaacgcacctgttaaaggactgagaattattcttcggagcctaaatttcattctgcaggctattagtgaaccccatgcagcagctactgggtttgtccctgatagatccatcgttgacaatgcgcgcgcccacgtggggaagcactatgtgtacaatctagatattaaggacttcttccactcttttgaccgcaatagggtgaaaatgggcttcatgagaaagccgtttaatttgaaggcaaatgagaataaggagaagctcgcattctttctttcgtgcctctgtacacacccttttgaggtcgaaggagaaatgaaaaccgtgctcccccaaggatctccaaccagcccaacgatcacaaatattctctgcaagaacttggatagaaggctcaacggcctggctaagaagtacaacctgtcctttacccgttatgccgatgatataactttctcatctagccataacatctttaaggatgaagagttccagaaagagttacaacggatcatcgaggaggaccagcaattagttatcaacccgacgaagactagattgcagaagacctgctaccgccaggaggccactggcctcatcgtgaacgaaaaagtcaatgtgaaacgggactatgtgaaacagctcaggatgtggctgtattattgggaaaagtacggtgaagtacgcgctgaacagatcttccagcggaactacaatctggacaagggtcatgtgaagccagagcatcccgggatggctaacgtaattgccggcaaactggagttcctgaaaatggtgaagggcgacgaggaccctacctacaagaaactccgggagcgatttttgaagctgcaccctggcagtccctttgtcgaaaaactgctgcaaacctgggaaacaagaggcatagatgaagccatcaagatccatacactacgaatcaaaacatcaaaggtcatccttaataccaacatgtatacactgtga

SEQ ID NO: 7487 - RNA, 1209 nt, synthetic construct
  source 1..1209: mol_type = other RNA
atgaaggccagcccagatcagcagacatacataaggaaaaagttcgcactgctggaatccaaagaggatctgctggtgttactgaatgaagctaaacgaatgatgtatggagacgagtgtaaggtattcagacttaaggcactgaactattacgccaatcctgacttctgcaaaaaaaggtatacatccttcgacattccgaagaaaaatggagccaaacgcatcattaacgctcccgtcaaggggctccgtagcatcttgagagtcttgaactttatcctgcaggcggtctacgaggctcatccagccgccaccggattcgtgcaggagaagtcaatcgtcgataatgcacagcctcacgtggacaagcactatgtttacaatcttgacctgcaagactttttccactcctttgataggaatcgcgtgaaactgggattcatgaagaagccattcaatctcaggaaggaccggaacaaagaacaactggcattttttctaagttgcctgtgcacgcacccttttaagattgacggcaacattaagactgtcctgccccaaggctctcctaccagccccaccatctctaacatcctgtgtcgggacttggaccgacgcttgaaggggctggctaagcgttttaacctaaattttacacggtacgctgacgatataacttttagctcttcccataacgtgtataacaaaaacgagttccagtctgagctcactagaatcattgaggaagatcagctactcaaaattaatccgtcaaagacaagacttcagaagaccggctttagacaggaggccacggggttagtggtgaacgagaaaataaacgtgcccaagaattataccaagcagctccgcatgtggttatactactgggagaaatatggcaccaagaaggcggaacaaatcttcacccaggattaccttaaagataaaggtcatgttaagcccgatcacccagagatggaaaacgttttggcaggtaaactcgaattccttaagatggtaaagggtacagacgatcctacttataaaaaacttcagggcaggttcctgaagttgagtatggggtcgccattagtggatcgggtgctcaaggtttgggacgaagagggcctgaataaagccatggaactctactacgaaaaaaaggagagttcagaggccctgactacaaccattctgactctctga

SEQ ID NO: 7488 - RNA, 2010 nt, synthetic construct
  source 1..2010: mol_type = other RNA
atgaagatcaaacaaacagagatcaatctgttaagggcacagtttgcagccattcaaagtaaggaggatcttgtgaaaatcctcacaaaggcaaaaaagcttctttacggagagaaggcaaccaaaatccatctcaagtccctgacctactatgccaatcccgccatatgtaaatcccgctataccccatttcacgttaagaagaagagtggggataacagagtcatccatgctccagttaggggcctgagaattgttctcagttccttaaatttcctgctgcagtgcctgcacgaacctcataagacggcgacaggcttcgtgccaggcaagtctatagtcgacaacgcacggatccacaccaattctaactacgtctacaacatcgacctcaaggacttttttcattcattcaaccggaacaaggtgaagatggcctttatgtaccaacctttcgggctgaaaaagtctcaggagcctcttgcctttttgctggctagcctctgcacacacccaatcgagattgacggaaaaacccagatgatcctgccacagggaagcccgacctctcccactctcagcaatatattgtgtatcaaattggatcgtcggctgaatggattagcaaaacgatttggtgctaaatatacacgctatgccgatgatatcactttcagcagctcagataatatttatacccaagccgactttcaggccgagctacaacgaattatcgtggacgatcagaaactgacaattaatgcgcagaaaacgcggttgcagactaaatatgaaaggcagcaagtgaccggcctggtcgtaaacgataagaacgtgaatgtacacagggcctatgtcaagcagattagaatgtggctttattattgggaaacgtacggcaaaattaaggctgagcgcctttttcagcaggactaccagaaatcggccgtgaacgctcagaaaaaggccccccccctgcagagaattctcgaaggcaaactaaacttcttgaagatggtgaagggtaagaagaataacacctacagacgactgaaacaacgctttgacgagttggcatctgttgcagggaataacgacactaagcccaaaaagcctaagaggaagtcatcaaaacccctgccaagacctcaggagacaaaagggttcctttccctgttcaacaactctaaggggctaaaataccttacccacaagttcaatgacatcacccctccagactacactgaatttatggccctctgcaaggaagaattcgaccagggacagaaaaagtatcccaatgtcccgactgctttactggagcgcattcagcagtacacctttgcctccgctcccgagtggtttactcggaagggcgaagaaaagaactaccaccatatgggttggagcgagcctaaattcgtggaatggtatcagaagtcaagtctccaccctgccagtaatgctaaatggaatcaggagatgattctccccttcaaacacactatagaggtgcgggccggctatctgccggcaatcatagatgaggcaattaccctggctctcggggactctcgttcctcatttgatattcagatctcgaatgacacaataaaggtggctgaattctacaccgatgtagataggttccaattagccctataccatatcttcagcactatcaagactcatggcgaggcgaacttttgttacggcctgacaattgatttcattaaggagaaaagcggaagcacacacatcaaaaagctgatcatcacccacgtggactccgaagcgactaagccagctaacgacgaaggattcataaaaggggacctgaacacaattaagacgctcttgtggggattgtgcaactataacatcgaggcgaaatttcccgatgggttccaaagtaagacaatcctggccgataagcagaatctgggtaaatcctccgaggaagaagagaagcatattaaaggtttcacccacatactgaaattttactga

SEQ ID NO: 7489 - RNA, 1281 nt, synthetic construct
  source 1..1281: mol_type = other RNA
atgaaaaacaagatcaccgcactgcaaataagcgagatcaaggcggattttcttaaaattgaatctttggacgacctctgtaatgtcctcaaccttatcaacgagcttacccagttcaaaaacaagattgagataaaccagctagttaagctgtcaaatccctccctggccaagaatcgctacaaagagttcacaattaagaagaaatcggggacaaatagaacaattaacgccccaattagggagctgaataccatactcaagtctctgaataacctcttcaatctgatttacaatccgcacaccaatgcatttgggttcgtgaccgggaaatccatcgtggataacgctaaaatacacaccaacaaaaagtacgtgtacaatatagacttgaaggatttcttccatagctttgaccggaatcgggtcaaaatgggtatttggtatcagctgttcggcggagataagtccaaggaaaagattagcttcatcctcgcatgcttgactactcatccacttatgatcgacggcgtctcaggaatcgtgctcccccaagggagtcctacaagcccttttctcacaaacctgctatgctacaaactggatagacaactgaaaggactcgcgaaacggtttcgattgatgtactctcgctacgccgacgacattacattctcttcgaattacgacgtttattccaatcctacttttacactagagctgaacaggataattaccacgcagaatctggtgattaaccccactaaaacgcgtctgcaaggcaacgggtaccgaaaagaagtcaccggcgtgatcgtgaacgagcagattaacgtttctcagaactatatcaagcagctgagaatgtggatctattacatcgagaaatatggaattgagaaggccaccgaaatcttcaagaaagattatgccaaggaaaagggtcacatcaagagtatgcaggccagtatgcagaatgtgattgaaggtaagctgttgtatctcgagatggtaaggggcaaagacgacaagaagtttctgacgttgaaaagacggttttataagtccatcggaaaggtgtccaagatcgacaaagtattaattgcttgggatgagaaaggcataagcaaggccatggacatctactataactacaaccgcatctcattagctgccttcctggataatgatgcaactaatgtcatcttagatgaacttcgttttgaagctaaggatagtaataacaacaggaagaaaagcaacatcatctttactctttga

SEQ ID NO: 7490 - RNA, 1278 nt, synthetic construct
  source 1..1278: mol_type = other RNA
atgaaaaattccctgactgtggcgcagattactgagattaaagagaacttcctgaagattgaaagcctcaacgatctgtgcatcgtgctcaaccagactaacgagctgactcagattaaacataccattgaggtggagcagcttgctaagctgagtaatcctgcactagccaaaaatcgatatagagagttcaccattaagaaaaagtctggtgccgataggaaaataaacgcacccatctcagagttgaacctgattctgaaatcactgaatcagctcttcaactttatttacactcctcacacaaatgcctttggatttgttagcggaaagtccatagtagacaatgctaagatgcacactaataagaagtacgtgtataacatcgaccttaaggatttctttcacagtttcgaccgcaatagagtgaagatgggcatatggtatcagttgtttgagggtgataaaagcaaagagaagatcagctttatcttagcttgccttacaacgcatcctctgatgatcgaaggcgagacaaagatcgtgctcccacaagggtcccccacctctccatcgttgaccaacctgctctgttacaagctggatcgacaattaaaagggttggccaagcggtttaagctgacctattcacggtatgccgacgatatcacgttttcttctaactatgatgtgtatagcaaccccatatttacactcgagctgaatcgcatcatcaccgctcaaaatctgatgataaacccggcaaagacccggcttcagggaaatggctataggaaagaagttacagggattacagtcaatgaatacgccaatgttagtcagaagtacgtcaaacagcttaggatgtggatcttctttattgagaaatacggcatagaaaaggccacagaaatcttcaaaaaagactactccaaggaaaaaggacatgtcaagtcgatgaatgcctctatgctgaacgtgatcgaaggcaaactgttgtacctaggaatggtcagagggaaggatgatgaaaaattcctcaccctcaaaaaccgtttctacaaatcaatcggcaaagtcagtaagatagacaaggtactgaacgcatgggaggaagcagggatttctaaggcgatggatatctactttaacaataagcgcatttccctagccgacttccttgacaacgatgctatcaattccattctcgacatcatgggtttcgacgctgacgacagcaataacaagaagaacagcaacattatcttcaccttatga

SEQ ID NO: 7491 - RNA, 1224 nt, synthetic construct
  source 1..1224: mol_type = other RNA
atgaggacccgcttaacggaagaacaaaaggaggtgatcaaggatcaaaccgctcttctacaatcaaagtctgacttcgtcgccctcctgaacgatgtcgcggtaatgatctatggcgacgatgggaagaaagcctttcacctaaaacacctcacctactacggaaacccgaaaatcagctccaagagatatgcaacattcgaaatcaagaaaaagagcggcaaaacccgcattatacatagcccatccagtggcctgaaatccatcttgaaatgctttcgctacgtgctggaatctgtctatgagccccatcctgccgcaatgggattcgctcccggaaggtctgttgtggataatgcccagaagcacgtgcaaatgctgtacgtctacaacatagacttacaggatttctttcacaactttgacagaaatagggtcaaaatgggactgtggcggaacctgttcaatgttgagaagaacaaggaagaactgtcatttttcctcgccgccctgtgcacacatccaatagagattaatggggaggttaaaatcgtactgccgcaaggttcacctgtatctcctgtgttgaccaatatgctctgtgtgtcgctggatcgcagacttcagggtttggctaaaagatatcggatccgatattcacggtatgcagatgacatcacattcagttccaataggaatgtgtttgtggagactgagttccagcttgagcttcacaggataattgaggaagaccagaagctcaagattaacccagacaaaactagactccagaagcgtggctaccgccaggaggtcacgggagtgattgttaatgaaaagctaaatgtgcatcggaagtacgttaagcaggtgcgtatgtggctttactacatggagaagtacgggcccgaaaaggctgagcagttgtttcgagcggactacattagggagaaaagccacgtgaaaaacattaccaaccctatgctgagcgtactcattgggaaattgcagtatctgaagatggtgaaaggccagcatgatcccacttatctgtccctgctgaaccgattcacaaaattattggacaagagcaactttccactccggcagaaaagtactgacctcgctgacaagagtgccatgctgaagaacaagaacatcattgatctgatcatcgaactgggcgtcgagaaagcacttcagaattatgtgatcaatgaatga

SEQ ID NO: 7492 - RNA, 1272 nt, synthetic construct
  source 1..1272: mol_type = other RNA
atggaacaacaggtgaaacaactgaaagaggggtttttgcagatgcagaccaagcaggagcttgctgacgttcttaatttggcaaagaaggtcctgtaccccaacgacgaccaaaagatagagctaaagaatatcacctatcatggcaacagtaagttcagcaagaatcgatacaaaactttcgtggtgaagaagaagtcgggaggtgagaggattatccaggcaccaaagaaagaattcaagtccattctgaagcctctgaatctggtattccaaaccgtgtttgagccccacaaaaacgcatttggctttgtcccacagaaatccatcgtggataatgccaaccgacacgttagcaagaatttcgtgtacaatctggacctgaaagacttttttcacagcttcgaccggaacgcagtgaaaatgggaatctggttctatggttttaagatggacaaaacgaaagagtctctggcatatttactggcgtgtctgtgcactcatgagacagaaataggaggaaaatctgaatttgtcctacctcagggcaatccctgtagtcctacgctcaccaacctcctttgcaccaaactggatcggaggcttaatgggctcgcccgccgcttcggagccgaatatagcagatatgctgacgacattacatttagcgccaataagaacgccttcaaaaacgaggacttccaaaaggagttgaaaaggataatcgaggatgatcagcagctcgaaatccagcccaagaaaactcgtctacaagggcggaactacagacaggacgctacaggcttaaccgtaaacgaaaaagtcaacgtgcagccaagatacactaagcagatcaggcactacctgtacctctggaagaagtacggctataacaaggctgccactattttcaccgccgggtattcagataatcgcggccatgttaaatctccgaatgcaaagttagaaaatgttctgtcaggtaagctggaatatctcaagatggtgaaaggcgaggacgattccacgtaccagacacttaagaaacggtttgatattctcgccaatagagatgtcgagatagagaagattgtggccatttgggagaaggaagggatcgaggcggctgccaaagctaacgagaagcgtaagcagtcaaaaactgcgaacaagctgaacaacaaaaagttcagtaccttcacagacatcaatgagttgtttgatttctccgatgatttggctgccgaaaaagtagaaacatacggtaaatga

SEQ ID NO: 7493 - RNA, 1188 nt, synthetic construct
  source 1..1188: mol_type = other RNA
atgtctctggatcaagaacaaatcgaagagctcaaacaagagtttctcgccataaagagcaaggaggacctactgattatcctgaacaaaacgagcgctcttttggccaaggacaatccagattttaacccaagccctatcgaactaaagacgttaacctattatgccaatcccaaactgtgtaaacagcgctactctagtttcaagattaaaaagaaggctggcgacgaccgcacaatttatgcgccatgccctgggttaaaacgcattctgaggactctaaactaccttctgcaaatcaccttcgaaagtcacgatttcgcaatgggtttcgttcagggcaaatcaatcgtcgataatgcaatcctgcatgtaaacaagaactttgtgtataacgtggacctcgaggatttcttttactcattcgatttctacaaggtcaagttcgcattcgagggcgccccttttaattttaataaagagaaggagcccctggctttttttctggcgtgtctttgcacccatcccttggagctcgaaaaagggactaaagttacactcccccagggcgctcctacttcaccgtttatcacaaacatactctgctaccgaatggatcggaagttgcggggactcgccaaacgctttgacctggtctacagccgatatgcagacgatattacattttctggtcggttcaacttctctctgagcaaggacttcactaatgaactggagcgtataatcaccaaggaaaagttaaagctgaaaccgtccaagactagaatgcagtcaagcttttataggcagagtgtcaccggtattgtggtgaacgaaaaggtaaacaactataagtcctacatcaaggatcttaggatgtggattttctatcttgagcggcacggactggagaaaacccagaccatatacagacagcgtgtgcaggatgacaaaaataagggcagagacattctgaatgtcatttccggaaaactcctttacatgaagatggtgaaagggcagacaaatccagcttacatcaagctggtggacaggatggaggccttcttgatcgggtccggcaccaagaaagaagactccaagcctaaacccgataaatttgagagagttgtgaattcgctcttgaaagatggagacatcgaaaaggccatgaagctgttcaggtga

SEQ ID NO: 7494 - RNA, 1197 nt, synthetic construct
  source 1..1197: mol_type = other RNA
atgaagctggaacaagaacaagtaatcgagcttcgccgactctttctgaaagccaatactaaggaggatttgctcaaggtcataaacaaatccatcaaataccagaacaacggtacaaaggagtttaagtatatttcgctcaaaacgctaacttattacgccaatgcgaacgtctgtaaggatcgctatacaagctttgaaatcctgaaaaagagtggcagtaagaggaccatccacagcccccatctgattcttaacaagattctgaaggctttgaatctcatactccaatgtagcttcgagccgcaccaggcagccatgggatttgttaagaataggtcgatcgttgataacgccaaataccatctgaaccactcatacgtgtacaacatcgatctgaaggattatttctactgcttcgatcttaaacgtgttaagtttgggttctttaatgtgccattcgatttctctaagaaccaggagtctctggcgtttttcattgcctgcttgtgcacgcatccactggacattaacggcgaacttaagaccgtactgcctcagggtgctgccacatcacccaccttaaccaatatcctttcttacagattggaccgcaaactgactggtttggctaaacggtttaacctgctgtactctagatatgccgatgacataaccttcagtggggacttcgacttcagcaaaaataaagacttcattgctgagctcgaccggattatcacaaaggaagggttcgagattaataaggataaaacacggatgcagtccaaggccttccgacagcagatcactgggctggtggtgaatgagaaggtgaacgtccacaaaggcttcataaagcaattaaggatgtggatccactacattgaaaagtatggcctagaaaaggcacagtccatttttgacaagtcagagatcaaacctctcaatgcaaagtacgaccttgcaaacgtgctcaagggaaaaatagaatttctgaaacatgtgaagggccaggaggatcccacctatatcaaactgaatcagagattgagggcttgtctgataaaagcaggacggattgaagagaacctcactgagaaaaagtcctccgaagacattaaatttgagaaggccatcagcctgttaatcaaacagggagacatcgagagcgctatgaatctatttttcaaatga

SEQ ID NO: 7495 - RNA, 1236 nt, synthetic construct
  source 1..1236: mol_type = other RNA
atgaaaaagctgactaaggagcagaagctctatattaagaactctttcgagaatctgcagtccttagatgacctggtatcgatcatcaactacactttaacagaagtgttcagctttgtgggaatcacaaagaagaacatcctcttcaataccaacccctcaaatcagagataccggtctttcaccattaaaaaaaagaccgggggggagcgggtgattaatgcccccaagctcctgctggtgaggactcaaaaggctctgtctgtgatttttaccatatgcatggagatccaccctaaggcaatgggattcaccgaggggaagagcgttgttaccaatgcccagctgcatattggcaaaaattacgtgtacaacattgaccttaaggatttcttccacagcttcaaaaaatggcagattaagaggatcttcactcaaacatcttttcagtttagtgaggaaatcgccaactgcctgacaaacctgtgcgtctatgctcttgccattgatgacaaaaaagaatttgtcctaccccagggagcaccaacatccccgatactgaccaacattttgtgtagaaagatggatattgcccttgataagctggcaaaaaagtacaaagccacatacagcagatatgcggacgacatcaccttctcaagcaacaaagctgtgttcaataaccctaatttccttcaggaactcgaagctatcatccataagaataaactgcagatcaatcctaagaaaacgaggttacaaaaaaagtcagaacgccaggaggtcaccggtattactgtgaatgaaaaattgaacacgacacggaaatatgtgaagcaaatccgtatgtggctctatctgattgagaaatacggagtggaaaaggcggagacgatctttcgcaaggattatataaaggagaaaggccacatcaagtataatcagaacccaatgttttcagtaatcggcggcaaactgttgtacttgaaaatggtgaagtcccaggaagatagcacttaccagaaactagctcagcgattcgataaaatatgtggctttaacgtcgacaccatacttgacgtatgggagaaggaagggaaagaaaaggcaatggaggtctttgaggccactaagagtgaaaagtggaaaaagtcccaaaacattggtgtttccgtttttgagtttagtgacgatgacgagttgagtgagatgatcctcgacaaggacatactctga

SEQ ID NO: 7496 - RNA, 1320 nt, synthetic construct
  source 1..1320: mol_type = other RNA
atgaagacgctgaccacggaggaaaagcaggaattgaagaaccggtttgaaaacattctcagtatcgatgacctggtcgaggtcattaactacgtgtatcaggagttattggccggcaatgagataagtaaggacgacgtgctctcaaatgcagacttgtctaataaacgataccacacctttagcatacgtaagaaaactggtggggaaagaatcatcaatgcccccgagagttcattggaaaaaatccaaaaggcgcttaacaccatcctgaatgagtgcgtgactgtacatccaaaggccatgggattcgccaaaggtaagtctgttgtgaccaacgcaaggctacatcttggcaagaactatgtttataacatagacctgaaggatttcttccactccttcaaaaagtggcaggtgaaaagagtcttcgcccagtccccgttccagtttcccgaagaagttgccaattgtctgacaaatctttgcgtgtacgatctggagatcgatgacaaaaaggcatttgtcctgcctcaaggagctcccactagcccaattttgactaacattctttgccgcaagatggacattgccctggataaactcgctaaaaaatacaaagccacatattctcggtacgccgatgatatttccttctctagcaatgtgtcagtgtttaacaattccgtctttctggaggagctggaggccataatttccaggaacaagctcgagattaaccctaagaagactcgcctccagaaaaaaaatacaaggcaggaggtgaccggcatcaccgtgaatgaaaagctcaacacaacacgcaaatatgtgaagcaaatccggatgtggctatacttaattgaaaagtacggggccaagaaagcagaaaccatctttagaaaggattatgctaaagagaaggggcacacaaaacccgaaaagaatcctatgctgtcagtaatcgggggtaaactgttatatctcaagatggtcaagggggccgaggacagcacgtacctgaagctcgcacagcgttttgacaaagtatgtggattcgatgctgacaagatcctggacacctggcaacaaaagggagaaaaagaagcgcagaagctattcgaggagactaagaataacaaatggaaaaacctggcggctggccgacctaaaccaaaacgccagaaacttggcaagcatctgatggagaagagcaggtcgatggaggagcaggctgagtacgttgctcagattcggaaaaacatcgcagaaaggcaggcgaagagaaaggctgcaatgaagaaaatcagaggcgaatga

SEQ ID NO: 7497 - RNA, 1182 nt, synthetic construct
  source 1..1182: mol_type = other RNA
atgaaaacccttaccacagaagaaaaacaggagctgaagaacaggtttgagaatatactgagtatagatgacctggtcgaggtaataaactatgtctatcaggagctcttagctggtaatgagatctcaaaagatgacgtgctgagcaacgctgacttgtcaaacaagcggtaccatactttttctattcggaaaaagacagggggggagagagttattaaccgacccatgggagcactgggtatgatgcagaaggcactgtccgtaatcttcaccatttgcatgaaaattcaccctaaggcaatgggctttactgagggcaagagcgtggtcacaaacgctcaactacatatcgggaagaattacgtgtacaacatcgatctcaaagacttctttcactccttcaagaagtggcaaatcaagaggatattcacccagactccctttcagctgcctgaggaaatcgccaattatttagcctccctttgtgttcacacaatcgatattgacggtaaaaaagagcaggtccttccacaaggagcgccgacatccccaattctcaccaatatcctgtgtaagaagatggacatcgccttggataagctggccaagaagtacaaggctacctatagtcgttacgccgatgacatcaccttctcttcgaacaagagcgtgtttaataatcctatcttcctgcaagagcttgaggccattatccacaaaaacaagttgcagattaacccaaagaaaacacggctgcagaaaaagactaatagacaggaggtgacggggatcacagtgaatgagaaactcaatacgaccagaaaatatgtgaaacagattcgcatgtggttgtacctcattgaaaaatatggcgccaagaaagccgaaaccatatttcgaaaggactacataaaggagaaaggccatattaaatacaaccagaaccccatgttctctgttattggcggcaagttactatacctcaaaatggtgaagtctcaggaagactcaacttatcagaaactggctcaacgctttgataagatttgcggatttaacgtggatgcaatcctggacgtttgggaaaaggaaggaaaagagaaggcgatggaagtcttcgaagcaactaagagtgaaaaatggaaaaagatccagaatatcaggagcttctacttctga

SEQ ID NO: 7498 - RNA, 1302 nt, synthetic construct
  source 1..1302: mol_type = other RNA
atgaccacatttaccaatgaagaactgaaggatattgccgaaaaaggcgacgagctcataatcgagaagtttgcatccttgaacagctacaaagatatactggaaatgttcaacatcgcccaagtcattttatatggtgagaaggctacacttttcaagctggaagatctgatcttctatgcgtcattgaatttttcagagaaagaccggtacttcaccttcaccattaaaaaaaaatccggtggagaacggatcataaacgcgccctgcgaagagcttaaagggctgctccagtgcttcaattacatcttgcaggtgctatttacaccccatatcaaggccatgggttttgttagagaaagaagtgtcgtcagcaatgcacaactgcatactaataagaactacgtgtacaacattgacctgaaggatttttttcactccttcggccggcagtgggttaaatgggtgctgatgcaggaaccattcaacctctctggcgaaagagaaccactggccttttggttggcatctctctgtacacattcacttgagattgagggcagcacaaagatcgttcttcctcagggggcaccgacttctcctaccttaacgaatatactctgttatcccctagacaagaaactgaatggactcgctaagaggtttggtgccacctactccaggtatgctgatgacattacgttcagctcgaataagtctatcttcaaaaacgaggtattcctcaaggagctcgaacgcattgtgaagagccagaagttaactatcaatgagaagaagacccggctgcagaaaaaggaatatcgtcaggaggtgaccggactaattgtgaacgagaaagtcaacacataccgacactatgtgaaacaactgcgtatgtggctgtattacatcgagaagtacggaatggagaaggcagaggcgttttttcgcagagactacattaaagagaaaggccacatcaaatggaaagagaacccaatgaagaacgtgctgcaggggaaattgctttatttgaagatggtcaagggcgccgaagatgctacttatctgaacctcgtgcagcgctttgatagggccttcggcttcgacgtagaggccatcctcaagatttgggaggaaaaagggattgctgccgctgaaggactgtactacaatagtaagcccaaccgattaatcaaatataagaaggctgacttccactacatactgagtgaggaagagatcgccgagcttaggactaattatcctgaactgtttatggaggaggggttcctgcaatga

SEQ ID NO: 7499 - RNA, 1374 nt, synthetic construct
  source 1..1374: mol_type = other RNA
atgaagaccctgaccaccgagcagatctcatatattcaaactactttcgcatccctgaagaggaaagaaagctttctcgatctcttaaacgaggtaaagaagtttatggagggtgaaaatgccactcctttctcgctgagcttctttacacaatatgccaatcccaaattctgcgaatatgaccgctactacatcttcaagattaagaagaagtctggcggagagaggacgattatggctccatacgacacattcggagagttgctgcgatattttaacgtggtgctccagaccctttttacgccccataccaatgccatggggtttgtaccaggtaagagcatcgcaaccggtgctcagatgcacatcgggaagaattacgtctacaacatagacctgaaggatttcttccattcctttgaaagaaagagggtcaaatggatgttcacacaggcaccatttaatctatctggggagcgtgaaccgctggcattcttcctagctagtctctgtacacaccccatcgagatcgagggacagactagaataattcttcctcagggagcccctacctcacccaccctcacaaatattctgtgttacggcctggacaaaaaattatcaggtcttgctaaacggtttggcgcaacatacagtcgttacgccgatgatatcaccttctcctctaacaagagcatcttcaagaaagaggccttcctttccgaactccagagaatcataacatcccagggcctgacaataaacgagaagaagacaaggctgcaacagaaggagtatcgccaggaggtgaccggactaattgtcaatgagaaagttaacacgtacagacggtacgtgaagcagttgcggatgtggctgcactacatcgagacttatgggtataagaaggcggagatcttgttcaagaaagattacgtgaaagacaaaggccatataaaagaggccagttcgatgaagctggttttagagggcaagctcctgtacttgaaaatggtgaaaggcgagcaagatagcacctatctgaagttgcaggacaggtttaacaaagcttttgggctggacattgaaaagcttctgcaggtgtgggagacttatggcattgaaaaagccgaacaagtttatcgcgaaatgggaatcgagaactttaaaatctgcagtggcgccactgagaaggaggctgcgagctttataactttgcttgaggaaaacgggatgaaaaattctctgctgaacatccgaatttcacgcaatagaattgggaagctcctctctccatccgaaatgatcgaaattttcgataaggaagaccctaaagaaattatggaaagcatgaaaggacggatcattaaatga

SEQ ID NO: 7500 - RNA, 1230 nt, synthetic construct
  source 1..1230: mol_type = other RNA
atggagattatccagcagcataaggactacatcaaggagaagtttaagctcataaagtccggcagcgacttagtgcagatcctgatattcgtctctaaggaagtgcttaagtctaaacaagacctcaacctggaccttttcaaaaaatgtctggatacagaagctaaagaccgctaccagacttttaagatcaaaaagaaatccggcggttttaggaccattaatgcccctaatatccacctcaagcatatcctatcttgcgtgaatatcgtgattcagtgcgttgacgagccccacagagcggctacaggatttgtccgggggaagtccgtgatagagaacgccaagatgcatattgggaagaactacgtgctgaacatcgatttgaaggattttttccattcattcgacaaagaaaaggttaaggaatgtttcatgaggaagcctttcaacttcaatggagaaaaggagatactggcaatctttttggccgagctgtgcactcatccctttgaaatcgattgcgtcaagaaagctgtacttccacaaggagctcctagctctcccacaattaccaacgtaatttgtaaatccatggactgggatctaacagaactcgccaaccgatatggcgccacttataccagatacgccgatgacatgaccttcagttcgaatcacgatctgtactcagacgcattctacgaggaacttttccagatcattaactcacacgagttaactgtaaacagtaagaaaactaggttgcagaagaaaggttacaaacaggaagtgaccggtctggtggtgaacgagaaggttaatgtcccccggagatatgttaaacaactgcgcatgtggatttatttgtgggagaaatatgggtatgagaaagcggaaagtctttttgctaaagactatcggaaagataagggccacgttaaaaaggacaagaatacgatgctcagcgtgattaagggcaagttaaattacctgaagatggtcaaaggagagacggatccaacctacaaaaagctgtacttgcgatatttccacctcaccaattacctattcattgatgaaatactcggggtgtgggagacagagggcctgaacgccgcaatcagcgtgtatgaaaaacacaaacgtaaggagatgaactacccagagccgatcgatgtcaataaactgctggaactgtttgccaaagcagggatcaagtttgagtga

SEQ ID NO: 7501 - RNA, 1197 nt, synthetic construct
  source 1..1197: mol_type = other RNA
atggataagtttcgggaggaatttaatcccgaaatacatcccattcagaaaattaagggtaagagcgattttgtaaggctcatcaactacctgagactcaccaacatttccggcaatatcaaacccattcctcttaagcactttacattctatgccaatcacctgctatcaccaaaccgcttcgagtccttcgaaatcgtcaaaaaaaatggaggcaatcgaacaatccatgcccctaagcgaggtctaaagtctatcctcactgggctgaaccttttcttcaagcagcattacaaaacacacccaaacgtcacaggttttgccgagggcaagtcaatcgtggacaatgcgaagccacacatcgggaagaagtatgtgctgaacatcgatttgaaggacttcttccacgcttttgagaggaagcacgtaaaatgggccatgatgaacgcaccatttttcattaaagaggaaaaggaacccctggcgtttttcatcgctagtttatgtacgcatcccatagaaattaacggggagacgaaatttattctccctcaaggctctccgtgctcacctatcctgaccaatctgttgtgcaggagactggataaacagctcaaaaacctggcacaagaataccaggctaaatataccagatatgcagatgacatcaccttcagctccaatcaccacaagatatctgagaaggacttctacaacaagctggagtatgtcatctccaaccacaatcaccagataaatactaaaaaggtgcgtcttcagaaagagggatacaagcaggaggttaccggaattatcgttaacgaaaagcccaacctgcctaagcgctacataaagcaactaagaatgtggctggcatattgggaaaaatacggatacctgaaggccgacaagctgtttaaaaatgactacttaaaggagcgggggcataggattgagggaactcctcatctgttgagtgtgatggacggcaaactccagttcctgaaaatggtgaagggcgataaagacccgacctataagaaattagaatcgcggtttcataagctcaatggggataaaaaactcactcaggctcatcttgagcttatgaaaattaaccccttcaagccaagcctcaagaatcaacagagcttggaggaagtgctgattaaattggcccgcaagaaaatcttgtga

SEQ ID NO: 7502 - RNA, 1248 nt, synthetic construct
  source 1..1248: mol_type = other RNA
atgaaggacaatgtcgacatccaagctatcatcagggatgagttcccaaagatggagacacaagaggacctcttagttcttatgaacaaagtcaaacgctacctagagaagggcagtaaggaggagtttattccgctcataatgcagtctttgaactactacaagaacattaaggtgtctggcgagcggcgatacaagacattctccattaagaagaagtccggggcatttcgaacaatcaacgctccatgcaccggattgaaagtgtttcagtattgtctgaactacatgctccagaccctgtatcagagcaaccccaatgcctgcggttttgtgcccggccgcagcatagctgacggtgcaaaaaaacacgtgggcaaaaacttcgtactgaatattgacctcaaggatttcttcgatacgatcgaattgcaccgtgttaaagctatcttcactctgcccccctttaaccttaaggatgacaaagagaacagcaacagtctgccatacatcttagccaatctgtgttgccatcctaaagaagttacgaggattgataaagatgggaatccttatcagtgtgttaggaatgtcactccacagggggcccctacatcccctattatcacaaatctaatctgtcgccaactggaccggaggctccttgggctggcaaaaagatttcgcgtgagttattcaaggtatgcagacgatattaccttttcatcgaacaacaaggatgtctttgaagaaggctctgcgttccgtgtcgagctgaagcggataatcgaagaggatcagaagttccgaatcaatgaggaaaagactagagtgcagtcaagagcctatcggcaagaagtgaccggtcttgtagtaaacaacaaagtgaacgtcactaaacggtatgtgaagcagataagaatgtggctgtacctctgggagaggtacggctataataaggcctccgaacacttccagaaagattataatcgctacaagggacaggccgaacatgggaccagaatggagaatgtgattggcggaaaactgaattacatgaagatgatcgtgggagctgacaatgccgcatacagaaaacttgcggagcggttcgaaaagttggtgctggacattatcggagaaaataagaccctaaacaccgacgttaagatcgagactagcatatgcaaagaagacttgaacgccattctgaatgagctgaaggagctcgataagttactgaaatga

SEQ ID NO: 7503 - RNA, 1239 nt, synthetic construct
  source 1..1239: mol_type = other RNA
atggacaataacgcagacatcaagacaacgattcttgacgaattcccgaagatgaagacacaggaggatctgctcgcgcttttaaacaaagttaaacgcgtaatcgactcaaaccatcaacgggattttacccctattaatgagaagagcttcaactactacaaaaacatcaaggcctcaaagaataagcggtacaagacttttagcattaagaaaaagagcggtaaactacgaaccattaatgctccatgcgccggcttgaaaataatccaaacctgcctaaattacatcctgcaggtgttttatcagccgaacaattacgcttgcggcttcgtacccggccgctctatagccgatggcgctaaaaagcacgtgcataagcagtatgtgctgaatattgacctcaaggatttttttgacacaattgagcaccacagagtgaagagtctgttcaccctccctccctttaacctgaaggatgataaagaaaatcctaattcagtcccctacatcctcgctaacctctgttgtcacccaaaggacgtgacaaggtttgacaaagacggcaatacattcgtgtgcaaacgcaatgtcacccctcaaggggccccaactagtcccataattaccaacttgatttgtgcacagctggatagacgattagccgggctggcaaaacggttcaaactgtcgtattcccgttatgccgatgacataactttctcctccaactacaaaaatatcttcaaagagggttccgcctttcgcctggagcttacaaggattatcgaaagcgatcagaaattcaggatcaatgaggagaagacgaggatccagtctaatgcttttcggcaggaggtgactgggttgattgtgaacgaaaaggtcaacgtcacgcatagatatgtgaagcaaatcagaatgtggctctatctgtgggagcattatggatatgacaaggcatttaagtgtttctctaaggattactccctgagtaaaggtagcgccgcgcacggaaccaatatggataacgtcattgctggcaagctgaactacatgaaaatgatcgttggagcggaaaacccaacttataaaaaccttagcaagcgtttcaagaagctgatcaacattcaggagaacggaatcaacgttactgcaatcttggacgtttgggaaaatgaggggatagaatctgccttagaaacctacaagaggttcaaagactacaacaataaatga

SEQ ID NO: 7504 - RNA, 1260 nt, synthetic construct
  source 1..1260: mol_type = other RNA
atgaataactctgccgaggacatacatcgtttgattctggacgaattccctagagttagaactcaagaagacctgctggcattactgaacaagatcaaacagctccttgtagggtgtgctgacgaggagacttgcaaatccctgaccatgtcgtcactgaattactacaaaaatgtcaaggtgtccctacggcaccgctaccatttgttcaatatcaagaagaagtccggaaaactccgtcaaatttgcgctccggtagagggcctgaaaatcctgcaatcctgtttgcgcgaaattttcaacgcattttatgagcccacaccaaacgtctgcggcttcgtgaatgctaggagcatcgctgacggggccaaacggcatatcggcaagaactacgttctgaacatagacttaaaagacttcttcgattccattgagtaccatcgggttaaggcgatgctctgctgtgccccctttaatctgcgagataaccgagactctacccagagtctcccattcgtcattgccaacctctgctgtacacctaaggaagtgatcagatttgacaaagacggaaaagaatatcgctgcaggagatctgtgctcccacagggtgcgcccacctcacctatcctcacaaatctgatttgtcggcagatggacaggaagctctatctgttggctaagaaataccattgtgcctatagtagatacgccgatgatattacctttagcgcaaataagaacatctttaaggtggatagcgatttctatagtgagctacgacacatcatcgaagtggagtgcaaactaaagatcaatgaggaaaaaaccaggattcagtctaggaaatataggcaggaagtcactgggctggtggtaaacaagaaggtcaatgtggcaaagcgctacatcaaacagattcgcatgtggctgtacctttgggagacatacggctataagaaggcccagaatctctttatccacgattatttgcacgataagggacacgtcaagcctgaaacggtgcaccttgaaaacgttcttcgggggaaattggattatctgaaaatgattgtgggcgaagaaaaccacacttacagtagcctgtgcgaaagatacgagaagctgatagagtgcgagaacaaaccaaatcccagcgttgtgaagcaagagaagacgggtaaaaagaataacttacaggagttaaccgaggactgttcaatcgtggagctgcttgagatgcttatagataagatatga

SEQ ID NO: 7505 - RNA, 1347 nt, synthetic construct
  source 1..1347: mol_type = other RNA
atgaatcagcaaaaagccaatattcagcagatcatccgcaaagagtttcccaagattactactgaagccgacctgctccagctcttaaatcgaattaatagcgagctgcacaaggaatttttcgcagcaaaagataagaaggtacctcctatcaagctggctactctgaaatactacaagaactacaaggtgtccggcgctaaacggtataaaacgttcaccattaagaagaagagcggtaaagataggttcatcaatgctccggcgaaggggctcaagttgatccagcagtgtctgaatgagatcctgcagacttactaccagattaacgataacgcctgtggctttatccctgatcgcagtatcgtttatggcgcgaaacttcataccgacaagccatatgtgcttaacattgacctaaaagacttctttgacacaatcacatttcctagagtgaagaaagtgctcgctctgcccccttttaatcttacagggtcaaaggagcccgtcgcctatatcataacatccctgtgctgccatcccaaggcagtcgcaaaggtggacgagaacggagaaaagatcaccgagattaaacaagttctgccacaaggggccccaacctccccaatactaaccaacattgtatgccgtaacctggatcgccatcttgccgggctggctaagcgattcaaagccaactattctcgctatgccgacgacattactttcagtgctcataagaacatattccagcaggattccgtattcatgttagaactcaagaggatcattgaggacgagcagggtctgaccatcaacccagagaaaaccagggtgcagtccaagcgtcagcggcaggaagtcacaggcctagtggttaacaaaaaagttaatgtccctcagagatacgtgaagcagctcaggttgtggatccactactgggagaaattcgacatcgagaaggctcagcattttttccttcagcagtacattactcaacggggaaatgtgaaaagccacaaatcacacatagagaatgtgatcggaggcaaactggattatatgaggatggtcgtgggtgaatcgaacccggcctacaagaagttaagaagacggctggataatcttattcagatcgaggaacacaagaaaagcacaagcgcgccccagcagacgtctagctacaaacaaaagcaatgtgccaaaaccaacaaggaatatatagcagatgggaatggcatacaatctctgagttcagagcagctgccctttacccacaaagatgacttggaagtcttgttggatggactcattaatgacctctctaaggaaaaccaatcactgtga

SEQ ID NO: 7506 - RNA, 1425 nt, synthetic construct
  source 1..1425: mol_type = other RNA
atgatccttacggtcgaacacataaaagctattcgcgatcaatttcagctcttgcggaccaaagaagatctcctagccttgcttaattttatcgcctatccacaactgtatgccaccggctatgtgcctgatgacattgattttagcaaaattgagctgcccgacgacgctaccaccgcggaaaagttgggcctggtgttcaacagtagctccaaaaagagaaggaagcagataactgctaaacagctgacttacttctctaccagtttctctgatgcagagaagaaaaggaaaagatactaccggttccatatcttgaaaaagtctgggaaaaagagggagattcatgcccccgtgtctaaactcaagcagatccagtcatgcatttaccacatgttacagtcggtctacgaaactcaacctcaggcatatggcttcgttgccggcaagtcgattgcagataacgcaagtcttcacaccggtaaggcattcgtgctgaacgtggacctgaaggactttttccctagtgtacattttagaagggttaaagctatgctggaaaagcctcccttttacctcagcggagaaaaagagcctcttgcctacctgatctctaacctgtgtactgagaatggtgtgcttccccaaggcgccccaaccagccctttctttaccaacgtgatttgccagcggttggatcagaaactggagcgattggccaaaaagttccagaccacatacagccggtatgctgatgacttaacattctccgctaatgcctacgttttcagcaagcgcttcatgctggagctcgaacagatcgtgaaaggggaacgctttcagatcaacgaggaaaaaacacgcgtgcaggggtcagcctacaggcaggaggttacggggctgactgttaatgagaaggtgaatgtcaacaagcattatctcagatcctatcgaaccctcctgcacctgtacaagaccaaaggaccgctagtcgcttatgagtatcattacaaacgtatgccagagtcagtgcgggtaataaaacagcaacgtacagtgacatccgcaacttcccacatacagaacgtcatttggggaaagtatctctttcttaaaatgatcaagggagactcagtccccatgccgccctttaccagaaataagtatgccaagatggtgatcgagaagtctatctccttaattaagccagaaccagaaaacatcacaggtgacgacgacactaagaccgagacaaagaagtaccaccaaccagtggtacagacaattctcctggaggcgagcgtacccaatgagcctgtcgaaccgaatacaaaaaaagagacggtggttgaacagctgttaactgcgtgggagaaggagggcctggagaaggccatcgaactactgaagacaaagacgacttga

SEQ ID NO: 7507 - RNA, 2016 nt, synthetic construct
  source 1..2016: mol_type = other RNA
atgaataacccgttcaacgacttaaagccggagcaagttgagggaattaatgagcggtttcacgggttaaattcttccaaggatttttaccttctgttagtagacctcctagatatcctgaacgtcaaagacgaggaaaaggaaatatttaaggcctggataactcagttcatcaggctccgatttcctagacgctacacatatttcactatcagaaaagcctcaggaaaggacagaattatccactcacccaacgatattctgaagttcatccagcgcctttttaacctggtcctaaacacagtttttgtgccacatcccaactcatttggcttctcaaaaagtcaatccatccgagacaatgctgctgttcacgtcaattataactacgtgttcaacatcgacctcattgatttcttcactacgatcgatgctgagcgcataaaaagcgcgtttaaggagtccccctttaacctgtctggagagaagcgtgagttgataaaccacctggtgtatctcacctgtattccgattaaactgggccaggataaagagaatgatacatcaatcggaacactcaaagtcctgccacagggggcaccaacgagcccaattatctcgaatattgtgtgctatgcaatggatcatcagttggctgaactcgctgacaaattcaagattaactatacccggtacgcagacgacattaccttctcttctaataggaacctttatcaggaaggaagcaaattcaggcatatgctggagtctatcgtgataagccagggttttgctctcaatgggaacaaaacccgcttacaaaaaaaacactcccggcaggtggtaacaggtctggtggtcaacgagaggaccaatgtaaaccgggattatataagatccctgaggatgtaccttcactactgggagaaatatgggtaccaaaaagccgaacagctctataataaagacgttgacactgaactgttcttcggagagcccaaaagtctgttcgaccttctcaagggtagaatcgactttctgaagatggtcaagggcgcagacgataacgtgtacaagaacctgaagaagagatggcttcggcttacaaatcctgactcacggaccattgaatttcgggatgagtacttcaatacccataagccaaaggacgtggcgaatttcctgcgcctctttcaggatagtgcaggcttgaagtacttgacacacgattttgatacccctggcgccaaattttcctacgagaagattatggacactgccaatacggaattttcaactggctttacaaaatacgctatcacacgagccttgtatgcaagaataaagcagttcgccttcactgagcggccatcttggtggcgttgggtgaatggggaaaagtccacatacaacctagggtggaagagcaccaagctgaaaaactggatcaatgaaaaccccggcgtgcaccctattaggttcaagatcttccgcgacgagttaataactcccttcaaagactctattcaaatcagggcccctaagtttaaggagctgattgagaactccattaaggagaagtttcaggactacaagagtgagttcaatatcagcttcaagtatctggaaacggcggagttctacaccgatgtggatattataatgggtgggatccgccatcttttcgacggtatcatcgaaaggctaagtctgtcgaacgaaatcatcattagctttaaacgtaccgaaatcaatggccgattgatcaaagtggtcgaaatcacccacgttaattccagttgcttcaaggaagctaaaatcaatgatctgctcagtggcaactttattgaagccaagcgagcctttcagggactctgtaactggagcataaccgccagcttcgcagacgggaattataaactgaacatgctgaatgatagcgatccttacatcgagagagaacccattgcctctgacgagattctgggcttcactcattccttgtatttttactga

SEQ ID NO: 7508 - RNA, 2016 nt, synthetic construct
  source 1..2016: mol_type = other RNA
atgaatagtccatttagcgatctcaaacctgagataattaccgatattcggggacgtttcgaagccttgcggactaaagatgacctgtatgacctgttccagtcggtcattagagagcttccagccggcgaaaccaaaagagaacactttgagcaggaaattgcttggttgtacaagaacggctacccccgcgactaccatttctttaaaatcaagaagacgagtgggaaggatcggcagatcgccagtccacaaggccccctaaaaacagtccagcgaataatagccgttatcctgagcagtgttttccagcctcacccacattcctttgggtttagaaaaggaagctcagttgtcgacaacgcaagaatgcatgtggggtttcactacgtgtttaacatagaccttgcagacttctttacatccatttccctcaaacgtgttaaaaggagcctggaaggatcaccctttggactggatctttccagagagcctatcgccgcccaactcgccagaatttgctgtatcgaacttatcgtgccgggcgctaattccaggcgggctttcctacctcagggtgccccatcctccccggttctgtctaacattgtgtgtcaaaagatggacgagcgacttaatggtctggccaagagattccacctgaacttctcgagatatgccgatgacatcacgttcagcgctaaccacaatgtgtttcgagaagggtcagaattccgattggagcttgccgatatagtgacagcctctggcttccaaatcaatccgataaaaaccaggctgcagcgccagaagaatcgccaggaggtcacaggactcacggtgaatcagaaggtgaatatctgcagaaaatacgtgaaggagctgaggaggtacctatattactgggagcgttatggccttactaaggcctatgagttatatctgaaggatcagcacgaattcctgctcagcggctctggtgttcctatggccgctataatcaaaggcaaattggacttcctgcacatggtgaaaggggacaccggcgactacttaaagcttctggcaaggtttcacaaaatggacaagggtggtccccggaaggtggtcaagggcgagaacgccacccaccatcaggaagctgagcagttccaacaacatcaaccacataacgtcgctattttcttgcgtctgtttcaggattccgctgggttgaaatacctgacacacgagttcgatatcggagatgaagtattcaacctcgaacagaccgtagaactggcaggcagggaatttcaggccgcctatcagaaacaccctatcactcgcgcgttgtacgcacggattaagcagttcgcgttcgaaaagaatcctaagtggtggaggtggcaggacggaaagatgcgggaaatcaacttggggtggtctgctccaagcgtccgcacctgggcacagaaatttcccggtactcatcccatgctgctgttaccctaccgagaggagatgatactaccctttaaagaatcaatccggatcagggcccccaagctcaaggagctgatcaacgctaacatcaaagccaaatttcgcgaggcagcggcagactgggatgtggaattgaatgacctggagcgcgcagacatctacaccgacgtggatatgctgctgggaggaattaggcatctgctcgacggcatcttagagcggggcgaggtgagcagaaagctcctcattacttatcggaagacagtagtgtcagggcgcgagatgaagatgatcgagattattcacactgctagtatctgctacaaggatgccgcgatttctgagctcctcaatgggaatttcttagaggctaagaacgcattttatggcctgtgtaactggtctgtcaccgcaattttcaacgatggagcttatcgccttaatattctgaaggatgacgtcgatatgcctgagcgagaggcggtaatggtgaaagtgctcgggtttacacatcacctgtacttctattga

SEQ ID NO: 7509 - RNA, 2010 nt, synthetic construct
  source 1..2010: mol_type = other RNA
atggccgaagaacacagatccgaattaaaagccaaatttcaggaggtggctaccaaaaaagactttttcgacctcctgatgcgggccattgagtgtcttccaatcagcaattcagaaacacatcgatttaaggagcgtctgaagaatttccatatcacagacagccgggagaattatcacagttttacagtgcgcaagtcctcgggcaaagacaggttgatcaacgcccctgtggcacccctcaagttctttcagcgactagtaaatgtagtgctgtcatgcgtcttcgaagctcatccaaacgcttttggcttcagaaagaatggctcaattgtccagaacgccagcttgcacgttaatcagcactacgtgttcaacattgatctgaaggactttttcacaagcatagacgacgtaatgctgataagtgctcttgagaacgccccatttggtttcaaggggaaaaaatccctgctggggcaggaaatcgtgagactttgtaccatgaaaatggacttggcaatgccgggtcaaggaacccagagctctaaggaggttagagtgctcccccagggagccccaactagtcctctgctctccaacgtggtgtgcctgaacctggacatcaagctcaccggcctcgctaagcggtttggcatcacttacagccgctatgctgatgatattaccttcagctctaacagaatggtcttcggacagtcatcctcattccttcaagagctgaagaagattatcatcgagcagaaattttccatcaacgagagcaaaacccggctgcaacatatgtctcagaggcaggaagtcactggactggtcgtcaataagaagatcaatgtggaacagaagttcatcaaggcagtgcgcatgtacttatactactgggagaagtatggatatcctaacgcccaggggaagtattacgcagatcaagggattgattattactacccggagtcaaaatctttgctggatacgttggatggtaggctcaatttcctgaaaatggttaagggagaagacgattctacctacgtcaagctagcacaacggttcaagaaactgtctggcagtctgtctactaggaagcacgctaatctgaatcccacgtccagcgaggttttcgaagagcaccggccagtggacgtggcgacttttttacgtctgtttcagcatggggagggcctgaagtatttgactcacgattacgatctccccgggcgcgagttccagtatgacaaaattatggatcttgcgggcagggaatttaatggcgcgtttcggtcctattctatcacaaggtctttatacgcacgagccaaacatttttgcttcgaaaggcgtcctaagtggtggagatgggaaaacggaaagaaaatcgatatcaacgtgggctggggaagtcctgagctaaaggaatggatcgcagacaacccgggtgtccacccaattagaatgaaggtcttccgcgaccagtttattaggccctttaaagagagcatacaatttcgggcgcctatgctccatcaagccgttgtgcagacccttgaagagaaatttggcgaagagtttcagaacttcgagatagagcttatcaatttggagtcagccgaatttttcacagacgttgacattttcttagggggtgtacgacacatcctcgacggtattctggagagagtggatgtaagcaaacgcattaggattgaattcaaacggcagatcttcgggaatcacaacatgaagatactagagataacgcacattagatctaagtgccaccgcgatgctaacatagttgatcttatgaacggcaatttccgcgaggtggcccgagcttttaaaggactgtgtaactggagtatcacctcctccttctcggacggcaactatactctgaaagtcctcgatgacaatcccggaagtccctcgaagatgtccgtggacgaggatgccgtgtacgggttcacacataccctcagcttttactga

SEQ ID NO: 7510 - RNA, 2067 nt, synthetic construct
  source 1..2067: mol_type = other RNA
atgacctactacatagagttcgccagcccacatccattcactaatttgaaagacccactgaaacagattacacaggaacagagacaggaagttgcatctaaatttcacgcatgcgcttcacaacaggagttctatcaaatcctggtgcaccttgtgagcctgttagacatcaatgatttgggccagacctattgctgccaaattcttagccagttcgaaataggtgaagatagtcccacttattctaacttctcgatcaagaagcgatctggtcgctataggcacatttctgccccgtccgaagagctgatgcttattcaccgcctcattaacttccttctgagctgcgtgtttcagggccatcagtgttcccacgggttcaagaaaggttctagtgtggttagcaacgcagtggtgcatgtaggtaagaagtacgtgttcaacatagatctaaaggactttttcccgtccatcgattctgaaatggtgaaagaggccttgatgaggccgcccttcaatctgtcaggtgaaaggaaatctatcgcggagcacctcagcggactctgtacaatgcgggcccccctgaagaaggggatccggaatagttcaaggaaatttattcttcctcagggcgctcctacatcccctctgctgtccaatgccgtgtgtcagaatctggacaacttgttggagagcctcgcgaaagcgaatcagttagtctatacgagatacgccgacgatattacctttagtggcaataacaacgttttcgaagaaggatccgccttcttgattgagctcgtcagaatcattagcgaacagggcttccagatcaatgagtcaaagacgcgcttgctgggcaagtccgctcgccaagaagtcacaggaatcgttgtgaacgaaaagactaacgtaaaacgggaatacctgaaaccattacggatgtacatctactattgggagaaatacggatatcacgaggcagagattaagttctttaacgacaggagtctgatttcggataaggagatggagtccacattacattctacccttgacgggcgcttgaattacatgaaaatggtcaccggcgaaaaccaccccacatatctcaagctctcaaaacgttttaagaaacttgctaacaagcggtttgcggaaaaaaagcagaaatcgtctagcacacacaaaggagactttagcgaacatcgtcctaaggacctggcccgatttctccgctttttccaggattccgacgggctaaaatatctgacccatgatttcgatatggtggacgccgtctttgactacgaccgaattatgatgtatgctgttcgagacttcttcagaggagtcaaggagaactacatcactaagcaactgtatgctcgcgtgtaccagtttgcattcgaagaggagcccaactggtggaaatacgaggatggcaaaaggattgagattaacataggatggagtagcaagcaaataaaagagtgggttcggctaaatcctggcactcaccctatcaggagcaagctgatcagagataacctgatcagaccctttaaagagtcaatacagtttcggccaccagcactcagaaacagaatcgagtccactgtgcgtgagaagttcggcgaagattatgatgagcttcagatcgactactccaatctagaggccgccgagttttacaccgatgtcgaactggtactgtctggggtgaggcatctgctcgacgggattctcgagagaattggaatcagtaaaaccatacatatcgctttctctaagcaagaggtcaatggcagccttatgaaggtgctcgagatcacgcacgtagggtcccggtgctacaaaaatgctctgcctaaggaactgctcaacgggaacttttcagatgctctaaagttattccatggcctgtgtaattgggccgtgcgggcctcatttgcagacggagacttcgaggtggacatgctgagtgataaggaaaagctgagccagaagaggcccgtcaataaggagttgatcagtgggtttacccacctcctgcgattttattga

SEQ ID NO: 7511 - RNA, 1281 nt, synthetic construct
  source 1..1281: mol_type = other RNA
atggcaaagaaaatcgaaaacaccgacctgatcatccagcggtttgccgcgatgcagagtattaccgacctgctcgagttgctgaacctcgtgaaaaaggaactgtacggcgagaaggctaatccattttctctacgacagcttaactactattcattatcgaagctgcaggctcagcactacaggcaatggagcatccccaagaagaacggaggggagcgaactattcatgcccctgtgaacggcttaaagcatgtgcaggcttgcctaaatgccattttgcaagtgctgtttgagcctcattatgccgcaatgggtttcttacctggaaaaagcatagtggataacgctaaaaaacacgctagcaagggattcgtgtataacctcgatctaaaggacttctttcccagtatacccagggaaagagtatgggcctgtctgctgcttcccccatttaatctgggatccagtacggagcggagacaactggctaataggatatctttcctttgcacagcgagcatcgagattaccgatgcagagagggggaaaatactgaacacttttctgccgcagggagcaccaacatctcctacgataaccaacatcatcgctagaaagcttgataggcgtttgcagggcgtggccaataaatatcacctcacatattcccggtatgccgacgatattactttctccgggaatagtaatgtcttcaaaaagtctggcgaggtggttttagagatccgccggatcatcgaagaccagaaatttcaggtgaatgacaagaaagtccggctccagcaacagggatataggcaggaagtgactgggctgatcgttaacgagaaagtcaacgttcctagacgttactaccgtcagcttagaaactggctgtacctttgggaaacctatggtaaagagaaggcatccaaactgtttctcaaggattaccgggccgataaaggttacaagagagacggcctgccggacatggactgtgtaattggcggcaaactggattacttgaagatggtcaagggccaagatgacccactcttcgccaagctcaatgcccgctacctgcgcttgagcaatattgaaagccaacagggggagtcccgctcatatattaagacctctcaggagtcaagcaagaaggaaaagaagaaaaacgttgaggaagggaaggaaccccgcaaactcatcgagacagtcctggaaatgattaatcgagactccttcgagaaagcaatggaatacttcttgtcaaaaaagtga

SEQ ID NO: 7512 - RNA, 1272 nt, synthetic construct
  source 1..1272: mol_type = other RNA
atgaaggctgacccagagaaaattcctgaaatcagagctagttttgcccgaatggaaaccaaggatgacttagtgaaagccttgaacctagccaaggagatcttgtatggtaaaggagtcaacgaattttctctaaagaacatcacctattacgcagacacgaggttccaacgtaaacgatacagtgaatttcagatcccaaaaaagcagggcgggactcgcactatacatgcccctgttccaggcctcaaagcaattctgcgatgcctcaaccttttacttctgtccgtgtacgaggacgggtatgagaacgaggccatgggatttatcccagggaagtctataaagaataacgctgagtggcacacagggaagtcgttcgtcttcaacattgacctgaaagatttcttcccctccatcgacctctatagggtgaagaccatctttcagctccctccctttaatttgaagggcgagaaagaacccctggcttatcttatggcccgcctgtgttgtgaaaaaatggaggtggtgcgcaaagacaatctgggagccgaaataaagaaagtagcgactgttttgccgcaaggggctcctacaagcccagcgatcaccaatttcattgcacggaaaatggatcggcggctgaaaggagtggctaagagattcggtgttgcatacacaagatacgccgatgacataaccttttcaagcaatcacaacgtctataagaagggtggcgatttcctgctggaggtggagaagattattagcgagcagggcttctgcattaatgaaagtaaggtaaggctgcagcaaagggagtacagacaggaagtgactggccttattgtgaacgaacaccctaatgtcccgcgcaaatttgtgaaacagatgaggcagtggatctatctgtgggagcattacggctatgaaaaggcaaatctctttttccggagagactactctcaaaaggccggaagggtcctggcctttatacctcccctcgacctggtgctggacgggaagctgaagtacatgaagatggtggttggtcccgaacacactacctggatgaaattgaattcccggtactcactgttaacacaggatcgcgtcatctccgaccccgacctccttgatattaataaggctctcgagagcctattcgtagagatgcgtaaaaacattgatgagttcatcgccgaggttaattaccatcaggagacaaaccaggcgatcaacatcgatgataacgaagcaacggattga

SEQ ID NO: 7513 - RNA, 1215 nt, synthetic construct
  source 1..1215: mol_type = other RNA
atgaaggctgaccagaaacagattcaagagattcgagatcgcttcgctaaaatgcaaaataagacagatctgctggatctacttaactttgccaaaggtatcttgtttctacagaagtctaatagcaaatctctgagactgagcacactgaattggtatgccgacccgagacttagtgctggcaagcggtatatcgagttctcaatccctaagaagaacggtggacagagaaagatacattctcctgctcgttccttaaaaactatacagcggtgcctgaatctcatccttcagtgtatctatgatccccatccggctgccatggggtttaggcccgggttttcagttgtagataacgccactaaacacacaggaaagaacttcgtgtataatctggacctcaaagagtttttcccctctatagaacttcaccgcgttaaggcatgcttcaagaacccccctttcaacttaactggcgacagggagcctctggcctttttcctggcaaatctgtgttgtcacgagcaagaagtggagcgcgagggtaaaccattggtgctgtcggttctaccccagggagccccaacgtccccaacgattaccaatatagtagcaaacaagctggaccggaagctcagtgggctggcaaatcggttcggggcctgctactccagatatgctgatgatattaccttcagcagcattcattacatatacggacgtaacggcgactttatcaacgaacttaagaagatcattgcgaatcagaagttcaagattaacagcttgaagacacgactccagaccaaatcaaaaaggcaagaagtcactggcctcatcgtgaatgagcacgtgaatgtgaacaacatctacttgaagaacattaggcagacactgcacatttggaaaaaatttggcatcgataacgcctggaaatactacaccgaaaacgaagacaccagaactaccaataaagagaattcatccctgttggtccagatcatgaacggcaagctccagtacgcactcactgtgcgcggcaaagaagactttctcatcaataagtacttcaccattctcaaagaccttatggcggataaaaggtccattccagaccagaatctggaattaatcttgcaagtcctgctgaccgagggattagacgaggccatggagaagtatacaaacaatatcagtcagggtaacgggaagtga

SEQ ID NO: 7514 - RNA, 1206 nt, synthetic construct
  source 1..1206: mol_type = other RNA
atgaagcttaccaaagaaaatatcgaggaaatcggcaaggacttctttgagatgaagtcccgtgaggatctcctgaatctactcaataagaccaagttttacctgtttggtgacaagtcaaagccaattcaactaaaaatcctcacatactatgcaaatcctaacattgctggaaaacggtacgtcgagtttaccatcccaaagaagtccgggtccattaggcgtataaacgcgccagtgaaaagcttaaaatacatccagatgtgcttgaatgtcatactgaacattgtcttcaaaccctctcctttcgccatgggatttgtgccgggccggagtatagttaccaatgcgatgattcatcaaaactgtcggtacgtatataatatcgacttaagcgatttcttccactccatcgagctccacagggtgaaagcagtattgaagctgaaaccctttaatctttgttcggaaagggaaccgctggccttcctgatcgccaacctgtgctgtacggagctcgacgtgaatcggcttgaaaacggcaatcagattgccgtggtgcggtctgtccttccccagggtgcacctactagccccgttttgaccaatattgttgctcaaagactggatcgccgactgtatggcttggccaagaggttcaacatcaactactctcgatatgcagacgatatcaccttttcagccagtatgaacattttcaagcagaaaggagaatttaaccatgagcttacaaggatcatcgccaacgaggggttctctatcaacaaagacaagatcagactgcaggatagatgctttcgccaggaggtaacagggctcatagtgaacgagaaggtcaatatacggagacgctatatcaagaacatcagattgtggctctactattgggagcgctatggttatgaaaaagctgctcagtactatgaacagtattaccgaaaggataagatgtacatcaaaattgtgcctagtctggaaaagagcattctggggaagctaactttcataaagatggttaaaggagacaaagacccagtgtttagaggcctgtggactcgctttgagacactggtgaagaggttcaaagagtccaaaagcgctatgttagattacaacattatcctggagattctcttcaatcagggcattactgccgcaatggaagcttactcaaaagtgaagtga

SEQ ID NO: 7515 - RNA, 2226 nt, synthetic construct
  source 1..2226: mol_type = other RNA
atgacaacttacgaagaacagcacatacgcaaacaagtggccctcagcttttccgagatggagagcacaaacgacctggtgcggctaatcaacaaagtgtggtctttttttagcggagaaaactatcagcctattccagccaaggttatctatcacttcagtaaccatcagcattcacaagacgcatatagaagcttcgagatccctaagaaaaatggaaagatgcggacaatccagagcccatgtcacgcgctgaaacgaattcaattctgcctcaactttatcttgtcgtccgtttatgatgacccccatcccgctgctaaagggtttgtccggggacgtagcattttggacgccgccaggccccacgttaaaatgccatatatttaccacgtagacctcaaagatttcttcccttctattagtttcttccgcattaaggcatgtctagaaattccccccttcaatttatctgggtccaaaaagaatatcgcgttttgcattgccaatttgtgttgcttgtatgacggcgaacagtcccgactaccccaaggggcgcctacaagtcctatcctctctaatatcgtctgtcaacggctcgataaaaaactgacaggcctcgccaagaggtttaatgctcggtatacccgatatgcagacgatctgaccttctcgtcatatattaatcttgccggcgagaaagatttccaggaagagctcgcccggatcattgacgggcagcagttctgcgtgcaggaagataagacacatcaggaaaaccgccaataccgccagcgcgtcctagggctgaccgtcaacgagaaactgaacatttctaaggagtacgtaaagtcaataaagatgtacctgtacctctgggagtcgtacggttacggcagagcttgccggctgttcgaagctgactgggataagtccgctaaaaacacacggagtatcccgagtcttagaaattatctgtccgggaagctggagtacatgcgcctggttaagggcagcgatgacccaacttttcagagtctataccagaggttcaccgacgtatgtatggagaatgacatacccgattggaaacagttcaagaaggaaatggaactgttttgtcaaaaagcttacaacccaacatatgacgccaaggagctcctgagatggtaccaggagaggctcgtggacattgatgtccgtctgctgaaggagtccaacctgtacttttcaatcaccaaggcattcacgtacctgagtaagaagctttatgcaaatcagcctcttatgaccaaggtggcagttcacgacgcccgcagattgccgtttttcctgtatacacacttctcaaaacaagagccattaaagtttttgactcatacttgggaccagtatgcggaatctacctcttttactgactacgaggatttcatccaaaagactaacgaggccttcaaaagaatcacccctgagtttaaggagcttgatcgacagctgtacgcttgcttttacgccttcctcaacaatgacggtaatggcagaggatgggggcagtaccacttaaaaacctcctggaagagcgattggataaaagcatggtgcaataagcatacggacagctccccctgggactgccctatcccagaagcctacaagcagatcaatgataacttgcgagtgaactactttagcgacatcatcgagttatttaaagaggagtttcagatcaggaccgaaaatcagcagctgaaaaggatggtccggagactcgtgaataagcatcttaatcctggcttcaacgtgcgtattaacgtgccacccaccaaactgtataccaacgtgtcactgttgtctcacgcactggacactctgttatataatctgtcccagaggaaggaatttactgatatagagataaccacgattgaccagagcgattacatcgatttgtctgtgtgtcagattggttcaatctattacgctgatagggaacagctcctgcaggagacagagtctggagattttgaagagattagaaagaagcttacgaaccgctgtgattggatggtccagaccacttgcaaggacggaggcaactatcaaatcgcctacctgaattcccttgctccgaacggtagcaccaaagagcttgacaaagtgaagggcttcactcacatactcaggttctataagccccaagcctacgaaaaaaacacagattactga

SEQ ID NO: 7516 - RNA, 2076 nt, synthetic construct
  source 1..2076: mol_type = other RNA
atgacgtacttttccaattataaactggccaaggatgcatattacaagttcctgatccccaagaagaacgggaaaacccgggagatacaggctccagtgaaagacctgaagagacttcagatttgcctgaacttcattctctcatccctgtatcatccgcacccagccgccaagggatttatcctgggtcagaatattagcgacgccgctaaacctcatgtaagaatgccctacgtcttccaccttgacttaaaggatttcttcactagcatttccctctatcgcgtcaaggcctgcctcagtctgccacctttcaaccttaatggtgataaagagcggatagcttactgcattgcgaacatttgttgtaccaatgacggatccagaacctttctgcctcagggcgctccgacaagtcctatcctgtctaacatcgtgtcacttagactggatcgtaaattaaccggcctagcgaagaggttttcagcaagatacacaagatacgccgacgacattactttctcttcttatcaggatatcgctagcgatactgagtttcagcaagaactggcacgaattatttcgggtcagaacttccaaatccagccttcaaagacacgagccgagggaagaggataccgccaaaccgtttgcggactcacaattaatgagaaggtgaacgttagcaagtcttatgtgaaggagatcaggctgtacctgtatctgtgggagcgatatggctatgaaagggctcagatgtacttggattcagatatcaaaaagaccaaggaaaaccacagtgacatccctcaattgtcccactacctcaacggtaaaatacaatacatgcggatgattaagggcaactccgatgacacatataagactctccgcaacaaatttatctacctgtacatccctcagtggaaggagtgggaaaaaaatattcttgacttctgtgatgccgtccaaaattccaaactaagtatagaggaactgaataagtggtacaagacgatatccaccaatatcaacatccatctcttgaaagacacaccactttacacttctctgaccaaagctctgtcctgcttgacactgaaagccagtgacattccgacccagacagtgtttaaagaacccatacataatgccacactgttgcctagcttcctctatgagaacttctcgaaaaatgacccacttaagtttatcacccatatatgggacgggaatgcagacaactgcaaattcgagggatatgaagacttcattcgaaaagaacagatggcattcaaagaaatcactgggagatttaagaccatcgacaagaatctcttttactgtttctatggctttctacacaaccccttgaataatcgtgggtggggacagtataagatcaaatctgggtggagctcatcttggcttaaagcatggtgcagtgagcaccctgagcgcagcccctttgattgccccatcccagaaaacaagcgtgagattgccaataatgtcaagctcaactatttcagcgacatcgtggagttatttaagagcgaattccaacttcgccccgagacgaggcaattaaagaaactcctgcgggaactggttcggcagtacctcaactttgattttcacgtgactttcgaactaactgacgtcaagctgtatacaaacgtatatatgatcaggaacatcttgagcgacatactgcacgacatggcccagcggaagcagtttcccgatattctagtgagggtggaggatctgggctcagattacgtggatatcatattatgtcagaaagacagtgactactatgctacccacctgcagttgatccaggaaactgaatccggcgatttttgtgagctgaaacgcaaaatggcaaatctctgcgactggtacgttgagacgcagtgtaaggatggcgctttcaggattaactatctggacagcattcagccagatcggacaatcgcggagcccttgctctctgatggcgtaaaggggttcacccatcggattcgcatctacaagcattacgcctacgagaatccaaactacaggtga

SEQ ID NO: 7517 - RNA, 1185 nt, synthetic construct
  source 1..1185: mol_type = other RNA
atgttggttgatcaacctcagattgatcatcttcgccagcaatttgcttcacttcagtctaaagcagatttactggcgctgttaaatgaagcaaaagccatgctctttgaaaagggagatcagtacccgctgcagctcaccagtctcacctggtatgctaataccagcttaggtgtcaagagatacacagctttcgaaattcctaagaagaggggtggacaccgactcatattcgctcctaaagaccccctcaaagtcatacagcggtgtctaaacctggtcctccaatgcgtttttagtccacataaagccgcaactgggttcgtgcctgggaagagcatcacagacaacgcacggccccatgtgggaaagcactatgtttataatctcgacctgaaggacttcttcaccagcgtggatctgcaccgagtgaaggcttgtctgaaactgcctccattcaacctgacgggcgatcgggagcctcttgcctttctgattgctaacctgtgctgcattcgtcaggtcggagagccaagcagagcctttctaccacagggtgcaccaacctcccccctcttgaccaatgtggtgtgccagcagttagacagaaggctgacaggccttgcgaagcgcttcggcgcaacttacactaggtacgcggacgacatgactttttcctcgttcgtaaatatctatcagcccgattctgctttctgtgtagagctgaaccgcataatcaccgaccaaaggtttgtcatcaaccccgccaagacaagacttcaacgccccgggtataggcaggaagtgacgggcctggtggtcaatgagcgggtgaacgtgccgagacgattttggagggagatccgggctttgttgcacaattgggagacattggattacgacgaggccaatactcggttccagaagctgtatgccctgaacaaggcacgtccctctcaaaaagccccagccctagccaacgtactctccggcaaactcttgtttatgaaaatggtgcgtggcgccaatgacgaactttaccagcactacgcgcgccagctggatgccctgactaaccagacaaccgatgagatctcagtggacgttgaaagaattcttgacatctgggaaaaacaggggctggagaaggctatgacggccttcgagcagtacaaggatctgtga

SEQ ID NO: 7518 - RNA, 1185 nt, synthetic construct
  source 1..1185: mol_type = other RNA
atgtccctggaccagcagcaaattgactctattcgccagcagtttgcctccatgcagaacaaggaagaactactcgtcctgctgaatcttgcgaaaagcctcctgttcgagaagggtacggagaagtctattaaattgcacagtttgacttggtactccaacacctctctcaacgcggtgaggtaccagtcttttacaatcaggaagaaatcaggaggcgagcgcacaatccatgcacctgtgggccccctaaagaccatccagcaatgccttaacttcgttctgcagtgtgtgtttgtcccacacccggctgccacagggtttgtaatagcaaaaagtatcgccgacaacgcaagaccccatgttgggcacccctatgtctacaatttggaccttaaagacttcttcccttcagtcaacttccaaagagtgaaggcctgtctgaagctgccaccatttaatctcaacgaaacccgagaaccgcttgcatttttgatagccaatctgtgttgcgtgcggaaccctattgaccctaaacaggcatttttgcctcagggcgcccccacaagtcctgtgttaaccaatattgtttgccaacagttagacaggcgactcaccgggctagctaagcgattcggggcttcctacactcggtatgccgatgatatgacattcagcagcttcacgaacgtttaccagcccggtagcgagttttgccaggagctgaatcggatcatctcggggcagcgcttcgtgattaatccatcaaagactcggctgcagaggaccggctatcggcaggaggtgactggcctggttgtgaacaacaaggtaaatgtcaacaggcgttatctgagaaccctccgcgccatgctgcataattgggaaacactgggatacgatgaagcagatcgtagattcaaacaggcctatgctcttgaccgcgcttatactggaaagaaggctccagctctcctgaatgtgctgatgggcaaattagagtttactaagatggtgaggggacaagaggatgtgctgtacagccactataagcaggtcttcgagacactccttgccgaaacgaccgatcagaaacccgtagaattggagcaaattttagatatctgggaggaacaaggtatcgagaaagcgatgatactgtttgagagatacaaagccctctga

SEQ ID NO: 7519 - RNA, 1188 nt, synthetic construct
  source 1..1188: mol_type = other RNA
atgcagctcaccgaagaacagaaggagacgattaaaatttgtttctccactatggaaagcatcgacgatctcgtggttttactcaacttcgtcaatcccctgttatacccagaaaattacgaggggaagattaatgctatccagaaaaaatccgtgaccttctatgctaaccctaagctgagcggcgacaagcgctatgcagagttctctatcagaaaaaaatcagggggagacagaaagattgctgccccacacaaatcattaaaactgattcagagcgccctcaactttattttctccgtgatatacgagcccaaggagtatgtcactggatttgtaccagaaaagtcgatagttgacaatgccaaggtgcatgtcggccgcaactatgtatataacatcgatttggagaacttcttcccgtctatcgaactgaatcgggtgaaagctgtgctgaagctcccaccttttagtctggagggcacagaaagggagaagatagcctacctcatcgcctgcttggcgtgcaaagacggacgactaccccaggggtcccccacaagtcctgttctttccaacatcgtgtgccaaaagatggacagaaggctgcgtggcttcgcaaaggcatttcactgtcgatttacaagatacgccgacgatatcacattcagcgctaacaaagacgtcttcaaccagacttttaaaaccgaactgaagcggattattgaggatcaaaatttcaccatcaacgagaagaaagtgaggcttcagggtaggggctacaaacaggaagtcacgggactgatcgtcaatgaaaagctcaacgtgtctaagaagtatgttcgggaggtacgcgcaatgctgaataactgggataagttggggtacgagaaagcaagtgagaagtttaagaagcactactacgaggataaggggcatgttaaaaaaggagaagcgtctatgcagaatgtggtatggggcaaactacagtttcttaagatggtgaaaggcgaggaagatgccgtggtgctgaaatacgaagctcaatacaaaaagttgaacccgcaaccccttcaggtcaatctggataaccctaccttgtcagatatcctggccatctgggagaatgacattaatggtaagggtatagaggacgccatggagctgtattatagcaagtttaagtga

SEQ ID NO: 7520 - RNA, 1146 nt, synthetic construct
  source 1..1146: mol_type = other RNA
atgattcggcttaagtttaacacattgaattcgattgaggacatagcgactctaatcaatgaagtttacgcccttcttttccccaacgccaagccacttcccaaaacgaaaaagccttttcacatctcactgacttccctcaattacctggcttacagcgagcacttccgtcaaaaaaggtataaaacattccggattcccaaaaagaagaagggcgaatttcgtgagatttcagcacccacttacaccttaaaagcagtgcagcggtgcttgaatgcagtctttttctgcttattcgaaccttacaaggctaacgaactgccagagaatcagcagcatctgaccggcaagaaaattttcccgcacaaggctgccaagggatttctgcctaaccgatctatcgtcgataatgccaagctgcatgtggggaagagattcgtgtataacatagacctggaagggttttttccaaacacctctttcgctagagttcgccaagtactgaagctcgcaccctttaacctgaaaaatgaacgcgatgacctgggaaaactcatcacagccctatgttgtcaggatgattgcctgccacagggtgcaccaacctcccctaccctaactaatatggtgtgtcaacgactggatcggaagttgtacaagctggccaaagaaaatcacgctaactacacgaggtatgccgatgacattacattcagcagcgacaaaacaattttcaatgagcaccttaaagaggctatcgagaaaactatcaacgaggaagggtacaagatcaacaaggcgaaagagagactccaggggaagggaatccatcaagaggtcacaggcatagtggtgaataagaagctcaacgtcaccagaaggtatatcagggacctgtacttttggttttcccattgggaaaaagacggatatgcctctaccaaagcctattttgacttgaaatatgtgaaccagaagggttacctgcgctataagggcaagatccccccgatggagaacgtcttatggggcaagatccagttcctcggcatggtgcgcggtaaaaatgatgagctctaccagaaattcttggagaagtggaaggtttgcagtcagagtaaagacgtacctataattgaaaactga

SEQ ID NO: 7521 - RNA, 1191 nt, synthetic construct
  source 1..1191: mol_type = other RNA
atgagcaacgacaacctgttccaggaaaacatcaaaagcattttctatagcatcgactccattgaggatttttgcaatctgctgaatcagatttaccagcacatttttccttcccgtgacactaagctgaacgtggttattagcgtgaaggacctaaactattacgccttcgacagatctaggaacaagtacaagacatttgccataaggaaaaaagacggcggctctcgcatcatcaaagcaccgaattacaagttgaaaaccatcctgaagtgcctgaactggctttttaatacgctattcattccccataacaatgcatatgggtttgtgaggaacaaaaatgtggcaaacaatgcggtgccacatgtcgggaaattatttgtctacaatatcgatctcctcaatttttttccaagcaccagtttccggcgagtgaaatccgtattcgaactcccccccttttatctgaacggcgacaaatcaaagctggctaatagggagaaactggggttcttgatcgctaatctgtgttgcgatgccgggttcttgcctcagggagccccaacatcacctgtgctgacaaatatagtgtgtcgcagaatggataagaaactttacaagttcagcaaacagaacaattgtacttacactcgctatgccgatgatattacttttagttcctataagcaggtcttcgatgagtctttcaagaagggaattaagtccatcatagagaacgaggagaactataagataaatgacaaaaaggagcggcttcaatcttatggtgaaaggcaaatagtgacaggtttagttgtgaatcagaaactcaacgtcacccgcgattacaacaaggatatccgtttctggctttggagttggaagaagtggggctacgaacaaacgcaattacggtttgctgaagagttcgtatataagaaatcttaccagaagtacaacggaaaggctccctcctttgtgaattatctctcaggaaaaatcagatatctcagcatgatccgaggcagagatgacgaacgggtaaagagatacatcgacaacttcaacaagatggtcagtgataccgttaagacctttaccactgttgatttgctgcagatcttccggaaaattgacacacacggtaaagactcgatcgactactcattcaagaaaaatattgcctga

SEQ ID NO: 7522 - RNA, 1278 nt, synthetic construct
  source 1..1278: mol_type = other RNA
atgcgtttaacaccggagaacatcgaagaaattaaagtcagattcgcgaaaacggagactgttgaggagctggctcagcttctgagctgggtctacgctctgaagttccctaagaggagcgagaaaacaactattattatcgaagccaagcacctcaattactatgcttttaaacccgtcaaccggtacaagcagttcacaatcaagaaaaaaagtggtggagagaggacaatatctgccccacgctacaaacttaaaactattcagaagtgcatccacgaaatcctcaacgcagtgttcacccctcatttcaccgccactgggtttgtgccccgcaaatccatcgttgataacgcaaaagtgcatattgggaaacagtttgtgtttaatacagacctcaaggactttttcccctctaccgagttcaggcgtattaaggccgtactgggactagctccttttaacctgaccgatgctaacgagatcaactcaaacaaggacaaaaagaagacctcagatgagaagggtaaaggatacctgggctatcttatcgccaatttgtgttgcgacaatgggtgtctgccgcaaggcgcacctaccagcccaaccttaacgaaccttatatgccagcgattagacaaaaaactctacaagtatgccaaatcgattaacgcaacatactcccgctacgcagacgatattactttcagtgccaataagcccgtctttgacgaaacctttaagaagatcctgattgacttgatcgaagtgcaggagaagttcaagatcaattttgaaaaggagcgattgcaagggggtggagagcggcaatccgtcaccggaatcattgtgaatagaaagtccaacgtggatagaaagtaccttaaagatgtgcggttctggctaatgtgttggaagaaatttggcaccaatgccactcaacagaaattcctggttcagtttccagagaaaaaagggttcctcagatataacggcacaactccacagttttataattacctcaacggcaagatcctgttcctgggtatggtaaggggcgcgaaggacgaaatcttcttgaagcagaaaatgaacttcgatgagttgtattctgaagttacagggaagaataataagacggaaattggcactgtgatacagcgggacagtaattatgagagctcagatctgtctaagggcatactggagatactgaatgaactggatcgcaatggatataccaatgctaacaacaagctcaaaacaatctttaagtga

SEQ ID NO: 7523 - RNA, 948 nt, synthetic construct
  source 1..948: mol_type = other RNA
atgaagctgtcggagacaattcaacaggagatcaaccagaagtttcaaacgattaaatcagtggaggacttggtgatcctcatgacttttgtttacggacatctctatcctaacatccagactaagattgagattaacaagcgaaagctccacttcatcgccttttccaaaaaggagagatacaaatctttcaccatcccgaagaaaagtggcggggaaaggaaaatttttgcccccatctacacactaaaggtttatcagaagattctgaacgaaattctgcagatagtttttacaccccacaagagctcccatggattcctcccaggcaagtcaatagtgagtaatgctaaccttcactacggcaagcagcatgtgtacaacatagatctaaaagacttcttccctagtacttcttttcgtcgggtgaaaaccgtcctccaattgtccccatttaacctgaatcaggatagagagtcattaggattcctgatagcaaatctttgctgtaacgacaatgggttaccacagggagcacctacaagccccatccttaccaatatagtatgccaacggctggacaggaaactgttgcgattcgctgcgcagtacaagtcttcttataccaggtatgctgatgatattacgtatagcagcaaccagaataagttctccgccgagtttgaaagcaaattgcaggaaattatccatgaagagggttttgaaatcaactcaaataagactaggctgcaggacttcaaaagacgccaagaggtaaccgggctgatcgtgaatcgcaaagtcaatctgaacatcgaattcatcaaacaggtccggttctggctttacgtgtgggaaaagtttggctacgccagcttccacgagagactgtcctccgattatatcaagagtggcaatacctctaagcgcaaagggggtattcactga

SEQ ID NO: 7524 - RNA, 1773 nt, synthetic construct
  source 1..1773: mol_type = other RNA
atgagtggcgtcttcttggataagctactgatcgaaaatacgaagaaacgttttgatcagatgaccaatctcacagacttcgtgagcctcctcaactacatcgagcagagagtgttcaaaaacaagaaaaaacccctcacagttccacacctctattatttgagcaagactaagaatacccgctacgaagaatttgaaatccccaagaagaacgggaagcctaggaagataaagagtccagagaacagactgaagcgggtccaatcccttatcaacatcctgcttcagatcattttcgaagatcattctcactactcagcaaatggctttctgttcggcaaggatattcgcagaaacgctctgccccacataaataagaactatctgctgaacattgacatcaagaacttctttccgtccatcccttttcgaagggtaaaagtggttctggagtttgccccattcaatctcattgatgatagagaacgcatagggtttcttatagccaacctaggaactttcaaaaatgcactgccacagggtgctcctactagtccgatcttgtccaatattgtgacccaaaatctggatcgcaacatcttaaagtactgcctgaacaagaaaattaagtatacgagatacgcagacgatttaagcttttcttccaattggaacatctttgaccagcaggtcatcaaagaaatagaggcgattattatcgccgaaaatttcatcctgaaccccaaaaagactagagtgaggaatttcatgcaacgacaggaagtaactggccttatcgtgaatacaaaattgaacgtcaagcgcgaatatctccagaaggtgcgggccatgattaataattgggagaaaggagggctaagttttgctatctcacagtttaggaagcatcagccccctgagaaggtcaattataactttaaggaagtactgctgggtcacatatctttcctcaagctgataaagggggacacaaatagcgtcgttcagaacctgcaaataaggtacaatttcctcgtaaatctgttggactattcgttcatcgaggaggacaatgtgaggctgaaattggaggaggatgatcagaaaatggaaaagattgcttttgagaatgaccaaacaaaaaaggagacgttcatttcattctgcacctccgccttccaccagattgagaacctgctcaattactacttttggaagaaattccctgaaattgacgacttaaaagactacatgtggcataataaccctctttttcaggatcggtggaagaaacttaagaagttagacaagaaagagcggctcaaccgattgaacaactttaagactgtgagggacttcgacattaacaccctggtttatctgttcgagaaggagttttatttcgatcaacatctctcatacggaaaaaagttaacccacctgcgtgagattcgtaacgacgaaagccatcggtgtaccgtgctcgataccaacgaacaggttattattaatcagttcgaggagatcaagaaagagcggaaagccaaaaaagagaaaggcaaacagttcatccttagccccaaacaaaaaaaggaggagatgaactacttgacactgaagtacatcgaagagaagaattataagaacgtgagaaacatcctgcgcgaagtgaaaaacaacatcaaaaacaccctaccaaatatcgaaccacttcagataaccggaaaagtggagcagaaagagattctggaaacatctgaggtctttaattga

SEQ ID NO: 7525 - RNA, 1632 nt, synthetic construct
  source 1..1632: mol_type = other RNA
atgaagaacttgactgattttgtcgcattgctcaactacttagaattccggatttataagacaaacttgaaaccgctaaacatcaagtacctgtactatttgagcaaaacaaaagatgaccggtatgtggtattcgagatacccaaaaaaaatggcaagactcgaaagatcaaatctcccgataagttaatcaagcgcgctcagtctcttatcaatctcctgcttcagatcatctttgaaaatcattcccactatagtaccaatggcttcctgctcggcaaggacattcggaggaacgctgtccctcacattaacaagaactatctactgaacattgacattaagaactacttccccagtattaactttagaagggtgaaagtcgtgcttgaactggctccttttaacctccgtaatgagagggaaaccattgggtttctgattgcgaatctgtgtacgcacgggaacagtttgccacaaggagcacccaccagccctatcctgtctaatatagtcacacagaacctcgaccgtaaactgtcaaagttctcaaacgagaatcggattaaatacacccggtatgccgacgatctgtccttctcaagcaattggaatatttttaagccaaccttcatcaaagagattgagaagatagttaactccgaaaactttagcctgaattccaaaaaaaccagagttcgtagcttcatgcagaggcaggaggtaacaggcctcatagtgaacacaaagctcaatgttaaacgcgaatacctgcagaaagtgagggcaatgttaaataactgggagaaaggaggtctgtatttcgccacctcaaggtttaaggcccaccagaccaaatctaagaagaacctggattttaaagaggtgctcctgggccatctgtcttttttgaaactcattaagggagaagacaatcaactcattaagcgactgctcgagaagtacaacaacttgtacaatcagatagagtatgggtacatcgatatcgaaaatgtcgagaagaagctgatcgaagacaatctaaagatggagaaaatctttctggaccaggaattaccagataaagataagttcatctccttctgcactatcgcctttcaccagattgagaacttgcttaactattactactaccggaaatttgagaatttcgaggatctactgaatgagcttattatcaacaacccgaaattcaaaaagcgctatagaactactgagaaagctaaccaatccttcaagaaaattagcgatctgaacatcaatgttctggtgttcatctacgagaaggagttcttctttgacaagaagataagttatgacaagcacataacgatgctgagagaaatccgcaatgacgactctcatagatgctccgtgatagattttgacaaagaagagatcatcaaggaataccaaaaaatcgagaaggaaaggaaggggaaagaaagccgcggtaagaattttgaatattccaatcagcaggccagaatcaagctgaattacgatacactgaaattccttgacagaaagaactataagagcgtgcgctacaatcttaagaacattagctcaaacatccgaaatactctccataagaaagagctttcgtga

SEQ ID NO: 7526 - RNA, 1701 nt, synthetic construct
  source 1..1701: mol_type = other RNA
atgtcctctatcttcctggacaaaaaaatcaaggacaacatcaagcagaaattctataaggtgaaagatctcgaagaattcgctacactgctaaactttgttgagcgtcagtttttcaagaattttaaggccgagaaacttattgatgtggactacttatactacctttcgaaaaccaagtcatccaggtacactcagttcgagatcccaaaaaaaaatggcagtgtgcgcgtgatcaatagccctgacaccacattgaagcggatccagaaactgataaacataatcctccaaatcatctttgaggattatagccattacaattccaacgggtttatcctgggtaaggatataagaagaaatgctattccgcacattaacaaaaactacgtgcttaatatcgacataaagaatttcttccccagcatcaattttaggagaattaaagttgtgctcgagttaagcccatttaagctgaacaataaccgagagaaaatcagctttttgattgcaaatctcgctacaaccgatgggactttgcctcaaggaagtccaatcagcccaattattagtaacattgtcacgcagaaactcgatagaaagttgtccaagttttgcctgaagtcaaagatcaaatactcgagatatgccgatgatctcactttttcttccaacaagaaggtttttaactcagagttcatcgagaagatcgaaggcatcttaaatcaggagaatttcctgatcaacaatcaaaagaccaggattaagtcttctatggaaagacaggaagtgaccggattagtagtcaacaagaagctcaatatcaagcgggagtttctgcagaaaacacgagccatgctgaataattgggaaaaaggtggactgaactatgcgaaaaaagagttcaagaagcaccagcctgagtcaaaaaagaattatgagttcaaggacgtactgctgggccaaattagcttcattcggctggtgaaaggcattgaatccccgatagtgaacaagatatctctaaagttcaactacctgaacaaccttattgactacaccttcattagtaacgaaaacgtcaagaaaaagctgattaacgacaacataaagatggagaaacttttgttcgataagaatgaaagcgaagaggatatctttattcccttttgcacgtccgcatttcaccagattgagaatctgctgaactactattactggaggaaatttcctgtatttctggatttactgaagacattgctggaaaataatcccaatttcaaacggcgttatcgcaacctaaagaatgccaataaccacttcaagaaaatcagtgacttgaacatcaatgtgctggtgtatctctacgaaaaagagtttttcttcgacaaaaacaggtattacgacaaaaggataactcatctccgcgaggtccgaaatgacgacagccatcgctgtcagatcattgacatcgataaggattcacttaagaaagactatgagctgctgcaggataaaattaaaatccaggacaagaaagggaaacagttcgactacaaaaaggaagataagaagctaatacggtcttatgagactctcaagttcattgaaaagaaggacttcaagaaggtccggaattccctccgcataatgtcttaccaaatcaaaaacacccttcccaacaacgttcacaagaaatga

SEQ ID NO: 7527 - RNA, 1689 nt, synthetic construct
  source 1..1689: mol_type = other RNA
atggccggcgtattcttgaatgacctcttcaaaagtgaaattaaggttcgcttcgagcgcattcgaaacgtccgggagtttgtcagtctgttaaactatatcgaatcccagatctccacatccaccgaagaaatttttgaattgaccttcagtcacttgtactacctgtctaaaagtaaggatagccgctatacagaattcgcgatcttaaagaaaagcggcaaactgcggcagatcaactctcctgataaactcctaaagagagtccaaagcctcatcaacatcttgcttcaaataatcttcgagagtcagtcccattattgctcaaatgggttcctcctgggacgcgatattaagaggaacgctataccacatacaaataagaagttcgtgctgaatgtcgatatcgaagatttcttcccttctatcaacttccgcagggtgaaggtggtgcttggattatctcccttcaatcttatagatgagagagagaagatcgccttcattattgcaaatttgggtacttacaagaactatttaccccagggaagccctctgtcccccttgctatcgaacatcgtgactcaaaagctggaccggaagataagcaagttttgtctgactcaccggattaaatattcaaggtacgctgatgaccttagcttttcgactaacagaaatatactggacgaatcatttgtgaagtcaatcaagaatatcgttgaggatgagaattttaggataaacgacgagaaaactcggctgaggacatccagagaaagtcaggaggtgaccggcctcgtggtgaacgaaaaagttaacataaagagagagtacctgcagaaagtaagagcaatgctgaataactgggagaaggggggtctgaggtctgccgaagaaacatttaaaaagcaccagccgccaaataaactcaactacgactttcgaagcgtgctgctgggccatctgtcttttcttaaactcattaggggggatgacgatcagactgtaaagcgccttcgactgaaattcagcttcctcaataatcttatcgactactcctttattgacaacgaaaaagtgaaagtgagactggagaaagacaataagacgatggagaaaatcttttttgacattgacatgtccgaggacaagtttatctccttttgcaccagcgccttccaccagatcgaaaacctaatgaactacttctattggaagaagtttgagcatgatgagctgctaaatgagctcctgattaataatgctcgattcaaaaagcggtacaaaacactggagaaagcacaggaggaaatcaagaccattaggaacctcgatatcaacgttctggtctacctatatgaaaaggagttcttctttgacaagaaggtgtattacaataagcacattaccatgttgcgtgagatccggaatgatggatcacaccggtgttctatttttggcctcgacgttcaaaaactgaaagacgattatgtcctgattgaaaacgagcgtaacgataaaaagaaacgtgggaagaatttcgagttatcactcgaccaggctaaaaaggaactcaacttccttacctattcttttctggagcgccagaactacaaggaggtcagagagaatttgcgaaatataacgaagaccattaacggtgcccttaaactgaaaatcaagtga

SEQ ID NO: 7528 - RNA, 1698 nt, synthetic construct
  source 1..1698: mol_type = other RNA
atgcctgggatctttctggatgatgtaagccgcgagaaggtcattcagaaattcaacaagatctccagcattaatgagtttgcttctctattgaacttcatcgaaaagaacaacacacacctattagacaagaaaaaattcacccccattaacagcaagtacttatatcatctgtctattaccaaggacaaacgatacaaggaattttccatttccaaaaagtcaggcaatctaaggaaaattgaaactcctgatgagttactcaaacgggtgcagaaactcataaatttcctgcttcaggtgatctttgaaccatactcacactattcatccaatggattcctgtttggaaaaggcattttgaggaacgcgaagccccacgttaataaaaattacgtactcaacctcgacatcaaggattttttcccaagcattaatttccggagagttaaagtggtgctggaattgaaccccttcaatctgaaagatgaaagagagcgaatatcctttctaattgccaatatttgcacctataagaaccatctgcctcagggcgtgccaacgagccccattcttagtaatatcgtaacacagagacttgatagaaaactgacaaaagagtgcctggacctaaacattaaatacactcggtatgccgatgatctgacgtttagttctaaccagaacatccttaatcctaacttcgtcaaaaaggtggaacaaataatccaatcagagaacttcgaactgaacaataacaaaactagactgcaaacaagcatgcagcgccagcaagtcaccgggttgatagtgaacgagaagctcaacataaaaagggaatacctgcaaaaagtccgcgcaatgctgaataactgggagaaaggcggactggactatgctgaacagatctttcggaatcatcagccaatagagaaaaaggagtatcctttcaagaatgtgttattgggttacataagcttcataaagcagattaagggctctgataatgggatctcactgaagctggtggagaagtatactcttctcaataacctcattgactactctttcataaagaattccgcagtgaaagagaagcttatctctgacaattataagatggaacagattccacttttcaacaaccagccggagaatgacaagttcatcagcttttgtacctccgcctttcatcagatcgagaacctgctgaattactattactggtcaaagttttcggactttatcaacctgctcgaacatctgctcctgcacaacccctcctttaagaagcgttataagaatttggacaaggccaaatctcactttaaaaaaatcagtgacctcaacatcaacctgatcgtgtacctctatgagaaggagtttttcttcgacaagaagatttactacaagcaggagattacaaaacttcgtgaaatccgcaacgacgatagtcacaggtgtagcgtcatcggggttaataaggatgagatcaacaatgagtacgctaaattggaagccaagaaaaatgacttcaaaaaaaggggtaagaacttaatctactcgaataaggagaagaagttcatcctgaagtacgaaacctttctcttcctcgaagataagaactataaagaggttcgacggatcctgaagcacatcactctgaatattaagaataccttgccgaaaacaagttga

SEQ ID NO: 7529 - RNA, 1266 nt, synthetic construct
  source 1..1266: mol_type = other RNA
atgtctggaatcttccttgatgagaattctcgtgagaaggtgatcaagaagttcaacaagattaattccgtgaacgagtttgtttctctactcaatttcattgagaagaacaatgacaacctgaaagataagaatgcattcaagccaataaactccaaacagttataccacatcagtaaaaccaaagacaagagatacttggaattctcaatccctaagaaaaatggaggaaagcggaaaattaaaacgcctgatgagatactgaagcgggtgcagaaactcataaactatctgctccaactcgtcttcgaaccatatgcccactactcatccaatggttttttgtttgggaaaggcatcattcgcaatgccactccacatatcggcaaggagtatgtgctgaatctcgatatcaaggacttttttccctccattaatttcaggagagttaaggtcgtcctggaacttaatccgttcaatttgaagaacgagcgcgagcccattagtttcatcattgccaatctttgtacccacaaggaccagctgccacaaggggcccctactagccccatcctctcaaacatagttactcagaaacttgatcgaaaactgacaaagatctcactcagtaagaacatcaaatacacccggtacgctgatgatgtgacctttagcaagaagaacattctgaaacacatctttatcaacaaggtgtccaagataattcaggaagagaatttcatcgtaaacgaagacaagactcgattacaaaaaagtacggaaagacagcaggtcacaggcctgatcgtgaataagaaactcaatgtcaaaagggagtatcttcagaaggtgagggcgatgttgaacaattgggaaaagggcgggctagaatatgcaatcaacgtattcaaaaagcatcaacccaccgaaaaagtagattaccctttcaaggaagtcttgctgggccatatatctttcatccgtcagattaaaggtattgacaataacgtgagcattaagttaacagagaaatttagcctgctgaacaacttgatcgattacaacttcattaagaacgacattgtgaagaaacgcctgatagatgacaatcacaaaatggagaggtttctgctggtggagaatctgaccgacaacgacaaatttatttcgttttgcacaagcgcttttcatcagatcgagaaccttgttaactactattattggagcaaattcgacaacatcgaactgctgctcaattacctatga

SEQ ID NO: 7530 - RNA, 1686 nt, synthetic construct
  source 1..1686: mol_type = other RNA
atgactcatgaggaaattaccattgagtttgagaagctcaaaacaacatcgcagctcgcaacactgcttaacaaggtggagaaaaatagggcgctgcagacagaaaaactccagaagctgaaagctaaagatctcaactttttggccatttctaaagactctcgctacagggagttcaagatttttaaaaagagcggcaaagaacgcatcatcgatgccccagacaattacctgaagagagttcaaaccttaataaacgacctcctgcagatcatttttgaacctaaggtgcataacgccacgaatggctttctgcttaatagggatatagtgcgtaatgctcgcgtccacgtgaataaacgttacctcctaaatctggacatagaagatttctttccgaccatcagttttagacgggtgaagtcagtcctcgaactggctccctttaacttaaacaccgaaaaggaaaatctggcttttatcatagccaacatctgcagcctgaaaggcaagctgccccagggtgcccccacttctccaattctgagcaatattgttacgcagcagctggatcggcggatcacaaagtattgtctgaagaagaacgtgaaatattccaggtatgcggatgacctttcatttagctctaacttggatgtattcgacaaggcctttatcaaggggttgactatcattgtgaagaaggaaggcttcaaaatcaacaaagagaagactagaatgaactctaatatggagaggcagcaagtaaccggaatcatcgttaacgagaaactgaacgtgaagagggactatatccaaaaagtccgcgccatgctgaacaattgggagaaaggaggactggactacgcaaaagcacagttcataaaacactacgggaagtcgaaatacaaacctgactttagaaaggccttgaaggggcacatcaattttataggacttgttcgaggtaaagaagatccactcttcagtagactgctcctaaagtacaattatctgaactaccagattgattgcaactatatctcaaataaggtcgtgcaggaggtcctagagcgtgacaataaagaaatggaatccattccccttaggagcgtacggattaacgaagacaatttcatcgctttctgtaccagtgccttccaccagatagagaatctcttgaactacttttactggagaaaattccctgaaatcgaagatctgcttcagtatattatggactataacgaagcattccactggaagagtatcgagaaatgcaagaaacgattcccgaagatctctaaaattcaaatctgggctaaagtctacatattcgagaaagagttctatttcgataagaaaatcccctacaataaggacatcactattttgcgagaaattcggaatgatgatagccatcgctgtgcagttatttcctataaccgcgacggtatcaaaatggactacaaggagttgaagattaagtgcatgcagtacaaggaggagcataagaagaatatggagaagtccagcggcgagaacattcttgagcaaaaatacaaggtgatcaagttcttagaggagagaaattataactccgtgcggcgaattctgaagggggtgtcagacaacataaagaactatccattcgtgaagcctgtcgagttagaggaatccaattga

SEQ ID NO: 7531 - RNA, 2538 nt, synthetic construct
  source 1..2538: mol_type = other RNA
atgaaaatagagttcaaaaaggtgatcctcataaaacaatacttcgacactaccgaaaacatagatggcctcgccgatctgctgaatttcgtggggaatacactctacgaaaaaaccttttctaagaagcagctctcaaaaaagctgcttaccttttttgcctttaaaaaagaggacaagtaccagagattcaccatcaagaaaaaaagcggggaaaaccgcttcattctggcaccacatagatacttgaaactcatccaaaaatgccttaatgtggtattgaacgtggttttcgaacctcattgggctagtcatggcttcgtcctggataaaaacattgtcactaacgctagaaagcatatcgggaaaaattacgtactcaacgtcgatctcgaagatttcttcccttcaatttctttccggcgcgtgaaaacggtgctgcagctgccccctttcaacctaaacgatgaactcgcctttttaatcgccaatctgtgttgctatgaaaattcactcccgcagggagcaccaacttcccctactctaagcaacatcgtttgtcagaaactggataggaagctggccagatttgccaaagaaaatagggttagttatagccgctatgccgacgatatcacttttagcgctcggacggatctcttcgacgaggactttctgaaccgactgaaagagatcatactgtcggagaattttaaagtgaatgagaacaagacgcgtatccaatcatttgcccaaaggcagatagtgacaggacttaccgtcaaccaaaaggtaaatgttagtcagcagtacatcaaagagattcgtgcaatactgaataactgggagaagaaagggtttgaacaagcacagtatgtcttcatcaagaactatatcaaggacaaccccaacataaaaaacccatcgatgattgaagttcttcgcggcaagctgaatttcctagggatggtccgcaaaaaagataacctgtaccagaagtactttaaccaattcaataagctgctggattcctataatcagaaggaagagggcgacattatctacatcaaaaacgtgcttagcaagtataagaccgagactaacacatctaagacaaatagggatgtccgcaaatcttgcaaacataatccaattagggtgaccgaatttctgagagtatttagcgaagacagaaatttcggtttaaatatgctggtgcacgaggctgaagacattgatcttgaggaaaagctgaaagagatcaatttagaattcgcgaaatacggtaagcaatttgaagaggaaaagtatcagattcccatctggttatatacccacattaagaaggacctcatagacctctataatgggaaggggcttagtatttaccgtgagcttggcaaacacccgtttcagaatgaccgagagttcacaaagaccatctttgattttaagaagacctaccggtttggacaggacaagggcgaagagacatccctcagagatacaatcattaggtgtctgtccaaggtgcggtacggcgacagggatatcctttccaagtttcaaattgcagtgtttgagcctataaaccagctggatttcgatttaattgctgctattaagaccgatgttatccgcgtggaattggccatacgaatcattctgtcctcttacctgaagcacagcaacggttcaggaaggctgaaatttgagcttcaggagatccagaaccagattattctgaacattatagacctcgactctatatgcacaaagaactatgagaacctgcagggtggcgacttcaatgagattattcagaagctgtggtccctgtgtgatgtcaacgtgatcagtaagtttaaggacggtaaaactcggatcgtgccaatccttcccgagaataaagacagcaaattgtacgacaaagaagtcgagggattcactttccagttggtcttttataacctccctcgggtgctcctcctggacaataaaggccgggttaaagaggtgaataacgaatacaaaccatacatagccattgagagtgatattagcgagaacgacctgttaagatacaacgctctcattatccacaagagcattcccaattatgttaacttgttcaagcgagctataaaggagaatatccctgttgtgagtagcggaggtggctcaggcggagaggaagggatcgtggagaacgtcggaaacatttctatcgcattcgacttgatgcagaagaacctgcccttgttcctgaagaaaatcaaggaagattacgtcgtggacatcaatatcttcttgttcgcgaataagatcaactataaaaaggccgtgaagatcaaggaggagatcatcaacattattgagaatcacaacctgctattcccggagttgtcccttgaggtaatcaataagatcaaggtattagccaagtcaaatgacattccctccttcgagaataagaaatctttgtccaagtttctacaggaaaagctaaaactgatcgagtatgaaacagcgaattga

SEQ ID NO: 7532 - RNA, 1656 nt, synthetic construct
  source 1..1656: mol_type = other RNA
atggagcctatagatatcaagtcggagaacattcttaagcaatttaacagcatctctgggatccacgacttcgtggaagtgttaaacgagatttacaagctgtattttcctgagggtgagaagaagctgtttagagtcggtagtattaattactatgcctttcacgctcagaaaaggtattacacttttgacataccgaagaagaatgggtcaacgagaagaattaacgcccccgtgtaccaactgaagctgctccagcaatgcatcaatcagctcctgcatttaatctttaagccccaccataccgctcatggctttttgctgggcaggaatgtcgtaacaaacgcggggattcatgcgggaaagcaggaagtcttgaacgtcgacctgcaggactttttcagtagcattaaattccgcagagtgaaagccgtcctggaactgcctccgtttaacctgaccggcaaaaaagagaaagtggccttcctgatatctaatctctgttgcaataacggcgtgcttccacaaggcgcccccacttcacccctactgactaacatcgtttgtcaacgacttgatcgaaagcttttccagcttgcaaaaacatccaaggctcgttactctcgctacgcagatgacatcaccttttcttccaacaatgcaatcttcaatgatgagttcatcaaggaactcaattaccagatcgagaatgaaggatttttgctcaacgaagccaagactaggatacaagaccggcgtcagcggcaggaagttaccgggctggtagttaacaagaaagtgaacattaatcgcgattttatccgcaaaattcgggccatattccataattatcaaaagggcggacagaaattcgcccagaagcagttcgccaaacactggagtaaaccaatcacaccacctgactttcggagcagcttgaaaggtcagattgaatacctgggcatggttagggggaaatccgatagcatctacctaaagtataagcagacttacctgcgcttattctcctccaactttatcgattactcattcattagccacaagggagtccgcgctcagctggagctggactacaaacgaatggaagctgcacggatcaggctaactatgagtgacgaggaaagattcaccgagtactgcctcacagcagcttttcagcttgaggagctggtgaattattatttggcacagaagatggactttgataaacttgtaaacgaactcgtcacccacacgtgggctacaaccagtgggttgaatggaaaaaataatgtgagcgagattccagccgtttataagtactttctgttcgagaagtacttctattacaaacccggagtgttctatgattcagtgattaccaaattgcgtaacataagaaatcagaagctgcaccgggccacagtggtgcagaggtccgaggagcagattttaatggaatataaggccctcatggcgaaagcatctaatcacaaaatcaactcagacggccgagtttaccaaatgagcaagtccgaagcaagactcaacaacgaagccaaggctgtctatttcttcagggagaaaaactataaggctgtattcgaggcggtgaaggatgtgtctgataagatccggatggacctcgccaactga

SEQ ID NO: 7533 - RNA, 1134 nt, synthetic construct
  source 1..1134: mol_type = other RNA
atgtccattccgccctcctccagcaatactaatggtaacgagcagccagctagcgttcctgctactaaagtggaccttactgccagctttcaaaaggtgacagacgtccatcagctggctcgggtactcaacgtggctttgaccctcgagctagcggaaaacccagagcacaaagataaacctatctcagcaaagctgcttaattactatgcataccacaagaaggaaacccggtacagaactttcaggatccccaagcgaaccaggggcgaggtccgcataatcaaggcgcccgacagaggcctgctgaggctacagcggctgctgctcagttgtcttactgcaactttcaccaccagccatcctgccagtcacggattcgtcctgggccggtcggtgctgaccaatgctcaaccacacgcagggcatagatttgtgctcaacctggacttacgcgatttcttccccagcacgtctatcggaagagtggttgccgtgttgcagctcccacctttctctctgtctaaggagggcgcctatcttattgccaatttgtgctgtgatcaaggctgcttacctcaaggagcacccacctccccgctgcttacgaacgccgtatgccagcgtctggaccgtcgcttgcaacagctggccactcaccatcggtgcacctatacaagatatgccgatgacctgacatttagttgtaaccgcccagtgtttcgggataggtttcaccaggaactcaacaccattattacagcagaggggtatcagcagaatgaacagaaacagagactgcagaccccagaaatccggcaggaggttacggggatcgtcgtcaacgagaggcccaatgttccccgcgagtacgtgaggcagattagggcaatgttacataactgggagacaagaggttacgaagctgccacatccaccctgcagcaacattatgccacatctaaggctcacgctcgacacaggggcaatgttcctaaattggaacgcgtactcgccggaaaaatagcgtactggggtatggtgagagggtgggaggatgtgaactacatctcatcactccttaagctacgaaaactgactgacaagcagaaacgacacgaacgttacacatga

SEQ ID NO: 7534 - RNA, 1119 nt, synthetic construct
  source 1..1119: mol_type = other RNA
atgttcgtgcatgtccccagctccaccaacaacggcgccgtacaaccagcttcgggtcctgtgacggaagccgtcttggcaacaaatttccgtctgatcaccgatgtccatcagctggcccaggtactcaatagcgccctgctgctcgatttggccgaaaaccccacgcaccaggacaaacctatctcagctaaacttctgaactactacgcataccacaagaaggaaacacgctatcgtaccttccagattcccaaacgaactcgcggggaggtgaggaccattaaagcacctgaccgcgggttgcttcgcctacaacggctgctccttagttgtttgacggctgccttcaccggcaatcaccccgcatctcacggatttgttcccggaagaagcattctgacaaatgcgcaacctcatgcgggacatagattcgtgctgaacctcgacctcagggatttcttcccaagtacttctattgggcgagtgatcgcagtcttacagcttcctccatttggtctggtcaaggaggtggcctatttgatagctaatctgtgttgcgatcagggctgtctgccacagggggcacccacaagccctctcctaaccaacgttgtctgccagcggcttgacagacgtctccagcaactggcgatccggcacaggtgcacctacactaggtacgccgatgatctcactttttcttccaatcggccggtttttagagacagattccaccaggagctgaacactataattgcagaagagggctaccagcaaaatcagcagaagcagagattacagactcccgaatttcgccaggaagttaccggcgtggtgatcaacgagaggccaaacgtgccgagagagtacgtgaggcaaatccgagctatgttacataattgggagacaaaaggatatgaaacagctgctgccaccctgcgcgagaagtatacaatttcaaaagcgaaggctaggcacaagggccaggtgccaaagatagagcgggtactagccgggaagatcgcctatctcggtatgatccggggaaaaaacgacgccctgtttcttgagctgtccatgaaattgatgcaagtgatgaaaaagcagaagctgtga

SEQ ID NO: 7535 - RNA, 1002 nt, synthetic construct
  source 1..1002: mol_type = other RNA
atggctttcgctctgaacgccgcactgcaacaggatctcgacgagaatccgcagcacaagcccaaactgatcaccccaaagctcttgaactattacgcttatcacaaaaaggaaaccaggtaccggaccttccaaattgccaaacgcacgcgcggtgagttccggacaattaaagcacctgaccacggcctgcttcggctgcagagactcctgctccggtgtctgactgccgcgtttacaacatctcatccagcgtctcatgggttcgtgcctggaaggtcagtgctgactaatgctcttccgcacgttgggcacaggttcgtgctgaaccttgacctcaggaatttctttccctctactagcgttgggcgtgttatggcagtgttacaactgccacctttttcgttggccaaggagagcgcctacctagtggccaatctctgctgtgatcagggtagtctgccacagggcgcacccacctcacctctgttaaccaatgctgtgtgtcagcgtctagaccgaagactccagcagctggccactcgccaccgatgcacctatacacgctacgccgacgatttaactttttcctgcaataggcccgtctttagagcagccttccatcaggagcttaacgccaccttggcggctgaggggtatcagcagaacgagcaaaaacagcgcctacagacacctgaaacacggcaggaggtcacgggcatcgtcgtcaatgaccggcccaacgtaccaagggaatatgtcagacaaatcagagccatgttgcacaactgggaaaccaagggatacgaggctgctagtgcaacgctgagacagcactaccctactagcaaggcccatgcacgccataacggaaaagtgcccaagctggaaagggtgctcgccggtaagattgcgtacctgggcatggtaagaggccagaatgattccgcattcttgaacctgatcaagtcctttcttcgaataaaagatgctggacaatga

SEQ ID NO: 7536 - RNA, 1377 nt, synthetic construct
  source 1..1377: mol_type = other RNA
atgtccgaacaggaccctccagaacagccgacagacgaacccggacctggccaggaggagtttgaaggggctttcgaggagtcacaaagggagcactccgaggaggaggcggagctcttggcagaaatcaaagccgagcttcaggcggaactgtatgctgatctggaagcagacctgaggagtgagatgcagaatgagctagccagcgaatcactgttcgggacatatagtgctaacaaatctctgagcgatgatgtgatcgaagaaatcaagcgatggggcgcatttatggccgtgttaactgccgcaacaacactcaacgatctcgccgagccctttaggcgtgcaaccaatgccaagtatctcgctgcggtactcaatgcggtgctcagactcaatttgctagagaaccccagccggaaggctaaaccagtctcatttaagctcctgaactactatgcatttcacaaaggtgagcggcggtaccgcacctttctgatttcgaagagaactcccggggaacagcgcgaaattaaggcacctgactacggacttatgcgactgcagagactcctactgggctgcttgaccgccgctttcagcacttgtgatgacgccgcacatgggttcgtctccgggaggtccgtgctgactaatgccttgccccacgccggtcgcaggtacgttctcaacctggacctagagaactttttcccaaatacacccgttcaacgcgtcgtaaaagtgctgcaactgcagccgtttggacttgtgaaacccgtggcccatttaatcgcttctttgtgctgcgaccaagggtctttgccacaaggcgctccaaccagtccgttgctgaccaatgccgtctgtcagcggttagatcgacggctgaggcagttagcctttcgtcatagatgtacgtataccaggtacgctgacgatctgacgttcagcagcaatagacctgcattccaagaactcttccacaaggagcttaacgccattctgacactggagggttataagcagaatcccaacaagcagcgcttgcagacccctaaccagaggcaagaagtaaccggagtggtggtgaaccagcgtcctaacgttacccgagagtacgctagacagatacgggccatgcttcataattgggagactaagggctatgctgtcgcctcaacaacgctgcgccagttctacccacagactaaggctcacgccagacatgagggcaaggttcctaagcttgaaaaggtcttagcgggtaaaatagcctacctgggcatgcttcggggaaaagcagatgtgatgttcctggacttcaaaagtaaactgtccactctctctgcagccgctctgccacacgacaactga

SEQ ID NO: 7537 - RNA, 1281 nt, synthetic construct
  source 1..1281: mol_type = other RNA
atggctgagacaccagatcagcttcccacccccccgcacgataacgaaccagctgccggtgggcctgcagatcatcctggtaaccctctggctggcttcgtaattaaaaacgggtggttacagcaggttaagcccggctatcagcccgctttacctgccgccgaggagttggctgaactagccgagcactttagggccgtgactgatgcaatttccctggccagagtgcttaatgctgctctcgagctccaccgtaagcaacaccctaaggggtcaccaaagacggtgagcccagggctcctgttgtactatgcacaccacaagaaagagcgctaccaaaccttccaggtcccgaaaaggactcgaggccagtttagagacatcaaagcacccgagcacgggctcagaaggatccagcggcttctcctgctgtgtctgaccgctgcgttcacaacatgtgacgaggcagctcacgggtttgtgcccggtcgctccgtcctgaccaatgcgcagactcatgctggacggagattcgtattgaatttggacctgaaagacttttttcctagcacgcgggttggaagagttcttaaagtgctgcagctggaaccattcgatctcccgaaggaagcagcacatctcattgccaatctatgctgcgatcaaggaagtctgccacagggcgcacctacatcaccccttttgactaacgtcgtttgcgtatggctggacagaaagttacgagccctcgctaagcggcaccgctgtcattacacacgttacgctgatgacattactttctccagtcagcggcctgccttcacagcggccttccaagccgagctcaatgccgtcttggtggacgaaggctacgagcagaaccctgcgaaacagcgactgcaaaccccagaaaccaggcaggaagtgaccggtgtcgtcgtaaatgaaaggcccaatgtgccacgggagttcgtgcaagacatcaggtttttactacatgtttggcagaaacatggctatgcagccgcctctaaggcaatgggccagaactatggcggctctaaggcccatgcccgctaccgtggaaatatccccaagcttgaaaaagtgctggcaggtaagatcgcgtacctgggaatggtgcgcggcaaaaagggaattgtctatgccagcctgtatgagcaactccaggatctgaacggagtgactgccctgcacatacttgaggaactgaccataatcgggttgcaggtggagtttgacaagaaccagaacctgtga

SEQ ID NO: 7538 - RNA, 1236 nt, synthetic construct
  source 1..1236: mol_type = other RNA
atggccgagacacctgatcagctgcctcccacacccaacgaaaatgaaccagccgctggagctcccgctgatcagcctggagagccactcgctggcttcatcgtcaccgatgacaaactgcagccggcattaccagccgccacagagttggccgaactcgcagagcactttcgcgcggtgaccgatgctacctctctggccctggtcctcaatagtgcccttgagctgcaccgcaagaggcaccctaagggcagaactaagacagtcgctcccgggctgcttttgtactatgcgcaccataaaaaggagcgttacagaacttttcaggtccctaagcgcaccagaggccagttcagggacatcaaggctccggaacatgggctgcttagaatccagcgcctcctgctgctgtgtctgacggcgacgttcaccacttgtgacgaggccgctcacggttttgtcccgggacggaatgtgctaactaacgcccagccacacgctggtaggcgattcgtgctgaacttggacttgaaggacttcttcagtagtacgagagttggacgtgtgcttaaggttcttcaactggccccctttaatttgcccaaagaagctgcacatttgatcgcaaatttatgctgcgatcaaggatcactgccacagggcgctccaacatcacctttactcaccaacgtggtatgcgtttggctggaccgaaagctacgcgccctcgccaaaaaacatagatgtcggtacactcggtatgcagatgacattaccttttcgtcccagcggccagcatttacccccgcgttccatgccgaattaaatgccgtgctggccgatgagggatacgagcagaaccctgcaaagcaacggctccagacccccgaaactaggcaggaggtgacaggtgtggttgtgaacgaacgccctaacgtgccaagggaatttgtgcaggacattcgttttctcctccacgtctggcaaaaacacggctatgtagaggcatctaaagcaatgactcggaagtatgggagcagcaaggcccacgctaggtacaaggggtccacacctaaactcgagaaagttctggcgggcaagatcgcatacctgggcatggtgagggggaaagaagacgtagccttcgagcaattcgcccattctctggtcaccctatccagccccgaatatcgagagattgagatgctgatttccatacttagcagaataggttga

SEQ ID NO: 7539 - RNA, 1299 nt, synthetic construct
  source 1..1299: mol_type = other RNA
atgccccagccccccgatgatctttttccaccctctcccgatgcagcagctggcagagaagaggatgctgctgggataccaaaccaggggagtagcatgccagatgaacccgcctcgattccacaacctgaccggataagggatgcggcggatttgctagccatgctcgacgccctcgatgacattcagcctgatcccctgacagacaatctggcagcacagcccttcccactaccagtcccaactaaactagctgatcttgccgagccctttagagcagtaactagcgcggtgtcactggcgagagtgctcaatgccgcactgcacttacatcgattacgttacccacgatcccaagctaaacctgtgtccgccaaactcctccggtattatgcccaccacaaacaggcgcgatatcatacctttcagattccgaaacgcacaaggggacagtttagagacatcaaagctcccgaccatggactcagacgcgtgcagcggcttctgctgctgtgcctgactgccgcattcacaacatgtgacgaggcagcccatggtttcgtccccggcaggtccgttctcaccaacgctcagccacacaccaagcggcggtttttgctcaatctggacctgaaaaacttcttcccaagcacctccgtaggtagggtcctggccgttctgcagctggcccctttcaatctgaataaagaagccgctcacttggtcgcaaatctgtgttgtgatgctggagtgttgcctcagggagctcctacctcacctttactcactaacgccgtgtgccaacgtctggacaagaagctgcggcgcttggctgcaaggcatcactgccgatacacaaggtacgctgacgaccttaccttctctagtcagaggcctgccttcacgcctacctttcacgcagaactgaacgccgtgttgaccgaagagggctatgaacagaatccggccaagcaaaggctgcagacgcctgctactagacaagaggtcacaggcgttgtggttaacgagcgccccaacgtgccgcgcgaatacgttcgcgacatcagatttctgctacatgtctggcagaagcacggttacgcagtcgccacacaggccatgcgtgccaagtacgggagctctaaagcccacgctcggtaccagcagaagatcccgaaattagagaagttgctggccggcaagatcacgtatcttgggatggtgcggggcaaagaggaggtggtgtatcgcactctccttagaaagcttgagatcgtaaagaagaagcaaaagctctga

SEQ ID NO: 7540 - RNA, 1338 nt, synthetic construct
  source 1..1338: mol_type = other RNA
atgcctgaagacctcccacctgatgccatctctgcgacacccgaccagccagatgccggaacagaggaggcagccggtcaggcattggaggccgttcagcacgccgagctgctgagagtcctgtcccctgaataccaggcggggttttgggcaatgctgaacgcccaaaaagggagacagccacgtcctgcccctttgctcgaaataatcgataccgccggcctcgccgtaccttttagggaggtaatggatgctgacaccttggctcgcgttttaaacgctgctcttgcactggacgtcgcagagaatccccagcacaaacccaaacccctaattgggaaggtgctgaactactatgcttttcataaaaagaccactcgctacagcacttttgagatcccaaaaagaaccaggggcgaaatgcgagtcataaaggcaccagatcacggcttgcggagaatccagcgcctattgctcttatgtcttacagccgcatttactacgtgtgacaaggctgcgcatggattcgtgcccggcaggtcagtactcactaacgcccagccccacgcaggcagacgattcgttctgaatctcgatctgaaggacttctttacaaatactcactatggtcgggtggaacgcgtccttcaactcccgccattcagtcttttgcccgccgtcgctcggcttgtggcaaatctttgctgcgatcaggggagcctgccacagggtgcaccgacatccccactgctgacaaatgccgtatgtcagcggctggatagacgtctgaggcaactcgccaagtgccatcgcgccacctatacccggtatgctgacgacctgacgttctcttcccagaggcccgcattccgagagcctttttatgccgaactaaaggtgattctggacgctgagggataccaggagaacgctcagaagcggaggttacagctgcctaatgcccgacaagaggtgaccgggatagtggtgaacgatcaacccaacgtgccgcgcgaatatgtcagacaaatcagggcgatgttgcataactgggagacaaaagggtacgaagcggccagcacgactctccgtgcccattacagggagtcgaaagccggagcacggcacaaaggcaccgctcctaaactggaacaggtcctggccggcaagattgcttacctcggcatggttagaggaagcgactcagttgaatacaccgtgttctcccagaagctgaaaagtcttggtttcgacaaggaaaatttagctattatgggaatcctgaaggtgattaaggagaaaggcgtgaaggaggcgatcgcttctaagcaggtgtga

SEQ ID NO: 7541 - RNA, 1299 nt, synthetic construct
  source 1..1299: mol_type = other RNA
atgcccgaagacttgcctccagacgccgcttcagcgacccctgaccaacccgatgccggaatcggcgaagcagcagagcaagcaccagaggttgctcagcacgcggagctccttcgcatccttagcccagagtatcaggctggcttttgggcaatggttaacgctcagaaagatcagcagcagcgaccgctgccactgcctgaaatcatagatactgctgggctcgcagtgcctctgggggaagtgaaggacgctgataccttagcccaggttttaaatgcggccttgaagctggacgtggtggaaaaccctctccacaagccaaagcctctgacgggcaaggttctgaattattatgccttccacaaaaaggccaccagatacagtacttttcagatccccaagcggactaggggtgagatgagggtgattaaggcccctgatcacggactgaggcgcatccagcgtcttctgctgctctgtctgacggctgcgtttaccacttgcgatgaagctgcccatggcttcgtaccgggtcggagtgtcctgactaacgcccaacctcacgcaggacggcgcttcgtgcttaatctggacctgaaggacttctttacaaatacccattacggccgagtggagtctgtgttgcgaattgcgccctttggtctgcaacccgccgtggcacgtctcgtagctaacctgtgttgcgatcagggcagcttacctcagggggctccaacatcacccctgctcactaatgctgtctgccagagattggacaggcggctgcgacagttagcaacacgtcatcgcgccacatacacccggtatgccgacgacctcacattcagctcgcaaagaccggcatttagagagcagttccattccgagcttaaggaaatactcgatgctgaaggctaccaagagaacgccctcaaaaggagactccaactgcccaatacacgccaggaagtgaccgggatcgttgtgaatgaacagcccaacgtcccaagggagtacgtaagacagataagggccatgcttcataactgggagacaaaagggtacgaggtggcctccgcaaccttgcgctcccactaccgggaatctaaagctggagcccggcacaaaggcacagtccccaatctagagagggtcctggccggaaaaattgcctatctaggaatggtccgcgggatcgagaaccccgagttcattaacttcactagagtgctgcaggagttgacgattacccagaagtttagattctctttggatcttgtcatgccaaaactatga

SEQ ID NO: 7542 - RNA, 1065 nt, synthetic construct
  source 1..1065: mol_type = other RNA
atggaatttacttcagatgaaatccagaccattaaaacagcccttcagtctgggaagaacctggccgacctgaccgacttgcttaaccttgttagcgattggattgcgcagaaactggtgttagaatataagccttttagcatcaagcaggtgtatcattattattacaacctggagagcaaatacaaggagcaccgtattagtaagaagtcgggaggggagcgagtgattcacgctccagaggagacattgaaacgaatacaacgcagactgaacgtcatcctcagccatctctataagcctacggaggccgctcacggctttgtgatgaaccggtctattgtctccaatgctcagccccacctagggaagaagaacgtgttcaatctggatttgcaagactttttcccaactatccatttcggcagaataaaggcagtactgcagctgcctgagtatggtttaactagtgagtttgctcatatagtcgcaaatttctgctgcttccagggtaaattgccccagggatcaccagtgtctcccatcttgaccaacatcgtatgtcggcggatggattacaggatttccggactcgccgcaaaacacgggttcacgtacacaaggtacgctgatgatatcacactatcctttgacgaactttcaaaagaagccaagcaaaaaatgggcctgggcctgggaaaaatcctcaaggaagagggcttcaaggtgaattccaagaagacccgcttactgaaacctaaccagcggcaggaggttaccggcgtggtagtcaatgagaagctcaacgttaacagagaatacgtccgcactatccgcgcgattctgcataattggcaaaaacacggactggaagtgacacaggcaaagttcctgaatcactaccccgaagaaaagggcttcaaaagaaataaaaccatcccggaccttaggaaggtgctactcggtaaaatacagtttctgaggatggttcgtgggggtagtgacgaggcctttaaagagtacctgatcattttcgacaagctcgccaagaacaatctcaaatga

SEQ ID NO: 7543 - RNA, 1065 nt, synthetic construct
  source 1..1065: mol_type = other RNA
atggagtttacaccggatgaactccaaaccatcactaatacactccgaagcggtcgaaatctagcggacttgactacgctccttaacttgaccggcgaactcattgctaagaagctggagttagagcataaatcatttagtgtgagacaggtctaccattactactacaacctggagagcaagtataaggaacacagaatgccaaaaaaatccggcggcgagaggattatccatgcccccgaggaacgtctcaaacagatacagaggctcctgaatgtggtgttctcccatctgtatcagccctctgaagcagcccacggttttgttaggaacaggagtatcgtcactaacgcccggcctcacgttggtaagcagcatgtcttcaacatagacctgaaggacttcttccctactatccactttggccgggtcaaggccgtgctacaactgcccgattatggactaacccccgaattggctcacatcgtggcaaacttttgctgtttgcagggacggctcccacaaggatctcctgctagtccaatcattactaatctcgtgtgcaaaagacttgactatcgcatttcagggcttgccgcaaagcacgggcttacgtacacacgctacgccgacgatattagcctgtcgttcgatcagttatcccacgagtcccgcaaatctttctcatatgggttaggcaagatactggacgaggaggggttcatggtgaatggaaaaaaaaccagactgctgaggccaaatcagaggcaggaggtgacaggggtagtgatcaacgagaagataaacgtcaatcgcgactacatccgtaatctgcgggcgattctgcacaattggcagaaacagggagaagagacaacccaagtacgatttgaacaactgtaccctaagaccgctgtttttcagagaaagcgcaagattccgaaacttcagaacgttctgtatggcaaaattcagttcctgaagatggtacggggcggtgaagataaggatatccaaaacttcttgatccagatcaacctgctgagcaataacgtgagaaaatga

SEQ ID NO: 7544 - RNA, 1047 nt, synthetic construct
  source 1..1047: mol_type = other RNA
atggaactcagtcagtactatatcgacgaaattaaggcgcgtgtggccaatggtaccaccttagaggatgtcacaagccttattaacttcataatcaacatccagaacgaaacactaggcaccacttaccggttcatttctactaagcgcctcgcctattattttgtgcatcgcgacgagaggtacctatccttcgaaatacctaaaaagtcaggtggcgtgagacagattacagctccagatcctttcctgaagaaggtacaacgcaggctgaatttcatcctggaggtcttgttccgaccaaaagcagccgcccacggatttgtcacagggcggagcatcgtgaccaatgctaaggtgcatgttggtaagaactacgtctataatgtagatctgaaagactttttccccacaatccactatggaaggataaaggcggtgcttcagctcaattcattccgtatgaagccagattttgcccacataattgcccacttatgctgttataaaggaatcctccctcaaggggcacccactagtcccatcattaccaatatcacgtgccaacaactcgataagaacctggtcgattatgctaagctgaactcctgctactatacgcgctacgctgacgacatcacatttagcgctgataaaaacgtgtttaaggacaagttccatgagaacctgaaattacacctggaagccgccggctttaagctgaatgacaagaaaactcgaaaacagaagagaactcagagacaggaggtgaccggcattatcgtgaatgagaaactgaacctccagcggacctacattaaaaaaattcgggcaatgctgtacaattgggaaagagacgggttgcccgcatgtcagagggagtttaacaaatattacccgctggagaaagggtttgttaagtcgaggatcttgccacctttcgagaacgttctgatgggcaaaatactttttcttggcatggttagaggaaaagaagacaagtacttcatggagttcacctctaagtaccagtccttgaagtcttga

SEQ ID NO: 7545 - RNA, 1047 nt, synthetic construct
  source 1..1047: mol_type = other RNA
atggaactatcacataaacagacggagtacattaagtatttcgtctcaaatggcgaaaccttggaggatctgaagtctctcatcaattacatcattaagctccagaacgacacactgggcaccacgtataagccggtcagtatcaagcaactcactttctattttgccaatcgtgataagcagtattttaacttcgagatccccaaaaagacagggggggttagaaagatcaccgccccagacctcttcttaaaaaagattcagcgcaggatcaactttgcgctggatttgctgtttaagcccaaagcagcagctcatggatttgtgaccggtagatcgatagtgtctaatgcaaaagtgcacgtcgggaagaaatacgtatataacgtggacttaaaggatttctttcctaccattcacttcgggagaatcaaagccgtgctccagctgcatccttttaagatgaaaccaaaatttgcgcagctgattgcccacatttgttgctttgaaggaattttgccccagggtgcccccacatccccaatcataactaacattatttgccagcaactcgacaaaaacctggtgagcttcgctaagttctacaagtgctattatactcggtacgctgatgatctgacctttagttccgacaagaacagcttcaaagaaaaattctacgaagatctggtgcttcaccttaccaacgccggattcgctctgaatgagaagaaaacacgcaaacaaactaggacacagcggcaagaggtcactggcataatcgtgaatgagaagcttaacttacagaggtcctacataaaaaagatccgggccatgctttataattgggaaaaagacggcctgcacgcatgtcagaaaaatttcaaccaatactaccctctggagaagggcttttttaagaataagagcgtacctccattcgagaacgtcgttatgggcaaaatcctcttcttgggtatggttcgaggaaaggacgacaaatacttcctagagtttttcagcaagtaccagaatctgtctaagtga

SEQ ID NO: 7546 - RNA, 1065 nt, synthetic construct
  source 1..1065: mol_type = other RNA
atggatttgactaacaaacacatcgagtacattaaactgttgttacacaagggcagcacccgggatgatctcgtgtccctgatcaactttgtaatcgagctgcagaacgaacagctccagactaactacaagacaatctctaacaatcaacttgggtattacctagctaagcgggatgaaaagtatattcatttcgagatacccaagaaatcgggaggcgtgagacgtatcagttccccttccaaagtgctgaaaaagatccagaggaggattgcttttgtgctagaggtcctgttcaccccaagattaagcacaaatggctttgtgaaacagaggtctattgtcacgaatgccaaggggcatatcggccggaaatacatttataacatcgacatcaaggacttctttccgagcacccactacggacgagttaaagccgttctccagatttttccattcaaagccagcgaggaaatggcacacctgattgcgcatctctcttgttacaagggaatccttcctcaggggagtccacttagtcccatacttactaacatcgtctgtcagtctttggattatcacctggtgaaactggcccaagaccataagtgcttttattcccgctatgcagacgacatcacgttctcatcaaataagaacatttacctcaacgagaagttcttaattaagcttaagaaggttgtgaacgaccagggtttcaatatcaatgaaaaaaagacccggctgagatcaaatgctcaacgccaagaggtgactggtgtcatagtaaataccaagcccaacctgaagagaacatacattaagaagctccgagcaatgctgtacaattgggaaaataaaggactcaagtattgccagaataaactgacaattcactacccttatgagaaaggcttcatacgtaacaaagtcgtgcccgactttgaaaatgttctgcagggaaaaatacagtttctggggatgatcaggggcaaggatgaccattactacaagaccttcaatcgcaagttcaacgagttgaaaaaagtgaagaacggttattga

SEQ ID NO: 7547 - RNA, 1062 nt, synthetic construct
  source 1..1062: mol_type = other RNA
atggactttacacagacagaaattagtgaaattctgacccaactccagcagggacagaagatcgaggatctggtcgagctgttgaatcatgtaatcaagctccagaacgaaaaggataagaccacttacaaacctctgacaaacaagagagtgaagttctactacgcaaatatcaacaaaaggtacgtgaatttcgaaatccctaagaagaccggcggcaaacgcaccatcacggctccagataagtacctgaaaaaagtgcaacggcgcattgatttaattcttaggctcttgttcgtaccgaagcctgccgcccatggattcctagccaatcgttctattgtttctaacgccaaaatccacgtgggcaaaaagtatgtactgaacatagacctgaaagacttttttccttccgtccattttggcaggatccgagcggtgctgcagttgtatcccttcagacttaaacccgagtacgcacacgtggttgcgaatttctgctgtttcgaatcaaaattaccccagggtgctccaaccagcccaatcatcactaacatagtctgccagaagctcgattataagcttgtccagctggctaaggagcaccactgctattttactcggtacgcagatgatattactttttcgtgtgacaaggcacggttcgacgacgaattcctgaagaagcttgatgagattgtcaaagcagaaggtttcgtgatcaatgagaagaagactcggattcagaagcgagcttttcgccaagaggttacgggcgtcaccgtgaatgagaaactcaacctccaacccgactacatcagaaacgtgagagccatgctgcacaactgggagaagtatggatatgagatcgccaacgccaaatttgctaaattttacccgaaggagaaggggttcctacgtaataaaataataccacccctggaatccgtggtttcagggaagattatgtttctcgggatggtgaggggaaaagaggacgccttatacttgcgctatagcaaccagctgaaaaccctgacagacttgaaaaatacaaagtga

SEQ ID NO: 7548 - RNA, 993 nt, synthetic construct
  source 1..993: mol_type = other RNA
atgtacaaaaagattagcgcaaagcggctcaaacactattacgccaacatcaacaagaagtacatcaacttcgagattccgaaaaagacaggaggcaaacgaaccatcacagctcccgataaattccttaaggccattcagagaaggatcaatctgctgctgacgctctttttcgaacctaaacccgccgcccatggtttcctggaaaacaggagcattgttaccaatgctaaaattcacgtcgggaagaagtatgtgctgaatatcgacctcaaggatttttttccatccatacatttcggtagaataaaggccgtgctgcagcttcctgtgtttggcattaaagctaatcagttcaaacagggggatagtatctcttttgaactccttgccaagttcggactgaaacctgagttcgcacagatcatcgcgaacttttgctgttttgagtcaaaactcccacaaggcgcccccacttctccaatagtcacaaacatcgtgagccagaggctggactataagctggtcaagctggcaaaagagtaccactgtttttatactcgctacgccgacgatatcactttcagttgcgataaaaaccgctttaaggaagaattcatgattaagttggacgagattatcaaatcggaggggtttgttatgaatgacaagaagacgcgtactcaaaagaaagcagtgcgccaagaggttacagggattacagtaaatgaaaagctaaacttgcagaggacctatgtaaagaaggtgagagctgctttatccaactgggagaaatatggatacgaaaaagccaatgcaaaattcgcgtcctcatacccacaggaaaagggttttttacggaataaaaccatccctcccatggaggctgtcttgagcggcaaggtgatgttccttggcatggtgcggggacaggatgacaccctctatttgaaatacaagaacaagctatctgagctgctgataaccaagtga

SEQ ID NO: 7549 - RNA, 1080 nt, synthetic construct
  source 1..1080: mol_type = other RNA
atgaaggagcgcaaggaaatgatcatgcaactcgtaaaaaactgtgacaatcttaaggacttctgcgaactgattaactcatccaacttgctcgtgagcaagattcagtctcagaaaccactttacacctccggcaaacaatttggctacctcctggctaacaaggagcatttatataaacagttcgacatccctaagaaatccggcgggaggcgaaaaattaacgcacccttggataatctaaaggtggtacagtacatgatcaaaaacctgctgcaactcttctataataccccatttgagtggcaggaaaagttagaggagatcagcaagaataacgcaacagtcctcccctgcgtgcacggttttgttaatggccgggggatcgtgagtaatgcgtatctgcacctcaagcaggatttcgttcttaactttgacctgaaggactttttcccttcaataggaaatggcaaaataatcgaaacgctatgtttggcccccttcaacttcagcagatttacaagcaagataattgccaacctgtgcaccctggagaaccatctgccacagggagcatgcacctcacccttgctgtctaatatcgtctcgcagagaatggacaatagatttatgagcctcgccaacaagtaccctaccatgcagtttagccgttacgcggatgatattacattcagttgtatgtaccatgtctttgacgactctttcatggagattatagaagatatcgttcgcgctgagagttatgtgatcaatccgaaaaagactaggctgcagaggcagtcccagagacaagaagtcactggtctgatcgtgaacgaaaggcttaacattcctcgcaaaaaaattcggatgttacgagccgtcctgcacaattggaaagtgaacggctatgagtccgcccaggccaaatttaaggatgctttcgggatgaaaaaggatttgaaactctctattgggggattccttaattttctgaagatggtgcggggagatcaggacgctctatatcaaaagtactacgaggaattcaagatcctgacaaatgagatcactaattga

SEQ ID NO: 7550 - RNA, 987 nt, synthetic construct
  source 1..987: mol_type = other RNA
atggaaattactaaagagaagatcaaggagctactcgaaaaaggcaaaactatggaagacttcttggaagcatataattgcttcctgctatatctgaacagtagggacgggaaagatagaaaattgtgggagaagaactcttttttgtatctctaccgaagtgttaacagacaatacatagagttttccatccccaagaagagcggagaggaacgcaaaatttgcgcccccaaaaaacagctgaaactggtgcagaagaagatcacacaaattctggagctctactacaaacctaatgctaactgccatggattcgtaaaacagaggtctatcgtgaccaacgccgagatccatacaaataagacatttgtgctgaacctggacttagaggattttttcccctccattaaaactaaccggattatcgactctctcattatcgaaccattcaatttctcaacagagatggctaagataatctcaaggattgcatgtaaagaaggcggactcccacaaggcagcccgatgtcccctatgatcagcaatgtgtgttgtgaaaagatggatcttgaccttaaagatttcagcaaaaagtacaagctcaattactcgagatacgctgatgaccttacgttctcaggttatcgcaagatcttcaacaataccttcttttccgaactggggcgtatcatcggtaaaaagcaccattttcgtattaagaagtctaagacccgcattcagaatcgcaacaaccggcaggaggtcaccggggtcgttgtgaatgacaagttaaacgtgaataggaagtatatacgggagctgagggccctgatacactatcacaagctgggaaaggccgaggagaatgcgctttatgtaataagtgggaagttggaatttctgaagatgatcaagggcaaagatcgggtctacagaaacctgttaattcagtttaagagccagaaaaatggccagcgaaacaactga

SEQ ID NO: 7551 - RNA, 1071 nt, synthetic construct
  source 1..1071: mol_type = other RNA
atggagaagtatcggactgctaggtggcggttaacgatgtatagcgaacgtcacattattaccatcctgaatcgtattcgaagaaggcgcgacatcctgaactgtaagggttactttaaactttccacgttacagaagtatgcaagcggaaactactataagtttttcagcatacccaaaaagaacggggggaaacgcataatctccgctcccgaaagagagctcgccttcatccagctatgcatcgcggtgctgttcaatagcatctacaagcccaataaatgcgtcttcggatttgtggataagcgatcgattgtgcagaatgctcagcagcacattaacaaagagatccttttcaacattgacctgaaagattacttctcttcaatctcttacaacgatatcatcgagaaactgatcagacagccttactatttctcttacccagccgcaaagtttctgacagacattttggtcgtggagactcaagatggaaagcgggttctcccgcaaggcgcacctagctccccaattgtgacaaacatgatagccgaccaccttgacgtccgcttgtccaagttcgctgaaaaacacgacttgacctatactaggtatgccgatgatattaccttctcattttcaaggagcaaacttcgtggttggcgcagtcatggtctgaccaaagggatccgcgacataatttttgacattatcgagacagaggggtttctcatcaataagagaaagaccagaatctcctttataaatcaaagacatgaggttaccggcctggtcgtgaataagaaagtgaacgtaaagcgggaatacatcaaaaggctgaggacagaaattcacaattgggagcgagatggctatgtcattgccagttacaagttcctgaaacattacgaaaagactcatctgggaaaactcaagtctatggaaaacgttatagaaggcaagctaagttttatcaagatggtgaagggcgagaacgatactacatttatgaagttgtacaaccggttcatgctcctcatgcagcgggacaaagtattcatcaattcatga

SEQ ID NO: 7552 - RNA, 1743 nt, synthetic construct
  source 1..1743: mol_type = other RNA
atgcccagaccagcgctgctgtcctcgtcattcggattgctgagcgtgcaagatctgtgccagtatctgaatagtatcccagtcagcgagcccctgctcaagcaagcctatacccccctttctctccaggccctcagtgaagtggcttccagctgctacaaagagttacacctgcccaaaaaaaacgggtccttacgaataatccacggccctaacccacacctgaaagctgtccagaaaggcctgtgcacactgttaaatgagtatcagaaggagttgaaatctccttccgcttacgggttcgtaccagggagaaacatagtggacaacgcagctcgacacaccggaaagaatgttgtgatcaacttagacctgctgaacttcttccccacaatcaactcaagcatggtggctgaggcacttgccaaaccaccggcaagcattcccctggtgtctcagctcaatcaagtcatgacaaacctgatgtgtcgcgaggacaggttaccgcaaggtgccccatcaagccctgccatggcaaacctcgtctgtcacagtctggatttgaaccttcgggccctagcacagaagcatagatttacgtacactcgctatgctgacgaccttacattttcgtcaaactaccctaaggttgcggaggaggtcttcatcaatattatttatcagcgttgtgagaagttgggtttcaaggtcaacaaggaaaagactaggatccaaaggagctccggcagacagtccgtgacagggttggtggtgaattccaaggtgtctgttaaaaagaaatactgccgtataactagggctatgcttcataactggaaaaaactggggtacgaggaggccgaggccctattcaaagccaattatcccaaaggccctctatataatctgtccaacgttctgcttggtcgaatcgagtttatcggcatggtcgacaatcacaagttgccgctcagacagcggaaaaatcaactgctctctgacacccggtatatgaaacttctggccgaatactgggaactcatgaatgggcagaactatagcttcattcagaatcagaagatctttcagaggttggtcaggtttaaccggctcgccgagaatgtagctatgattaagaacaaccagtttagttctcgcgatcgctttatccggtattgcacctacaccttcgtacagttggaggaactttataaggtatacttcctcatcaagttccaagaagactacagtaagataggccgccatttctttgacaacaacgatgcattcaaacgcatgctgctcggaaagaagaaagaagaccactcacccgaggatgtggagagagctcgtaaagaggccgagaataaaacttcatttgcggattacaagacgtacatgctggaatcccagtttctgaacgattgttactacgcgaagggtagaaatcctccaaagctccccaggctgctgaggcagctacggaatttttacgtgcatggatctgaatttactaaaagagatgaggcaagcctgaagcagaccttggaaggaattcctgcaaagaatgccgcatataaaaagaagcatcagaaggatcgagtgatgcctaaggacgaagtgaaagcccaggaagaatatcttgtgttcaagtggattgatggaggcgactacgatagtgtgcgcgccttcctgggcgacattgttgctctcgttcggtacgaatttgaagatcggaattga

SEQ ID NO: 7553 - RNA, 2040 nt, synthetic construct
  source 1..2040: mol_type = other RNA
atgataagcacacagtacgatacaaacgttctgatctcgctactccgcgagggggagtctctggatgacttgctgaccctgctcaacggcgtcgtcgaatggcaaaacttcgtgcaccagtctaaacgacggctgttcaccaggaagcagctctcatttttctacaaaaacgtggacaagaagtaccattcatttcaggtgccaaagaagtccggggccctgagaacaatcaatgcgcccgacgggaccttgaaagccatccaacggtgcattacggacctcctccagattatctaccagccccctttctcggtaaacggctatgtaaaaggcaggagcgtcgtatctaatgccttgatgcatacgaataagaactttgtgctgaatatagacctgcaggatttcttccccaatatcaagttcggaagagtgagtgcagtgttaaaacttaagcctatcgctgttaaacccaaattcgcctaccttcttacaaaatactgttgctacaacggcgctttgcctcagggagcacctacttctccagtacttagtaatctcatatgccagcgactagactttcgactcactgagctgactcggtccgagcatcttagctatagtagatacgccgatgatttaactttctctagtgatcaaccgtttcagaacgggttcctgacccgcctggaggagattatccaagaggaaggattcctgattaatcccggcaaagtgagactgctaggcagagatgtgcggcaggaagttaccggtgtgactgtgaatgacaagactaacgtcagtaggaaatatatccgtaagatcagggctatgctgtacaactggactaacctcggctatgaaaaagcccaggacaggtttcttagtagctacaaaccaccagccaatgttgtcaagaacaaaaagtcagatcctcagctgtccaatgtggtcggcgggaaaatcgactacctgaagatggttcgcggagcagacgattcaatttacagacaatgtaaggaggcttttgagcaattacttaagggggagctgatttttcagatctctgagaaaatcctcagaacgcaaaccgtagagcaccagccacggcaagtggtgtccttcctgcgcaatttcaaagttattaaccagaccggattccgtgagctgttacatgaccctgatgtctccgattttgattttaagaccaacttggcgaaggtcaacgagcagatgcctgctctgagcgctgtcttgcccgcaagcctctacacgaaactggaatcctttgttgcagtgtacaacacagacggacaggcttaccacgaaaagtatggacttcttccgctgaagggccagaagaagacaaatccaaataatctcatcgacatcctgtctcgaaagaagaagaataaagtggtcgaggatatggtgctgacaacacgggttcaggccgaagacatattgcccgataataaggtaacccaggccgccaaggactttcggacacaaatccggatagggaacgactattttcacgactggatactaattaactcgctcaagcccattgtcaatgaactcaactctagggaactggtgtctatttcctatgaaccatccgaggaagaattcagcctgaactgtgagtttttcactgacactaaagaggtgtggaaagctattaggagcttgctgaaggacttagccgagaacccttattatgatgtgaaggacgagcgcattatattgcttcgcagcgccaccattaagcgcaatctgaatggtgagtcattctttgcgactattatctatctcaacctacaaaacgctttcatcgtgaatgaactgaaagcctttcagcagagccgtctgaccaaaaaccagcagaggctgcataaactagcagattggtccaccgtgtatcaggacgaaagtggtcagttatccgagcacttgtttctggcaagcccggaaacaagatcagataatcagctcaccgaaggtatcacccacaagctcacattctatcactcatga

SEQ ID NO: 7554 - RNA, 1998 nt, synthetic construct
  source 1..1998: mol_type = other RNA
atggcgcctatccagtctgatatcgtaactcttcagaattctctacagaaggctgaggacttccacgattttctctccgtcctcaatgacgcgctagagtttcccttctctcagaagaaactgtacttccacctgaaaaacgtcgacaagctgtatcatagcttccaggtgcctaaaaagtcaggtggcctccgtaccattaatgctccaaacaaatctctgaagttcatacagcattgcttggcgtttatcctgcaaggagcatatcagccaacatattccgtaaacggatacgtgacggggcggtctgtggtgagtaatgcacatgtgcatgcaaacaaaaagttcgtgctcaacttggatctcgagaacttctttccttcaattacatttgggagggtgcatgccgtgctgcagctaaaacccattctggccaagcctaatgtggcacagatgattgctaagttatgttgttacgagggcgttcttccccaaggcgcaccaacatctcccgtcctctcaaacatgatctgtcagcggctagacagaagaatagagtcgctcgtgtccggctaccagattacatacactcgctatgccgacgatttgactttctcctccgacaagcctttcgaaaatggattcttaagcaggctcgatgagatcatcaaggccgaaggatttaccataaacctcgaaaaggttcgactgcagttgaagaatagcaggcaagaggttaccggcttaaccgtcaatgagaaagtaaatgtcacccagcggttcatccgggaaatcagggctatgctgcataactgggggacgctgggctatgactctgcccaggccaagtttttaacccactactcccctaaggttagcaagaagaagaagagcgaaccccaattacgcaacgttgtggcagggaagatcaattaccttaaaatggtgcgaggaaacgaggataccgtttaccagcaatttaaagccgagcttacacggctcgaaaagggagaggagatcccacaaaaaaagccgaaactgccagtgtggcagccgtccatcgaccacaaccctcgtagggtggtacaatttctgagaaatttccgggtggtcaacgacacaggctttcgcgaactgctgcacgaccccgatgtgagtgatttcgacttcatggctaatcttgccaaagtcaacactcagatggacggtctgaagtccgtgctcacgccaaaacttcaccagaagctgtccgtgttcgtgaacgcttacaataccgccggcgttacctatttccaagaacacggtttgttgccgctgaaagggcgacccaaacagactgtgagcctgttagctcgcctactcctgaagaaggcaaaaatgcccgtcctggaacagcagactacagagcaggtagccgtggctcctgatcgcgccgtcagtaaagcagccaaggtgtttagagagcagatcagagtcggctcagattacttccaggatctgatcctggtaaacgctttgaagccaatagtggagacacttaatgctagcgacagtgtgaacgttagctttcaacctggtgaaaatgagtttgggataaactgcagtttttttaccgatacgtgggagagtgtcaagacactgaggtcagttttgaaagacttggcccagaacacagactaccaaactccaactaatcagaggaacatttggcttagatctgctgttattcagcgagaagcggagaaagaagcattttttgccaccgtcatttacattcacctggaaggcgggaagattgagtcagagaatgccttcaaacatatccgtctccttaaaacacagcagagactctgcagcctggccgattggtcggtcctgtatcaagacgcgaacagccagactcaagaattcttcttcctgaattcagatgccaaccgctcccatcaggcacccaattatgaaggaattacccacaaactgaccttttatcacagttga

SEQ ID NO: 7555 - RNA, 1497 nt, synthetic construct
  source 1..1497: mol_type = other RNA
atgtccgaggccgaaatgaaaaaaatttggtggtttcggaatcgcatgtacaatcagttcgtggtcacctcaaaacacggcaaagctcggaggatcaatgctcctgatctcaggttgaagatgctccaaagaagcattgcaaaactcctagatcagctgtatgccccccgtaatccagtgcacgggttcgtcaatgatcgatccgtgattaccaacgcatcctctcatctgcgatccaagttcatagtgaatttagacatcgagaacttcttcccaagtatcagcgaaaacagagtagagggcctcctccgagccataggaatcgacgataacgtgtctagcatcatcgctcgcatctgtacaagacagggggtgttgcctcaaggagccccgacaagccccgtgttatcaaacatgatatgtttcagacttgaccgcgaactgcttgccctgtccaaagcctcaagatgcatatacacacggtatgctgacgatattacattctcttcgtaccagaagcccgaactcctgtttggtgctggtgtacctcctactggccgcttttctcccgagctgctcgctacgaatctctcggcagcctttaccgacaacggctttactctgaacgcggataaaagtcagtatggtgacaagcatagcaggagaatcgtgacggggctaaaaataaacagtggcttgaacgtggaccgtaggtttgttcgaaatattcgcgccgcactgtactctgtggaagcaaggggccttgcagccgcgcaaaagaaatttaaggatcggcacaacggcaccactgaccttgagctgcacctgaaagggaaaatctcttggttaggctccgtgaaaggacagttcgaccctgtcttcagggcgattgcgtctcgcttcaacgcggcttttccggcacacatgataaagatcaacccaagtccagaggatatcagatcacgggctgtctgggttttggagcattttcatggtgatttcgcccaaggcactgccttctttctgaagggggtgggactggtcactgccgcccattgcgtctcagacgctcttggggaggagattgatgtgcaccaccacagcaagcctagcaatacatttaaggttaaggttaagcagcatcacgtgatccgggatctggcaatccttgaacataccattccatccaatgaatattacgagctcgagctgacaaagcaggctttgaatatcggtgattccgtcagggccattggttacccaggctatgcccccggcgacggactgaatattcgtccgggacagatcagcagcttcagtgtgaagagtaccgttcctctagtcgaggtcacccagaagctgacccagggcatgtcagggggacccattattgacgaccagaacggggtaatcggcattatccacaagggagggccccatgagggacgggactttgccgtgaacgtagaagctttggttgcatggctggacgaatga

SEQ ID NO: 7556 - RNA, 1593 nt, synthetic construct
  source 1..1593: mol_type = other RNA
atgccaaagccgttcattatgttcgggtcgttgaacctccgcactagcatacctcctgagttggcggactattctacatttttaggttacctctgcctgtctcaggctgagcttaagaagatttggtggtttcgtaagaagatgtacaaggacttcaaaattacatccaagtacgggaagacacgtaggattaatgcaccagatagaagattaaagatgctacagcggaacattagcccactcctcgataaactgtatagcccccggaacccagtgcatggatttattcatgagcgaagtgtgatgactaatgcgagctcccacctttccaacaaattcgtcgttaaactggacatcgaaaatttctttcccagcatctcagagaatcgtgtcgcaggcctgcttcacgccctaggggtggatgagtcagtgtccgccataattgctcgcctgtgcaccaatcggggagttctccctcagggagcccccacatcacctgtcttgagtaatatgatttgtttccgcttggataaagaactgctcaaactggcgaagaccgctaggtgtatctatacccgatatgcagacgatgtgactttctcttcataccaaaagccggaactgctgtttgaagtaggcgcccctcaacccgggagattttcacccgagcttctggccagcaacatctctgccgcctttaccaataacgggttcaaactcaacgcaaataagtcccagtatgcagataagaacagtcgccgcgtcgtaaccggcttaaaaatcaattccggcctgaacgttgaccgcagattcgtgcggaacatcaggtcagcactctattcagtcgaaacacttggcttgagcgcggctcagaagaaatttgctgatcaatacggagggaagtgcgatctgacacagcacttgaaaggaaaaataagttggctgggttctgtgaaaggccattccgacccagtatttagagccactgtgctgaggttcaattccagctttccatctcagcccatcaaaatgaaccccagttctgacgaaatcagaaatcgaggcgtctgggtgctggagcacttccacggagactttgctcagggcacggccttcttcatgaagggcgtcggtctggtgacagcagcccattgtgttgccgatgctattggcgaagagatcgacgtgcaccatcacaccaaaccgagcaattctttcaaggttaaggtgaagcggcaccattttatcaaagacctggctatcctggagcacgccataccttccaacgaatactacgagctcgagctaaccgaccaagatctccaagtgggagacactgtgaccgccgtaggctaccccgcattcgctcctggggatggtcttaacgttaggtccggacagattagcagttttagtgtgaagtcgacggtgcctttagtcgaggtgactcagaaacttacgcagggcatgagcggaggtccaatcctggatgagaaaaatcgggtaatcgggataatccacaaggggggtcccaacgaaggcagggacttcgccgtccatgttaaggctttgatggaatggctgcaggagtga

SEQ ID NO: 7557 - RNA, 1377 nt, synthetic construct
  source 1..1377: mol_type = other RNA
atgctccagcgtgctctggtaccactgctcggcgaaatatactctcctcgcaaaccagttcatggtttcgtgcgggatagatccgtcattactaatgcagcgtcccacttaaagagcaagtttgtgattaaccttgatatcgaacggttttttcctagtattagcgagaatagggtgataggactgttgaaagctctcggcgtggacgaggacgtttcttcaataatcgccaggctgtgtagtaaccagggaactcttccccaaggcgctccaacaagtcccgtcttgtctaacatgatttgctttcggcttgacaaggagatgcaggttatcgctaaggcagcacattgtatctacacgcggtacgcagatgacattactttctcctcctatcagcctctgagcgccctatttgccgctggtgtcccgtcaacgggcaacttcgcccctgatctgctggctcctcagcttctcgctgcatttatcaataacggcttcaaggtacatcctgataagacccactatggggatcgccactccaggcgaatagtgaccggactgaaagtgaactcaggcttgaatgtggaccggcgattcgtgcgaaacgtgagatcaaccctcttcagtatagaaactacagggttagccgcggcccagaaaaaatttgacgatcactatggcgggaggagggacattgcccgcttccttagagggcgcatctcgtggatcggcaatgtcaaagggcagtctgatcccgtttatcgctctattgccacgcgttttaatgcgtccttcccaatgcagccaattatggttctgccgaccaggaccgagatcagaagacgcgctgtctggattctggagcacgcacacggagagtgggcccaaggctctgccttcttcctgaaagatgtgggattagtgaccgcggctcattgcgtccaggatgcaattggcaaggaaatcgacgtctaccaccccacaaagccagccaacatctttaaggtgaaagtcaagaagcaccataaaatcagagacttggcccttctggagcatagtatccccagcaatgagttttacgaactggagatgaccaacacaacatacgtgatcggcgacgttctcactgcagctgggtatcctgggttcgcccccggagatgggctcaatgagcggctcggtcacatcagcagcttcagcgtgaagtcaggtgtacccttgatcgaagtgactcaaaaactaacacaaggaatgtccggtggacccgtcttcgatgacaacgacctggtagccggtgtgattcataagggagggccagacgaaggccgtgactttgcagtgcacattgacgccctgaccgcctggctggatgaatga

SEQ ID NO: 7558 - RNA, 1596 nt, synthetic construct
  source 1..1596: mol_type = other RNA
atgccccatccactgagagtatttggcggggtgtcatttcgcgtccgcatccccagcgagatgacagacctgactacctttcttgaccacctgtgtctgtctgaggctgagctccggaagatctggtggttccgagggcgcatgtataaggatttccctctgctaagcaagtcaggcaaaccacgcataataagtgcgccagatcggcgtctgaagatgctacaacggacaattgcgcctttacttgaccagatctattccccaagaaaccccgttcacggattcgttcccgataggtcggtgaggaccaatgccacatctcatctcaaatccaagttcgtggtcaatctcgacgtagagaggtttttcccgagtatttccgagaaccgagtggctggcttgctcaaggccgtcggcatcgacgagagtgtggccgttgtcgtggcccggctgtgcacaaatcagggagtactgccgcagggtgcccccacttctcctgtgcttagcaacatggtctgttttaagctggacaaggagctgcaggccatcgctaaagcagctcattgcatttacaccagatacgcagacgacgtgaccttttcttcatatcagcctcctggcgggctgttcgctgaaggtgtgcctcccacgggcaatttcgtcccagacctgttatctccgcgactcatcggtgccttcacaaataacggcttcaagctcaacccaagcaaatcacactatggagacaagcatagcaggagaattgtgaccggactgaaaatcaacagcgggttaaatgttgatcgccgctttgtgaggaatatccggtcaaccttgtactctatagaaactttgggcgccgatactgcacagaagaagtttgaggtcgaatacggcggtaaatgtcgcctctcccaacacctgaaaggggagatttcttggctgggtagtgtgaaggggcagagcgatcccatcttccgtgccatcgcagcccgatttaactcctccttcccaacccagccaataaaagtgtcaccgactcgggcgcaaatcaggtccagggctgtgtgggtgatagagcactttgaaggaaagtttgcacagggaagcgcctttttcctgaaggatgttgggctcgtaacggctgcacactgcattgaggaggcccttggacaggaaatcgacgtctaccatccctccaagcctagtaacgtgttcaaggcccgtgtcaaacagcaccatacagtccgggacctggcgattctcgatcatgaaatccccgcacacgaattcttcgagttggaaatggcgaccagagcaccctctctgggggatgctttgacggcagtgggttaccctggatatgggcctggagacagtcttaatgtgagatcaggccatattagctcgtttgccgtaaaaagcgctgtgccactaattgaagttacacagaaattgacccaaggcatgtccggcggccctgttttggatgacgaggatagagttgccggggtgatccacaaagggggccccgaagaaggtagggacttcgctgtccacattgatgctctgactgcctggcttgatggaagatga

SEQ ID NO: 7559 - RNA, 1623 nt, synthetic construct
  source 1..1623: mol_type = other RNA
atgccaactccccgtagcatgtttgggggaaatctaacacgctccagagtgcctctcgaactgacctccattgatgagctgctccgacacttgtgtgtgagcgaagctgaattacagaagatatggtggtaccggtctagaatgtatagcgagttcaacatcagcaagaaggccggcaaatcaaggcttatttccgcgcccgatcggaggttgaaaatgattcagcgtgcactcgcacagctgctcgacgggatgtatcagaggcggaatgccgttcatggctttgtcgccgacagaagcgtgatgacgaatgctaggtcccacatgcgctccaaatttgtgttaaacctggacatcgagaacttcttccccacaatttctgagaatagagtggtcggggttctgaaggccctcggggtgattgaggacgtggcacgaatcgtggcgcgcctctgttgcaataacggggtgttgccccagggagcacctacctctccagtgctgtccaacatgatctgttttcggctggataaggacttacacggcgtggccaaggcatcccattgcatctacacccgatatgcggacgacattactctctcaagctaccagccgccagtggctctatttgcaggaggggtgccaccaaccggtaatttcagcacagaactgctggctcctgtcctggtggaagcattcgctcacaacggtttcaagctgaacgcccataaagcccactatggtgatcgcaactccaggcgcattgttaccggcctgaagatcaacgagggcctcaacgtagaccgccgttttattagaaatgttaggtctgctctctacagcatcgagacattgggcatcgaaactgcccaagccaaatttaaatccgagtacggaggcaagtgcggcgtcgcgaatcatttgcggggtaagatatcttggatcaagtcggtaaaaggccagagtgaccctgtattccgcggcatagcagcccggtttaataagctgtttcctgccgagcccatcaaagtacagccaactcggactgaaatgagagacagggccgtctgggtgcttgagcatactcatggagattgggcccaagggagtgcattttttctagagggagtgggtctggtgaccgccgcacattgcatccaagatgctgtcggccaggaaatcgatctgtatcacccaagtaggcctagcaacatcttcaaggttaaggttcgagcccaccacgctgtgcgagatcttgcactgctggaccactctataccctcaacagaatacttcgaactgcaactctcggcccggacgcatgctgtcggtgactatctgatagccgtcgggtaccctgggttcgctgctggagataacattaatgtaagatcaggccagatcagcagtttcagtgttaaatctaccgttccgttaattgaggtcacgcagaaacttacacagggaatgtcaggagggcccgtgctggacatcgatggtagagtcgctggggtgattcacaaaggaggacccgatgagggcagggacttcgcggtcaataccgatgccttgatggcttggcttagtgagcttgttacagccgtaggcgccccggtgtcatga

SEQ ID NO: 7560 - RNA, 1458 nt, synthetic construct
  source 1..1458: mol_type = other RNA
atgtattccgacttcgagattgccaaacctagcggaaagtccagggtgatcaacgcacctgacgacaggctgaagatgttgcagcgctacatagcaaacctgctggatcagatttacaagccacggaacccagtccacgggttcgttttggatagaagtgtgcgcactaatgcatcttctcacctgcgaagcaaattcgtggtcaatttagatattgagaacttctttgggtctatcagcgagaatagagtgattggcttattgaaggctcttggcgtggatgaaggcgccgccgaaatcgttgcccggatctgctgcaacaaaggtcatctaccgcagggagcgcctagtagtcccgtcctctccaatatgatttgttttcgtctcgataaggaccttcagcagattgcaaagaaggtgtattgtatttacacacgatatgccgatgacatcacattttcttcctaccagcccttgtccagtcttttcgaggccgccgtcccacctgcgggtaatttcgattttgacatgctcgtgccagaactgaagcagtcttttctcaacaatggatttaaggtaaacgcttccaaagtgcactacgcggacagaaacagccggcggattgtgaccggcctaaaaataaatgagggactcaacgtggatcgcaggttcatccgcgacatccgcagcgcattgttcagcgtcgagaaggacggtctggttgttgctcagcaaaagtacgctgagaaatatgggggaacgtgctctatcgacctgtatctgaaaggcaagattagttggattggctcagttaaaggaagatcagacccggtgtttcggggcctggcatcaagattcaacctatccttctcattcaatagggtaaagctgctggccacccaagccgagatcagagaacgtgccgtgtgggttctggagcactgggaggggaattgtgcccaaggatccgctttctttctggaagacgtcggcctggtcactgcttggcactgtgtggccgaagctgccaacaagggggaaatcgatgtgtatcaccccaccaagcgatcaaacatatttaaagtgaaagtcgctagccattgcgcagtaagggatctcgccatccttgagcattcaatccccgataatgagttttatgaactccaggctagcactcacgtggtcgggatcggtgattcggtcaccgcaataggttacccctcgtacgggcctggcgacggaataaatgtgaggtccgggcaggtgtctgctctgcctgtgaaaagcgccgttcagttagttgaagtaacacaaaagctcagccaggggatgagtggaggccccgtccttgatgacgaagacaaagtggccggcgtgatccataagggcggcccacatgaggcacgggactttgcagtatctatcaaggcgctgattgatcttgccgctggtaaatga

SEQ ID NO: 7561 - RNA, 1467 nt, synthetic construct
  source 1..1467: mol_type = other RNA
atgtacaacgatttcgaagtggccaagcccagtggtaagaagcgggtgattaatgcccctgatgaaaggcttaagatgttgcaacggtacatcgcggagctcctagatcatatttaccggccccgagatccggtgcatggctttgtcttcgacaggtcagtgagaactaacgcaagctctcatctccgctctaaatttagcctgaacctggatattgagaacttcttcggctccattagtgagaatcgtatcatagggctcctgaaagctcttggcattgaggatgacgccgcagaaatcgtagctcgaatttgttgcaacaaaggtcagctcccacagggagctccgtcctcacctgtgctgtccaacatgatctgtttccgcttggacaaggagctccagaggatagccaagaaaacgcactgcatctacacaagatatgcagacgacattacgtttagctcctatcagcccctgtctggcttattcgacggcgtgcctcctcccgctggtaacttcgacgttgaactgttgacagccgaattaaagcaaagcttcgctaataacggatttaaagtcaatgctgccaaagtccactacgcagatagaaatagccgcaggatcgtaaccggtttgaagatcaacgaagggttgaatctcgacaggcgctttatacgtgatgtacgatccgcgctttattcagtggaaaaagacggtctagctgcagcacagaagaaatttgaggacgcttatgggggcaagtgtcctattgacttttatctcaaaggaaagattgcttggatcgggtctgttaaaggcagatccgacccagtgtttcgcggactggcgagtagattcaatgcatcctttctgaagaaccgcatcaagctgcaggctactcctagtgagatacgggagagagcagtatgggtcctcgaatactgggaggacaatggggatggcgcccaaggaaccgccttcttcctgaaagacgtgggcctagttacagcatggcactgcgttgcgaaggccgagactgtcgggcttgacatcgatgtctaccatccaaccaaacggagcaacgtgttcaaggtgaaagtggttaagcactgcgccgttagggatctggccatcttagagcactctattccagataatgagttttacgagctggaaccatcaactagaaattcggtcatcggggacggagtgaccgccatcggatatccgagcttcggacccggcgatggcatcaatatacggtctggccagattagcgcacttaccatgaagagtgctgtcccatatatagaggtgacacagaagctggcccaagggatgtcaggagggcccgtcaccgatattgaccacaaggttgtgggcgtgatccataaagggggtccccaggaagccagggattttgccgtggacgtaaaggccctgatgaacctggccgtgggaaaatga

SEQ ID NO: 7562 - RNA, 1539 nt, synthetic construct
  source 1..1539: mol_type = other RNA
atgacaagcgaggccgccttgttggattatctcggggtgacaagcgccgagctcaagaaaatctggtggttcagagggcgaatgtaccagacatttgaaatcgctaaggcagtaggcaagtcaagaataatctcggcccctgaccgccgtctgaaaatgcttcaaagaaatatcgccaccctcctcgacgccatttacaaaccacgccaccccgtgcacggatttgtccctgataggagcgtgttaaccaacgcgtctagtcacctccggtcaaaattcgtggtcaatctggacatcgaaggctttttttctgctatctccgagaacagggtcgctgggctgctgaaagctcttggagtgcagtctcgggctgccgacatagtagcacgcatttgttgcaatcgtgggtgtctgccacaaggcgcaccctcctcaccggttattagtaacatgatttgtttcggaatggataaggaattgcagcggtttgctaagaccgcacattgcatttacacaaggtacgccgacgatattagcttctctagctaccagccccttactgccctgttcgacggggccgtccctagttctgggaattttgatcacgacactctggcgcctagactaagagcagccttcgtgaacaatggtttcaccataaacaaggccaaggcacattatgcggacaagcatagtcggcggatcgtcactggtctgaaaattaacgagggactaaatgtcgatcgaagattcatcagggatgtgcgctcaaccctgtattccatcgattctctcggactggccgatgcacagaagaaattcgaagataagtacggcggcacctgtgatctttccagctttttaaaaggcaagatttcctggattggaagtgtgaaagggcggtccgatccagttttcagaagtcttgccggccattttaatgtcaagtttcccacccgcgccttcaagttgcaacctactagggacgaagtgcgtaagcgagctgtgtgggttatagagcacttcgagggagagtttgcacaggggtccgccttttttctaaagggcgtgggtctggtgacggcatcccattgcgttgctgaagcggcggcagcaggtgctgagatcgacgtttatcacccgacaaagccatcaaacatcttcaaagccactgtaaaacagcactgcgagatccgagacttggctatcctggaccacaatattcccgaaaacgaattttatgagctcgaggtgtcaggcgagaagttcgcagtcggtgatccactgacggccctgggctaccctaaattcgcccccggcgacggcatgaacatcaggagcgggaacatatccgccttcagcgtgaagtcttcggtccccttaatcgaggtgacacagatgctgactcaggggatgtctggtggcccagtgatagatcgccatgacaagctggctggaattattcacaaaggaggcccggaagaaggaagggactttgctgttcatgtaaaagctctgatggactggctcaccagctga

SEQ ID NO: 7563 - RNA, 1497 nt, synthetic construct
  source 1..1497: mol_type = other RNA
atgtcaaaatccgagcttaagaagatctggttctatcgcgagagaatgtaccacaatttcaatgtttcaggggctaaagaaaccaagagactgatatccgcccctgaccaccgcctgaaaatgcttcagcgcaaaattgccgcatctctagatacgctgtactgtccaagaaagtctgtgcacggctttgtcaggcatcgctctgtgaaaacaaacgcagccagtcatctgagcgccaagtatctgctcaacttagatcttagcgatttcttcggatcaatttccgagaaccgagtgaatggcctcttcgtcagcttgggcatagataaagaggtcgctctcatcttggcccggttgagctgctacaaaaaccacctgcctcaaggagcgccgacttctcctgtcatttcgaacatgatttgctttaggctcgacaaggaactgttgagtattgcaaagcagaataggtgtatctatactaggtacgctgacgacatcactttcagtagctataaacctctcaccgtcctcttcgacggagttacaccaaatacaggcaagtgcgacatcaaattactgggtggccgtctgcttaccacatttcagaacaatgggttaatcatcaaccctgagaagatgtattacgccgataaatccgctaggcaaacagtgaccggcttacgggtgaacgagctcgtaaatgtcgatcggaagtacgtgcgaaacgtgcggagcgcccttcacgtggtggaaaagagcggtgtgctggaagcccagagagttctcaaggataagtacctgcgcaattcaaccatagaggctcatctgcagggaaaaattgcttggctggggcacgtaaaagggaggagtgaccccgtgttcagaaagttggccgctaaatacaacaacttgttccccaagaaggcaatcaaactagaacccaccaaggaggaggtgcgtaatagagcggtgtggatcgttgaatactcagatcatgagaattactcacagggatctgctttttttctcaaaggcgtcgggctggtgacagcctggcattgcgtgaatggtcacgaaagttatgacctgtaccatccgagtaagccctccaataagtttactgtgacggtgtctcgatcttgtaaatcccgggatcttgcactgctcaaccacaatattccattcaccgagttctatgagcttagcctaccagacagaacctttcacgtgggcgaaagcctgtatgcagccgggtatcccggctttggtccaggagacaaactgaacgttcgcttgggggccatctcttcctttcccattaagtttggtattcagatggtcgaggtcactcaaaagctaccatcgggcatgagcggtggcccgctggtagactccgctaaccgggttgccggaatcatacataagggaggggaagatgaacctagggacttcgcggttcacatcgatgtactgaaggcatgggtatccctgccctga

SEQ ID NO: 7564 - RNA, 1491 nt, synthetic construct
  source 1..1491: mol_type = other RNA
atgagcccagatgagctcaacaagattcggtggtttcggggcaggatgtatcggaagttcgatattagcaaggggaaaagcaaaaagcggactattaattcccccaactatagattgaagatgttgcagaagaagatcagtattcagcttgctaagatttataagccacgtaacagtgtacacggttttgtctcccaccgatccgtcaagacgaatgcccagagccacataaaacagaagtacatcctgaacatcgacattaaagacttcttcccctctatcactgagtctcgcgtccgtgggcttcttgaggcgataggcctagacgaaaatgtgtcagctgccattacctggatctgttgtaacgacggctgcttgccccaaggcgcaccttcatcaccactgatttccaacatgatatgctttcggctcgataaaaatttacaggccttcgccaaaaggacgcgctgcatttatacaaggtacgctgatgatataacctttagtagccaccagcctctgtcactactgttcgcagagtccgtgcctagagccggacatttcccagtcatccagctgtctgaaggcctgaggaatctgtttacttccaacggatttaccctaaacgacaataaagcccattatgccgataagcattctaggagaacagtaactggaatcagggtgaacgaggtactcaatatcgaccgcaaattcattaggaatgttcgcgcggccctctacaaaatcgaaacaatcgggttgaaggacgcccagaaggagctgatgagccgattcagttccaacgcctcaattgaagactacttgcgaggcaaaattgcttggctcgggcatatcaagggggtgtccgaccctatctttagaggtctggctgctaggttcaatcgctcttttgcaaaaagtgccatcaaaatacagccgacccaagccgaaatgcgcgatagagcagtgtgggtcatagagcatttcgatggcgagatgtgtcaagggagcgcctttttccttgaaagtgtgggactggtgaccgcagctcattgcgtggaaggcagcacagagatcgaactttaccaccctagcaagccatctaacaaattttcgggtaagatcaagtctatttgttcccacagagatttagcaatcattgagcacaacatcccgagcgttgaatacttcgagctgagacggtcactgaaggacgcacagataggcgaagagttaatcgcagccggataccccggctttggacctggggataaactgaatattcgtcccggtaccgtgtcttcacgacccgtgaagtccgcggtgaactacatcgaggtgacacagaagctcgctcaaggaatgtcggggggtccactgctcgacactgataacaatgttagtggagtcatccacaaaggcggggctctggagaatcgggacttcgcggttcacatcggcgaactgtatctgtggctcggaatttga

SEQ ID NO: 7565 - RNA, 1599 nt, synthetic construct
  source 1..1599: mol_type = other RNA
atgcccagcttcgcgtcctttttcgttactccagtgcgagtgagtgtacccaatgaacttacttcagaggctgagcttttgaaatttttagctctgtctaccgccgaactgaagaaaatttggtggttccgcggtcggatgtatcaaaagttcgaaatctcaaagggtgagggcaagaaacgggttattagcgccccagaccatcgcctcaaaatgctgcagacaaaaatcgcttcatctctcacgcccatctgccggccgagaaacccagtgcacggctttgtggatggcagaagcgtcaagacaaacgctacagcccacagaaggtccaagttcgtgatgaatctcgacatcgaagggttcttttctgccatcacagagggacgcgtgtcaggcctcatgtccgcattgggcattgattctcgtgtggcagagattctggctcgaatatgctgtaacgagggcgttttgccacagggtgctcctagtagccctatcatctccaacatgatatgtttcaggatggataaggagctgcaaaccatagccaaagagtctcgctgcatttacacccggtatgccgacgatatcacattctcttcctaccagcctctgactttgctttttgaaggacccactccccctgctgggaagttttccccagaactgctcaaagacagactgcggggcgcattcaggagtaacggcttcgctattaatccacagaaggtccattatgccgataaatattcacgtaggactgtcacaggccttaagatcaatgaactggtaaatgtcgaccggaaatttgtgcggaacattagggcggcactgtttgtcaccgagaaacagggagccaccagtgcccagaaaatcctgaaagacaagtacgggagagaggctgcactggcgagtcacctccgaggacgcatcagctgggtgggacacattaaggggcctagcgaccctatctttagaggactagcactcaggtacaacaagcttttcccatcggaaaaattggagatcctaccgactatctttgagattcgtgagagagccgtctgggtagttgaacattggggcgatacaaccacagagggatctgtccaggggacagcctttttcttaaagagtgtgggtttagtgaccgcatcccactgtgtagaaggcgctaccgagatagagatttaccatccaagcaaacccagcaataagttcaaggtgaccgtggcgaaaaacgacactcaccgcgacctcgctgtgctaacccacgagattcctgccactgagtactatgaatttgatatatccaagcgaacactgaaggtgggggacatcaccacggcgctcggattcccttcgttcggcgcaggggataagataaatgtcaggagcgggcctattacgtcccttcccaccaagtcagcagtgccgatgattgaagttacgcaaaagctgtcacaggggatgagcggtgggcccttgctggatgaagacggcgccgttgccggcatcaatcacaaaggaggacccggtgaggccagggactttgccgtgcatgtcaaggcactgactgattggctgtctggtgcctga

SEQ ID NO: 7566 - RNA, 1596 nt, synthetic construct
  source 1..1596: mol_type = other RNA
atgaccaaccctttcgccttcctcgatatcgcctacaggattgatctgccagacgagctgaaggatgaggagcgcctgcttctccatctaggggtgagccaggcagagcttaagaaaatttggtggtaccgctctcgaatgtaccaccactttgacgtggccaaaggcaaaagaaaaaagaggattatcagtgccccagaccccaggttaaagatgctgcagagaaccattgcggcctctctgaatgtcgtttataaaccgcggcgtcctgttcatggattcgtgatcgaccggagcgtcaagtccaatgctctcagtcacttgaattccaagttcgtgttgaacctggatctcaaggacttctttccatccattacggagaaccgggtgtcagggctcctcaatgccctgggcattgacgctcgagtgtctgaaatcatcgcccgtatctgctgtgacaagagccagctccctcaaggggcgccatcatcacccgtaatttcgaatatgatttgcttcaaactggataaagagcttcaggtcattgccaaagcggccaggtgcatctatactcgatacgctgacgacatcaccttcagcagctatcaacctctgacactgctatttgaaggtgtcgcaccccccgcgggtaacatttcccccgaactcttgagcaaacagttacgcgaggcattccagaacaatggattcacaataaactctgagaaggcccactacgccgatagacactcacggcgaacagtgaccggactcaaagtcaacgaaatcctgaacgtggacaggaagtacgtcagaaatgtgcgggctgccctttataccgtcgagaaagccggcgtcgaagcagctcaaaagcgcctggaggaaaaatataacaaaagaagctccatcgctagtcacttgcgcggccgcatcgcctggatcggaaatattaaaggctggaatgaccctacttttaggagcattgcactcaggtttaacaactgttttcccaaggatcagttgaagattgaaccggatcgtgaagaaatcataaatagatctgtgtggctggtagagcattcattaggttccgtcaagaagatggctcaggggacggcgttctttctgaaaggggtgggcctggtaactgctgcacattgtgtacagaacggaaaggggatcgtggtttaccatccttccaagccatctaataagttcccggttaatgtggctaactcatgcaagtatcgggatttggctatcttatcccacagcatatctgaccaagagttctatgagctgaatgcctctgagagaagttttaaagctaaggataaccttacagcatacggctaccctggttttggccccggagacaaactgaacgtgaggccaggctacgtgaatagcctgccagttaaatcgagtatacagctgatcgaggtaagtcagaagcttgcccaggggatgtccggcggtcccatactggatgatgacggtcatgtggcaggagttatacacaaggggggacctgaagaagcacgggactttggcgtgcacatcgaggttcttatgaagtggctaaaggaattgtga

SEQ ID NO: 7567 - RNA, 1614 nt, synthetic construct
  source 1..1614: mol_type = other RNA
atgactaatggctggcttggttttggcataccaacatctatacacctccctatccctccagaacttagttccaaaactgccctgctcagctacctcggggtatcccccgccgagatgaagaagatttggtaccatagggaaaagatgtatcattgctttgacgttgcaaaaaaatctggaaagccgcgcctcatcaacgctccagataggcgcttgaagtttctgcaacgcaggatcgccaatctgttggaccagttgtatagagttcgtaaccctgtgcacggatacgtccagggcaagagcgtcaagtcaaacgctacctcacatctgaagcagagattcatcctcaatctcgacatacgcgatttctttgggtcaatcagcgagaggcgggtgttcggcgtgcttcacgccatcggcgtaccacgggatgctgctgaaacggtggcccgcatttgttgttattctggacatcttcctcaaggaggtcccgctagcccagtgctgagtaacatggtttgttttagactggaccgagcactactgaagctcgcgaaagacagtaagtgcatctacactcggtatgcagacgacatttctctctcatcgcttcggccgttgactgccttattcgatggaaccttacccaccaccggccgggtcgatcctgaactgctgtccgccgcgctgcaagctgcatttacatccaatggttttgcattgaaccccgagaagatccattacgctgatcgacattccaggcgagtcgtgacaggcctgaaagtcaatgaaggcctgaatgtggataggagattcgttcgaaatatccgcgcagccctgtatgaagtggagaaagacgctgtagcagcacaggcccgctacgctgccgatttcggcggtaaggcagatatctcgagccatcttaaaggcaagatcgcctggctgggtaacgtgaagggattagccgatcccgtgtatcgggctctggcgctgagatttaataccgctttcccgaaaagggccattaaagtgcagccaacccggcacgagagactagaccgttcagtgtgggtaattgagcaccacctgaatgacatagagaagtatgcccagggctcagttttctttctggctggggttgggctggtgacagcagcccactgcgtcgctggagtgaaagacgctattgtgcaccatcctagcaggcccagtaacaaatttaaagtcagtgtggcccactactctaagcacagagacttagcgatcctgacacactccattcccgccacagatttttacgagctaagcaaaagtgccgccgcagcagttacgggcgatcctattgtggccatcggctaccctgacttctctccagcggataaggtcaactttagagagggaactgtctccagcaccaccgtcaaaagcctcattaacctcttggaggttaacttcaagttcattcaggggatgtccgggggtcccgtcatcaactctaacgacgaggtggtaggaatcgtgcacaagggggggcccaaagaaaagcgtgacttcgccattgtgatagaagagttcgactcttggaatgccgcggggctaccatccgattactga

SEQ ID NO: 7568 - RNA, 1188 nt, synthetic construct
  source 1..1188: mol_type = other RNA
atgcccaacggctggcaaagattcggcattcccgcgcctgtgcacgtgccaattccgcctgaactggtcagtaaggccgccctgctcgtgcacctgtcagtgagccctgccgaactgaagaaaatttggtaccatcgggagaagatgtacgaaaattttgacgtcgccaaaaagtccgggaaacctcggcccataaatgcgcccgacaggcgtcttaagtttcttcagcgccagattgctgagctgttggacaccctctacccagtacggaaacctgtacacgggtacgtgagcggcaagagtgtaaaatccaacgctaccagtcatctaaaacagaggtttatactgaatctggacatcaaggacttcttcgggtccattactgagaggagggtgtcgggtattctgaatgctatcggcgtcccttcagacgttgcagaaacggttgcccgaatatgctgttatggcggacacctgccacaaggcggtccagcttcccccgtgctgagcaatatggtctgttttagattggaccgtgccttgctgaaattagcaaaagacgcaaaatgcatctacaccaggtacgctgatgacatctctttgtcctcactgcgaccactcgcacccctgttcgacggtgcactccctcccacaggacaggtggctcccgagttactgtctgatgctttgcaggccgttttcgcaaacaacggattcactcttaatccagataagatccactatgctgacaaacactctcgccgggttgtaaccggccttaaggtgaacgagggcctgaacgtggataggagattcgttagaaacgtgcgggccgcgctatatgctgtggaaaaggatgtcgccgccgcgcaaactagatacgccgcagatttcgggggaaaggcagatgttggtacacacctaaagggcaagatcgcctggcttgggaacgtgaagggacttgcggaccccgtgtatcgggctctcgccttacgctttaataccgcctttccgaagcagtctatcaaagtgcagccgacacgccatgagcgcctcaacagaagcgtctgggtcgatctcctgcctattaatcatgctatcgggaaactcgcccgccagatggagacaagcgatgcagcccgaccaatctataggggatcagatcattggagagcagctcgtgcctga

SEQ ID NO: 7569 - RNA, 1608 nt, synthetic construct
  source 1..1608: mol_type = other RNA
atgccttccgtgtggtccatgtttggaactgcagtgcagattcctctgcccccagagttcggcgacgaaggtactctccttgcatatctggggctgtcacaggctgaactgaagaagatctggtatcacagagagaaaatgtacaagaatttcaatgtcgctaagaagagcggtaaaccacgaccaatcaattctcccgatcgccgcctcaaattcctgcagaggcagatcgccacaaaattggacatgatttatccacggaggaatcctgtacatggctatgtcaaggaacggagtgtaaaaagcaacgccgctgcacatcaaaaccagcgcttcgttctgaacctggatatcaaggacttttttcttacgatcaccgaggggcgcattgtgggggtgctgacagccataggggttcccgatagagtatcagcgatcattgcccgtatatgctgctatggcgggcgattaccacagggagggccagcatctcctgtgttgagcaatatgatctgttttcggctggatcgagccctcttgaaagtcgctaaggagggccggtgcatttacacccgctacgctgatgatatcagcctgtcaggattgaggccactatcacccttatttgaaaacggcctacccccctctggaccgatcagtcccgagctgctgagttcggcactacaaagcgcttttgccaacaatgggtttgttctcaaccctgagaaaattcactacgcagacaagtttagtaggcgggtggtgaccggagtgaaggtgaacgaagggcttaacgtcgataggagattcgtgcgaaatattcgggccgccctcttcgaggtggagaaggaccaccttgccgcgcaggcaagatacctttccaaatttggcggatcgaccaccatctccgctcacctcaaaggcaagatcgcatggctgggttttattaaaggctccgctgatcctgtgtaccggtcactggccctgagatttaacaagagcttccaatctcaggccattacagttcaggcgactagggaggagcagatcgacaggtccgtctgggttatcgagcacggctctgtgttagatgacacctaccgtcaagggtctgtatttttcctggacggtgtgggactggtcactgccgctcattgtgttgccggggtgaaagaagcaacagtccaccatcctagcagaccttccaataagttcaaggtgcaggtattgcattatagcaaacaccgcgatctggcgatcttgtctcacgccataccacctaccgacttcttccaatttgccaagtcccttataccggctgccgcaggtgacgccgttacagctttcggatacccggacttcaatcctgcggataaaatcaatatacgttctggcactgtctccagcacaacggtcaagagcctgattccgcttgttgaagtgaacttcaagctctcacagggaatgagtggcggtcccctcatcaacagttcagacgctgtggtcggcatcattcataagggaggccccgagatgcccagagacttcgccattgtgatttccgaactcgacaaatggatagccgcaggctgtccagacgatttctga

SEQ ID NO: 7570 - RNA, 1587 nt, synthetic construct
  source 1..1587: mol_type = other RNA
atgccatcacccgcaatgatgtttggaccgccacctagagttaccatcccaccagccttggaaacggaggccgccctcctagctcacctagggttatcaagtgcggaattgaagcgaatctggtggttcaggcatcgtatgtatagggactttaacatagccaaaggcgccggcaagctgcgtatcattacagctccccaagaccgcctgaaacatcttcagaggcgaatcgctgacctgttgacccctatgtacagggtgcggcaccccgtacacggatttgtggcagataagagtgtgaagactaacgcccgaagtcatgtgaagtctaaattcgtcctcaacctcgacatacgcgacttctttggggccattactgagaatcgcgttgagggcctgttccggtcgttaggcattgacagaagagtggcagagatcttggcccggctttgttgcaatcaaaaccggcttccgcagggagccccttctagtcctgtaatttccaacatggtctgcttccgcctggacaaagaactgctggcggtcgccaaagctacccgctgtatctacactcggtatgccgacgatatatctttctcctcctacaggcctctctcgggactgtttgaagcagcccttccccccacagggaatgtctcccctgatctcctgagcactgacttgagaagcgccttcgagacaaacggattcgctatcaacccagagaaagcgcattatgccgatcggcactcaaggagaattattaccggggtgcggatcaacgagggcttgaatctcgataggcggtttatacgaaatctgaggtccggcctgtatagcatcgaaaaactgggcgagacagctgccgaagcaaaatatcatgcaaaacacggaggtacagcctcccttgagagccacctccgcggcaagctgtcttggttaagcgacatcaaaggggcatctgacccggttttccgcaatctggctaaaagatttaacctactgttccccaaggctcccatcggtattgagccaaccccagcggaggttagagatagagctgtctgggtcattgaacactcaggccctaagggccgtcagggtacagccttttttcttaaggattacggcctggtgactgcggcacattgcgtgtccgaagcctctgagcccataattgtctaccatccatctcgattatcaaataagattcctgtcaccgtagccaagacgtgtccccaccgtgacctggccattatcgcacatgctgtcccgcctaacgaatactatgaactcgaggttactgagaagcctccagctgtggaggaccacgtgacctccgtgggctacccccagttcggattcggtgacagactgaatgtgcggaaggggacggtgagtagcctcccagtgaagcacgctgtgcagcagatagatgtaggtattcgcattaccgaagggatgagcggcggtcccctccttgcagaggatgggaaggttatcggaatcaatcacaaaggagggatcgatgaagatagggatctggctatccacatccaacagctggtgaagtttgcaagcgagtga

SEQ ID NO: 7571 - RNA, 1305 nt, synthetic construct
  source 1..1305: mol_type = other RNA
atgcacattgtgatcgcccggattatctgcctcacttggcgggactggaagggcgatccagtacctcgctctgcctctattttcggccgcgcgattagggtgaaactgcctccagagctgctgacagaagtcaatctactgactcacctgggaatgtcccgcggagaactcaatgtcataaattggtacgcgagacggatgtatcactcctttgacatcaagaagaaaagcggcaagcctagggttatcaacgctccagagcgcagattaaaactcttacagaggaaaatagccgatcttcttatgcccctgtatcggcgtcggaaccccgttcacgggttcgtggcagacaggtcagtgaagaccaacgcccagtcacacctgaacagtaagtttgtggtcaatctggatctcaaggatttcttcccctctatctcccaaaagagaattgtaggagtgctgcgatccctgggtatcgacaggggtgtggccgatgccatttcgacaatctgctgcctcaatggatgtctcccacaaggcgcaccaagctcccctgtccttagcaatatgatatgctttaggctcgacaaggagcttttggaattcgccaaacaggcgaagtgtatttacacccgctacgcagacgacctgagtttcagtagctaccagcccttgggatcactgttccagacgagcccaccttcccccggccattttagccctgacctactgggcgagaaattgcgccacatctttactgccaacggtttcatcttgaatccggacaaagctcattatgcagatcgacatagcagaagaacagtgaccggaattcgaatcaacgagctactgaatgtggaccgtcgatttgttcggaacttgagggccgctctgtacagtgttgaagcacagggcatcgccacagcagaagctaagttccacgcctcatacaacgggaaatctgatatagggaaacatctgcaggggaagattgcttggcttgggtatatcaaaggtgcttccgatcccgtgttcagaggcattgcgtctcggtttaacaaggccttcccctcgctcaagttggagattcagccgaccccacaagaaatccgcgagagagcagtgtggctcatcgaacattgggagagaaccggcgatcagggaaccgctttttttctggagggcgtggggcttgtaactgctgagcattgtgtcagccccagtgggatagtcgaactgtatcacccgtccaaaccttctacgcggaagtcacataggcgtgtcgtgcacagggttcgattatga

SEQ ID NO: 7572 - RNA, 1542 nt, synthetic construct
  source 1..1542: mol_type = other RNA
atgaagctgcccccggagctgatgagtgaagcgtccctgctggcacacctaggcgtcggtagggcagagctgaatgtgatctcgtggtacgctggccggatgtaccataagtttgacatcaagaagaaaagcgggaaagctagggttatcaacgcccccgaccgccggcttaaaatgctgcagcgaaaaatcgccgacctgctgactcctctatatcgcagacggaacccagtgcatggttttgtgatcggtcgatcagtgaagactaacgcacagtcacacctggggtctaagttcattgttaatctcgatctcaaggattttttcccctcaatctcttacggccgcgtcaccggcgtccttaggtcgttagggatgaaaagagaagtcgctgaagccattgcgacaatatgttgcctgaacggaaccttgccccaaggggcaccatcctcccctattctgagcaatatggtgtgtttccgcctcgaccggaggctgagagaactcgccaaagatgctaggtgtatttatacccggtacgccgatgacttgtccttttctagttaccagcccttgatgggactattcgagactacacctcctgcctccggacacttcagcccagacctcctctcagagaagttgaagcagattttttctggcaatgggtttgtgctcaacccagacaaagcccattatgccgataagcacagcagaaggaccgtgacaggcattcgtataaacgaggcactaaatgtggaccgccgtttcgtcaggaacctcagagcagccttgtacagcgtcgaaacgctggggttagctgcggctcaagctaagttcaaatccctgcatggaggtaaagccgacgtgggccaacatcttcagggtaaagtgtcttggctgggatatatcaaaggggctagtgacccagtgttccgctctgtggcctcccggttcaatgcagcttttcccccattagcgcttgatatcctgccaagtccacaggaaatccgggagcgtagcgtttggctgatagaacactgggagacaggaggcgatcagggcaccgcatttttcatgaagggagtgggactcgtgaccgctgagcactgcatttcccccagcggcattgtagagttgtaccaccccactaagccatctaataagttcgccgcatcagtcaagcaccgatgccctgatagagacttggctgttttagatcatgcaattccgaacaacgagttttacgaacttgagacagccggcaaagccgccgccacaggagatgctactaccgcgatcgggtatcctgggtatggacccggggacagactgaatatccgacctggcgccgtaaccagccttcccacgaaatcagccgttaagatggtcgaggttcaacagatgctcactcctggcatgagtggcggccctctccttgacgtggacgatagggtcgtaggtgtagtgcataagggtgggcacgatcacggaagacagctggccatagcaatcagcgaactgcatgcttggctgccgtga

SEQ ID NO: 7573 - RNA, 1581 nt, synthetic construct
  source 1..1581: mol_type = other RNA
atgcctagaccagcgcgtgcatttggcccaccgatacgcgtgaagctgccagtggaagttgcttccgagggtgcgatcctcgcccatttagcagtgagccctgccgaagccaagaaaattcgatactaccgagccaggatgtaccgcaccttcagcatccaaaagaagtccggaaaggctcgcatcataactgctccagacagacggctgaaaatgctccagaggcggatctgtgatctgctcactcctgtataccgcagacggaatcccgtacatggcttcgtggccgatagatcggtcaggaccaatgcggaggcacacctgggcagcaagtatgtagtgaatattgatctgaaggatttctttccaagtatctccgaaaggcgagtaacaggtgttctgatgagcctcggcatcgggcgagatgtagcagagatcctctcctctatatgctgtgttaatggatgtcttccccagggcgccccctcttcacctctgctttctaacatgatttgcttcaggcttgataaggagctgatggccttcgccaaacggacaaggtgcatctacacccggtatgccgatgacatcacattttcttcataccagcccttggctggactcttcgaggcagtgcccccttcaccaggccgattcgccccagacttgctctccgccgaggtagctgccatttttgctgccaacggctttgtcattaaccccgagaaagctcactatgcagaccgtcactcgaggcggactgtcacaggattaagagttaatgaggctatcaacgttgaccgtagatttgtccggaatttgcgcgccgcactcttctctgtggagaaactcggcgcagctgccgcgcaagctaagtttcacgctactcacgggggtagagtcgcactaggcaatcatttgcagggaaaactgtcttggctgggatacgtcaaggggcagtcagatccggtctttcggtccatggccagccgtttcaataggagtttcccagatagggcactgaccatccagccgactcgcgacgaaattcgcgacagagctgtgtggttggttgaacattgggagaacggcggcgaccaaggcacggcattctttctgcggggggtgggacttgttaccgccagtcattgcgtctcccctagtggcgctgtcgaggtgtatcacccctctaaacctagcaacaaatttaccgccaacgtgaagcatagatgtgaacaccgcgacctggcagtgcttgaccatgctattgccgcgacagaattcttcgagctagaagcagccgccacagctgtggtgacaggggatgcgaccgtggccgttgggtatcccggttttgggcctggtgacaaactgaacgtgcgcacggggaacgtgacttcacttccaatcaagagtggagtccaaatggtggaagtgcagcagatgctgacccagggtatgagcggaggtcccctaacggaccccgacgatggagtcattgggataattcacaagggggggcctgaacacggcaggcagttaagcgtggctatagaggtgctgagagattggctggcctga

SEQ ID NO: 7574 - RNA, 1503 nt, synthetic construct
  source 1..1503: mol_type = other RNA
atgaagcacctcgggctgggagcagcggaagcgaaaaagattcgatactatcgtagcaagatgtaccggaccttcgacatccggaaaaagagcggtaaagccagggttatcaatgcccccgacagacggctgaaaattctccagcgcaaaatttgcgacctgatcactccattatatcgccgcagaaatcccgtccatgggttcgtagctgatcggtcagtcaaaactaacgcgcaatcacacctgggggggaagtttatcgtgaaccttgacttgaaggacttctttccttcaataagtgagcggcgcatagtcggcgtgcttatggcactcggcctgaagcgagacgtcgccgaaagactctcctccatctgctgtgtagacaatggacttccacagggagcgccgagcagccctatcctttcaaacatgatctgctttaggatggataagcagttgatggccttcgctaagtcggctaggtgtatttataccaggtacgccgatgatattactttcagctcttaccgtcccctaactggcctgttcgaatccgtgccaccacctagcggatcctttccacctgaactgctgagttcggagttgctagggatctttgggtctaatgggtttaccatccatcctgacaaggcccactacgcagatcgcaatagtaggcgtacagtgaccggcctgagggtcaacgagaacctaaatgtggatagaagattcgtgcggaacctgcgagctgctctctattccgtggagaagctgggcgagaagccggcagagacaaagttccatgctgaccacggaggacgggcaccaataggccgccatctgcagggaaaactcgcctggcttgggcatatcaaagggccagccgacccagtgtttcggtccatcgcctctcgattcaatgctgcttttcccagtctggccctcaagatcttacccacccagctcgaaattcgagaaagaacagtttggctgatcgagcattgggagggaactggcgcccaaggcacagccttcttcctgacaggggtcggcttggtgactgctgatcactgtgtttccccttccggcgcagtggagatgtaccaccctagcaaaccctccaacagatttgcagctatggcaaaacaccgcagctctgatagggacctcgctgtattggaccacgccattccgcccaacgagttctatgagctggatgcgtcaaacgttgggtctgtgaccggtgatgccacggtggccataggctaccccggctttggtcccggcgacaaagttaatgtgaggagtggtaatgtgacctctttacctaccaagtctggtattcaaaagattgaagtgcaacagacgctgacaccaggtatgtcaggcggccctcttttgaacagcattggacaggttattggagtcatccacaagggtggagcagaggaagaaagacagttagccatagatatcagtgtactgcagaaatgggtcccctga

SEQ ID NO: 7575 - RNA, 1581 nt, synthetic construct
  source 1..1581: mol_type = other RNA
atgccctctgcattttacctgttcggcggcaccagtcggaccatcatccctgccgaactgtccacaaagagcgagcttctgaaacatctgggagtttcacctgccgagctgaaaaagatctggtggttccgcgggaggatgtattcccacttcaatatttctaagcgctctggtaaagtgagattgatctccgcacctgactacagactgaaaatgttacagcaaaagattgctaggtctttatctggcttgtataatcctaggaaccctgtccatgggttcgtcccagacaggagcgtgaggtcaaacgccgaggctcatctcagacggcgattcatcctcaatgtggacataaagaactttttccccgccattaccgaggctcgcgtccaaggcttacttgaaagcatcggagttgatactgatgttgccgagacgataacaagaatctgtacaaacaatggttgtctgccacagggagccccctctagccctgtcatctccaatatgatatgtttccgactcgataaatcactcatgaatttctccaaggaacacaggttgctctacacacgttatgctgacgacattacattgtcctcatttcagcccccaaccgcactgtttgaaggcgataggcccgacagcggtagactgccaccagagaagctgtctggtgagctcttgagcatactgggaaacaacggctttgagctgaacccagaaaagattcactatgctgataagaatagccggaggatggtgaccggcatcaaaattaatgagggcctgaacgtagatcgacggtacgtgcggaagattcgcagtgccctgtttaaggttgagtcggcttcagtggcagccgcagaagctgaactgaagaccagattcggaaaatcatgcaagatacaggcccaccttcaggggaaaatttcctgggtggggttcgtgaaaggacaatccgatcctgttttccgggggttagcagaacgttacaatgcctgcttcccagccagtccgatcaaggtacatcctactcaggcggagcttctcgacagatcagtgtgggttctcgagacagagaaaaacaccgggactgcctttttcctgcggggtgtagggcttgtgaccgctgcccattgcgtgaacggcgcgagttcgatcgaggtcttccacccagggaaaccggctaacacttttatggtgggggtgcagcatatctgcacacaccgtgatctggccctacttagccacagcattccctccactgactactttgaactggaagagtttggcggctttcccgccacgggggcaaatacgattgcagcgggattcccgagctatggacccggcgatcgactcaacatccgcccaggaactatctcttccctaaccattaagcatgccgtgaatctcattgaggtcacccagaagctaagccagggaatgagtggcggtcccttgatgacccaagaccacgctgtcatgggggtgatccacaaaggcggtcccgacgaacctcgcgactttgcagtaacactgagtgaaatgaagagttggatagcgactctgccgtga

SEQ ID NO: 7576 - RNA, 1644 nt, synthetic construct
  source 1..1644: mol_type = other RNA
atgtgcacctggggcgactggcgaggaaatcttgtgccctctccgttcaacctattcgggggggcctcacggacaaagattccgccagaactgacttctaaagacgaactgctcaaacatctcggcgtgtcacctgctgaactgaagaaaatttggtggttcagaggtagaatgtactcccacttcaatattagtaaacgctctgggaagacgcgtctgataagcgcacccgactaccggctgaagatgctgcagcaaaagatcgccagaagtttggccaaactatataacccaaggaagcccgttcacggcttcgtgccagaccggagcgttcgctccaatgcggagtctcatctcaggcgtagattcatcctcaacgttgacttaaagaacttctttcccaccatcacagagcccagggtgcagggactgctggagtcaatcggcataaacaaagacgtcgctgaaacagtcgccagaatctgtgctaataacgactgcttacctcagggagccccaagtagcccagtaatcagtaacatgatctgttttagactggacaaagctctcatgaagttttccaaagaacatcggcttctgtatacccgatacgccgatgacattaccctgagcagtttccagcctcctaccgccctgttcgaaggcgatagacccgaccctggcaaggtggcggaggagaagctgagcgacgagcttagatccattattcgcaataatgggtttgagctgaaccctgaaaaaatccactatgcagataaaaactcgcgacggatcgtgacggggataaagataaatgaggggatgaacgtcgataggcgctatgtacgcaatgttaggactgccctttttaaagtagaaaagcacggccctgcagctgctcaagccgagttagaggctcgctttggtaagacatgtaagatccaggcgcacttacaagggaaaatttcatgggtggggttcgtgaagggtcaatccgatccagtgttccggggactggctaagcggtataatgcttgctttccggcctgcccgattaaagtgcatcctacccaggccgagattgtcgatcgagctatatgggtcgtcgaaactgaggatgatactgggacagccttttttctgaagggagtggggttggtgacagctgcgcattgtgtaaactcagcgagcgaaattgaggtgttccaccccttgaagactgcaaacaggtttaaggttactatcaaacacatctgcgcacacagggatctggccatcttggagcacagcatttcctccaccgagtactttgaactagagtctttcactggaagcccagtcgtgggcaccaatacccttgccgccggatttccaacgtacggccctggtgaccagctcaacatacgtcagggctctatctcgtcacttaccacaaaatccgccgttcccctgattgaagtgtctcagatgctcggtcagggaatgagcggaggccccctgatgaataagaataacgaaattctcggaatcatccataagggtggcccagtggcatacgttgccaaagatggctccgtctctccccagaggcagctcgcagtggcaatcagcgagttgaaggcatgggtcagtgcattgccttga

SEQ ID NO: 7577 - RNA, 1104 nt, synthetic construct
  source 1..1104: mol_type = other RNA
atgatctgtttccggctcgacaaaacactaatcaatttttccaaggaacaccgcctgctgtacaccagatacgcagatgatattactctcagcagctttcaacctccaacagcgcttttcgaaggggacaggccagatcccgggcgtctagcattagaaaaattgagcgacgacctgagaatgattttcaagaataacgggttcgagttgaacccagagaaggtgcactatgctgataagaactccagacgcatggtcaccggtattaagatcaatgagggtctgaatgtcgaccggcgctatgttcgaaacgtccggagtgcgctctttcgagtagagactacaggcctggccgccgcacaagctgaactcaaaaccaggttcggtaagtcctgtaaagttcaagctcatttgcagggaaaaatctcttggattggctttgtgaaagggcagagtgaccccgtcttccgcggcttggctaaaaggtataatgcctcatttcccgctagcccaataaaagttcatcctacaaaggacgagatctttgacagagcggtctgggtggtggagactgacgacgacaccggaacggctttcttccttgatggcgtgggccttgtaactgcagcccactgcgtgaacggggcatctgagattgaagtgtttcatcccctgcggacctccaataagttcaaggtcaccataaagcatatatgcgcccacagggatctggccatcctggaacacctgatcccttcgacagagttcttcggcctcgaagcctttgagggtagtgtgacggtagggaccaacaccctggccgcagggtttccgacgtacggacctggcgatagacttaacgtgcgtcagggttcaataagctcactgacaacaaagtctgcagtgccattgattgaagtcagtcagatgctgggccagggaatgtctggaggccctctcatggatgaggatcacgccgtttttggaatcattcataaaggcggacccgtggcttacgtaactaaggatggatcagtgagcccgcagaggcagttagccgtggccatctccgagctgaaggcctgggttgctactttcccctga

SEQ ID NO: 7578 - RNA, 1602 nt, synthetic construct
  source 1..1602: mol_type = other RNA
atgttctacctgtttggtggaaccagcagagccaagattcctggagagttgagctcccgctccgaactccttaaatacctgggcgtgagcccagaggagctgaagaagatctggtggttcagagggcggatgtactctcacttcgacatcagtaaaaggtcagggaagtcccgcacaattagcgctcctgactacaggctcaaaatgctgcagcaaaagttggctcgttcattaagcggcctgtacagcccccgtaatcctgtccacggttttgttcccgacagatcagtgcggacaaatgcagaaactcatctgaggaggcggtttatactgaacatcgacattcagaatttcttcccgtctattacagaggctagagtgcaaggactgctgacctctataggcgtcgacactaatgtggcggaaatagtcgccaggatttgctctaacaatggctgtttacctcagggtgcaccatcatcccccgtgctctcgaacatgatctgctttcgactggacaagagcctgatgcggttcagcaaggagcacaggcttctgtacactcgatacgctgacgatatcacgctttcttccttccaaccccccaccagcctctttgagggagagcgaccagcgcctggtcgcctttctcctgaaaaattgcacgctgagctgcggatgatctttcagaataacggcttcgagttaaacccagaaaaaatccattttgctgatcgcaattcccgcagaatcgtgactggcataaaagtgaacgaaggtctgaacgtggacagaagatatgtacggaacgtgagatcagctctgtttaaggtggaacgcagtgggctcgcagctgcccagacagagctgaagtcccggtttggaaaatcgtgtaagattcagagtcacctgcagggcaagatttcatgggtggggtttgtaaaaggccagtctgatccagtgttccgagggatggccaaacgttataatgcctgtttcccggccaaccctataaaggtgcatccaaccagagcagaaatcgtcgaccgcgctatctgggtcgtcgaaacagaattcgacaacggcactgccttctttctcgatggagttggtctagttaccgccgcacattgcgtcgatggagccagtaaaattgatatctttcaccctctacgcactagcaataggttcaaggtaaccattaagaacatttgcacacacagggatctcgcaatcctggaacacagcgtggccagtacggagtatttcgagctaggatctttcactgggtcccccaccatcggcgcaaatacacgggccgccggttttcccacatatgggccgggcgatcagcttaacgtgcgacaggggtccatttcttctttgacgaccaagtcagctgtacctttgatcgaggtcagtcaaatgttggggcaaggaatgagcgggggccccttaatgaccgaggatgatagtgtgctcggcattatacataaaggaggaccagttgcctatgtggcaaaagacggctccgttagtccccagaggcagctggcggttgcgatctccgagctttcagcctgggtcgccaccctcccatga

SEQ ID NO: 7579 - RNA, 1641 nt, synthetic construct
  source 1..1641: mol_type = other RNA
atgccagaggacgtcaggcagtcctggagggattggaaggagggccttgttagttaccgcggggccctgttcggcaagcctatacgtataacaatccctgccgagctggctgatgaggcagccctcctggcatatttaggtttgggcgcagcagaacttaagaaaatatggcactttcgcggtcggatgtaccagcattttagtatcgccaaggggcccaacaaagtgagattaattagcgcgccagatcagcgtctgaaattcctacaacgccgactggcagataaattcaccgaactctacagaccaaggcacccggtacatggatttgtggtggggagaagtgtgaagaccaacgcccttgcccatctccatcggcggttcgtggtgaatatcgatctcaaagactttttccctacaatcgcccagaacagagtcgagggcatgctgttttcccttggcatcgacgccagggtggccgagattattgctcggatctgctgtaatcggggacacctccctcaaggggcacctagcagccccgtcctctctaatatgatttgcttcagactggataagcagctgttggacgtggctaaggaaactaggtgtatttatacacggtatgcagacgatataacattttcgggtcaccgtccccctactgcactgtttgacgccgccttgccacccgccggaagattttcaccggacctgctggcaccaaaactccttgacatcttccagcagaacgggttctctattaatcccgacaaagctcattacgcggataggcactcgcgccggactgtaacggggctgaaagtgaatcagttgctcaacgtagaccgacgctatgtccgaaatatcagggctgcacttcattccattgctactctaggcttgaaggaggccgagaaaaaattccacgagaagcacggcggaaactcagggctggctgcccacctgaggggaaaaatcagcttcttaagccacataaagggccagtctgattccgtggttcggtcccttacgctacggtttaacaagtgctttcccgcccagcctattaaggtgatgccgacctcaacagaaattcgagacagagcggtgtgggtcgttgagcacaacctggacagggaccatggaaaacaagggactgcgttcttcctgaaaggcgttggactggtgaccgcagcgcactgtgtagagggcgtgtctgagatcgaagtttttcacccctctaagcatgccaacgccttcaaggcaactgttagaaagcgagacgaacatcgcgacttagccatcctagatcattccattccagctaccgagtacttcgagttggaccccgtgtcacatgccatcgtgaccggtgatagtatgacagctgtggggtatcccgcttgggctcctggagatccactgaatatcagacccggcttcgtcagcacactcaccgttcgctctgctgtgcagtacatcgaagtaacgcaaaagctgaccccaggcatgagcggcggaccattgctggatgctaatgacgccgtcgccgggatcattcacaagggaggccctgaagaaggtcgcgattttgctgtccacattgaggtcctggaagcgtggctcaaggaaggttga

SEQ ID NO: 7580 - RNA, 1584 nt, synthetic construct
  source 1..1584: mol_type = other RNA
atgacatactggggggcacttttcgggaaacctattcggattaccattcctcccgagtttgccaatgaagccgccctgttagcctacctcgggctcggtcccaatgagctcaagaaaatatggtattttcgggcgagaatgtatagacacttctccatagccaaggcgcaaaataaagtccgactgatatccgctccagatgagcgcctgaagttcctccagcataaaatcgccgagaagctgaccgatctttataggccacggaaacaggtgcacggcttcgtggccgggaagtccgtgaagaccaacgctctggcacatctaggacggcgattcgtagtcaatatcgatctcaaagactttttccctaccatcacccaaaaaagagtcgctggtttgctcctgagccttggtcttgacaaccaggtcacaactctgattgcccatatctgctgtaatgacggcaatttaccccaaggcgctcccagtagcccagtcatctcaaatatgatctgcttcaggttggacaaaaagctcctggggatcgccaaggaggctcgctgtgtctacactagatacgctgacgacattactttttcatcacaccagcccccgacagccctgttcgaggttgccctccctcccgcagggaggttttctcccgatctgtttacccccaaactgctggaggtgttccagcagaatggagtggccatcaaccctaacaaaacgcattacgcagacaggaactctcgtcggatcgtcactgggctcaagatcaacgaacttgtaaacgttgacaggcggtttgtgcgcaatattagagctgctttgcacgctgttgaggcacagggaattgtcgaagcacagaagacattccaggagaaatatggcggcagctccttggtagcacacctccaaggcaagatcagctttctgagtcacatacgagggcagtcggatccagtggttcgctcggttactctgaggttcaataagtgttttccgaaacatctgatcaaggtgacacccaccccatctgaaatccgcgataggtctgcctgggtgatagaagataagaacggcgacgtcgtgcagggtaccgcattcttcctgaaggatattggcttagtgaccgctgcccattgtgtggaacctaacacagaatttcagatctatcacccaagcaagcctgccaacaaatttgccgtcagagtaaagaaaaagtgcacacaccgcgaccttgctctgctggagcatgaaattcccgccactgagttttttgaactggcgcgtagtttgaacgcagcgagccagggcgaccagttgacagccgtggggtacccatgcttcggacctggagacggtgttaataccagactgggtactgtatccagcttaccagtgaagcgtgatgtgaaactaattgaggtgacccagacgctaacgcaaggcatgtccggcggacctctgcttgatgcgaacaacggagtggttggagtgatccacaagggcggaccggaggaaggacgaaatttcgcaattgctatagaagtgttgtcagagtggattgagtctagttga

SEQ ID NO: 7581 - RNA, 1578 nt, synthetic construct
  source 1..1578: mol_type = other RNA
atgccccgatggggggctctgtttggtcagccagcaagggtcgccattccagcagaactggcggacgaggcagccttactggcttaccttggtctgggggcgggcgagctgaaaaagatttggtattacagaggacgcatgtatcagcattttagtattgctaagggaccaaataaggttaggacgatcagtgcccctgacgggcgcctcaagtttctgcaaagaaagctcgccgacaaactaacagaactgtatcggccacgcaatcccgtgcacggcttcgtggccgagagatccgtcaagacgaatgccctggcccacatgcacagacgtttcgtagttaatatcgaccttaaagactttttcccgacaatttctcagaacagaatagaaggcatgctcgcctcactgggcatcgatgctagagttgctgagatattagcccgaatctgctgtaacaatggccacctccctcaaggggcaccctcatcccctgtgctcagcaacatgatctgtttccgtttggataaaaaattgatgggcattgctaaggaggcaaggtgcatttacactagatacgcagatgacattaccttgtcctctcatcagccccccaccgccctatttgaggccaccatcccacaggctgggcggttctcacctgacctccttgcgcccgaactgcggaacgcagttcaccagaatggtttcgccatcaatcccaataaggcccattatgcagaccgccactcccgcaggacagtaactggccttaagataaacgaactcctgaacgtggatcggaggtacgtacgcaacatacgagctgcactgcactccattgaaacattgggaatcaaagacgccgaaaagaagtttcacgaaaaacatagcggtagggcatcgcttgctgctcacctgcatggaaagatctccttcttgacgcatattaaaggccactctgacccagtcgtgcgatcggtcactctgcggttcaataagtgcttccctacccggaccatcatggtggcccctaccccgtctgagatgcgagatcgtgccgtttgggtggtggaacatagcgagaatcacgggactgctttttttctgaagggggtgggtctagtgacagctgctcactgtgtcgagggcgtggatgaagtggagattttccacccctctaaacatgccaacaaatttaaggccaccgtgaggaagagtgacgaacatcgggatctggcaatcttggatcaccaaattcctgccactgagtatttcgagctggattcaatcagcagaaccatcgccattagtgatcctatgactgcgcttggatacccaagctggggcccaggagataggctcaacatcaggcccggcgtagttagcacagtcacagtgaagagcgcagtccagttaatcgaggtgacccagaaactcactcaaggaatgtctggaggaccgctactggacgggaacggtgctgtggcgggcataatacataaagggggacctaacgaggggcgggactttgccgtccatatcgagatgctgcaggattggttacgcgagggctga

SEQ ID NO: 7582 - RNA, 1281 nt, synthetic construct
  source 1..1281: mol_type = other RNA
atgggcgccatctttgggcagccgattaggatcatcgtgcctgctgaactcgccaatgaggccgcattgttggcctacctgggggttagcgcggatgaactgagaaagatttggtactacagaaagcgtatgtataggcacttctctatatcgaaaaaacctaacaagaaccgactcatttcagcacccaacgacagattgaagtttctgcaacgggcactggcagtgaagctgaatgagctgtatagccggaggaatcccgtgcatgggtttgtcccagacagatcaatccgaactaatgctcttgcccatctacggcgcaggttcatcgtgaacctcgatctgaaagacttctttccaacaattggtcagaagcgcatcgagggcgtgctggtgagtctcaatattgatgctagagtcgccgaaattatatcttgtatttgctgcgttaacggacacctgccacagggtgcgcccacttcacccgtgctaagcaacatgatctgtttcagactagacaagaagctgatggacttcgcgaaagaggcgaggtgcatctataccagatacgccgacgacattacgttctcctctcatcagcccccgaccgctctcttcgagacgaccatcccggcagctggaagagtagcccccgatcgcttagcccctcgattacgggatttgttccagcagaatggatttgttatcaaccccactaaggtccattacgctgacagccacagtaggcgcatcgtcacaggcataaaggtgaacgaaatgcttaacgtggataggcgctttgtccgtaatatccgagccgcactgcactccattgagacattaggaattgaggccgctgaggaaaaatttcacgataagcacggcggccggagcaatcttgtcgctcatctcaggggtaaaatctccttcctgaattatatcaaggggcaaagtgaccctgtggtgcggtccatagcactccgtttcaactcccgctttcctgcaattccaattaagaccgcacctaccccatctgaaatacgggaccgcgccatctggatagtggagcagtcaaaaagccaaggaactgcgttctttctgaatggtgtagggctggttacagccgcccactgtgttgaggggtttgccgaagtggatgtcttccatccaagtaaactcgctaacaagtttaaagccagggtaggcaaattggatcgacaccgggatcttgctattctggaccacggcatccctgctaccgaatacttcgagcttcagtga

SEQ ID NO: 7583 - RNA, 1281 nt, synthetic construct
  source 1..1281: mol_type = other RNA
atgtttggaaagacagttcacattagcatccctccagaactggcggacgaagcaagtcttttaacctacctgggactgggcgccgacgagctgaaaaagataaggtattatagggcgtcaatgtatcataatttccccatcgggacggatggcagaaagcggagaattatcaacgctcctgacgcccgactgaaattccttcagaggcgcattagtgataagctagccgatatttataggagaaggaacccagtacacggatttgtggccgagcgctctgtcaagaccaacgcgctggcccatatgcggagaaagtacgttgtcaacatagacctcgctaattttttcccaaccatctctcagaaccgggtggagggtatgctcctctcgctgaaccttgatgccagcgtagctcagatcattggtatcatttgctgcaacaaaggcatactcccacagggcgccccctcttcacccttactgtcgaatatgatctgctttaagttagacaagggcctgatgaacttcagcaaagaagctaggtgtatctacactcgctacgctgatgacctcaccttctccagttttcaccctccagcagccctattcgaaacagcccctcctccggcaggtcgcttgagctctgagcagctggcaagccagcttcgaaggctcattatccaaaatgggttcagcattaatgagcgtaagctgcactacgcagaccgcgactcccggagattggtgactggtttgaaaatcaatcagatcctgaacgtcgatagacgatatgttcgcaacatccgcgcagcacttttctcagtggagcggaatgggatcaaaggggccgagaagacataccataaagagcatggagggagagggtccctagctgagcatctgcgtggcaagatttctttcttgtctcatatcaaaggccaacacgaccccgtggtgcggggattggctattcggtttaatcaatgtttccctcactggcccataaccgtgactccgaccaaaaacgaggtgcgtgatagagccgtgtgggtcgtcgaaaatgaaacttcctcacagggcacggctttctttctccgaggagttgggctggttacagccgcacactgtgtggaaggcgtaaacgaagtcgacattttccacccatccaaaccctccaataaatttaaggcgaagatctttaagagggagccccacctggatttggccgtgctcagtcatgctatacccgagaatgaatactttgagctgagcaagtcctga

SEQ ID NO: 7584 - RNA, 1584 nt, synthetic construct
  source 1..1584: mol_type = other RNA
atgcctttgttcggcgcctttttcggggctcctgtcagagtgacaatccccgaagccttggccgacgaaacaagcctgctgacttacctcaatttgtccgggcccgagcttaagaaaatatggttttatagggccagaatgtataggcacttctcaatcgccaagagtagtacaaaggtccgcctgattagcgcacccgatcaacggctcaaatttttacagagacaactcgccgacaagttggatgagttatacagaccaaggaacccagtccacgggtttgtagctgataggtccgtaaagaccaatgctctgtcacaccttcacaggcgcttcctgctcaatatcgacctagctgaattctttccgactatcaccgaaaacagggtgcagggactgttgatcagcctggggatcgactcaagggtcgctgacattattgcccgcatttgttgcaatgacggccagcttccacagggcgctccttcttcacctgttctgtccaatatgatctgctttcgtcttgacaagcagctgatgacgatagcgaaggatacgcggtgcatctatacacgatacgccgacgacatcactttctcatcctaccagcctcccgtgggcctatttgaggcgaccctccctccctctggacggttcctacctgatctgctaactccagccctccggggggtcatccagcaaaacggcttcgtgatcaacccagaaaaagctcattacgctgaccgccactcgcgtagaattgtaacaggattaaaggtgaacgagctgctcaacgttgatcggcgttatgttcgcaatattagagccaccctgtactccgtcgaaaagcttggagcgaaagaggcagagcaaaagtttcatgacagccacgggggacgaagttctttggcagcccatcttcaaggcaaaattgcatttttgactcacataaagggacgatgggacccagtggttcgcggtatcaccctccggttcaacaaatgtttccccgagcgcgcccttaaagtgcgacccacaccacaggaaattagagggcggtccgtgtgggttgtggaaaacgatccagcccagcagcagggaagtgcattcttcctcaaagatgttggcttagtgaccgccgctcactgcgtggagaatacggatgaggtagaggtctaccatcccaccaaaccggccaataaattcgtcgcaagagtgtcgaagaagtgtgagcatcgcgatctcgctctgctggagcatagcattagcagtaccgaatttctggagctcatacggtctgagagggcggtgtcccagggagatcccctgacagctgttggttatccccgatttcacgtcggtgatcggctgaatgcaaggcctggcaacgtgatttctctggtggccagaagcggcgtggaaatgatcgaggtgaaccagaccctgactcaggggatgtctggaggcccggtgctgaatggcgacgacggtgtcgtgggtataatccataaggggggtcctggcgaaggcagggactttgcagtaagcattgcaatgctgaacaaatggctggaagagaagtga

SEQ ID NO: 7585 - RNA, 1581 nt, synthetic construct
  source 1..1581: mol_type = other RNA
atgccatccgccgctcgaatctttggcaaacactttccaattccaattccaccccagttagcagatgaggccactctattagctcatctgggtttgtccacaaaggaactcaaaaaaatctggtggtaccgtgggcggatgtatcatcaattttctattgcgaaaggagctggtaaggtacggttgatcacagcacctgatcgtcgactgaagatcctgcagagcaaattggcgccgctgctggaccagttgtattctgttagacaccctgtacatggcttcgtgcctgccagaagtgtgaaaactaatgcagaggcgcatggacggcggagattcgtcgtgaacctcgatctccaggacttctttcccaccatcaccgagaatagagtccgcggactgctgaccagcctgaacgtcgatgctagggtgaccgaaattatcgcccgactgtgctgctttaataaccacttgccccagggcgccccaacttcacctgtcatatcaaacatgatctgttaccgcctggacaccgagctcctgaggattgggaagggcgcccgagccatctatacgcggtatgctgacgacattactttcagttcatatcaaccccctgctttactgtttgagggagccctgcccccagtcggacggttttcaagagacttgcttgcacttcctctcagaggcacttttcaatctaatgggttcacgattaaccctgataagtcccactatgcagatcgcaactctcgcaggattgttacaggagtgaagattaatgccggcctcaacgtggatcgcagatacgtgaggcatatcagggcactactccactctatcgagacactggggctagccgacgctaacgccaaattcgttgccgcaggcggcaaaggttccattgcagcccacctgcgaggaaagataagctacatcgcgcatctgaaggggaggactgacccagtagttcgtacactcgccctgaggtacaatacatccttttcacatcagccgattaagctcgtgcccaccgttgaagagcgcagagataggagtgtgtggatagtagagcactctgccaatgggggcgaacagggaacagccttcttcctgaaagacgtgggacttgttactgcagctcattgtgtcgagggcgtgagcgacttcattgtgtaccaccccaccaagccctcgaaccaggcctccgtcaccgtgcttaagcggtgcgagcaccgggacctggccatcttgggacacgctatccacgacaccgaatacttcgaacttggggccgcgagccgcgctatagcagttgatgatgtggtcaaggcttacgggtatcctggttacggaccaggcgataagataaatgtgaggagtggcgctgtgtccagcctccccatcaaaagcgctgtccagatgatcgaagtgacgcaggaacttgcacaaggcatgagtgggggcccaatccttgacgcccacggtgaggtcattggggtgatccacaagggtggtccgaacgaagggagacagctggctatacatattggcgtattacagaaatgggcacaagagtga

SEQ ID NO: 7586 - RNA, 1581 nt, synthetic construct
  source 1..1581: mol_type = other RNA
atgccgagtgtcatgcgcatcttcggtaatctgattcccatcgcaatcccccctgaactggccgcagaaccccctctgctgacccatctgggcctcagcgcaaaggaactaaagaaaatatggtggtaccgcgggcgcatgtataaacagttctctatcgccaagaacagtgggaaggtgaggctgattacagctcctgacagacgcctaaaaatcctgcaaaggaagctggcccctctgctcgaccagctgtacctggtgcggaatccggtgcatgggtttgtcccggcaagatctgtcaagacaaacgctgaggcacatgggcgacggcgttacgtggtcaacctcgacctgcaggatttttttgctacaattacggaaaatcgcatacggggactgcttatctcactcgatatcgatacccgggtggccgatatcgtcgcgcgcttgagctgtgtgcacggccatttaccccaaggcgcccctacatctcccgtgctgtcaaatatgatttgctaccgtttggacacagaacttttgagagtggccaagggggcaagagctatctacacccggtacgccgacgatattactttttcaagctaccaaccacctgctcctttgttcgagggcgctctgcctgccgttggaagattcagtccagaggtgcttgcaccacgagtgcgccagacatttgacaccaatggtttcactattaaccccgacaaggctcactacgccgatcggaactcccgtaggatcgtaactggcgttaaaattaatgccggcctaaacgtggaccggaggtacgtcagacatatcagggcgctcctgcattccatcgaaaccatgggtctggctgatgcgcaggctaagtataccgcaactggaggtaaaggcagcctagcagcccatctccgtggaaagatttcttacattacgcaccttaaagggcttaccgatcccgtggtcagagccctggccttaagatataatcggtcgcttgggcacaggccaatcaagttggccccaacaatcgaggagaggcgagaacgctcaatatggattgtagaaaactccgccaaggcgggcaaacagggtacagccttcttcctcaaagacgtgggcctcgttactgctgcgcactgcgtggagggcgatagtgacatcactgtatatcacccaactaaacccactaaccacgccaaagtcaccgtgttgaagaggtgtaagcatagagacttagctatactgggccataccatccacgaaaccgactattttgagctggagccgaccgaccacgttgtggtcgttggggatttcgtgattgcttatggatatccagggtatgggcccggtgataagattaatgtacgaggcggatccgtgacaagcctcccaatgaaatccgccgtccacatcatcgaggtggatcaagagcttgcacctggtatgagcggaggccccattttggatgcccgaggagacgttatagggatagttcacaaaggaggaccagacgagggcaggcagctggcagttcacctcgacgagttacagacgtgggtacaggagtga

SEQ ID NO: 7587 - RNA, 1524 nt, synthetic construct
  source 1..1524: mol_type = other RNA
atggcggatgaagcttcacttctgagacacctcggtttgtcgccacgcgaactgaagaaaatctggtggtatcgcggtagaatgtaccaacagttttcaatcgccaagggaggcgggaaggtccggcttattatggccccagatcgtaggctgaagattcttcagtctaagctagcccccctgctggaccagctgtatcgcgtgagaaatcctgtgcacggattcgtacagcttcgcagtgttaagacaaacgcagaggcacacggcaggaggagattcgtgataaaccttgatctccaggacttttttcctactattacagaaaaccgcgtgaaaggcttgctgaaatccatcctgatcgaccccagagtggccgaaattgttgccaggctgtgttgcgtggagagccacttaccacagggggcgtcaacatctccggtgctcagcaatatgatatgcttcaggctcgacacgcagctgttgcagatcgcaaaatcagccagagccatctacacccggtacgctgacgacatcactttctcttcttatcagccccccgcccctttatttgagggagccctacccgctgtcgggcgattctccccagacatgctggctgcgcctctgcgtggagccttcgaatccaacggcttcattataaaccccgtcaaggctcattatgcagacaggaatagtcggcgtattgtaactggtgtgaaaataaacggggggttgaatgtcgatcgacggtacgtgagacggatcagagctctgctccattccattgagctgctaggcctggacgatgcacaacagaaatacggttctggagggggcaagggagctatcgcggaccaccttcgcgggacaattagctacattacccacttgaaagggagcgtagacccagtagttaggtcgttagcaacgcggtacaatcgaagtttccctgcacgccctattatgctcgctcccaccgtggaagagcggagagatagggcagtctggatcgttgagcatagcgctgacggtggtcaacaaggcaccgccttcttcctcaagaatgtgggtctggttaccgcgtcacattgcgtggagggggatagcgattttgtggtctatcacccatccaaaccgtccaacaggagtaaagtgaccgtgctcaagcggtgtgcccatcgggatctggccctcttagggcatgctgcccatagcactgattactttgacctggatgtggccgcacgatctgccgctgtcggcgatgacgtcgtggcatttggctatccaggctttgggcccggcgacaagatcaatgtccgaggcggatctgttacaagcctgcctatcaagagtggagttcctatgatcgaagtttcccaggaacttgcccagggaatgtccggcggcccgatattggatgctcacggcgccgtagtgggaattgtgcacaaaggaggacccgaggaggcacgccaactcgctattgagatcggcgtcctgttgaagtggctggccgagtga

SEQ ID NO: 7588 - RNA, 1575 nt, synthetic construct
  source 1..1575: mol_type = other RNA
atgagcagcgcagcaaggatatttggaaaacgcattcccattccaatccctcctgagtttgccgacgaatccacactactcgcatttctggggctttcaccaagagagctaaaacggatttggtggttccgcgggcgcatgtaccaccaatttgagatcgccaagggggggggcaaatccaggctgattaccgctcctgaccagcggctttccatcctgcagagcaagctccgtcccctgttgaataccttatatcgagtgagaaaccctgtgcacggcttcgtcccagccaggagtgtgaaatctaacgccgaagcccacggcagacggcggttcatcgtaaatcttgatttgcagcacttctttcctactatcactgaaaaccgcgttagaggggtactggaagccctcggggtcgaccaaagggttgccgagatcattgcccgactgtgctgttttgagagccatctgccacagggtgcgagtacaagcccagtcttaagcaatatgatatgttacaggctggacacagatctcctgcgccttgctaaaactggtcgggccatatacacccggtacgccgacgatatcaccttctcttccaaccaaccgcctgctccactcttcgatggtgctcttcccaccgtgggccgtttctctcctgagctgctggcttcagccttgagagatgctttccaaaccaacggctttatcctgcatccagacaaggcccattatgccgatagaaattcaaggcgaatggtcactggagtcaaaatcaacgacggcctcaacgtggatagacgttatatccggcgtatcagagcgctcttacattctatagagacactgggcctggcagacgctcagtctaagtttgctggcttgggcggacgaggggctttagcggctcatttgcgcggaaagatcgcgtatattagtcacctgaaaggggccacagaccctgtagttcgcgctctggcgcagaggtacaataaaagtttcggcgctacccccataaccttggtgcccacgccccaggaaagaagagacaggtccgtttgggtggtagatcacatcgaccagtacgggagtgccttcttcttgaagggagtggggctggtgactgctgcccactgcgtgaagggactatcagaggtggagattcttcatccctctaagcacacaacaactttttcagcaaaggtgctcaagaggcacgatcaccgggacctggcactgctcgacaccagcaccattcctgcaactgagtattttgagctagacctggcaactacgcctcccctcgtcggtgatcccgtgacagcagttggctacccgaactgggcccccggtgataggctgaatcaccgcccgggagttgtcagccttattacgccacaggcaggagtgcgaaagatcgaagtgtcccagatgctgacccaaggaatgtcggggggtccgattctcgatgccaatgccggcgtcgtcggcattattcataaaggtggaccaggagaaggccggcagttagcaatccatctctccgtgctgcaggaatggttgaaggagtga

SEQ ID NO: 7589 - RNA, 1611 nt, synthetic construct
  source 1..1611: mol_type = other RNA
atgggggactggcgcgactggaagggcgacttagtgtccgtcgcaaggatttttggaaagcactttccgttgcagatcccgcaggagctggcagacgaggcctctctgctggctcacctcggtctggggcctaaagagctgaagaaaatttggtggtacagaggccgtatgtacgagagattcgatattgcgaaaggtggcggaaagatccggcagataactgccccagacaagcggctaaagatcctgcaaagtaagctcacgcctctccttgatcaattgtatcgcgtgcggaatccagtgcatgggtttgtgcctgagcgatccgtcaaaaccaatgccgaagcgcatggccgtcggaggttcgtcgtgaacctggacctgaaggacttcttccccacaataaccgagtcgcgcgtcaagggccttcttggcgcgcttgctgtcgacgacagagtggcagaaattatcgcacgtttatgttgtgtcaacgaccacttacctcagggcgctccgaccagcccagtgcttagtaatatgatctgcttcagactcgatactgaactgctgagagttgcaaaagctgccaggagcatctatacacgctatgccgatgatattaccttctcttcttatcaacctcccgcccctttgttcgagggagccttacccgcagtgggaaggtttagcccagatacgctggctcccacactgcgcaatgtattcgccggcaatggcttcgtggtcaaccccgataaagcccattatgctgaccgaaactcccgacggatcgtgactggagtgaaaatcaacgcatccctgaacgttgacaggcgatacgtccggcacattagagccctcctgcattcagttgagactttgggtctgggggatgcccagcagaagtataccgatgccggtgggaaaggagttattgcagagcacctgaggggcaaaattgcctacgtgacacacctgaaaggactcaccgaccctgtcgtgcgcagccttgccatgagatttaacaagtctttcaccgcccgcccaatccggctagcacctacagtagaggagcagagggatagagctgtgtggatcgtggaacatagcgccaacggagggaagcagggaactgcttttttcctcaaggacatcgggcttgtgacagcttcacattgcgtggagggcgagtccgattttactgtgtaccatccctctaagccctcaaatcagtttaaggtttcagtggccaaaagatgcgaacaccgagacttggccttgctcggccacgccatcccaactacggattacttcgaactcgtggtggccacacaccctgtagcagtcggtgcggttgtgaccgcatttggttaccccggttttggcccaggagataagctgaatgtacggggggggagtgttaccagcctgcccataaaggggggcgtccagagggtcgaagtgtctcaagagctcgcacaaggaatgagtggagggcccgttgtagatgctcaggactgtgttgtgggcatagtccacaaagggggcccagaagaagctaggcagttggccgtagctatttccgctctgcaggacctagctgcggaatga

SEQ ID NO: 7590 - RNA, 1581 nt, synthetic construct
  source 1..1581: mol_type = other RNA
atgccttctgctgctaggatctttggcaagcactttcctctgccaatccccccggaattggccgatgagtcctccctgctggcacatctcggacttagcccgcaggagcttaaaaagatctggtggtatcgcggaaggatgtacgcacagttctcaatcgcaaagggtggcggaaaggtacgacagattaccgcaccagacaagcgcctaaaaatccttcagaataaactggctccactgctgaatcaattgtatagagtgcggaaccccgttcatgggttcgttccggcgcggagcgttaaaaccaacgccgaggcacatggacagagaaggtttgtggtgaacctggaccttaaagacttttttcccaccatcacagagaatagaataacggggcttctccgctccctgggtgtggatgatcgcgttgctgaaatcattgctcgcctgtgttgcttcaatagtcacctcccccagggagcccctacttcaccagtgctcagcaacatgatttgcttcaggttggacactgaactcctacgggcggccaagggagctagatcaatctacactaggtatgctgatgacataactttctcttcctaccagccccctgccccactattcgaaggcgccctcccagctgtcgggagattctcccctgatactttggccccttcactgagagacacatttacccgtaatggcttcgccgtgaaccccgataaggcccattacgccgatcggaatagtcgaagggtggtcacaggcgtgaagatcaatgccggcctgaatgtcgatagaagatacgttcgtcggattcgagcacttctgcactctgtcgaaaaactgggattacgcgatgcccagcagaagtatgctgacgccggcggtaaaggtgtgattgcggagcacctgcgggggaagatatcttatattacccacttaaaaggggccacagaccccgtagtgaggagcctggcaatccggtttaacaagaactttcgagcacgaccaatcaagctggccccaaccattgaggaacaacgggatcgcgcagtatggctcgtggaacattccgctaactgcgggcaacagggcaccgcgtttttcctgaaagacatcggattagtgaccgcgagtcactgtgtggaaggcgtgagcgattttactgtctaccatccgtcgaaaccttccaacaggttcgaagtgacagtcgccaagcgctgtccacacagagacttggccgtcctcgaccacgcaatacctgcttctgactatttcgagctcgaggctgctgcccagtcagtagcggtgggcgacgcagtgacagcctttggataccccggtttcggccccggcgataagatgaacgttcgtggggggagtgtgacgagtctgcccgtcaaaagcggcgtgcacttagtggaggtcagccaggagttggcccaagggatgtctggcggacctattgtagacggccacgacggtgttgtcggtattgttcataagggggggcctgaggaggcaaggcaattggctattgccatcggagtcctgcagaaatgggtggctgagtga

SEQ ID NO: 7591 - RNA, 1506 nt, synthetic construct
  source 1..1506: mol_type = other RNA
atgacgtcagcccggaggatgtttgggaaacagatccggatccccctgccacctgagctggctaatccggacgccctgcttgcttacctggaagtgtcccccgctgaacttaaaaagatttggtggttccggggcaggatgtatagtgaatttaacattgcgaagagaagcggaaaggtccgcaccattacagcacctgatcgtaggttaaagatcattcagtccaagttggcgcccctgcttgatcagctctaccgaccccggcacccggttcatggattcgtcccaaatcgctctgtgaaaaccaacgcagaagcccacgggagacgcaggtttgtggtaaacctcgatctcaaagacttctttccgacaataactgaaaaacgcgtggttggcctgctgagggccttgggtgtcgagaagggtgttgccgagatcgtagctcgcctctgctgtcatatgggacaactgccacagggcgcaccaacttctcctgtactgagcaatatgatctgctaccgactggacaccgacttgcagcaagtcgccaagtctgcgcgggcaatctataccaggtacgcagatgatatcacattttcctcttaccagcctcccacaactctcttcgagactgcagtggctggggcaggaagattttcccctgaggtgttagccccacagctaaggggtgctattgcctccaatggcttccttataaaccctgataaggctcactacgcggatcgtaacagccgacggatggtgacaggagttaaaataaacgctgggttaaacgtcgaccgccgttacataagaagaatccgggccatgatgcactcatttgaacgtgtagggcttgcggaggcccaggccaaatatgcctcaggaggtggcaaaggcagcttggcggcccatctacgcggcaagattgcctatgtggcccatctgaagggccagaccgaccctgtggttaggtccctggctcaaagatacaataagagcctccccgcaaagccaattaggttgaccccaacggtggaagagcggcgagatcgcgctgtttgggtaattgaggtgccactcaaacacaatggcacggccttcttcctcgctggagtcggcttggtgactgccgcacattgtgtggaggggctcagcgaagtggaggtcctgcacccctccagacacaccaccacttttacagttaaggtcagacactatgacaaacatcgggacgtggccgtgcttgaccacgggactatccccgcaacagagttctatgaactggagcctgctaccaaaccagccgccgtcggtgatgcagtcgttgccttaggatatcccctgtgggggctaggcgagggcctgaatatcaggccgggggaagtgtcgtcgctgaccgtgagaagtacaagtgctggtttctcagccagacgccccagcaagcgaagtgagaggggacctagcctgtctggcgtggactgcgcttctgcatcacggagttga

SEQ ID NO: 7592 - RNA, 1083 nt, synthetic construct
  source 1..1083: mol_type = other RNA
atgtccaatatgatttgctacagactggacaccgagctcttgcgggtggctaagtctgcgcgggccatctacacgagatacgccgacgacatcacatttagcgggtatcagcctcccgccccgttatttgaggctgggcctccacccgtgggacgtttctcttccgacctcttgagcactgcgctgcgtgtcgccatagaaggcaatggcttcacaattaatccccagaaagcccattatgctgataggaattcaagacgcatagttacaggcgtaaagatcaacagtggcctcaacgttgaccgccggtacgtgcgtgatatccgcgctaagctgaacagcgttgaaaaacacggcctaaaggcatctcaggccaggcattcagcaaagaacggcaaaggggatatctgtagccacattagaggaaaaattgcttatgtcgtgcaccttaagggtctggcagaccctgtggtgcggagtttggccctgaggtataatagaagtttcgcagatcaacccatgaaggtgacccctactgactcagaaaggagggatcggtccgtgtggatcgtcgagcactcggggaacgagggagagcagggaaccgccttctttctcagcggcgttgggcttgtcacagctgcccattgcgtagagaatcccgaggatctgcttttgtatcacccgtccaccccttccaaccagacccgggttagcgtcagaaagcgatgtgaacaccatgacttagcaatacttgaccacgcaatacatccaaacgagttctttgaaatggaagcggccacagtcgctgcagcggtaggcgatgacgtgacggcttgcggttaccctgggtacggaccaggggaccgactgaatatccgcaatggaactgtcacctctctgcccaggaaatccgccattgatcgcgtggaagtgagtcaagagctgtctcagggtatgagcggtggtccagtactcgatgccggcggacgcgtggtgggtattattcacaaaggagggccaaacgagggccgacagatcgctactgccatccatgaactgaaaaagtgggccgcatcatga

SEQ ID NO: 7593 - RNA, 1581 nt, synthetic construct
  source 1..1581: mol_type = other RNA
atgccatccgcagcgagggtgtttgggaaactctacccaattaacatccccgcggcccttggggatgaggctacactgctggctcatcttggtatgtctccaccggaactgaagaagatctggtggtacagaggcaaaatgtaccggcggttcagcatcaccaaaggcagcggcaaaacacggaccatctgcgcacccgactccagattaaagattctgcagcgtaaactggcaccgctgttaggccagatttaccgggtccggaaccccgtgcacggatttgtcctcgatcgctctgtcaagaccaatgccgaagcccacggggcaagaaggttcgttgtcaatctagatcttcaggatttcttccctaccatcacggaaaatcgaatcgtggggctcctgacttctgtaggccttgagaggagggtggcagaaatcgtagccagagttgcttgctatgacggccacctacctcaaggggctcctactagtcccgtgttgagcaatatgatttgttatagattggacaaggccctcttgcgtattgccaaatccgctaggactatttacacacggtatgccgacgatattaccttcagcggctatcaacccccagtggccctgtttgaggccggaccacccagcgtcggtaacttctcccctgaactcttgtcagccgcactacgaactgctgtgcagggcaacgggttcataatcaatccccataagctccattatgccgacagaaattcaaggcgcatcgtcaccggtgtgaaaataaacagtggtttgaacgttgatcgcaggtacgtacgcgatatcagggccaagctgtcctcaattgaacgccacggactgaaggcctcccaagccacgtatttttctaagggagggaaaggtgatattggtactcacatacgaggaaagattgcttacgtgggccacttgaagggtctggcagaccctgtcgttcgttccctcgccctccgatacaatcgcagcttcgcagatcatccggtgaaaataacccccactgagagtgagcgtcgcgacagaagtgtgtggattgtggagcactcaggaaatggcggggagcagggtacagctttttttctgtcaggggttgggcttgtaaccgctgcacactgtgtggaggaccccgaggacctgctggtctatcaccctagcacaccatccaatcaggctaacgtgtctgtcaggcgccgatgccagcatagagatttagcgatactggaccatgctatcagctcgaacgaatttttcgagatggaggcggcaacgaccgctgttgcagtgggcgacgacgtcatcgcctacggctaccctggatacggcccaggagatagactgaacattcggtctggcaaggtgacatcgctcccacggaagcacgcgatcgatcgggtagaggtgagtcaggaactgagccaaggaatgtcagggggccctgtgcttgacgcttctgggaaagtggtgggagttatatataagggaggccccaacgaaggaaggcagatcgccacagccatccatgagctgaagaaatggactgccgtttga

SEQ ID NO: 7594 - RNA, 1575 nt, synthetic construct
  source 1..1575: mol_type = other RNA
atgccgcgcaatccgtttggaccaccaatcagagctgccgtccctgcggaacttgcgtcggaggcagccctcttggctcatctgggcatgacagtcggtgaattaaataaaatccgttggtatagggaccaaatgtaccagacgttcgagatcgcgaagtccggaggcaagagtcggttaatctcggcacccaacaaacgcttaaaacacattcagcgacagctgctccccctcctctatcagctctaccagacacggagtcccgttcatggcttcgtctttaacaggagcgtgaagactaatgctcaatcacacctgcgtagacggttcgtgctaaaccttgacctgcaggatttttttcctaccataactgagaaccgggtggtgggaatgctgaaagccataggcatcggagctactgtggccgtagccattggctatctgtgctgcattcatggccacctgccacagggtgcaccaacctcccccgtgctgagcaatatgatatgtttcaggctagatcgagagcttcttgcctttgcaaaggcaagcagatgcatctatacccgctacgcagatgacatcactctaagttcccatcagccaatgagcgccctgtttgaaggctctcccccacccgctggcaattttgctaatgatctgctggtttctgctctgacagccatagtggtgggcaacggcttcaccattaaccctatgaaagcgcactacgctaataggcatagccgccgaatggttacgggcctgaaaattaacgatcttctcaacgtagataggagatatataaggaacattcgtgctgtactgcactctgtcgagacattggggttcgtgggggcacaaactaagtacgccacctcaggaggaaccggttcccttgctgcccaccttcgcgggaagattgcatggatctcccacattaagggtccctctgatcccgtcgtcagatctattgccctgcgatttaacacctgtttcgccgatcgcaaaatcatggttactcccacccccattgagagacgggagagatctgtttggattgtagaacatgatgacggtcaggggacggggttcttcctcagtggagttggattggtgacagcagcccactgtgtcaccgggaagcgggaggtcgaggtgtttcacccgtcaaaacatgctaacactttcaaagcgacagtgctgcaaagggacgaccatctcgacttagctatcctgggacatgagatcccagccaccgaatactatgaattgaatagagccgccctgccagtggtaacaggggatcctatgacagccgtggggtacccaaagtgggcccctggtgaccctctgaatgtgaggcctggtgtcgtgagcaccgtgaccatcaagagcgccgtccgcctcatcgaggtgacacagaagctgactcaggggatgtccggcggacctctcttggacgcaaatggcgacgttgctggggtcgtgcacaaggggggacctgaagaaggccgggacttcgcgatccacgttgaggtgttgaactcctggttggcacacctggcctcatga

SEQ ID NO: 7595 - RNA, 1488 nt, synthetic construct
  source 1..1488: mol_type = other RNA
atgactgctaaggagctcaacaaaatccgctggcatcgagggggaatgtatcagagtttcgagatcgctaagaataaagacaaaggcaggcttatttccgctcctgacgatagacttaaacatttacagaggcagctccttcggttgctggaccccctttacacagtacgcaacccagtccatggcttcgtgttacagagaagtgtcaaaacaaatgccctgagtcacctgcgcagatcatttgtcctcaatctggatctgcaggatttcttccccactatcactgagaaccgcattgtcgggatgttggaagcgctgggaatcggatccagcgtagccgccgccatcggatacctctgttgcattaacggacacctgcctcagggagctccaacatcacccctcttatctaacatgatctgttttcggctggatcgggaactgcttaacttcgccaaggtcaccaggtgcatttatacaagatacgcagatgacataacctttagttctcaccgtccgatgacagcgctgtttgagggtccactgcctctcgccggacactttgcccccaatctgctggttccgagcctcgtggccctgtttgctggtaatgggttcacaattaacccctccaaggcccactacgcagaccgccatagtcgtcgaatggtgacgggcctcaaggtcaacgaactgctaaatgtcgacaggaggtacattcggaatattcgggctgcgttacacagcgttgaaactctgggcactgtgggtgcccaagccaagtacgaggcatccgggggctcagcttcattggctagccacctcttgggcaagatagcgtggatcagctatatcaaggggtcttctgatcccgtggtgaggagcatcgccttgcgcttcaactggtgttttccagactgcaaaatcgaagtgctgccgacccctatcgaaagacgggatagggccgtgtgggtggtggagcacgatgatggacaaggtaccggcttctttcttaatggcgtcggattcatcactgcggcccattgcgtggccggcaaaaaggaagtggagatattccatccttcaaaacacagcaactccttcaaggcaatcgtgctaaagtccgatgacgacatggacctcgcagttctgtcgcatgagataccagctaccgagtattacaagctggaccaagctgcactaccaattgcaaccggggcactcatgattgcagttggttatcccaagtgggcccccggcgaccctttgaatgttagacccggcgtggtatctacgataacggtgaaaagcgctgtgagactgattgaagtgacccagaagctgacccagggaatgtctggggggcctctgctagatgccgatggggctgttgccggggtcattcataaaggtggccctgaggagggccgagactttgcaatccacatcgacgtattgaactcctggcttgccgctgccgcaccatga

SEQ ID NO: 7596 - RNA, 1683 nt, synthetic construct
  source 1..1683: mol_type = other RNA
atgtcacgggaggacgttcgcgccattaggctgctgagagagtggcgtgactggcggggggatttggtaccccagaaccccttcggccccccagtaaggattgacatccccgctgagttggctagcgaagctgcactactgtctcatctcggactgagcgtgatggaactcaagaaaatccggtggtgtcgcgggagaatgtatcagtctttcgatattgctaaggtgaagaataagatacgcgagattaatgcccctgacagtagacttaagcatcttcaacgccagcttttgcctctgctggaccagttgtatcgcgtgcgaaaaccagtgcacggattcgtggccgacagatccgttaagacaaatgccctcgcccacctaaggaaacactttgtgttgaatttggacctgaaggactttttccctagtatcaccgagaacagagtcgtgggcgtcctgaaggctctgggaattgacggcagcgtggctgctgtgatcggatacctgtgttgcgtgaatgggcagctgcctcagggtgcacccacctcaccagttctcagcaacatcatctgcttcagattagataggaagttactggcttttgcgaaggacgcgaggtgtatctacactcggtacgccgatgatattacattcagcagttaccagcccatgactaccctgttcgagggcccgttaccaccggcagggcactttgtgccagatctgcttgctgcagcatttgcctccatatttgtagtgaatgggttcgccataaacccagccaaggctcattatgctgatcgacactccagacggatggtcacaggactcaagattaatgagctgttaaacgtcgatagaaactacgtacggaacataagggccgccctacactccattgagacaatcggcggtatcgccgcacaacgcaaatttgaagcacgaggcggcactggatctctggctgcgcacctcctgggcaaactgtcatggctgcgacacatcagggggcaaactgacccagtttttcggagtgtcgcagtgcggtttaacaatgccttccccacccacaaaatcgacgtaacgcccactcctgcggaagtgcgtgacagggccgtttgggttatcgaacattacgaaggagatatagaccaatggtatcagggttccgccttctttctacgtggagtgggactggtcacggctgcccattgcgttacaggcgcctccgaagcggaggtgtatcatcccgggaaaccggccaacaaattcaaagtgaccgtgcttaagatcgacgatcacagggatttagccattcttgcgcatatgatcccagaaacagagtatctcgagttggagcgctcgacccaggtcattaccgtgggcatgctcctgaccgcagtgggctacccttcttttgggtctggtgatcgccttaatgtacgagacgggaacgtctcatcgctcccggttaaacatggggtccagtatattgaagtgcagcagaaactctcaccaggcatgagcggcggccctctgttggatgcatacaatgctgtcacaggtgtggtccacaagggaggtccttctgagcctagagacttcgccattcacatcgatgttctgaacgcctggctcgcaagtgcaagcgctagcttcgggcccaacggttccgcctga

SEQ ID NO: 7597 - RNA, 1260 nt, synthetic construct
  source 1..1260: mol_type = other RNA
atggtggcctatttgtcattaactgaagcagagcttaaaaagattcgctggtttcgccggggaatgtatcactacttcgaactggcaaaaggtaacggcaaacgtaggcggattatggcacccgacgcaagactgaagcatctacaaagggccctcctgccactgatggaaaatctgtaccgagttcgaaacccagtccatggttttgtaagggataaaagcgtcaaaaccaacgccgctgcccaccttagacgccggaatctcctcaatattgacctaaaggatttcttcggcgccatcactgaaaaccgtgtggtgggcgtactcgaagcaattggtgtccccggagatgtggctgctgccattggctatctgtgttgctgtgagggcagtttgcctcagggggcgccgtctagtcccttgctgagcaatatggtgtgtttcagacttgacagggagctgatgcgctacgctaaggagcataggtgcatatatacccggtacgcagatgacataactttgtcctcccaccaacccatggcctctgctttcgacgggcctattccacccgctggtacagttcagagtgagcttttggaccctgagctgagagggatcatcggaagcaatggcttcgagctgaaccctgataagattcactacgcagataggaattcccggcggatggtgacaggactcaaggttaacgagctgctgaatgtcgaccgtcgcttcgtccggaacttacgagctatgcttcatagcatcgagataaaggggcacgccgatgccaaagctaggttcgcgtccctcgggcactcaggatcaatgtctgctcatattcgcggcaagatcgaatggctcgcctctatcaagggaacatccgatcctgtggtgcggggaatcatattgcgctataacgcttgctttcccgggaaggcaatcgcggtgagcccaaccgacgaagaaagacaggaccgagctacctggatcaccgagaacaaaaatgggcagggttcgctgttctttctgaagggggtcggactggttactgccgcacactgtgtggccgatctactgaaccttgagatttttcacccatcaaagcatgccaatagatttggcgcgacggtaacgaaatacgacaaagacaggagacgactcagattaggcttaaagagggtgctggatccaatcgaggccgaaatgtgcgcctgcctcacagcccctctgtttggcaccggcccgagaatcctgtga

SEQ ID NO: 7598 - RNA, 1638 nt, synthetic construct
  source 1..1638: mol_type = other RNA
atgcataacccctttgggccatcaacccccccgcggatctccattcctcaggagttggagaataaggaatcaatcctcgcttatctggatgttaatccagaggagctaaagaagatatggtggtttcgcgaaaagatgtatcaggccttcgaaatccagaaacggggaggcaaagccagggtgatctcagcccctgatgatcgcctgaagtacctgcagcataagattttgctcctgctaaacagactgtaccgtgttaggaaccccgtgcacggcttcgtccctcaaaaatccgttaagactaatgccaccgcccacctgagaaaaaggttcatcttgaacatagacctaaaggacttcttccccagtatcactgagaaccgaattattggtgtcctcaagtcgatcggtatcgatgaccaggtggctcaaattatcagccgaatatgctgctcaaacggttgtctgcctcaaggcgcaccaacatcaccagtcctctccaatatcatatgcttcaggctggacaagaatttaatgagcctcgctaaggacacaagatgtatctacacccgctacgctgatgatctgactttcagcagtcaccagcccatgatcaaactgttcgagggcgtcatcactccagccggccatgtgtccccggagctgttatctctccatttgcgcaatattttcctggccaacgggtttattattaatcccgataaggtgcactatgcagataggaattccagacgcatggtcacaggcctcaaggtaaacgaatttgttaatttggaccggaggtatatacgcaacattagagcaattcttcactctattaaggtaagtgacgttaaagccgtggagacaaaatataagcaggattatggaggtaaggtcgatctgggaaaatacctgagaggtaaaattacatggctcgggtttatacggggacagagcgaccctatttttcgagcgatcgccataaggtttaatgaagaattccctgatcttaagatcgaaacaactccaacctttattgagatccgggacagagccgtgtgggtgatagaatactgcgtggatactctcgcagggctgaaagcatttcagggtagctgcttcttccttaaagatgtgggattggtgacggcagctcactgtgtgctggacgagaatgagccaatgaaggagttggagcttgaattacaccatcccagtaagcccgccaacaagttcaaggcgaaaatctgtatgttcgacaaacatcgggacctggctatccttagtcacaagattcctgctaccgagtactatgagctcgagctcagcacaaaaaccatcagcgttgacgatgaacttaccgctgtggggtacccttcgtttggcccaggcgaccagaccaacattaagaagggaacggtatccagcctgcccaaaaaatctgatgtccagttaatcgaagtgacgcagaaactggcacaagggatgtctgggggccccctacacgactccaactttgccgtagtcggagtgattcataaaggcggaccgtctgaggggcgtgactttgcggtgcacttcgacgaacttaacaagtggctgtctaccccacctatctccaaaatcctgggctga

SEQ ID NO: 7599 - RNA, 1503 nt, synthetic construct
  source 1..1503: mol_type = other RNA
atgagcggaaaagagttaaagaagatctggtggtttagagggcgcatgtaccaccagttcgagatcgccaagagggagggcaagacacgcattatcaacgctcctgataagcggctcaaacacttgcaaagacagattgcccctctccttgatcaactctactcagtgcgcaatcctgtccacggcttcgtgaccggaaagagcgtcaaaaccaacgcactggcccacctaagaaatagatttgtgctgaacatcgacctgaaagatttttttccaagcataaccgaaaacaggatcaacggcgtgctggaaagtctcggtgtagacagcggggtttcccgtataattgcacgcctgtgttgccataatgcccagctgccacagggcgctcccacatcacccgtcctatccaatatgatttgcttccgactcgacaaggagctgcttgcattcgccaagagcatgcggtgtatttacactaggtatgccgacgatatcaccttttcctctcatcagccgatggtggcactttttgaaggtagcgctcagcccagcggtgctttcgcactggacctcttgtcgtccacgctgcggaatattgtgaatggaaacggctttgcgatcaatcccgaaaaggcccactatgctgatcggcattcacggaggacagtgaccggcatcaaaataaacgagttcttaaatgtggaccgccgatatgtgaggaacatacgcgccgctcttcactctgtggagcaggtcggaaaaaaagcagctcaggaaaagttcgagaaagaccacaaggggaagtgtgatctgggagcccatctggggggcaagctctcctggctgagatacatccggggtcagtccgacccagtttttagggcaattgcaattcgtttcaacgccaacttccccgaccgaaagattgatgtgacgccaacatctcatgaggtgagagatcgggccgtctgggtcgtagaatattgcgagggggagggggaaaaccttaaaatgttgcagggaacttgttttttcctaaaggacgtcggcttagtgaccgctgcacactgcgttgagggagttgaggaagtcgaggtttaccacccatcaaagagaagtaacgtgttcaccgccactgtcgttaagcgtgataaggatagagatttggcgatcttggagcattcgatccctaccactgaatattttgagattgagaggtctgcccaagcggttgccatgggcgacgagctgacagccgtaggttaccctagtttcggccctggagacggactcaatgtaagggatgggaaagtgtcaagcctgccggtcaaaagttctctcaaactgatcgaagtgactcaaaaattgagtcagggcatgtccgggggtccccttctgaacggggacaatacagtagtgggcgtgatacacaaaggaggcccaggggaagcgcgagactttgctatccatatcgaaatgctgaatgcttggctgtcttga

SEQ ID NO: 7600 - RNA, 1629 nt, synthetic construct
  source 1..1629: mol_type = other RNA
atgagagcatggcgtgattggaaaggggatctggtcactttgcctctgtttaattctagtatccgcacaagtatacctgctgaactggctgatgaaacggccttctttctatacctacagatgtctccgagggagatgatcaaaatctggtggttcaggcgacgtatgtaccaccagttcgaaattgcaaagggcaaaggcaaaacccgcatcatagaggcaccagacgaccggctgaaacatcttcaacgcaagctgttacctcttttagaccagctatattgtgttaggcaccccgttcatggcttcgtcgccgggaagagcgtgaagacaaatgcccaggctcacctgcgaaagagattcgtactgaatattgacctgaaggattttttcccttccataaccgaaaaccgggtggctggtgtgctggaggctctgaacatcgacggacgagtttcgagattgatcgctaggctctgctgtcacaacggccatttgccccaaggcgccccaacctcccctatcctgtccaatatgatttgtttccgcctggacaaagaattgctggtgtttgccaagagcatgcggtgcatctatacacgctacgccgatgatattacgttcagttcccaccaacctatggctgccatgtttgaaggagccgcggccccactcggacggtttaactctgacttgctcatccagccttttaggaatattatcgccagtaatggtttcagcctcaatgcagacaaagcccattacgccgatcgcaactccaggcggatggtgacaggaataaaagtgaacgaactcctgaatgtcgacaggcgttacgtgcgaaatatcagagccgctctgtattctgtggagaaacttgggaagaagggtgcccaagacaagtttgaaagcgagcatggcgggaccagcaagctcgcagctcaccttgcgggtaaaatcgcatggcttgcacatatccggggccaaagcgaccccgttttcagagccatagcggtgagatttaacaagaacttcccagaggctcgcattgcggtgacacccacttctgaggaaatccgtgatcgagccgtatgggtagtcgagcatgaggaagcccagggaactgcttttttcctgaagggagtggggctgattactgccgcacactgtgtcgaaggagtgaaggaggctcagctgtatcatcccagtaaaagggcaaacgaatttactgtgagagtggtcaaccgggacaaggacagagacttagccctccttgagcacaccattccttcaaccgagtattttgagctcgacagatcaaaccagccggttgctgtcggccaggagctcactgccgttgggtacccatcattcggcccgggtgatcgcttgaatgtccgggatggaaaggtgtcatcacttaccgtacagcacggggtgaggttgattgaggttacccagaagctgccccaggggatgtctggtggacccttactgagctcccagtgcgcggtggtcgggatcattcacaaaggcggcccagatgagggacgggacttcgcaattcacatggatgtactggcagcttggctcgcagagaaaccacccggcgatggctgcacatcctga

SEQ ID NO: 7601 - RNA, 1578 nt, synthetic construct
  source 1..1578: mol_type = other RNA
atgccccccagtttttttgggatccccgtggttcgggtcgcgattccacctgagctggcctcagaagctgctttgttggcctacttaggtgtttccgccaaggagctgaagaagatttggtggtttaggggccgaatgtaccaccagtttgaaattgcaaaaggaaacggcaaatcgcgcattattaatgcccccgataaacggttgaagtatctgcagcgcaagatagccgcgttgctttatcatctctaccgtgtgagaaacccagtgcacgggttcgtcgccggaaaatctgtgaagaccaatgcgctggcccatctccgcaagcggtttgtgctcaacatcgacctcaaggactttttcccatccattaccgagaacagagtgactggagtcttagaatccttaggcatcgattctagagtcgcatccattatcgggcggctgtgctgtcataattcacatctccctcagggagctcctaccagccctgtgctgtcaaacatgatatgtttccgtctcgacaaggagctacttgcatttgctaaagcatccaggtgcatctacaccagatatgccgatgatattactctgagtagccatcagccgatgactgcccttttcgaggctgttcctccctctgggcattttgcccctgaccaactgaagccagcgttcagaaatatcatcgtaacaaatggcttcgccatcaaccacgataaggctcactacgccgatcagcactcgcggcggacggttactggacttaaaatcaacgagctgctaaacgtggatcgaaggtatgtgcgaaatattagagctgccatatactccgtggaaaatctgggcaaaaagaccgctcagaaaaaatttgagagctcacacggaggcacgagcgatctggggaagcaccttgaagggaaaatcacatggctgaggcacataagagggcagtctgatccagtctttcggagcatcgcagtgaggtttaatactagtttcccggaaaggaaaatcgaagtcacacctaccgctgcagaagtgcgtgatcgcgcagtctgggtagttgagcatttcgagggcgacatggctcaaggctcagcattcttcctcaaagacgtgggtcttgtcacagcagcccactgcgttgcgggggttgaagaggtggaggtctatcaccccagcaagccatctaacgcatttaaggccaaggtgctcaaacgcgacgagcccagggacttagcaattctcgaacacgccattccgcccacagagtacttcgaactggagcaatccaaccatagtgtggtggtgggcgagggactggttgccgtaggatatcccagcttcggccctggtgaccgactgaatgtacgcgacggtaaggtcagttctctgccagtgaagcacggcgtcaaactgatcgaagtgacccagaagttgagccagggcatgtccggtgggcctctactggaccacaatgacgccgtagctggtattatccataaaggagggccaggagaaggcagggacttcgccatactgatcgagatgttgaacgattggctcgctgagtga

SEQ ID NO: 7602 - RNA, 1542 nt, synthetic construct
  source 1..1542: mol_type = other RNA
atggacaatgagactgccctcttgaagtatctaggcgtgtctgccgacgagttaaagaaaatttggtggtttcgagtccgcatgtaccatcaattcgagattgccaagggcaaggataagacacgcactattacagcccctgatgaacgattgaaatatcttcagcgccaaatcgcacccctgctggaccagctgtacagggtacgcaacccagtacatggcttcgtcgatggaaaaagtgttaagacaaatgccctcactcacctgaggaagagatttgtcctaaatattgatctcaagtcctttttcccatcaatcaccgagaaccgggtgattggactgcttgaagctctcggcattgataattgtgtggcctctatcaccgcgagattgtgttgctacaattctcacctgcctcagggcgccccgacatctcctgttctctccaacatgatctgtttccgactggacagagagctgctagcatttgcgaagggaaccaggtgcatatacaccaggtacgccgacgacatcacattcagcagccatcagcccatggctgccctctttgagggttccgcgccacccagcgggcattttagtcctgacttgctgatacccgccctgcgtaatacattcgcatctaacggttttacgatcaacccccacaaggctcattacgcagacagacactcgaggaggatggtcaccgggctgaaggtcaacgagctgctcaacgtggacagacggtatgtacggaacatccgggccgcattgtattcagtggaaaccctgggcaaggccgctgcccagaccaaattcgcaagcaaccacggagggacgagtgacctgggtgcttaccttcagggcaagattacctggcttaggtttatccggggccagtcagaccctgtattccgtgccatagctgttagattcaatgcttccttcccggatcggaaaattgaagttaccccaacagcagacgaggttcgcgacagggcagtgtgggtggtggagtactgcgaaggggaaggagagaagttaaagaccctgcaggggagcggatttttcctcaaagatgtcggccttgtgaccgccgcgcattgcgtggagggagttgacgaggtggaagtgcaccacccttccaaaccagctaataaatttaaggctacggtggtgaaacgcgacaaagaccgagatctggcaatcttggaacatactatacctgcaactgaatatttccaactcaacggagcaactcaagctgtcgctgtgggcgatgaattaactgcggtcggttatcccgggttcggaccaggagatcgggtaaatgtgagagaggggaaggtgagctccctggctactaaacacgccgttgagctgattgaagtcacacagaaactgtcacagggtatgagcggtggccccctgttaaatagtgataacgccgtcgttggcgtgatccacaaagggggcccggatgaagggcgtgattttgccgtgagaatcgagatgctcaacacatggcttgccgagtga

SEQ ID NO: 7603 - RNA, 1584 nt, synthetic construct
  source 1..1584: mol_type = other RNA
atgcctaaccttccccctccgtttggcgcctcaataaggttagctctccccagggagctcgccgacgaaaacgctctgctggtgtacctggggctctctcctaaggagctgaggaaaatttggtggtgccgggcaagaatgtatcaacatttcgatatcgccaaagggcgggataaagtccgcaccatcagcgcccccgataaacggctgaagtacttacagcgaaaactggctgctttgctgacacagatctacagaccacgccacccagtgcatggatttgttgtggggcgatcagtcaagacaaatgccgtggcacacctacagaagagatacattctgaacatcgatgttaaggatttcttcccctctattaccgaaaatagagtggagggactcctccattccctcggtgtggacatgcgggtagccgcaataattaccaggatcgtgtgcaatgagggctgccttccacagggcgctccgactagcccaattctgtctaacatgatctgtttcaccctcgatcgccggctcatggcgttggccagagataacagatgtatttatacccgatatgccgacgatattactttttccagtcaccagcctctcgcgtctctgttcgaaggcgctagcccgtcagccgggcagattacacctgacctgttgagcccagctttgcgcgacaccttcgtccacaatggctttgccctaaatcccgacaaggcccattacgcggaccgccattcccgacgcacagtgactggactgaaggtgaatgaactgctaaacgtagacaggaggtttgtgcgtaatctgagggcagctttacacagtgtcgagactcttgggatcgccgcggcacagcaagtgtatcaggatcgctatggaggcagcgcgtcgcttggcgcacacctagagggcaaaatcggatggctgaggcatatacggggtcagtctgatcctgtgttccgagccctggcattgcgtttcaacgcctgttttcccgatagagaacttcgtttaacacccaccgtgtccgagataagagatagagccgtttggcttgtggagaatgacgagacaatcgagcagggcactgctttttttctggcaggcgccggattggtgactgccgcacactgcgtcgagaaggccacggaactgacgctctaccacccaagtaagcctgctaacaagttcgtcgccaccgttctcaagtgcgacgcacatcgtgaccttgctttattgggtcacgacatcccccctactgagtacttcgaactagaacggtccaccgccgctgtactggtcgggcaagaactcacggcagccggatatccaggcttcggacccggggatcggctcaacgttcggcttggcacagtcaccagcttgcccatcaaaaggggtgttcatatgatagaggtgagtcaaaaactgggacaggggatgtcaggggggcctgttctggacgaaatgctgggtctggtgggcgtaattcaccgcggaggtccaggcgaagctagggactttgctatccacctggacgtcctgaactgttggctggcagaggagtga

SEQ ID NO: 7604 - RNA, 1434 nt, synthetic construct
  source 1..1434: mol_type = other RNA
atgtatcagcaattcgatatcgccaaaagcggcaaaaaggtgagaagcatcagcgctccggacaagcggctgaaacaccttcagcgtcagattgcaccactcctcgactctctgtaccgggtaagacacccggtgcatggcttcgtggctaacaagtcggtcaaaactaacgcccaggcacatttacgcaagcggtttatccttaacctcgaccttaaagatttcttcccctctatcactgagggaaggattggaggtctgctgcaatcgattggtatcgacagtagagttgcggacattattgcccggttatgcaccaatgacggacgcctcccacaaggggcacccacatctcccgtcctgtctaatatgatctgttttaggcaggataagcagttgatgtccttcgctaaggagaataggtgcatatacaccagatatgctgacgacattacattttcaagtgaccagccaatggcagccctgttcgaaagtgcggtgcccagtcctggccgattccctcctgatctcttggtcacccggttgagggcgatttttatggctaacggctttgagatcaacgctgataaaacgcattatgccgataggcatagcaggagaatggtcaccggactgaaggttaacgaactgattaatgtggatcgccggtacgtgcgcaatattagggctgccctatactccgtacgtacactcggggccgaagaggctcagaaaaagtttgaaactaaactgggcgggaagtccaatattggatcccatctggaggggaaaatcgcatggctgagatttatccgcgggcaatctgaccccgttgttcgagccatggccctgcgctttaacgccgccttcccagatcggaagatagatgtggtgccgacgcgagacgaggtgcgagatagggcagtgtgggttgtcgataatgacaccgacatatcacagggctcagcgttcttcttgaagggcgtgggactggtgacagccgcacactgtgctaagggggctaaggaggtagaagtataccaccccagcaaacgttcaaacaagttcaaagccactgtagtcaaacgggacgaacagtttgacctcgccatactgaatcacgagataccaaccaccgagtactatgagcttgagagatctctaacagcagtggccgtgggcgatgaccttactgcaatcgggtatcctgacttcggtcctggtgatggcttgaacgtgagagggggcaaggtcagctccttacctgtgaagaatggagtctccatgatcgaggtgacacagaagctgtcccaggggatgagcggtggtcccctcctagatgacaacgatgccgtcgttggagttacccacaagggcggcccagatgaaggacgagactttgtggtccgcatcgaaatgatcgataaactgtga

SEQ ID NO: 7605 - RNA, 1638 nt, synthetic construct
  source 1..1638: mol_type = other RNA
atgccctctagtagtgcctttggattccctatcgtgtcggttgccattccatgtgaactaaagagtgaggagaagctactggaatacctggctatcagcacgaaagagcttaaatttgtctggtggtatagggagcggatgtatcgcaaatttgagctggggtccaagaaggggaaggtgcgggctattgccgcgcctaataaccggttgaaatatatacagcgcagaatcgccgtgctcctgaatcagatttaccgggtgagaaatcctgtccacgggttcgttaaggaaaagtctgtgaagactaatgccctctctcaccttaagaagaaatacattgtgaacatcgatctcaaggatttctttccttcaattacggaaaaccgagtgatcggagttctgaattccctcggtatcgagcggtccgtgtcccaaatcattgcaaagttttgctgctgtaacggacatttgccgcagggagcacccacttcgcccgtcatatccaatatgatttgctttaagatggacaagagcttaatgagtatggcgaaggaaatgaggttgatctacactagatacgccgatgatattacattctcaggttaccgtcccatgactgtcttgtttgagggggctgccccattccctggcaggttcgaccccaaccagcttgccagcgagttacgacagataatcagtggtaacggctttgtattgaacgccaacaaagcacattatgctgacccaaatatgcgacggatggtgactggcctgaagatcaacgagatcattaacgtggaccgtagatacataaggaacattcgctctgcactgtactcagttcagacaatcggggagacagcagcgcaggataagtatcagattaaatacgggggcagatcatctctcggagcccacctggaaggaaaaataacatggctacgatatatccggggacagtcagacccagtctttagggcgatcgctgtaaggtataacctgtgttttcccaaccggcgaaaaattgaagttattccaacaccggaagaagtcagggaccgcgccgtctgggtcgttgagcactctgagggcgatatggctcaaggctctgcttttttcctgaaaggcgtgggcctcgtcaccgcagctcattgcgtggaagaagccaccggcctccagcaaatcagcctctaccacccaagcaagccgaataatctgttcgccgcaaccgtagtgggtatcgataagcacagagacatagccattctggagcatagtatcccacttaccgagttcttcgagctggaaagctcattcagggtggtgcaggtgggagacaatatgaccgccgtaggattccccggtttcgctaaaggcgacagacttaacgtgagggagggcaagatatccagcctgcctgcaaagagcggtgtccgcctggtggaggtgacacaaaaactgacccagggtatgagcggcgggcccttgttagattccgacaataaagttgtggggatcatccatcgcgggggacctggcgaagggagagactttgctacccacatcggggtactgaatgattggctccgtgagcgccctgaaggcgtttccaaaaaaattgaggaggtcagaggatga

SEQ ID NO: 7606 - RNA, 1368 nt, synthetic construct
  source 1..1368: mol_type = other RNA
atgcccaattttttcggcgactttcatacgcccagagtcaaactgcctgaggagtttagcagcaaggaggcctttcatcagtatcttggactgagtacagctgagctgaagaaaatctggtggtacagagaacgtatgtacaaacagttcccgctcgctaaaaagaacggcaaaaacagactgatttccgcacctgacaagagactcaagttcctccagggcagattacttttactcctaaaccaaatctaccgtgcaaggaatccggtccacggtttcgtcttcgaccggagcgtgaagacgaatgcagaggcccatctgaggaaaaggtacgtgttaaatattgacctgaaggactattttctgtctatcaccgaaaagcgtattgtcggactgctggaaagccttggcattgacactgaggttgcctgcatcgccgcacgactctgttgcttgaatagtaggttgcctcagggggccccaacttctcctatactgtcaaacatgatctgcttccgcctagataagaggctccaaaagttttccaaggaaaacagattcatctatacccggtacgcggacgacataaccctatcctctcagcagcccatgacctcaatgttcaagagtggtactatcgtgtccggatcaattagtcccgacgaccttaatgctactttcgttgatatcatcagcggcaatgggtttcaaataaacccacagaaagtgcactacgctgacaggaattctcgccggattgtgacagggattaagatcaacgagcttctgaacctcgatagacgatacgtgagaaatattagggccgctctgtacagcgtcaacaccctgggccagatcgaagcacagcgcaaatttgaggatgtgcacggaggagattgtgacctctcccggcatttgcgcgggaagataacctggctgggctatgttcgaggacgctccgatccagtatttcggtcaatcgctcgacggttcaatggatgctatcctgatatgaagatagagacagtacccacagccaaggaagtgcgcaatagggctgtctgggtgattgagcacttcgaaggcgattgggcgcaagggaccgcttttttccttaaaggtgtaggtttggtgactgccgcacactgtgtgaaaggggccgagaaaatcaaaatctatcacccagaaaagcggtctaacgaattcgacgtgcatgttgttaaaatcaacgaggacctggatttggccgtactgcaccactcgattcctacaactgaattttacgagtttgatcagacaaccaaggatgtggccgtcggcgatgagctgattgcgctcgggtatccaggcaacccacccgaaaaatga

SEQ ID NO: 7607 - RNA, 1440 nt, synthetic construct
  source 1..1440: mol_type = other RNA
atgtatcataattttaatattgggcaccacggcagaaaattgcgagtgattaacgccccaaacgaccgacttaagtatattcagcgacgcctccttaaggtcatctccggtatttattccgtgcgtgacccagtgcatgcctacgtcgaaggccggagcataaagactaatgccgcaagccacctcaagagcaagtacatcgttaacctcgatttgagtgatttctttccatccattacagaagataggatagttggactaatgaacagtctctgtatcaccccaagagtatcagccatcataggacgcctgtgttgcatggggggatatctgccacagggggctcccaccagccctatgctgtccaatatgatctgctttaggatggatagggatttcctgagcattgctaagagatacaggtacatatatactcggtacgccgacgacattaccatctcctcccggtcaccccttaccaatctgtttgcgtctggcgcacctcccgtaggacacttcgatgcaaacatactttcaaaggatgtcatctccatcatttatactaacggcttcaacataaactctcagaaatgtcattacgctgacaggcatagcagacggatggtgacaggcctcaaagtcaatgagtttgtgaacctggatcgcaaattcattcggaatatccggtctacgctgtactcaatagaaaagtttggtatcgctaaagcgactgatgagttcatcagcaagcacgccgggaaaggaacacttcatgcccacttacgcggtgagattgagtggcacggccacattagggggagaagtgaccccgtgttccgtaaaaatgccgatcgctttaacttgctcttcaaacctaagatcctggtggagcctacatacgaggagatccgtaagttcgccgtctggatcgttgataacaatactgcatgtgatcaggggacatgttttttcgtacatgacatcggcctaatcaccgccgctcactgcgtggaaggagctaccgacatagacgtctacaatccgctgaaccctacgcagaagtacaaggctaatgttcaaaaaatcgacaaacacctggacttagcaattctgtctcactccattcccacatcacagtacaggaacattaaaatcagcaaggtcagagccagtgtgggacaaagtatcattgctgcagggtatcctgattatggcccgggggacagtctgtcgatcagaactggcaccgtgtgctctctgtcaatgaaatccggtgtaggccgagtggaagtgacacagaagttgtcgagcggaatgtctggaggccccctcattgaccgcgacaattgcgtgtttggggtgatccataagggcggttctaccgaggagaaagacatcgcggttgaaatttctgaattaacgaagctggttcatgcatga

SEQ ID NO: 7608 - RNA, 1692 nt, synthetic construct
  source 1..1692: mol_type = other RNA
atgaacggtggggaacacctcgtaccgagtgggtcctatatctttgggagcgggaagccacgaatagggatccccgatgagctgaccaccctgtctaaaatgttggattacctgggcatttccgacaaggaattgctgaaaatccgtttatctaggtcattcatgtactccgagtttacaataccatcccccaagaaagcccgcctgatttcagccccagacgctcggctgaagtttctacagggaaggcttaagagctctttcgaaaagttttaccgcccccgccttagtactcacggtttcgtgtccggacgtagtattattaccaatgcggccattcacgctcgaaagagacatgtgctcagcctcgatctgaaagccttctttccctccataaccgagaatagagtcagaggactgtttcggaacctaggcttcgcaacggacgtgtgtgatgcaattactactatatgttgtcatgctggatatcttccacaaggagctcctacttctccgattatttcaaacctgatctgtttcagcctagatcgcgacttgcattcgtttgcaaaaaagcaaaatctggtgttcactaggtacgccgatgacatttcaatctcaacaaacgggacaccagccggacttttttccgcaacagtcccctctccaggaaagctggacattagtgccttgtcggtcgatttgatcgacgtcgtagttaagaatggattcttcctcaacgaagagaagatcagattcagcagcggctctcaccgaaaaatcgttaccgggctgatcgtcaacgaattccccaatgtgcctcgcacatacatctccaatattagggctattctctttagcatcatgaaagatggctatgcagtcgcagaagccaaatttcgacagaagcggccctctgcgaaacgctccctggagcagtatctccggggcaaattaaaccatctggctaatgttcggggcaaaggtgaccctatctacagatcactcgcagacaagttcaataaagagtttctacctagtctggcaacagaaccaaccccaagggaacggcagagcagcggtatctggattattgaatggcagtataatgaccgtaagatcgataagttgtacggggaggcggaggccaacggacaaggcataatgtccgtcactgaaggtgctcaggggacggcctttttcctggacggtgtgggccttgtatccgctgagcattgcgctccccctgaggagatcgatttagagtttttccgggtatttcaccccagcgcacctaacctcaaattcgaggtgaaggtggcgaagaggtgcaaagtgcgcgacatctgcatcctgaagcacgatgtgcctgagaataaatttgagggcttaaagccgtgccgagtccctgctagaggaggcgacgtggttagagccttcgggttcacggactatcaggtgggcgacgccgtaaccacaagcaggggagaagtgagtcacgtggccacccggtctggggtgaaactgcttaacctgagcttcaagatcggccagggcatgagtggcggtcccataatggataggatggaaagggttgttggcgtcgttcacaagggcgggcctctcgagttgagagattacgccgtgacccttaacgccgtgctctcactgcatgaggaagcctctctgtga

SEQ ID NO: 7609 - RNA, 1608 nt, synthetic construct
  source 1..1608: mol_type = other RNA
atgctctgcataggtcgggaaggagggggagcaccattcacaatgcctaccttgcccaaggccctcggtagcgccaatgacttttatgcttatctaggtgtcggcgctggcgaacgaaaatttttggaaaagcacgccttccataggtataagcgcgtgattgtgccgaaacggagaggaggcacgcgagtacttatggtccctgatcggcggttaaagttcctccagaggaaggcccaccaactgttaaatcagctttaccgcccgaggaccccagtccatggcttcgtgaaacagaagggagctatctccaacgcaaatgaacaccagagaaggccttatctgttcaacatcgacctccgcaactttttcggtgtgatttctagacgacgggtgctgggcatgctgatctccatggggcttcctgatgatgctgccgaggccgtgtgtagcgtctgcttgacagccaatcagctgccccagggggcaccaacttcaccgatcttgtctaacctggtcgcctaccgtctcgaccgagacttaatgaagttcgccaagacttacaggctgaaatacacaagatacgccgacgatattagctttagctcttacgctcctccgctcgctttatttaatgcaggactcccaatcccaggcagagtgaaaagcgatcaacttagtgtcgagctgtccacggtgctcgctaccaatgggtttgagatagcacctgacaaagtttggttcgccggaccaaagtcgcgcaaggaagtgaccgggcttgttgtaaatgagtttacgaacctaaaacggtcattcgtgcggaacgtgcgcgcagctctgtacaagaccgaaaaattgggccttgctgcggcccagtctgcataccagaaaaagtatactactaacgccaccttggagcaggtactgcgcggaagactagagtggatagcgcaagttcgcggtcgcagctttgatccctataggactcttgcaaagagatttaacaacctctttcccaactccccactccctatcctgcccacccatgaggagacagccgaacgtgccgtgtgggttgtcgagttcttcgcggatgaggataactgcgcacagggcactgccttctttctggcgggggttgggctggttactgcccaccacgtgcttgagaagctgccccctggcgcgcatgctgacttgtatcgtccctccggaggcggaaataagttcaaagcaacccccagcaagagatcttgtcctattagagatctgatgatcctcgagcacgatgtgcccaccacagactacctgtccctgccagtggtcacaagtcccgaacagcgagatgacaaaatcgtcgcactgggctttccagactatgggcccggggaccaactaagtaggaggggcggacaaatttacggccgggctacaaaacacggcgttaagttactcgaggtgagtgctattctgtcagatggaatctcgggtgggcctgtggtgaatgaccagcatcaggtaattggcatcgctaaaaaagggggtatagaagaaaggaagcagctggccgtagaggtttcagaactgctgaagctggccgacgagtga

SEQ ID NO: 7610 - RNA, 1455 nt, synthetic construct
  source 1..1455: mol_type = other RNA
atgctgtctgacactgcctattttacctatctgggtgtaggagcaaaggagcggcagttcctggagaagcacgctttctaccgatattcagaagccaccataccaaagcgacgggggggaaccagaacactcctcgtgcccgaacgacggctaaagttcctccagcgccgtactcatttgctgctgacacagttatattccccccgcgctccagttcacgggttcgttgcccacagaggagcaattacaaacgctaacgcccatcaatcacgtccataccttttgaacattgacctccggaactattttggcaccataactcggaggcgagtgctgggcatgcttcagagcatgggtctggacgaggccgtcgcccttgcagtctgttctatttgtatgactcggaatcagctgccacaaggtgcgcctactagcccagtgctgtctaatcttatcgcgtacagtctggatagagatctgatgaaattcgccaaagactataggttcagatacacgaggtacgctgacgacatctctctgtcatcctatgctccgccggtcgccctcttcgagcaaggagtgccaccccccggaaaaatgacagttgaacagctgtccgcttcactgaggagcgtgattacttcaaacgggtttgagattgcgccagaaaaaatctggttcgccggccctaaaagccgcaaggaggtgaccgggctcgtggtgaacgagttcaccaatctgaaacgcacgttcgtgcgcgatctgagggccgcacttcataaggtcgagacgatgggcggtgcagcagcagagaaggacttccaggccagatacaaaacaaccgcttctcttgaaaagattctccgcggcaggttggaatggatcgcccaggtaagaggacgcagcttctcggcctacaggaccttggcgaagagatttaatcaacagtttcccgctagcgcggtgaccatcttacctacttatgctgaaatcgccgagcatgcagtatgggtgattgacttttttaatggcacagtttgcgagcaggggactgccttttttctggagggggtgggcctagtgacagctgatcatgtcttgcagaacctccccgtaggagtcagcgccgaaatctaccgcccatccgggggaggcaagaaatttaaggccacacccagttcccgtaggtgcccttacagagatctggcaattgttgatcacgatataccgaccggcggttacctatccagacctgtgacatccagtcctgagcggcgggacgatgatattatcgccatgggctttcctaattacggccccggggaccagttaagcaaacggcgaggtcacatcattggaagtgctaccaagcacggcgttaagttcatcgaagtcagtgcaatgttgcccgggggaatctctgggggccctatcctcatgatcgctataaggtga

SEQ ID NO: 7611 - RNA, 1581 nt, synthetic construct
  source 1..1581: mol_type = other RNA
atgccaaccgtgcccgctgaactcaaaacggctaacgccctcttcgcacacttaggggttgggtccgccgaacggaagttcctggaacaccacgctttttacagatacactgaggtggccatcccgaagagaagaaaaggcgagcgcaaactgctggttccagagaggaggctcaagttcttgcagcgcgagatgcttaagctgctgtctcagctgtacgtaccccgggaccctgtccatggattcgttgtgggcaggggtgcgctgacgaatgcttccgcccacgaaaaaagaccttatctcctgaacatcgatctgaagaatttttttggagtcatcgcccggagacgggttcgtggaatgcttttgtcattccatcttgaggaggaaatagctgaggcaatatgtgacatttgtactaccaggaatcagctgccacaaggcgcccctacatctcctatgttgagtaatatgatcgcataccgattggaccgggatcttatcaacttctctaagacccacaggctgcggtatactcggtacgcagatgacatctccctgtttagttatacccccccaatggggttattcaatgccgggttacccaactcaggaagggtggccgaagagcagctcagcacaggtctgcgttcagtcttctcgaccaatgggttcgagacagcgcctgaaaaaatttggtatagcggaccagacttccgtaaggaagtaacaggtctgattgtaaatgagttcccgaatgtgaaacgcacattcgtcagaaacctgagaagctcactatacaaggctgagactatgggcatctccgctgccgagaaagattatcaaaagcgatacgggacaacagcctctctgcagcaggtactccgcggcagactagaatggattgcacaggtccgaggccggagttttggcgcctataggactctcgcaaagcgatttaacgcaatatttccagcgagtcccattgctgtgcttccgacctatgatgaggtggcggaacaggctatctgggtcatcgacttttgcgaggacgtggcaggcaagcctgagcccacttgcgcacagggcactgcattttttatagcgaacattggtctggtgaccgcccaccatgtgctcgctgatctccccccaggctacagcgccgtccttcacaggcctagcttaccaggcaagaaattcaaagccacgccaaccaagcgccagtgcccttaccgcgacctgatgattctggaacataacgtgcccgccaccgactacttgtctttatcagccgccacctctcccgagagaaggaacgctcccatcgtggccctagggtttccgagttttaacgctggagatgaactagggacacgcagcggactggtggtggggaatgccacccgacacggggtgaaaatgctcgaggtgtccgcactcttgttgagcggcatctccggaggtcctattgtcaacgatcgcgcccaagttgttgccgtggcacataaaggtggatatgaagaaaataagcaactgggcgtcatcgtttccgagctgattgctcttgctaacgagtga

SEQ ID NO: 7612 - RNA, 1557 nt, synthetic construct
  source 1..1557: mol_type = other RNA
atggcggctcttcctccccaactaacctcagttgcagcccttcatgcgtatcttggagtgggagccggggaagcacgattcctttctcgttatgcgcaccaccggtatcgggcagtgaatatcccaaagcggaggggcggcttccgaaacctgctggtacctgaggataggctgaaattcctccagcgtaagatgctggagctcctcgaaccccggtataagcctcggcctgccgctcatggttttgtagttggccggagtgcaatcacaaatgccaattctcaccaagccagaccgtacctgctcaatctggacctggagaactactttggaaacattacccgcaaccgggttcatggcatgctgcaggctattggattcgccccggaagtggcaagagccatctgccatatctgtatagtgaacaatcagctgccacagggtgctcccaccagccctctattggctaacatggtcagcttcaggctggataaggacttgactcagttcagcaaggctaatagaattagatatacacggtatgccgacgacataacattttcctcgtacgtgcgaccagtggcactgtttagcgagcccttacaggaggcaggcgctctctccgttgaggggctcagtaaggagctgcgactgataatctcaagcaacaactttacaatcaacccagtcaagactcgctacgcggaccgcaaaagcaggaaagaggttactgggctgattgtcaacgagtttaccaacgtgcggagaactttcatcagggatctccgcgcttcactgtacaaaatcgataaattgggactaagtgccgcccaaacttcttacaatgagaagtatggatccgacgccttgctaaaggatgtgcttagagggcgcctggaatggttagcccaggtaagatctaggtctttctatacgtatcgtaccttggcccagaggtacaacaagcattttcctgataatccagcccccattgatccaacaaatgaggaagtcgccaaatccgccatctttgtgatcgaacacttcgatggggacggcgcccaaggcacagctttcttactcgacggggtcggacttgtgaccgccttccacaccctcgacggaatggtaagcgagtgggctgatttgtaccgacctcacgagcccacgaagaagtttagggcgaaagtggggggtaagttctgcaaacacagagacatcgcactgcttgaacacgatattccggcagaagaccaggcttcattgcgccccgcaacaggcgccgagcatgtcaagtcttccatcattgcactcggctacccagaatttgcttcaggtgacggactgagtgaaagaactggtaagatagtggggcgctccacgaaaagtgccgtcaggtacgtcgaggtcgatgccattctgggtgacggcttatccggcggccccatcgtgaatgatcgctacgaggtgattgctctgacccacaaaggggggctcctggaaagcaaacagctgggcgtggacatagtggagattaccaaagttgctgaagcatga

SEQ ID NO: 7613 - RNA, 1554 nt, synthetic construct
  source 1..1554: mol_type = other RNA
atgccaaccctgcccccagaactgatgaccgttcctgctctgtacgcaaagttgggcatcgggggcgcagaggcaaagtttttggctcactatgtcagacatcgctacagggctagccagatccccaaacgtagggggggctatcggacattactggctcctgataatagactgaagtttcatcagcgggagctgctggatttgttgacacccctgtaccgccctaagcctgccgtccacggtttcgtcgcagagcgctccccaatcaccaatgcgaacgcccatcagggaagaccctacctcctgaacctggacatttccaattacttcggcgtaataacaaggaacagagtgcgcggggtgctgattgcagtaggtatgcccgcagctgtggctgacgccgtgtgtaacctcaccgtggtggacaaccagcttccacagggtgcacctacctccccgctcctggcaaacatggtgacgtttaggcttgatcgtgaccttactagctttgccaagacacacagactgcggtacacaaggtacgcggacgacctgacctttagcagctacgttcgacccactgcacttttcgctgaggccgaaccagcaccgggactcattgatatcgccgaactagcccccgtgctatctggcttgattacgggaaataacttcaatcttaacccagtgaaagcccgctactgcgtcagtaaaacccggaaacaagtgaccgggctcgtggttaacgagttcactaatataagacgggattttctgaggaacgtaagatcaagtctctatcgtatggagacactcggcgtggccgatgcagaggcagaataccagtccaagtacgatcccaaagccaaactgcacagcgtggtccgcggcaggctggaatggattgcccaggttcggggcaggtcgttcgagccttatagaatcctggctgggcgattcaatgccttgtatcctgccgccactccattaccaattaaccccactaacgacgagcttttggctaaggccgtatttgtgatcgactatggcaaaggcaagaatatggctcaggggaccgctttctttttagagggagcgggactcgtcacagcgcaccatgtcctggctaaaatgcagtctggatctgccactctataccgagccgatgagcctacaaaaaagtataaggcgcggttctctgcccgcgtttgctctcatcgagatttagccatactggaccacgacgttccagtgtcagagcagacgtttctcaagcaagcggccggaatcgaccggattaagagcaccgtaaccgtcgtcggctatccggaattcggcccgggagatagtcttgttcaaatggaaggaaggatcgtaggtcgcaatactaagtcagctgtgcgatatgtgcaggtggatatgcaggttggtgatgggctatccggggcccccatcatcaatgacagatatgaagtggtggctgtcggccacaaagggggtccttcagagagtaagcaactgggaatagacgtggccgaagtccacgggctctga

SEQ ID NO: 7614 - RNA, 1704 nt, synthetic construct
  source 1..1704: mol_type = other RNA
atgacacgtagggtgaatgccacatttgaccgaatgctgccacaggatgtggccgtagcattcggcgggttgcccgcaattagaaggcgtcgccgccttagtttcatgagacatattcctcagcagctcgcctccgaatctgaactgttggtacatcttggcgtgggtgctgaagagctcgccttcctgaggcgctggacaggatttaaataccggactgtcaagatctcgaaaaggagcggcggagaaaggacgctgctgatccccgacgatcgactgaaatttctccagaagaagatcctagggatactgctgaatctgtacagaccccgcgctccggttcatggattcaccaaagatcgcagtgcgttgacgaacgctaaagcacacgaggggcggcgctttctgttgaacctcgatcttaaggactactttgcttctgtgtccagaaacagagtagtgggacttcttgagaagctgggtattgacgctgccgtggctgacgtcattgcagcattttgcatcttccgcgaccaattaccacagggcgctccaacatcacccatcctcgcaaacatggtgacattccgaatggatcgagagctcatggagtttggccagaagcatcatctcaagtacactcggtacgccgacgatctaacgttcagtagctatcggccgcccaccctgctgttcaaagacggcctacccaaagagggcaagatcacagagaaagctttaagcgatgagatcaggctgataattaattctaacgggttcgacctaaattctgacaaaatttggttctccgcgacccgttcccggaaagaggtcactgggattatcgtaaaccagttccctaatgtgaagaggagcttcattcgagagttgagggttcttctccacaaggccgagactctgggcctgccccagacagaaaaggactatcaaagttttagcggaaaaaacgctcctctggaacaggttctgagaggacgtctcgagtggattagccaaattagaggtagagatttcccgtgttaccagatactcgccacccggttcaatgcgctctatgccaagaagcctttaaggcttccaccaagccaggaggacgtcttgcagaagtcgatatgggtgatcgaatatcacccaaaagaatctgaaaaacgggaatgtctgatcgatatacagggcacctgcttttttctgaagcaggtgggtctagtgaccgctcaccacgtcgtttcagagctgccaaagggaacccggttttccgtgtttaggcctactcacagctggcaaaagtatgaggcttggtcatccgagatcacctgccagtaccgggatctggccatcctgcaccacaatatcccacctcacgccttcctcgagcttgaagcggccaatagtcaagcggtcgatcagactcggatcaaagccctgggatttcccaactttgggcccggggacactttggcacgcatccctggcgaagtgattagaactctgaccaaatctgcagtgaagcaaattgaggtgaccgccgccttaccttctggcatctccggcggacctattatcgatgcagcacagctccgcgttctggcagttgccgtcaaggggggtgccaccgaagacagacaagtcgctgtggccatatcagaattacagacattgttcaaggagcatcccgggtcatga

SEQ ID NO: 7615 - RNA, 1581 nt, synthetic construct
  source 1..1581: mol_type = other RNA
atgccttataatccgtttgtggtgcatagaaagcccaaggtgcctgaagggcttagaaccttgcctgttttcctatccgacctgggcgtctcagagtctgagcttcgtctgatctccgctaaaaaagtggagcagtaccatctcgtttccgtgcggaagaggtctggaggcatgcgcaccctcagtgtccctaacgaaagattaaagtacatccagaagcacacagcaagccttctagccccgttgtaccagccaaggtggtgtgtgcagggcttcgtgaaaggaaggtctgccttgcagaatgcccagaggcatcttggcagaaaacacctggtgaaggtggatctgaaggattatttcaaccaggtaaccgtctcgagggcaaagggggttctgaggtattttgagctcgacgccggtgttattgacgctatcctgaccttttgcacgctgttcggtaaactgccgcaaggagcgccctccagccccttactggccaacatggtaacttttagcttggatcaggaactggttcggtacgctaggacgaatcggcttaagtacacacggtatgcagacgacatagtgttaagctctttctccaagcccagactgctcagaccctccgtgactgccgattattgcaaattaacaatagaggacgtgcaggaggactttgcgaaaattttcagcaaccaggggttcgaactgaacgaggaaaagatgcgatattgcggccaacgcgcatctcgaaccgtcaccggttacactatcaacgagtttgctaatgtccctagggagcacattcgcagaatcagaagtattctaaacgacatcgagaagcgcggttacccactagctcaacggcggttttcggaaacaacacactcaataaaaagcctgaaggctagtttaaaagggcgtctgaattgggtcagttcaacgaaaggcgtgtcagatccagtataccgacgtctggccctgcgcttcaatggcctgtttcctgacgactgtcttgagattgggccagactattccaagctcgcccagctgagcacttgggtgatcgaggcagaacgaaagactaatggcgttccagaagcccagggcaccgctttctttctcaaaggggtgggactggtgtccgcagcgcactgtttgcccggagggtgcaattactcagtcttcaacatcgataatccctctaagacttaccccgcaactatcgctaagacccataaccatattgatctcgccattcttgatcattccatacctgccgaatcttacctcgcgctggagctgagtgatcggcaagccaacctcggcgaagaggtgttctcctggggatatcccgaacacggacctggaaaacgcattacacaaaaaagcggccgcgtcagcagtaaaccacgggtatctggagttgacatgtacgcagtagatatgaagctgtatcagggcacaagtggcgggccaattttgaactcaagctcagccgtgatcggtgtcacccacaagggaggtcacggggaggcccatgatctcgctatcctcatcaaacacctgaaggacttgtga

SEQ ID NO: 7616 - RNA, 936 nt, synthetic construct
  source 1..936: mol_type = other RNA
atgcctacggctatctcggtggcctttgggaaaacccccacaccccccgtcgaatttagtagcatggcagccctgaaaactcatctcaaaatttccgacaaggagcttttggtgatacgcaagcatagatccaagatgtatagccacttcataattcccaagaaaagtggcggcgtcagattcatcgacgctccgaagccccgtctgctatacctgcagagacgcctacttgaagtgcttgtgaagatgcataaaccgaggaacccagtgcacggtttcgttaggaagcgctcggcaatcaccaacgcagaagagcacctgaatcggaaacatgtaatgaacatcgatctgaaggactttttcccaactataacccaggaccgtgtttcttcactgctcagaatcttggggattccatccgatgttcgagcggctatcctcagcatttgctgcgcgaacggaaggcttccacaaggcgccccaactagtccagtatttagcaacatgatttgtcttaggatggacaggcagctgatgggattttgtaaaacccggcgaatcaagtactctcgatatgccgatgatctcactttctcactgtacacagcacctcaccagttattcagtgaatcagttccttctcctggcaagctggccagcagccaaatatcaagggagctcaagagcatcatcctggataatggtttcgtcctcaatgaagacaaattacgctattttgggccctcctccagaaaagaggtgacggggctgattgtctctgacttcgtgaatgtgccccggaaattcgtccggaatattcgcgccacaatttttgatatcgagaagaatggcttccctgccgctcagatcaaattttccaccctgtaccggaagacaaaccctttgtctgagcacttgagaggaaagattgtgtga

SEQ ID NO: 7617 - RNA, 1650 nt, synthetic construct
  source 1..1650: mol_type = other RNA
atggacataggatccctgagatgcgcctatgactacgataagctgggtaccctcttcggggtacctggagccgcactcaaaaagaatctctatagcagccgggggtacactgatttcacaatccctaaaaagtcaggcggagtccgccttatctcagcaccagggagactgcgcaaacagctgcagagaaagctgctccccgtactggatgacgtgtacaaaatgggccccgccgttcatgggttcgccaaaggccggtccgtgcgcactaacgccttaccgcatgagagcaagggcctggtgatcaattttgatctgaaggacttctttccttctattagtttccagaggattaggggcgtctttctagggcacccttttcgactggactggacagtggctaatatcctcgcacagatgtgttcccttgacggcgtaatgcccgccggagctcccacttcaccagttctgagtaacatcatatgcgcgaagctggataaacgtcttagtgccctcgctgcaagactagggggtacgtacaccagatatgctgatgacctgaccttctcgtttgacagacccctggccaaattgtctagcattgctatgatcgatgaggaaggtaagcccgccgtgggggcttcggtaagcgaaatcgtgacctccgaagggttcgccatcaatgtggagaaattcaggatagctgccaaagggtcacgtaaagccgtcaccggactggtggtaaatgagcgggtgaacgtgaagaggtcctggtatttaaaactagagtcagccatttatgctgtcgaaaagttcggtctgaaccctgttgccgccaagatgttcccacaagaagaggtgccaggagtcgcacctgccaggttgttgcgccagctgcacggcaagatttcctacctccggatgatccgcggaaagggtgattggctggccgcagagatggcccatcgattcaatacactgcacgggaacgtgaggttgagggtgcctagcgtggagatgatatctaacccaaaccgacaggtgcggggcgtccatatcgtcgttgcatatgccgccgcagttccagttttcgaccccactgaagaacaaggcaccgcttttacgaccccatccgggctgttagtgactgcagctcacgtgctcgagcatgaagacacaaagacccttctaccatttgtttacgtaatgaacgagcgcaaactttctcttgtcgcttgtgatgtgttagcggtggattgggatcgggacattgcaatcttgcgcgtgcgtgacgacaaaaatagagtctctgcagaacgaagtagatatggcttgggccaggaccctcaccagggtgagactttgattagcatcggctaccccgactacgcaaggggacagcacggctctgcgtttgagacacccgtcacaaaactgtttaagattaaggttcctggtggccaggagattctcaaggctcgagtgggcggaccaatccaaggaggaatgagtggcgggccggctattgattccaactttgatgtgcggggggtgatccttaagggagtcgcgaatcccggaggtgtgccggagattatagcgatcagcgaagtcaggcgggttgctcaagccaatggcctgaacctctga

SEQ ID NO: 7618 - RNA, 1653 nt, synthetic construct
  source 1..1653: mol_type = other RNA
atggacatcgagagcctacgttgcgtgcactcctatgactcacttggagccctcttcggcgttcccggtagtaccttgaagaacaatttgtacaaatcccgcggttacacggatttcacaattccaaaaaaaagtggcggcgtgaggcttatcagcgccccaggaagactgcggaaaaagctgcaacacaagctgctcccagtattgtattcggcttacaaaatgggccctaacgtgcacgggttcgccaaaggaagaaacgtacgaactaacgctctcccccatgcgactaggaaggttgtgataaatttcgacctgaaagatttcttcagcagcatctcttttcaacgtatacgtggcgtgtttcttggtacccccctcagacttgactggtccgtcgccaatatcctggcacagatttgttccctcgatggagtgatgcccgctggagctcctacgtctccggttctttcaaacattatttgcgcaaagcttgacaagcggttgtctgccttagcagcccgcttgggagggtcttacactcggtacgcggacgatcttaccttctccttcgaccgcccgttaacccaactgcggagcgtcgccatcctggatgacgaaggtaaacccctggtgggcgcctcgatctcagagattgtgacatcagaaggcttttccattaatatggagaagctgcgcattgccacgaaaggatctcggaagaccgtcacaggtcttgtggtcaacgagaaggttaacgtgaagaggccatggtattttgcactcgagagcacaatctatgccatggagaaattcggagtcgatgaagtagcagctcagaagttccccgaagagaagacccctggagtggcacctgctcgcctcctaagacagattcatgggaaagtttcttacctgtccatggtgcgcgggaaaggggattggttggcctcagatatagcccataggtttaataagctgcacgaaacactgcagttacgcgtccctagcgttgagctgatctcacagctggttcgaagagcacggggggtgcatatcgtgaacgccagtactgaccctctgtttgtcttcgacctcggccagagtcagggtacagcatttactacctcaagcggaattatggtgacagccgcgcacgttgtggagcgagatgacaccaagacaatcttgccctttgtgtatgtaatgaacgagcgaaggctggccctcgtcatatgtgacgtcatagccatcgactggaatcgagacatcgctctgctgagggtgaggaatgacaagcacagactcgacctggaacggtctaggtaccgtctaggcagagatcctaatcaaggcgataacctggtcactgtaggctatccggattacacccggggggagcatgctaccgctgtcaatagccccgtaaccagagtctttaagaataaggctactagtggagcgcacgacatcagaaaggctagggtggatgggccaattcagtctgggatgagcgggggcccagcactggattccaaatttgaagttcgcggcgtcgtgcacaaaggcgtgttaaacccaggcggggtggcggagattatcgctatctccgaagtgctccgggttgcacaggccaacggtctgagtgtgtga

SEQ ID NO: 7619 - RNA, 1557 nt, synthetic construct
  source 1..1557: mol_type = other RNA
atggggatcagggcattgcgtttcccaaggaatcccggtggagtgagagccatttcggcccctggcagattgagaaaaacgctgcagagacaactgctccccgtactctatgacgcgtataagatgggacccaacgtacatggattcgcacgtgggcgctctgtcaggactaacgcacaaccccacgccgctcgcaacgtcgtgatcaacttcgacctgaaggactttttcccttccatttcattccagcggatccgcggggtgtttttagccaacccgatgcggttagattggtccgtggccaacattttggcacagatgtgcagcctcgacggtgtaatgcccgcaggagctcccacatctccggtgctatcaaacatcatatgcgccaagctcgataagaggcttagcgctttggctgcacggctgggaggctcctacacaaggtacgctgatgacttgacttttagtttcgaccgacctttagcacagctgcgctccattgccatgctcgatgaagagggaaaagctgtcgtaggcgcttcgattagtgagattgtcaaatccgaaggcttctctatcaatatggacaagtttcggatcagcgttaaaggttctagaaagaccgtgaccggtctagtcgtcaatgagaaggttaacgtgaaacgaagctggtacctgaagttggagagcaccatctatgccatggataaattcggcatcccagctgtcgccgcccaggtgtttccagatgagaaaatcccagctgttgcatcagccaagctgctgagacagatccacgggaaagtttcctatctgtcaatgatacgcggcaaaggtgactggcttgccgccgatattgctcaccggtttaatggcctgcacggcgaggcccagcttagggttccaagcgttgaactgatctctcaagctggcaggagagccaggggggtgcatattgtgaacgcctctaccgaggaactgctggtgttcgaccttgcagcgagtcagggaacggcatttacaatccctagcggcctgatggtgactgcggctcacgtagtagagaaggatgacactaaaaccgtgctgccgcacgtctacatcatgaatgagcggcgaaaagccctggcggcctgtgatgtgctggcagtggactgggacagagatatcgcaatacttcgagttaatgatgaaaagcaccgcctcgacctggagagatcacggtataagcttggcttagaccctgctcagggtgatcatctggtcacagtcggctaccctgattacaccctaggtgagagggccacagcggtgaattcccccgtgagtcgaatttttaagtccaaggccgcaactcatggggccccagacgtgaataaagcccgcgttgacgggcccatacaaggagggatgtctggcgggcctgcgctcgatagcaagttcgaagtgcggggggtgatacacaagggagtcctcaacccaggaggcgtggctgaaattattgctgtgagtgaagtgcgccgtgttgccctcacccatgggctcaaggtctga

SEQ ID NO: 7620 - RNA, 1623 nt, synthetic construct
  source 1..1623: mol_type = other RNA
atgctaactatcaagaacttacagggcgttcattcttatggggcactggctcctttattcagtgtcacacctgcggccttgaaggcccagctgtattcagctaaaggatacagttcattcaacatccccaagaaatctggggggttccggcttattcacgctcccacgaaaattcgcaagcagcttcagcgggccctgcttcctgtgctgaacgaggcatataaagccccttccttcgtgcatggcttcgtcgacaagcggagcgtcaggagcaatgcccagccccatgtacaggctcgcaccgtggtgaatgtcgatctggccgacttcttccagtctatctctttcaaaagaattcgaggggtatttctggcgccaccattccgatttgattggactatttctaacatcctagcccagatatgctgttatggcggtgctctgccagccggtggtgtgacaagtcctaccttgtccaacatgatctgtgcacgtatggacaagaaattagtcaggctgtcaagaaggttggggggcgagtactcaaggtatgctgatgacctgacatttagctttcggaggcctttggcccaactttcctcaattgtggctgtcgacgcatcggggaattacctcccaggagctgccctgttggagatcttcaatgccgaaggcttttcgctcaatccggtgaagtttagagttgcaactggcgccgctcggaagctcgtgactggagtagtcgtgaaccataggacaaacgttccccgtaaatggctcagagccctggagtccaaaatctacgctattacccgatttggtgtcggggctatcgccgcccaggaattcccagatgttgcccccgaaagcgcaagatatcggcttctaaggcagttgcacgggcgaatatcctacctgcgtatgatcaggggagcaggggactgggttgcaagcgacctggcctacaggtttaacaaggcccacggcgagaatcaactcagagtgccctgcacagagctgatatctaacccccagcgggttccgagaggagtgtgggtcctcggctgtagtgcatccactatgcatttctttgatcctcaaaatcaggggacggcctttgtgacctccagcggcctcttagttaccgcggcccacgtactgctgctggacagtggcgatgtggcgggctacatttatatcatcaatgagcgcgcaaagaaactgcgccgctgtgaactgcttgccattgacgtggaggccgacgtggccatcctgaaagctagcgagcacaatctcgaagtagaacgatctcgcttttctttgggcaacgatccgcagtcccaagatagcgttgtagcggtgggatacagtgattacggatctggtgacaccgctaccatgctccaggctagcgtgcagaaggtgttcaagttcaactccatcaagaaagctcaagtgggcgcatttattagcggtggtatgagcggagggccagttgtcgatagtgcgtgcagagtgcggggactcgtgcacaagggagtgtcctccgctgcaggcgtctcggaaatcatatgcgtcgaggcaataattcgcgtggccgtgtcaaatagcctgtcactttga

SEQ ID NO: 7621 - RNA, 1605 nt, synthetic construct
  source 1..1605: mol_type = other RNA
tccgcccacacccatgagtctctcgcagcagctctgggtttagcgcctgcgggaatgttgaaagccctctataagagaaaggggtacacggtgtggctgatcccaaaaaaaaacggccagcaccgtaccattgctagcccatcgaggcttcggaggcacatacaaattcagctcaaggccgtgctggagcaggtttacaaacccgacgctagtgttcacggctttctgcagggccactctatcgtgacaaatgccaaacctcatgtccgccgccgcacaatcataaacttggacattaaggactgtttcgggtctatctccttttttcgtgtgaggggcttgctcctcaaagcgcctttcaatctgccctgggtgaccgccaatatactggctcaagccaccacattcgaaaatgcattgccacctggaggcatcacgagccccattcttgcgaatattgtgatggccggacttgataagcgcctgagccggatgatgattagatatggaggccgatacaccagatatgccgatgatcttacattttcttttccggcaccccctggacgcttgggcgaatttgtggaaaagtccgccgtcgggaattaccaaatcgcgccaaaactgagcgctgtactgaaagaggaaggattcgaatcaaaccagctgaagttccgatgcctgactggcgcctcttcaaagcgagtgactggcctcaaagtcagcgataaggtcaatttacccaggcggtggattagagagctggactgtaaaatctatgcaatggagaaattcggggtgaacgcagtggctgctgctgatcacccagattccccagttgaggctgcaaaggccaggctactccgccacatacatggtaagattgctttcgccagcatggtgcgaggacgggccgattttatcactgcagccatggcaaaccggctcaatcagctgcatgaacggagtgacctgtatctaagtgacatcgaaatcatttcgaggggtgaccgagcctcaagagccgtttgggtggtaactgctgcccccgagggggaagaccactacttcgcccctgagggaaacgggactgccttttgcataagggggggccttttagtcaccgccgctcatgttattgaagatcatgaggggaagaccaaggctccataccctgtagtgtgtgtgaggagagccgaccaacccggtacctatctgggttgcaatgtaatcgcattcgaccgggaccgggacttggcagtcctccagcttcttgtcccgcgcccagatctgaccagattccagtttgcgttaggcaaggtacctgtcacagatgagtccatgacttcaattggatttcccaactacgttgtgggcaaccgctccgctacagaagtgcacgtggttcaggatgtcagaccgcggtacggggtcctcaggatcagagctacgggtaacattatggggggagcaagtggcgggcccttgctgaataaaaagttcgaggtggccggcatcacacataagggactgctaatgaagtgggaggcaaacgagttcatcagcgtgggtgagctgcgtactgttctgaacgaaatcaaatga

SEQ ID NO: 7622 - RNA, 1629 nt, synthetic construct
  source 1..1629: mol_type = other RNA
atggttgacattactttagtaccgcctaggcagagcttgcgggatattactacgacccgcgagttagctgccttgatgggggtgagttactctcgggaattcgcttacattctgtataggtttcccccaactggaagataccgcagctttaacattgcaaaaaaatccggcggagacagacagattaatgctccaattcgcctcctgaagaagctgcagaggaggctggtaccgctgctggcagagatctatgatgccccaccctgcgttagaggattccaggggggtcagtcaatcctgactaatgcgagcgaccacgtgggacagcgatacgtcctgaacttagatcttaatgatttcttccccagcatccacttcaaaagagtttccggcattctgcagaccaggagatacagcctgagtcgggatgtggctgtcgctatcgcccaaatcgcttgtcatggggggcaactccccataggcgctcctacatccggcatcctggctaacatggtctgcggacccctggactcaagcctcctgcgcttggccaaagcccataaactccgctatacacgctatgccgatgacattaccttctccacgagtaacagccggcacttaaatgaggccacagggatacatgtcggtgatagatttgtgatacgaggcacagaggaactgtccgactcgtttcacgccctgttcacacagaatggcttctcgctgaatccgaataaggcagtcttgatgtcaaggagagtgagacaatccgtcaccgggctcactgttaatagaaagaccaacgtgagtaaggagttttatcggaatctcaaaagcagtattaacgctatcgagaactacggctacgaggcagcgcagtcagtatatatcgatcgtttccgaaagcccaatgagtctctccagcttagggaaaacttgcttggccgcctggcctttctgggacacgtgctaaactactccgagcgctacaacaaacttgcccggaggacagcgcggctttttgaggagcggtctatcccacgccctcgagatgaccgggaaaaggccatatacgtgttgactaatgagcaggacctgatgatgggcaccgcctttcacaccggaggcggaaagttcttgacagctgcacacattttcgcagatcggcctggggtgctacgctgtgaactcgcctgcccacctcattatcctgaacagatcaccgcggtggtttctcatatcgatcgtgaaagggacatcgccctggttagagctacgggaacttttgatctttcccgtcactctattcctacggacggtaagtccgtgaggattggggacgatgtatttgcgtgtggctttccacaatatgaagacggtaacagcatctcaaccatctctactcgaattaccgccgaacgatacatctcagggaaccaacgtctcgaggtcgacaggccactcagtcacggctctagtggagggcccgtgttctccagggacggtttccttgtgggtcagataaacaccggccccagaataggcgaagactactctcccatgagctatacaatcacaccatttcggcctcatgcagacctagtggccacctggctggcagcatga

SEQ ID NO: 7623 - RNA, 1584 nt, synthetic construct
  source 1..1584: mol_type = other RNA
atgcgacagctggctctgctccttaatgtcgactacgggaaaacactaagtttcgccctctatcgcgcaaatcagaccagcgcttaccgcgcattttctatacctaagagggatggctcagagcgcataattacagcccccaagcgcgcgcgtaaatcattgcaacagtcactcctcccactgcttgagcagttatacgaccccgccccctgtgtccatggagcagtgaagggacgttctgtgaaaaccaatgccgcaccccacgtggcaagaagatacatcctaaacgtcgatatcgatgacttttttcctactatccatttcaaacgagtggtgggcatactgtccagctcacgatacggtgtacatccaaccgtggccactgccgtggctcagatatgctgtcatcaaggtcggctgcctacaggagcgccaactagtcccatcttagccaacatggtgtgcggcaagctggactccgcccttcttaggttggcaaagaagaataagttgcggtatacccggtactatgacgacattactctgagtagtagcacatctggacatctgaccgcggccactggaattgacctcagctccgaccatattgctcatggagctgatcggctgtctgatgagttcaaggatatcttcacaaataatgggttctccatcaacagcaaaaaggtatggggcaccacacggaaggtacgacaacaggtgacaggtctggtggtcaataagaaacacaacgtacccatcgccttcgtgagaagcaccagggcgatgattcactctatcgaaaaaatgggcatcaagagtgcacaggaaaagtttctgcgctcccgtaaagacaacgattcacttgatttggaatcccacatttccggaaggctggcttatattggctacattactgactacggccttagatacacaacgctcgccaagagatttatggctgtttctcagggcactaagctccctctgccattattggagagggagcggtctgtgtacgtggcagtttctaaaccgggtaacgaacaggcaactgctttccacgtcggccacgggttctttgtcaccgcagcccacctcgtggatcctaataagaagccgattttcatcctggtccacagccctgactattatgagagcccaattgctaccaaaatcgttcacatcaactatgccaccgacgttgctctcctaaagaacgtgggcgccgttgccgttaacgataggccggccataaaattgacctcccgccagagttcgagaggcgaccaagtagaggcgtacgggttcgaaaattatatccccgggaacaaactgggcgtggtcaaaacagagatttcgagcgtgaggcagctggatggccagacgagacactcagtcagcgctccttggccccatgggatgtccggaggtcccgtttttgatacgcagggagtgtttctcggtatcgttttttcagggcctctgtacggggaaaaaatcagtccatatgggaccgcctttacgccaagcaacttattcgcagctgaactggagcagtggctgattgaccaagcctcctga

SEQ ID NO: 7624 - RNA, 1710 nt, synthetic construct
  source 1..1710: mol_type = other RNA
atgcagaccaaagacgacctcgcaaacgctctgggcatttccaagtcaaaactgacatatttcgcctatgccgtgtctgacaaaaggaagtacgtgtctttttacgtgaagaagcgcagtggcggcaaaagggtaatccatgctccaaaccgcggattaaaagccattcagcgatctctcgccatattactgtccgagatttatcagccttccaatccgcactgtaaccatggctttggtcgcaatagggacataattacaaacgcccagagtcatattggtcgaagatacctttttaagtgcgacctgaaggacttttacccaagtataaacggagcacgtattttcggggtcctaaccgctgctccattcaattttagcgacgaggtggcgcacctgattgctatgctgtcgaccaaggacggagcactgcctcagggagccccaactagccctgtcctttccaatatcatcatcagaaaactcgacaggaagatgatgaacttcgccaaaagctcagggggcctttatactagatacgccgacgacattactatctcgtatcggaccatttctatgactaggtcagcaatcgattctgatggcaatatctcagaccgtctccggcatataatcgagcacgaggatttcacattgaatgagagcaaaacacggcttctgaccaaacggaatagacaaatcgttacaggcgtcgttattaacgaaaaattgaacgtgaagcgagggtacataagagatctgcgcaatctgatctatatcctagtaaggtacggagaaagcgacgctgtaaatgcatataacaaacaccacctgtttgataaatctgccaaagacatcaagagagtcattgaaggtcgcattaagtttctggagcgggtgagagggagagaggacgccgtggttctcaagttgatcggaatgtatcagcaacacgataaggggtttcgaacagataaggcccctccctacgatgacaataaaatcgagacgtttaaggttaggctgcttgccgagggtaaaaccgactataagcacctccagatagcattcgagtttttcgcggagtcaaacctgtacccctccctcgacctcaacctcgaacctcacccggacattgaaggtatcaaacatctggaagctcatgtgaaagtgctggaaaaggtgactctggagcacctgcatatagcgatctacgacagcgatgacaagacaataaatgaaaggtacgcaaacgggcccaaacagctcggcagcgatttatacggattcaccttgccccgcccagggcatttaccagccgatcaacccttttgcatcgagatgctatatacccccaaagaccttaccacgccggatgaaaacgggcggcggattttcttgatcgatgagttcgacagaaatactaaccaccacaaacaggataagcgtattacaaccaataacaaatcctgggacaagttgatcatcgatgataaagtcttccggctggatgaaaatcacaacattgagagcatcaacttgagtaaggctgccttcgctagttttattgaaaagcgaaagaccgcgggcgatccccctgatctgcatgctttcaaggcaatcttcgacatgattgataagattgcccgcacttactatggcaagaatacttccgagcttggagaaaagatagatatcatcaagacgtga

SEQ ID NO: 7625 - RNA, 1668 nt, synthetic construct
  source 1..1668: mol_type = other RNA
atgaagactacaaaagagctggcgcaacacttagggatagagttgaaaaccctgatgttctacgcttttgcattacctgatacgaagaagtactaccattttgagatcaaaaagcggaacggcgactctagacgaatcgatgctcctataattaccatcaagaacattcaatcctccttgagcctgcttctccagaatgagtatgaaaagagcgcccctaagtccgtctatggctttaggcctggtcgaggcatcataaagaacgctagtgctcatcttaataaacgtgtgacaatcaaagtggatctcaaggattactttaactcaattaccggaggcatgattgtcgagacactgaccagtagaccattcgggatggataaacaggtggccagggtaatagccggcctgtgtactatcggcggacggctacctcagggagcaccaaccagcccagtgctggccaacatcattactagaacactcgacatcaaactgatttcgtttgctcataaaacacgaggtacctacacaaggtatgccgatgacctcacattctcatactcccacgagaatactgcacgtcagtgcgccatctactctgaggacgggatcgtgctgaacgcggagattatcaaacatatagaaagcaaagggttcaccgttaacagcaacaagctccggtataaaaagtcaacatctagacagatggttaccgggatcattaccaataacaaaatcccgggacttccacgcgaatacatcagggaaactaaacttctgattcacatcctgctgaagtacggtgaaaaggaagcagccgaagcatatcggcggaaatacgctcaaaatcgctatgggcaccgcaataatctggatatttctgctatcgtcaggggccgcttggagtacataaagtccgttaaaggtgtcaaaagctcggcgtattgtaaactggccctcagatataaggcattcaacccccagtataaattcgaggaagaggagcaagccgtgtttaatccggaagagatcattattctatgtgagggaaagacggactacaagcatttgagcgccgcactagctcacttccagcgcaatggacaatttaacagtctgaagttggatctgaccgacaaagaacgggggggctacgacggccttcagaaacagatagatgccctgctgaaggtgaaactgaggcagaagcacattgccattttcgacgctgatgttccttctatcagcaagaaatattatgaccccaatgacctctataaggtccatgagaacctgtttgtaattataacccccagaccagatcatgtggaatccggagagaacttttgcatcgaaatgctctacaaggacaaggatttaaagcgcgtctccagtgaggggagaaggatcttcctcagcaatgaattcgacgcgaagacttcaaagcacaaaaaggagccctactatgtgcaggaccgaattaaggataagcttattgtggaaagtccagtgtaccggttcacggatgagggtgagtcactcaattattgccgttccaaagacgacttcgccaaagagatcgaagcatgccacatgactcagcccatcgacttttctggctttttgcccttattcaagaagatctacgaagtacactcttcatga

SEQ ID NO: 7626 - RNA, 1230 nt, synthetic construct
  source 1..1230: mol_type = other RNA
atggttttttcaccctcccgacccgcagagggatccaatagctttatgagtccatgtattacagtgtatcacgacgggattggttctgagtcacctcggcgtttcggcaagttttacccaaaagttgtcgaagccgtcgcacgcactcttcacgtgatgcccaaagtggctccatgtctccgacctcaatgggccgatattcctaatcagagattctcccaaacaattaagagcctcagctccgtgcaggacttggcccggttttgggatctgcctgttaagcagctgaattatcatgcgtatcacgcaaccgatgcttctgagtaccacaacttcagcattacacgccggaatggcaggaaaagaaaaatcagtgctcctaatcggtcgctaaagtacatccaacgtattatccatgagacactgtcaaagctatattggcccgataccacggtacacggattcgtttcgcagagatccaccatcaccaacgccaagacccacctggcacgtaaatacgtcctgaacgctgacttgaaagattttttccagactatcaccaggcctagaataattgcgcggttaaaggtggctccttacgaacttcagcccccggtggccgtgctcataggcttcctggctactgatggagacggtcaactgccgcagggctctccctgtagtccagtcatagctaacatcatggccgcgagcatggacactcagcttaaggaactgtgcaaaaaacttcgctgcacatacacaagatacgccgatgacctgactatttctacggactgcgaaccgttcccacctgagatcgcccggtacccatctgcagccggaaccgtccaggtagtgttgggcgatagcttcctggacatcattgagaataacggatttcagataaaccacatgaagagccggctgcagaaccattggacccgccaaatctgcactggtttagtagtgaacagggagaaactctccctgccccgcagttacaaacgaaggctgagggctttgatccacaattggaagtcattagggtgggaaaaggccgcaaaaagaatgcacgagaaggaatatcgccccctcttccataatcgagatagatttgtccatcatgtgtatggcaggattaactacatgaggatgatctatggggtggactatatcggggcaaagaagctcctctctgccctggaggaaatcccaaaggaccagtga

SEQ ID NO: 7627 - RNA, 1068 nt, synthetic construct
  source 1..1068: mol_type = other RNA
atgacaactgggtcttcaagtatatttacgcccaacatcttcagcgtgaattcttgtgcaaaactcgcttcgctcctgaacacaaccgagagcaggttagaaagtctcgtggaccaggcaggaaactatcggagtttccgtatacctaagaaagacggcaccacccggcttattcaggctccccaaaacgaattgaagaagattcaatcccagctcagcgaaatgctgctgtgcgcctgggagccatcccctttctcctatgggtttcttcacagtagaagtatcgtctccaacgcgagagagcatttaggtaaacgctgggtgttgaatgttgaccttaaagacttctttccatcaatcacttcgcagcagattaaaaaagctctggttagtgccccatgtgatatgaagccagaggtcgccgatctgatcgcgaggatcgcatgcaacaataacaccctgcctcagggctcaccatctagccccatactgtctgatatagtggcctcccctctagatgactccctggctagcctcgcccagtctagagactgcacttactcacggtacgccgatgatatcacaatctctacctcccagaatttgttccctgtggaaatcgcccgccccattggccgccagatcgtactgggagccccgatcaaggaccccattattcgccatggctttaaaatcaacatgaggaaggtcagccttaattccaattcacaccatcaagaggtaacgggggtagtggtgaatgagaagaccaacgtgcgacggcagtatatctctcagctacggagcattttgtataattgtctggaatcaggtgtgtaccctcaagctctgcgttacattaagagaaataggcacaaaacacccgcagcagttatcgaaagaatggatgacattgcttatattgagcactggttcagcatggttctcaaaggaaaggtcgagtacatccgaatggtcaagggcaatgattcccccactttttttatgatggccgacaggtacaacagcgtgttcggaagcacattcaacataccgccaaagtcttga

SEQ ID NO: 7628 - RNA, 1101 nt, synthetic construct
  source 1..1101: mol_type = other RNA
atggaagaacacttgtctacccatctgcgaacgggacaggatgtgcagaccctgaccaggttcctcaacgccatgctgcttcggcgcgccgagaaagatggctggacaccgtggagatggcaggaacgccagattgacgcaatgctcacggaccctagctggttctatcgttcgttcacaatacccaagaaatccgggggcctgaggcacatcgatgctccgaaacggacactgaagctggtccaatgggcactggtccctctcttctctgaaatgtttactcctagctctcaagtgtacggattcgttaagggacgtggaatcgtggataacgcgtccgtccacttaggccagtctgcagtacttaatgtggatattcaggggttcttcccctcagtgagcagggcaaggattgaggccatcctcaaggacggtccagtgcttagactcagtgagtacatggcgcgttcaattgcccgactctgcactttacatggcggtcttccccagggcagtcctgcttccgcagttctcactaatctggtcaccgtgcgcttagatgcccggttggctggcctagctgagcagttcgggtgtcgctactccagatacgtggacgatataaccctgagcgcaagcagtagagccgctctggaccgagctctccccaagctagaaatgatactgctatcagagggctttgccttgaacacaaacaagactaggatccaaaccctgtccatgcgcagagaagtgaccgggcttgtcctttccggtgaaagaatcggggtgccagcggtaaatgtgcctcggccatataggcgccaggttcgcgccatgctgcaccactggcggaaacacggtatctctgaggcggccgctagaaatggctttgatggcgaccatggagttcgaccagacttggcctttgtgaggcaattgcaggggaggattgcccatctgcggcatgttaaccccacaccagaagtcgagagattttataccgacctgagcgacctgctggtaagtgagggatttcggacaagccccgacactgacttggagtgttgcgcagatctcgagtcagctaaagccatctga

SEQ ID NO: 7629 - RNA, 966 nt, synthetic construct
  source 1..966: mol_type = other RNA
atgactccatttgaagaggtgacgcagtttatcaatgatgggttaagtgtcctcaaagaagccgccccaaagaagcaccgggaagtgttcgaagtttctctcgatcaggtattcggggtcttcaaaaatctcgacacctcatacatcgcattcgagatccccaaaaaatcgggcgagatgcggcaaatagaggcacctaaccggaagttgaaatggatgcagaagggtctgaaggcccagctggagacacttttcgaggctgagccaggagctcacggctttgtgcctgaacggtcaatccagagcaacgcgggggtgcatgtgggccaacgttacgtccttaatctcgatatcgcagggtttttcccttccgttaaaagaggacgggtgcagacagtactgcagttggagcctataggcctcagcaagccggctgcgcgaatcctcgcacagttctgtaccaggaatagagctttaccgcagggcgccccaacatctcccaccttaacaaacctggtctgcatgcgtctggaccgcaagctggagaaactagcccgccattaccgctgcagatatagtaggtacgcggacgatattaccatctcaggtcccagcaaggaccttatgtatcacctgctgaaaaggataactctgattctgaagactgagggttttgaagtgcaagagtccaagactaggattctgcccacgagccagcggcaggaagttacaggattgtctgtgcatgcctttgttaactccccccgcacctataggcgccacttgcgagctaccctgcacacgtggcagtccagaggaatggaaaccgctatggaagcactgcagattactgacaaggcacagtttattgctgtcattagaggccgactacaacatgcccagcatactaacaatacagccgaggtgcaaagaatgagggccaccttccaccaacttatcgcctga

SEQ ID NO: 7630 - RNA, 1665 nt, synthetic construct
  source 1..1665: mol_type = other RNA
atgtcactaaataaatgcaacacccttagcgacctggccctccatctgggcatcagcaccagtcgccttagatggttgttataccataagcagtctgatctgtatgacagcttccagatacctaaacacaacggcgtgagtaggaccatcgatgctccatgtatgtccctgaaggatgtccagaatcgcatcctcaacagtcttgcaacttactacaaacccccaagatgtgcccatggcttcatagactctaagtccattatcaccaatgcaaaattacacgttcggaagaagctgatacttcggatcgacttggaggattactttccatcaattcacattgggaggattcagggactgctgaaaaagggactggggtgtaacccaacaatcagctgggcaatttccaggctgtgcactctcgactccgttctaccccagggtgctcctacaagtcccctgatcgctaacatgataaccaagcgactcgaccatcagctcgccagctttgcctcgtcctactcctgccgctacacgaggtacgccgacgacattacgatttctacaaccaaaaaggcatttccgcgtagaatcctgaagcggagcgaactgtcccggttggatatagaagacctggccgacgaaatgatcgcaatcattacagagaatggattccacatcaacgagtctaaactccggctctatcactgcaaccagaggcagaccgtgacaggcctcaccgtgaatcagaaagttaatttgcctaggaagcgcgagaagcaagttagagcgatgatccatgattgggagactaatggcctgtctaatgccgctaagaaatacatcagccgctacgattataagaaacgacctgataacactagcagcggactcttgtttaaaaaagtggtacttgggagactgtcatatatcagaatgatcaagggccccgacgattggatcgtgcaaaagtacgcgcacaggctctctttgcttgacagtgaattctttgaacaatatgagagcaaatggaaggtcatagtgcgtgctttccaggccattgagtgtattcgacttatcgaggtggaatatagtaagaatggcgtggaatactattctcaagggacgggtgtatatatcaagaacataggcctgctgacatgttatcacgtgctggatcccgatttcaccggaacgacttcatcgaatattgacgtctcacttgtgcaagaaaaattaatctctgggaagctcatttactctaagaaagagctgggggccggggtcttactaaaggccgataaggactgcgacctggcgttgctcaaagtggacaacgaccgtcctaactccattaccctgtcaagtaatgatccaatcttaggagagagcattattactctgggctacccgaattatacacctggtagatctgctcacgtacagaatacttcaattgggagtcagaaaatgtacatgggaaagacacacttcactatcagcgatgatattttcaagggtatgtcaggcggacccgtcctgaactccaactatcagctggtgggtctgatgatcgtcggcaacgagatcacatgcaccaaatacaaacggtccgaatcctcctttatagttctaagccatattgtcgagtttttgcgcaagtga

SEQ ID NO: 7631 - RNA, 1641 nt, synthetic construct
  source 1..1641: mol_type = other RNA
atgggctgggtggtttccttacatgacaaacttcttatcctagggttaaccaataccatcaaaggagtaaaggatccaatacctgatctgccaaggatggagccggagccgtataaggcaggaaagaaacttaaatgggacaacaagaaactggagaaccacagtcaggcctcgaaagaagagattattgacatctgtgagaagatcatcaacaaggatatcgtgattacgtctgctaacgatgtcgcaaatatactggaggttcccgtgggtcagctgctctacattctgtatcataagaaagggaattaccgccagttcgacatagagaagaaggggggcggttctcgtacaattagtgcacctcagggcggaatggctattttgcaagaaaaactgaagcccattatagaatacttctaccgacctaagaaaagtgcgcacggcttcattattggcaaaagcatctataccaatgctgcaaaccatactaagaaacgatatgtcgtcaatattgatctggaagggtatttcgattcggtgacatttgcaagggtgtacgggatctttaagtcaaagcccttcaacttttctcacccagccgctagtgtgttggcccagctgtgcaccagagacggaatattgcctcaaggtgcgtgtacgtccccagccctggcgaacctggctagtacaagccttgataaacagttgacccagctggccagacgcaaaaatataacttatacccgctatgctgacgacatcaccttctctttcaatcaggagcagatcaaggatatcataactctgggagacgaggatgagttcgaactgtccgagactgtcatctcaatcattgaaagatgcgggttcaaggtgaatctccgcaagtttcgggtgcaagagaaaaacgtttgccagaaagtcactggattggtggtgaatgagaaggtgaatatcgatcggaagtacctgcgagtcacaaggtcaatgattcacaagtggagggaggacaagttaaaggcatctctgatctttttcgcggccaaaggcctcgaaacaataaacaacgaacacgccattagcatatttaggaaccacatttatggcagactgagcttcattaagatgatccggggtgacgattttcccctctacctcaagctgatggcccagatgtcccataatgacccacggaagactaaagaaggcctgcgggctatgagagttacggagaattacgacgtatttatttgtcacgcaagcgaagataaagataccatcgccatccccatctacgacgctctcgtagctttgaacatcagcgcatttatcgatcatgtggagattaaatggggcgactcccttatcgagaagatcaactcagccctggtgaagagcaaatacgtcatggccattctctccgcttcatctgtgaataaagactggccccgcaaagaacttaacagcgttctcgcccgtgaaatctccgaaggaaaggtgaaactactgacactagtcaagaaggaagatgaggagatcgtggcctccgttttgcctcttctccaggacaagttatatatgtcttacgagaacaaccctcaagacgtagccgagaatattaaaagcctgctcgaatga

SEQ ID NO: 7632 - RNA, 1608 nt, synthetic construct
  source 1..1608: mol_type = other RNA
atgctgcgacttgccacagccaacaagcaggctactgatcaagtgccggatctccctaaaatggagcccgaaccgtataaaacaggcggcaggatcaagtggaacaacaagaagctcaaaaacaatagtcagacccctaacgaggacatcatcaaaatctgccagaaaatcgagaacaaaagcatcatcatcacaagcgccaatgatatcgcaaacgtcctcgaggtgccagtgggtcaattactgtacatcctttacgacaaaaaggataactaccggcaatttgagatagagaagaagaatgggaagtccaggattatcaatgcgccccaaggtggcctggctatactccaggagaagctgaagccaattatagagcatttttacaggcccaagaagcccgctcacggcttcatcaaagggaaatccatttacacaaatgcactgaaccacaccaagaaaaagtacgtggtgaatattgacctggaagactattttggaagtgtgacctttgcccgcgtctatggaatctttaaatcgaagcctttcaatttcagtcatccagccgcttcaattgcagctcagatctgtacaaaggaagggaagttgccccagggcgcgtgcacttctcctgttcttgctaatctcgcctccgccgccctggacaaacaacttacgcagttggcccggcgaaagaacattacttataccagatatgcggatgacatcaccttctccttcaaccagagacaggtgaaagaaataatcaccttggatgaggagaataatttcgaattgggggaaactattatctcagtgattgagaagaatggcttcaagattaatacgcagaagttcagggtccagaagcgtaacgagtctcagaaggtcaccggactggtcgtgaacgacaaggtaaacgttgaaagaaaatacctacgggtgacccgaagcatgattcataaatggcgcgaggataagctcaaggcatccctgctgttcgctagcaagaaaggtatcaaaacgaatagcaacgagcacgcaatttctgtgttccgcaaccacatatatggacgtctgtcctttattaggatgattcgggggggtgattttcctctgtatcttaagctcatggccgagatgagccataatgaccccgtaaaaaccaaagaagggctaagaactatgaaggtgaccgaaacatacgacgtctttatctgtcacgcttcagaggacaaggccactattgcgatccctatatacgatgagctgaataaactcaacatctctgcctttattgaccacgtagaaataaaatggggagactcgctaattgaaaaaattaacagcgctctggtgaaatcaaaatacgtgatcgccatcctgtctgccaattccgtggacaaggagtggccaaaaaaggaactcaacgcggttcttgcaagagaaattgccgaaggcgatgttaagctcttgactctggtaaaagaggaggatgaaaagatagtcgcagaaagtttaccactgttacgggacaagttgtatatggcttacacagataatgcctctgaggttgctgcaagggttcatgcactgctggaccgctga

SEQ ID NO: 7633 - RNA, 1608 nt, synthetic construct
  source 1..1608: mol_type = other RNA
atgctcagcctctctagtgccaacaaagaggaaaatgaaacaattcctgaactgcccaagttggagcctcagccctaccaagcagggaagaatctgaagtggggcaataaggagctgaagaaccacccgatcacctctaagatcgacattaacgtaatctgcaagaagattgagaacaaatccattgtaatcacttcagccaacgacgtcgcgaatctacttgaagtgccagtgggacaattgttgttcatcctatacaacaagaaggacaattacaggacgttcgagataaagaaaaagaatggcaagtccagaataattaacgccccacagggaggcctgagcatcctccaggagaaactgaaaccagttatcgagtacttttataggccaaagaaacccgcccacggcttcattaagaacaaaagtatcctaaccaacgctgagaagcacaccaaaaagaagtatgttgtaaacgtggatctagaaaactactttggaagcgtgaccttcgcccgcgtctatggaatctttaaatccaagccctttaatttcagccatcctgccgcatccattcttgctcagctgtgtacaaaagacggtaagctgcctcaaggtgcctgcacatcaccgattctggcaaacctcgccagtgctagcctggataagcacttaacccagcttgctcggcgcaaaaacataacttacacacggtacgcagacgatattaccttttcatttaatcagcagcaggtccgagagatcatcaccctcgacaatgagaacaatttcgaactcggggaagcagtcatcagcgtgattgaaaaatccgggtttagcatcaacacttcaaagttcagggtgcagaaaaggaatgaacgtcaaaaagtgacaggccttgtggtgaatgagaaggcgaacgttgaaagaaaatacctccgcgtgactcgtagcctggttcacaagtggagggaagacaaactgacttccgccctgttgttcgtgactaaaaaaggcttcaaggctaccaacaatgagcatgccatatctattttcagaaatcacatctatggccggctgtctttcattaaaatgattcgaggggacgactttcccttatatttgaagttaatggctgagatgtcccatcacgatccactgaaaacgaaggaaggtcttagagcgatgcgcgaaacagagacatatgatgtgtttatctgtcatgcgtcggaggacaaaatctcgatcgccatacccatttacgaggagctgactgagctgaatatcagtacctttattgaccatgtcgaaataaactggggagatagccttatccagaagatcaactctgcactcgtgaagtctaaatatgtgatcgccatcttgtcagctaattctgttgataagcattggccaaaaaaagaactgcactcagtactcgcacgggagattgccgagggggaggtcaagctgcttacgctggtgaaggaagctgatgaggctatagttgctgcaagtctccctctgctctccgataagctgtatataacctacaaagataaccctgccgaggtcgccgacaaggtcagagcattgttaaataaatga

SEQ ID NO: 7634 - RNA, 1608 nt, synthetic construct
  source 1..1608: mol_type = other RNA
atgttgaacctgacaactactaataaggaagcaaaaggtctggccccacagctaccaaacgtggaacccaatccaaacactatcgggaagtccgtgacatgggaaaacaaaaaactgaagaactaccctatagcttccgagtccgacatcagaactatctgttctaagattgaaaacggctccatcagtattacttcaaccacagacgtcgctaatttactggaagtgcctattgggcagctgctctatatcttataccagaagaaggacaactacaagagcttcaagataacaaaaaagaacgggggcgtgagaatcatcgacgccccttgcggtagcctcagcattctgcaagagaaactcaagcctataatcgagtatttttaccgaccaaagaagtctgcccacggcttcatcaaaaataagagcatccttactaacgcagaaaaacacattaagaagaagtacgtcatcaacattgatctggaagattattttggcagcgttacattcgctcgggtgtatggaatctttaaatccaagccttttaacttcagccacagtgccgcatctatactggcgcagctttgcaccaaggatggaaaactgccccaaggcgcctgtacatcaccggtgttggctaatctggccagtgctagtctggataagcatctcactcagctggcacagaagaaacagattacgtatacccggtatgccgatgatatcacgtttagcttcaaacaaaagcaggtgagagacatcatcatcaaaaacaaggagaatgatttcgagctgagcaaaaccatcgtcgacatcgtagaacgcaatgggttcaagatcaatttcaacaagtttcgcgttcaaaaaaagtcagaaaggcagaaagtgacaggactggtggtgaacaagaaggtcaatatcgaaaggtcttaccttcgcgtcacgaggtccatgatccacaaatggcgtaccaatcgctcagagtccgcgtcactgtttagtattcagaagggctacacctctaaaaataaggacgaggagatctccatttttcggaatcatatctacgggagattatcatttatcaggatgattcgaggaaatgatttccccgcatatcttaaattgatggcagagatgtcccaccatgacaccgttaaaacccgggagggtttgcgagccatgaaggagactgagacatatgacgtgttcatttgtcacgccagtgaagataaagagtccatagcgacccccatttacaatgagcttgtcaagctaaacattgctaccttcatagaccatattgaaattaagtggggtgattcgctagtagataagattaactcgtctttggtgaaatcaaaatacgtgatagctattctcagtacgaattctattcggaagcattggccaaggaaagagcttcacagcgtactgtctcgtgagattaacgataacaaggtcaaactcttgcccctgataaagaaagacgacacaggaatagttctgagcgagctgccgctcctctgcgacaaattatacgttacctatgacaacaatcccgaggaaatcgccaatatgattcagagcagactcggcaaatga

SEQ ID NO: 7635 - RNA, 1644 nt, synthetic construct
  source 1..1644: mol_type = other RNA
atgagtctccacataaagatcctcctaaacaatctcacatccactaatcacgccgacttgctgccaaatctgccccaggtggagccgcagcccaatttgagcccttctaagacggagtgggataacaagaagctgagtaataggtccttgctgaccgacgatgagcgcaataagattttaagcggtatagagaactccaaaatcattatctcatcgcctaccgacgtcgctaatcttctagaggttccaaccggacagctgctgtatatactgtacaagcgcaaaaacaactaccgctctttcattgtcaaaaagaagaacggaaagaaccgcatcattaattccccttacagtggcttggccatcctccagcagcgttttaagttgatccttgactacttctatagaccaaagaagtcagcccatggcttcatcaaggacaagagcattatttcaaacgccgagaaacatatcaaaaagaagtacgtcgtgaatctggatctggaagattattttgggaccatcacatttccccgaatctacggaatatttaaatctaggcccttcaacttctcccatccagctgccaccgtactggcacagctgtgcacacacgagggtaagcttcctcaaggcgcttgtacttctcctgtgcttgccaatcttgtatcggcatcactggacaaacagctgacgcaactggctaaacgtaagaatataacctatacacgctatgccgacgacattactttttccttcaagcaaaacggaattaacgaagtgataaaactgtccgaggatgaaaagtacgagatcggggatcagctgataagcattatcgagaagaacggctttaagatcaatcaggataaattccgagtccagaagcggaataataaacaagtggtgacagggcttactgttaatgacaaggtgaacatcaacaagaaatacatcagactgaccaggagcatgattcataaatggagtcaagataagaccacagccgcccttatgtacacggctactcacggaatcaaaacccgggacaatgatcacgccattagtattttcaggaatcatatctatggcaggctgtcctttatccggatgatccggggcaaaaacttcagcacctacttaaagctcatgtctcgaatgtctcattcagaccccaagaaaactaatgaggggagaagggcaatgagtgagacagaaacttacgacattttcatatgtcacgctagcgaagacaaagaattgattgcaattccgctgtataaggccttatgcgataagaatatccccacctttattgaccacgtagaaattgcgtggggggactctctcatcgataaaataaacaacgcactcgcaaaagctaaatatgtggttgctatcttaagcgagaactcagtggagaaaaagtggcctaaaaaagagctcaacagcgtgctcgccagagaaatttccaacggtaaggtcaagctgttgacactggttaagaaggaagatgaagaggctatcgccgacaaaatcccactcactcacgacaaaagatatatggtgtacgatgataatgcggactttatcgcggatgaagtccggaaaatgctagataaccaggcatctattaaccagtga

SEQ ID NO: 7636 - RNA, 1605 nt, synthetic construct
  source 1..1605: mol_type = other RNA
atgcacaatttcgccctcgctaataagaaaagccccgactttataagcgaactccctcaaatcgagcctaagccctacagtaatggacacaagatcaagtggatcaatcatactctgactagtaccgaggtcactccaccggacaatctgatcaagatttgtatactgatcgaatccggagagattgccattacctcagtgagcgatattgccaatctgctaggcgttcccgcgggtcagctgctgtacattctgtaccggaagaaagataactacagaacctttgagatcgagaagaagaatggaaaaaagcgcgtaataaatgcgccatgcggtgggctctctatcctgcagacaagactgaagcctgtgctggagtatttttatcgcccaaaaaagagcgcccacggcttcattaaaggcaaatctattatcaccaacgctggcatgcacattaagaaaaaattcgttgtgaacatcgacctcgaaaattattttgagtccatttctttcgctcgcgtctacggcatctttaaatctaaacccttcaatttcagccatccagccgccaccgtgttggcacagctctgtacgcataatggcaagctgccacagggggcttgcacaagtcctatattggctaatattgcatccgcctccctggataagcagctgacacagtttgcagggagaaagaagatttcttattcacgttatgcagatgacatcacatttagcttcaatcagcgtaacatcgacattatcaagaagaacgatgacggcagttattctctctcggagacaattgacaacataatttccaaaaacgggttcaaaatcaactacgacaagtttcgagtgcaaacacgaaataccaggcagagcgtgactggacttgtggttaacgataaagtgaacattaacagaaggtacattcggattacccggagcatgatccacaggtggacagatgacaaattaaaatacgctctgcttttcgccaccgagaagggttatcaagcaaaggataataaccatgcgattcagatctttcggaaccacatctatggaaggcttagcttcatcaaaatggtgcgggggaaggactatcctggttacctcaaattgatgtcatacatgagtcacaacgacccgctgaagactcaggaagggctcagggccatgaaggagactgaaaatttcgacgtttttatctgccacgcctcagaagacaagaaagacatagccattccaatatacgatgaattgacgaagttgaagatctcagcttttatagatcatgtcgagattaaatggggagattcccttatcgaaaaaatcaacgcagccctggtaaaatccaaatacgtcatcgcgatcctctctgcaaattctgtcaacaaggaatggccccaaaaagagcttcgcgctgtgcttgcctccgaaatcagctcaggcgatgtaaaactgttaacgttactgaagaaggaggacaaggaagtcgtgaacttgagtctccccttactatcggacaaattctatatggtctacgataacaaccctgaggtggttgctaataacataaagtccctactgcagagatga

SEQ ID NO: 7637 - RNA, 1632 nt, synthetic construct
  source 1..1632: mol_type = other RNA
atgtccctccatgataagctccttatgcacaacctggcattagcaaacaaggaaaacgccgatgtcattagtgaactcccgcaggttgaacccacaccatataaaaacggaaataaggttaagtggcgtaacaaaaagctgaataacaaggcggctattgaacctgactctttgatgaagatctgtatgctaatagagtctggcaaacttctgattacatcagtatcagacgtagctaaccttctggagatccctgttgggcaactgctgtacatactttatcggaaaaaagacaactacaggacctttgagatcgaaaaaaaatccggcaagaaacggatcatcaatgcaccagtgggtggactgagcatcttgcaaactaaactgaagcccgttatcgagtatttttatcgccccaaaaaatccgcacatggattcatcaaggggaaatccattataactaacgctaacatgcacataaagaagaaatacgtggtcaatgttgacctggagaactattttgagagtatcacgttcgccagagtgtacgggatctttaagagcaaaccattcaattttggtcaccccgctgcaaccgttctggcccaactgtgcactcataatggtaagctgcctcaaggcgcctgcaccagccctattttggctaaccttgcttcgacatcactagacaagcagctgactcagctggccggcaggaagaaaatttcatacagtagatacgccgatgatattacgttctcttttaatcaggagaaggtcattgacattatcgagcgaagtgaagacggatcttatatcatcggggaaacgatcgacaatatcatctctaagaacgggttcaagattaatcacgagaaatttagagtgcagacaaagaatactcggcagtcagtcaccggcttggtggtgaatgagaaagtcaacatagatcgcaaattcatccggattacccgctcgatgatacacaggtggaaagaagacaaagtgaaatacgcgttactcttcactaccgagaagggatatcagaccgaggacaacaaccaggccatcgagatatttcgtaatcatatttatggcaggctgagctttatcaagatggtcaggggcggtgattatcccggatacctcaagctcatgtcttatatgagctacaatgatccgtccaagacaaaggaaggggtgagagcaatgaaggaaacagaaaacttcgatgtgttcatttgtcacgcttcagaagataaggaggatatcgccatgccaatctacgaggagctaagtaaaatgaagattagcgccttcatagatcacgtggagattcattggggcgactcccttatagagaagattaacagcgcattggtgaagtctaaatacgtgatcgccattctgagcgcggacagtgtgaataaggagtggcctcagaaagaactccgagctgtattggcctccgagatttccgaaggcaagaccaagctcttaaccctggtcaagaaaaacgatgaggaaatcgtgacaaaggcgctgcccctgctccaggacaagctctacatggtgtacgacaataatccagacatggtagccgaaagcatcaaaaaacgcttacagtcctga

SEQ ID NO: 7638 - RNA, 1608 nt, synthetic construct
  source 1..1608: mol_type = other RNA
atgtacaacctagtgagcgtgaataagaaaaatcaagatatcgtacctgagctgccgcaggttgagcctgtgccctataaaaacgggaacaagatcaagtggcgaaacaaaaagcttaaaaacaagaccatcaccaactgcgaaaacttaatcaagatctgcaaactgatcgagtccaacgagatactcattacatcgtccaatgacattgcaaatttgctagagatccctattggccagttgctctacatattgtaccacaagaaagacaattacaggacttttgagatcgagaagaagtccgggaagaagcggatcataaatgccccaaatggaggcgtggcgattcttcagggcaggctgaagcctattatcgaatacttttatcgccccaaaaaatctgcacacggtttcattaaagggaagagcattatcacaaacgccagcatgcatacaaaaaagaagttcgtggtcaacatcgacctcgaaaattactttgaatcaatcaccttcgctagagtatatgggattttcaagaagaaaccgtttaactttgcgcatcccgctgcaactatactcgcccagttgtgcactcacaacgggaagctgccccaaggcgcttgtacaagtccaatactggccaatctcgcaagcaccagtctggataaacagctgacgcagctggcttctagaaaaaatatcagctatagccgctacgcggatgacatcactttctcattcaatcaatccaacgtcttcaacatcatcgtcaagaacaataagggtaattacgaggtttctgagaatattgactccatcataagcaaaaacggcttcaagataaatcacgaaaaattccgcattcaaactaagaataccagacagtccgtgacaggtttggtcgttaatgagaaagtgaacattgatcggaaatacatccgtatcactcgttctatgattcatcggtggaaggtcgacaaagtgaagtatgctctgctcttcacaattgaaaaggagtatcagaccaaagacaacaatcaggcaatcgagatctttaggaatcacatttatggacggctctcatttattaagatggtgaggggagaaaactatcccggatatcttaagctgatgtcctacatgagtcataatgatcccctcaagaccaaggagggcttgcgggccatgaaagagacggagaattttgatgtattcatttgtcacgcctcggaggataagaatgacattgccattccagtctttaaccagcttgatagaatcaacatttctgcctttattgaccacgtgcagataaagtggggagatagtctggttgaaaaaatcaacagtgccctggttaagtcaaaatatgtgattgctatcctgtctgccaacagcgtcaacaaagaatggcctcagaaggaactacgagccgtgctggcttcagaaatatccgacggcaacatcaagcttctgaccctgattaaaaaagacgatgaggaaatcgtgaaaaccgctttaccactgcttagggataaatactacatggtatacaatgagaacccagaagtgatcgcagacaagataagagagctcttacatcgctga

SEQ ID NO: 7639 - RNA, 1608 nt, synthetic construct
  source 1..1608: mol_type = other RNA
atgcacagcctcacatttgccaataaggagaatccggacagcattcccgaaatccctcaggttgagccagagccctacaaagacggtaaaaacgttaagtggcgcaacaagaagctgaagaataaaagtaccattgaccatgaatccctgatcaatctatgcaaacttattgagtcaggaagtattgttatcacctcggcgtcagatatcgccaatttactggaaattccagtaggccagctgctgtacattttgtatcacaagaaagacaactaccggacttttgaaatcgagaagaaaaacggcaaaaagaggatcataaatgcaccaaatggcggcgtgtctatcctgcaagagaaagtgaagccaatcattgagtatttctatagacccaagaaatccgcgcatggattcataaaagagcgctcaatcattaccaatgctttcatgcatacaaaaaagaagttcgtggtgaacatcgacatcgaaaactactttgactcaattacattcgctagggtgtacgggatttttaaatccaaaccattcaacttcgctcaccctgctgccactgtattagcccaactctgtacgcacaacggaaaacttccccagggcgcttgcacttctccaattttagccaacttggccagtacgagccttgataaacaattgacccagctggccggtcgcaagtcaatatcatattctcgctacgcagatgacattaccttcagtttcaatcagaagaaagtacctgatatcattgaacagaacgacgatggcagctatgaaatctccgaagccctggagggtattatcctaagaaatggctttcgagtgaattctgacaagtttcgtgtccagactaagaacacaaggcaatccgtcactgggctcgtcgttaacgataaagtgaacgttgatcgcaaatacatccgaataaccagatctatgatacacagatggaagtacgataaggtgaagtacagcctattgtttacaactgagaagggttacaagaccaaggataacaagcaggcaatggatatctttcgtaaccacatctatggaaggctctccttcattaagatggtcagggggaaggactatcctgggtatttgaaactcatgagttacatgtcgcataatgaccctctcaaaacaaaggaagggctgcgggctatgaaggaaaccgagaattttgacgtcttcatctgtcacgcatccgaggataaggaggacatcgccacaccggtctatgacgagcttacgaagatcaatatcagtgcatttatcgatcacgtggaaataaagtggggggattccctcattgaaaagataaactctgccctcgtaaagtccaaatacgtgattgctatactcagcgcctctagcgtgaacaaagaatggcctcagaaagaacttcgggcagtgctggcgagcgagattagcgacggagatgtcaagcttctgaccctggttaaaaaagacgatgaggagatcgtgaagaccgcactgcccttgctgagagacaaactgtatatggtctacgaggagaatcccgaggtggtggctgaccgggtgcgaactctgctgcatcggtga

SEQ ID NO: 7640 - RNA, 1653 nt, synthetic construct
  source 1..1653: mol_type = other RNA
atgcagctgaggaaacaaataattgcgttcaacgagaaatgccgggccgagggcctggatgaagataggctcatcccactgcttaaagacacagagccatccagcgtaaaagtgggaaatactgtcatttggaacaactcctttaaaggaaacgtgtttagtttaacggaacaggaagtgtcaaaggtatgtgctgctatttcaaggggggacgtgaatattgaaagtgtgcaggatgttgccaatctgctagaggtaccagtgggaaatctcatccatctcctgtacagatcctccagtattaagtacaagtcatttaccatcccaaagaagaatggcggtgagcgaatcatccttagcccccagggcggcatcaaaattctgcaagagagagcaaggaaatatctggatgcattctatcgccccaagatttcggcccacggatttatcctaaataagggcatcttcaccaacgccgagaaacacgttaagaaaaagtatgtcctgaacattgacctgaaggacttctttgagagtatcacgttccctagaatttacggcgtgctgaagaagcatccgttcaatatgggccgccccgcagcagctgttttggcacagttatgcgtgcataacgggaagatgccgcagggagcccctacaagtcctgtgctttctaatatcattgctagcgccctagacaagacactagtgagactggccgggaagtataggatgagatacacacggtacgctgatgacatcactttctcctttaaccagtctccaccactggatatcgcaaagaagatcgaggacaccgggggatacgaactcggcgatagcctgcgccatgctatagagaacaacggcttcaagataaatgaagagaagtttcgattgcaactcaagactgaacgacaggttgtcactggtctgaccgtcaacgagaaagtgaatctggatcgtaagtatattcggcttaccagagcaatgatagacgggtggggaaaagacaaagtccaggccgccaataaataccataaaatccggtatgggaaatgtgataaaaacgacgaattcgcggttgaatccttccgcaaccacatctacggcaggttatctttcatacggatgattcgcggtgccgaatggcctctctatctcaagctgtccgcctggatgtcctctaatgacgataaccccacaattgaagggcgccgggctatgaaggcgatggagatgtttgatgtcttcctgtgtcacgcatctgaggacaaggaatcaatcgtgatgcctatctacgacgagttgtgcaaactgcacatacacgcatttgtagataccaaatacatcgagtggggagatagccttacagagaaaataaacggagctcttgccagaagcaaatttgtggtggcggtcctctcttcgaattcagttgaaaaaaggtggcccctgaaggagctgcacagcgtgttagcccgtgagatcgctgaaggcgacaaaaagttgctcaccttagtgaaagacggcgacgaggaacttattaaggctaagctgcccttgctcgccgataagctgtatgccgtctacaagggtgaccctattgagatcgctcacggtttgagctctttgctcactgggaagaaatga

SEQ ID NO: 7641 - RNA, 1632 nt, synthetic construct
  source 1..1632: mol_type = other RNA
atggccttcaattcaaaatgcaagaaagagggcttggacgaagagcagttcctgcccctgctgaacgacaacgagccaagctctgtaaaagtcggcaattctttcctgtgggataatagggccaaccggaatgctttctctctgactgaacgagacatctccaagctctgtgttgcaattagcaagggtgacatcaatatcactgaggtccaagacgtggctaacctgttggaagtccctgttgggaatctcatttacctcctgtaccgcacctccagcgtcaagtacaaagagtttaccattccaaagaaaaacggagatgaaagaaagatcctgtcacctcaggggggcgtaaaaatactgcaggaacgcgcgaagaagtattttgatgccttctaccggcccaagattagtgctcacggctttattctgaacaaggggattcttaccaacgccgagaagcacgtaaagaagaagtacgtgttgaatgttgatctgaaagatttcttcgaaagcataacattcccgagaatttatggtgtgctgaagaaacatccatttaatatgggacaccccgccgccactgttttggctcagctctgcgtacataatggaaaaatgccacagggtgcccctacctcccccgttctttccaacattatcgcctctgccttagacaaaaccctggtgcggctggccggcaaataccgtatgcggtatacaaggtacgcagacgatatcaccttttcgtttaaccaatcacctcccagtgagatcgctaagaaaattgagaacactgatggatatgagctgggagactcacttcgccatgctatagaaaacaacgggtttaagatcaatgaagacaagtttcgccttcagtccaagactgaaaggcaggtggtgacaggcctcacagtcaatgaaaaggtgaatctggagcgtaagtacatcagactaaccagagctatgattcacggttggggaaaagacaaagtgactgccgccaagaaatatcataaaacacggtacggcaactttgataaggatgacaactatttggtcgcgaacttcagagatcacatctacggtcgactgtcattcatacgcatgatcagaggggctgagtggcctctctaccttaaactgagtgcttggatggcaagcaatgacgacaaccctacgacagaggggcgacgtgccatgagggcaatggaaatgtttgatgtgttcctctgtcacgctagtgaggataagaacgacatagtgatccccatttacgacgagctctgcaaactggatgtgcatgcgttcgtcgataataaatatattaggtggggcgattctctgaccgagaaaatcaacagtgccctagcaaggagcaagtttgtggtggcagtgctgagccgcaattctgtggaaaaggagtggccattaaaggagctcaattccgtcttagcacgggagatcgccgatggggacaagaaacttctaacgttattaaaggaaggcgacgaggagctcatccaagcaaaattgccattgctggccgataagctctatgcagtgtatacgggcgacccgataaaggttgctcaggacctgaaagcgctactttccgacggagaatga

SEQ ID NO: 7642 - RNA, 1653 nt, synthetic construct
  source 1..1653: mol_type = other RNA
atgggcctgcgcgagaagattgcgtcatttaacaacgaacttaattacggggtcgactataaagatagcctaattccactcctgaagaacaatgagcctctggccatacatatgggtaataaggtgctttggaataacttcttcaagaagaatgagttctcgctgaccgacatcgacgtgtacaaaattactacggccatctccaagaaaaacatctacattattagccctcaggatgtcgcagctcttctggaggtcccagttggaaacctgctgtacctgctctacaaatccaactctaataagtaccgggagttcacgataccgaaaaagaatggagataaaaggactattctctctccccaagggggagttaagattttgcaggagcgcgctaaaaagtacttggacgctttttatcgcccaaaggcaagcgctcacggtttcatcctgaacaagtccatcttcactaacgcggagaagcacgttaagaagaagtacgtgctgaacgtggacatcaaagacttctttgagtccataacctttccccgaatatatggcgtgcttaagaagcaccccttcaatatgggcaacagcgcagctgctgtcttcgcccagctttgtgtgcacgaaggcaggttacctcaaggggcgccgacttcaccagtagtatcaaacattatcgcctcgagcttggacaagaccctcgtgcgactcgcaaggaaatataaaatgtcctacacacgctatgctgatgacataactttttcctttaaccagtatccccctgtggggattgccagaaaaatcgatggaacaaatgactttgaactgggggattctttgagaaacgccatcgaatccaacggattcaaaatcaacaatagcaaattccggctccagtcacgggccgaaaagcaggtggtcaccggtttgaccgttaatgagaaagttaacatcaatagggactatatcaggacaaccagagcaatgattgacgggtggggtaaagacaggttccaagccgctaagaaataccacaagattcggtatggcaaatgcgataagtctaatcagtcagctattatcagcctaagaaaccatatctatggccggttgtcttttattcgtatgatcagaggcgccgaatggcctctatacctgaaactgatcagtcgtatggcgaataatgatgattcccccacagttgaaggaaagcgcgccatgaaaatcatggaaatgttcgatgtattcctttgccatgctagtgaagataaggatgacattgtggagcccctgtacgaggagttagtgaatctacgagtgaacgcatttctcgataccaaatatatcaagtggggtgacagtctgatagagaagatcaatggcgcactggcaaaaagtaagtttgtgatcgccgtactcagccggaattctgtggaaaaaaagtggcctcttaaagagctgaacagtgtcctcgccagagaaattacaggagaagacaaaaaactgctcatacttgtcaaggatggggatgaggaattaattaaggacaagtttccactgctggtggacaagctgtacttggtctataagaacaatccagagataatcgccggcgagttactgtctctcctggccggcaaacagtga

SEQ ID NO: 7643 - RNA, 1641 nt, synthetic construct
  source 1..1641: mol_type = other RNA
atgcttctgaaacagcagatcattgccgctaattttatccgtggcgagtctggaaaagcgttcctccccactttgctgtatgttgagcctaaaagtattaaaacaggctcgaagtacaagtggatgaatccacgatctataagggcctactcactctccgaaaatgacattcactccttgttgtcggcggtgctcacaggcgaaatcgaaatcaagactgccaatcacgttgcggagatcttagagatccccgtgggtcagctgatatacatcctctacaaaaagaccacagaaaactacgtagagttcgaagtgaagaaaaaaatgggtggagtgagaaaaatctactccccccaaggttccgtgaagatcatacagaatagggtcaagaagattctcgacttcttttaccgccctaaagccgccgctcatggattcatcaaggagaagtccataaaaaccaacgcaaagaagcatatagggaagaagtatgtgttgaacattgacctgagcaacttctttgagtccattactttcgctcgcatctatggggtattcaaagcccggccgtttaatttcggccacgatgcagcaagtatccttgcccatgcttgtacatacaacggggttctcccacaaggggccccaacctcacctaccctctctaacatagtagctgctagcctggataagaagctggtaaccctagcccggagattcaaaatccagtacacacgatatgccgatgacatcacttttagctttaatcaaaagccacctgaagatcttgtcaaggtgctggatggggaaggactctgcgaagtgggcgacctgctgaacgaggtgatcgagtcctgcggatttaaagtgaatagtaagaagacgcgcttgcagagtaaaacccagcgccaggaagtaactggccttgtcgttaataacaaggtgaacgtgaacagggactatattcggatcactcgaagtatgattcatgggtggtgcaaagatagagcttttagcgctagaaaacacttcaacattacagatgagtgttcagttgagaaagagaagaacatcattgagtcttttcggaaccacatttacggcaggctgtctttcattcgtatgatacggggcgtggactttccctgttatcttaaactcatggcctatatgagccataatgatcctaaacagacaaaggaaggcaagagggccatgaaggaaacggaaacctatgacatttttatctgccacgcaagcgaggataaggatgagatagctgtccccgtctacgacgagctgaacaatctgtcaatcgtgaccttcattgaccacctgtcaatcaaatggggtgacagcttagttgacaagatcaataatgccttagcaaaatctaagtacgtgatcgcaattcttagcaagaacagcgtcgagaaaaactggccaattcgcgagctgaattcagtcttggccagagaaatcaaaggagggaaggtcaaactactaaccctcattaaggcgtctgatgaagagtatgtgcaagataaactgcccctgctggccgacaagctgtatatggtttacaatggaaacccggcagaggtggcatccagggtcagagacttactgggccacccttga

SEQ ID NO: 7644 - RNA, 1635 nt, synthetic construct
  source 1..1635: mol_type = other RNA
atgcttctgaaacagcagattattaccgagaacttcattagggacgaaaacgggaaatccttgctgcctgccccaagttacgtggagccaaagagtatcaagtctggcaacaagtatcggtggatcaaccctaagagcatccgaaagtactccctgagtgagagcgagatccactccctccttagtgcaattttaaccggcgaactcaagattaatacggtgaatcacgttgcagagatactggagattcccgtcggccatctcatctacatcctctacaaaaaaatctcgagcaattacgtggaattcgaaatccctaagaagatgggaggggtccggaaaattaaagccccgcatggaagtataaaaattattcagggacgggtaaagacaatactcgactttttctacagaccaaaaaccgcagcccatggcttcattaaggggaagtctatcaagagcaacgccaaaaaacacatagggaagaagtatgtactgaacatcgacctgtcaaactttttcgaaaccatcacatttgcacgggtctatggtgttttcaagagccgcccttttaatttcggccacgacgctgcgtcagtgcttgcccaggcctgtacttataacggtgtgctgccacaaggagctccaacctcacctgcgttgtccaacatcatagctgcttctctagacaagaaactggtgaccctcgcaagaaaatttaagatccagtacaccaggtatgccgatgatataactttttccttcaatcagaagccccctgaggatttggtaaaggtgatagatgggggtgctctgtgcgagatcggcgacctcctgaatgagattattgaatcctgcggctttaaggtaaacttaaaaaaactgcgcttgcaatcccggacacagcgacaagaggtgacgggacttatcgtgaacaataaggttaatgtcagccgtgactacatccgtatcacacgcgccatgatccacgggtggtgcagagacagcacgcttgccgctaggaagcacttcaacatcactgatggccagggtgaggacaaaagcctggtgaacagctttaggaaccatatatatggtcgcctatcgtttatcaagatgattagaggcgccgagttcccgtgttatctcaaactgatggcatatatgtctcacaatgatcccaaacagacaaaggaaggaaaacgcgcaatgcaggagacagagacttacgacgttttcatctgtcatgcgtctgaagataaaactgaaattgctatccccgtctacgaagagctgtcaaaattagggatcgtgacctttatcgatcacttgtctatcaagtggggagactccttggtcgagaagattaataatgccctggttaagtctaagttcgtcattgccattctctccgaaaattctgtcgagaagaaatggcccattaaggagcttaatagtgtgctgtcaagggaggtcaaaggagggaaggtgaaactactgactttgattagagactccgatgaagagtatgtgcaagaaaaactgccactcttaagcgataaactttacatggtttacaagggcaatcccgtggatatagcttcaaaggtggaagacctgctgcgaaactcatga

SEQ ID NO: 7645 - RNA, 1587 nt, synthetic construct
  source 1..1587: mol_type = other RNA
atgctgacgtttaacaaactgcagtttaggttgcaggctaccgagcctacacggctttataataactactgggtcaaatggctcaatccttctcttagccccacgctttcccgaaacattgaaaccagccgtgagttaatcctggggctgcagagcagcaacgatgtcgccaacctgctggagattcccgtaggccagctcctgtacattctctatacgctggagccaaagtacaagagcttcacagtgaccaaaaagagcggtaagaaacgcctcattgattctccaaatgagtccattaaaatcttgcaggacaaagtgcgacctcttatcgaggcgcactacagggtaaagaagcccgtgcacggatttgtgggtggaggcaagggaatcgtgactaacgccatgcaacacaagaaaaaaaactacgtgcttaacatcgatttgtcagatttcttccattcagttaacttcggacgcgtgcaaggaatatttagaaacgccccctttaacatgggcagcgccgctgcaacagttttggcccagctgtgtactcataataagtgcctgccccagggggcttccacttctcctgttctgagtaacctggcagcaagcacattggatcgcaagctcgtgcagctggctaagaaattccacctgacctacaccagatacgcagacgacataacattttcatccaataagccattcagtggcaagatcgttgaaaatcgaaaggaggaaagtggactagaaactcatagggtaggcaaactattagagcagattattaccgattccgggttccaggtcaatcacacaaaaactcggctacaatataagtcgcagcgccaggaggtcactggattggtggtaaatgagggtgtgaatgttaatcgtaagttcatcaggaagacccgggccatgattcacgagtggtcaaatgatctgatctctgcagaggcaagatttatcatgcagaggtataacgtgagtgacagtgaagttgggaatgaccgggatggctcaatcttcaaacgggctgtgtatggtaaccttagcttcatcaaaatggtcaagggggaagaacatagtccctatctgaatctgtgtaggaaggtgctggaactggacaatgaaccaccatcctttatatccaagttaaaagacgtcctcgacatgtacgatgtctttatatgccatgcgagagagaacaaaaatgaggtcgccatcccgctctatgaagccttaaaatcgaaaggcatcaataccttcatcgactccagtgccattaactggggggactcactggtgtcaaaaatcaacacagcgttacaaaaggctaaatacgtgatcgccatcatatctgacgattccctcaacaagtcttggcctatgcacgaactgcggtctgtgctgtccaccgagatacgcagcggcgagatcaagctccttccgctcatggtgggcgacgctgacgctttgatttctcaaattcctctgctcgccgataagagatttattcacttcgaggacaacattgatgacgtcgttgaagaaattcagaagctacttaaggattga

SEQ ID NO: 7646 - RNA, 993 nt, synthetic construct
  source 1..993: mol_type = other RNA
atgtctaatctggcagccacatccctagataagaaactcgtccagatcgctaagaaatttcacctgacctacactaggtatgccgacgatttaaccttcagcagtaacaaaccctttcctagcatcttggtcgaacgcaaaacccaggataacgggcaggataagcaccgagtggggaagttgctcgaacaagtcatcaaagatgccggctttgagatctcccatgacaagacacggctgcagcataaatcacagaggcaagaggtgacaggactggtcgtgaacgagggggtaaatgtgaacagaaagttcgtgcggaaaactagagcaatgatcaacgaatggggaaaagatttgcgagcagccgagatccggtttattaagcatagatatcacgtgaccgactccgaaatcaatatggagaatctcgatggctcaatatataagagggcaatctacggaaacttgtctttcattaagatggtgaaaggcgaagagcactctccataccttaacctctgcaaaaaggttcttgaactggaatccaaccctcccgagttcataaaaaagttaaaaggggtgttcgatatgtatgacatctttatatgtcacgcctcggaaaataagagtgatgtagcgctgccccttcatgctgctttggcggagcgcggcataaacgccttcgtggattgcttcgagattaaatggggagacagcctggttgccaagattaatactgctctgcaaaagagtaagtacgtcattgccgttatttcagaagagtctgtgaaaaagagttggcctatgaaggaactgaatgcagtcctttcaagcgagattggtagcgaacagacgaagctcttaccactcatggtaggtgacgacgagtccctcctgaaacagctgccgcttctgggcgacaagctgttcgtgaactttgacgacaatatcgaggagattgctggtaaggttgacagcctactgcgtggctga

SEQ ID NO: 7647 - RNA, 1596 nt, synthetic construct
  source 1..1596: mol_type = other RNA
atgtccacccccctgggctcacttttatttaacctcgaaagctttgagcctgagaaaattccgaacaagaagacctattcctggaaaaatcctaaactcagtcccacgttaacgagagatctagaggtggctaaaactcacttcgtaggactccagactgacaacgacgttgccaatattctggaaatcccggtcgggcaactgctccacatcctgtactatcagaaacagaactacaattcctttaccattaagaagaagtcaggcaaaactaggcttatcgatagtccaaaagcctcaatcaagatactccaagacaaggtgaaaccgttgatcgaggcccattacagagtcaagaaacccgtacatggcttcgtcggggatggtaagggtatcataaccaacgctttccaacaccgtaagaagaactatgtgctgaacattgacctgcaggatttttttcacagcgtcaattttggccgcgtccaggggatcttccggaacactccttttaatatgggaatcccagccgcaacagttctggcacaactctgtacccataatgggagactccctcagggggcttcgacatctccagtgatcagtaatctggcttctacatcactagacaaaaaattggtccagatagccaagaaattccatctcacatataccaggtatgccgacgatctaacattctcttccaacaaaccattccccaccatactggtagagagagagatcgacgaaaatggtaaagaaatccataaagtcggaagactgctggagcaggcaatcaaggatagcggctttgaagtgtctcatcacaagactcgccttcaacataaaagccagaggcaggaggtgaccggcttggtagtgaacgagggcgtgaacgttaatcgcaagttcatccgtaagacacgagctatgattaatgactggtccaaaggcctggcgcaggccgagataaggtttcttaagcagcggtaccaccttaccgattccgagattaagaccgacgggctggatgggtccattttcaagcgagcagtctacggacacttgagtttcatacggatggtgaagggagaagagcacagcccctacctgaagctttgcgagcaggttctggcactggactccaagcctccagagttcattcggaagctgaagggcgtgttcgatatgtacgatgtttttatttgtcacgcgtcggaggataaggctgaagtggcactgcccctatatgacgccttagccaagagggagatcaaagccttcattgattgctttgctattgactggggagacagtctcgtgtctaagatcaacactgcgctgaaaaagtctaaatacgtcattgcagttgtgagcgatgaaagcgtgaaaaagagctggcccatgaaagaattaaatacggtgctggccgctgaaatttcttcagaagagacaaagttactgcctctcatggtgggagacggcgaagaattgctgaaagaaatcccattgctgggtgacaaattgtttgtgaacttcaacgacaatatcgacgagatcgccgataaggttgagaagcttctccagcgcagctga

SEQ ID NO: 7648 - RNA, 1311 nt, synthetic construct
  source 1..1311: mol_type = other RNA
atgcaagagaaaatcaagcccctgattgaagctcactaccgcgtcaaaaaacccgtccacggcttcgtcggaggcggcaaaggtatcgtttctaacgctgaacagcacaaaaagaaggattatgtactgaatatcgacctccaggactttttccatagtattaactttggtcgcgtgcagggtatcttcaagaataccccgttcaatatggccacccccgccgcttcagttctggctcagctctgcacgcataacgggcggctgccacagggagcatgtacatccccagtgatctcgaacctggcagcaacttctctggacaagaaactcgtgcaaatcgccaagaaattccacctaacttatacaaggtacgctgatgatttgacatttagctccaataagccgctaccctcaattcttgtggagaagattgcggaagacaatgggcaatacaaatacaaagtgggacgaataatcgagcaggccattattgactccggatttaacatcaatcacaataaaaccaggcttcagcataagagccagcgtcaagaggtcaccgggttagttgtgaatgaaggcgtgaacattgaccgcaggtttatacgaaagacgagagctatgataaatgaatggagaaagaacctgctggaggccgaaatccgtttcatcaaaaagagatacaatctgagcgactcggagataaagaataggaagcttaatgggtctatctataagcgggctatttatggcaacctcagcttcatcaaaatgatcaaaggcgaagagcattcaccatatcttacactgtgtaagcaggtgttggagctggacaacaatcctccttatttcgtgcggaaactgaaagggatttttgatatgtacgacatctttatctgccacgcctctgaggacaaagataaggttgccatacctctctacgacgagctaattaaacgggacatcaacaccttcattgattgctttgcaattaagtggggtgattccttggtcagtaaaatcaacactgcgctgaagaagtctaagttcgtaatcgcagtgatatccgatagcagtgtaaagaagagctggcccatgaaagagctgcatgccgtcttatcaagcgagattggctccgaagaaaccaagttgcttccactcatggttggggatggagaggccttgctgaaggaactccctctgctcgcagataaactgtttgtggctttcgataacaacatagaggaaattgccgacaaagtggagactcttttaaagaagtacaacctctatgacatcagtcagagatga

SEQ ID NO: 7649 - RNA, 1596 nt, synthetic construct
  source 1..1596: mol_type = other RNA
atgaccaaactcatggacttcctgtcttttcactccaatgcttttgagcctactaagtcctccaagaacgccggctatacctggatcaatccgtccttgaccccacatttgactagagaattagacttcgtgcagcgccagtttctggggctccagtcagacaatgacgtcgccaatattctggaaatacccgtcggccagctgctgtatatcctttactctcagaaggacacttatgttaactttacggtgaaaaagaagtctggcgagaaccggaacatagaaagcccctgctcgagcatcaagattcttcaggataaggtgcgccccttgatcgaggcccactacagagtgaagaaacctgtccatggattcgtggggaacggcaaaggcatcatttctaatgctgagcagcacaagaagaagacatatgttctcaacatagatctcaaggacttctttcacagtgtgaatttcggcagggtccaggggatcttcaaaaacattccctttaatatgggtacaccagctgctactgtgctagcacagctgtgcacgcacaaacgaagactgccgcagggggcctcgacatcacctgtcttgtcaaacctggcctccactaccctagataaaaagttgacaaagatcgcaaagaagttttacctgacctacacacgttatgctgatgacatcacctttagcagcaatgagccttttagtcaagcacttctggaaaaagacaaactggatgacggacaatatatctacagggttggaaatgtgctcgaggcagccgtgatctcttcagggttttccataaaccataagaaaacacggcttcagcacaagtctcaaagacaagaagtgacggggctcgtggtcaacaagggcgtgaacattaacaggaagttcatccggaagactcgcgccatgattaatgagtgggataagaacttgatcgaagctgaaaaacggttcatcaaagtgagatatcacgctcaggagacagagatcgacatgagtaaactcgatggttcaatctacaaacgggctgtatacggtaatctgtcttttattaggatggttcgaggcgaagatcatagcccatacctcaccctttgcaagaaagtgctcgagctggaccataaccctcccgccttcattaacaagcttaagggaatcttcgagatgtatgatgtgttcatttgtcacgccagtgaagataaagagagcgttgcgctgccactgtacgaaagtctggagaaacgcaatattaacgcatttattgactgtttcgcgataaattggggtgatagcttagtcgcgaagattaacactgcactacagaagtccaagtacgttatagcaattattagtgaggacagcgtcaaaaaatcctggcctatgaaggagctgaatgccgtactgagcgccgaaatcgccgccgataaaaccaggctcttgcccttaatggtgggagatggagaggctctcgtacgtcaactgccacttctggcggacaagttattcgtaggctacaaagacaatatcgaggaaataaccgacatgatcgaatcactactgaccgagaaatga

SEQ ID NO: 7650 - RNA, 1590 nt, synthetic construct
  source 1..1590: mol_type = other RNA
atggccactacattctcatcattgagtttctacctggtgtcttttgaaccaaagaaggtaccctataagaaatctattgtctggaaaaaccctaatctgtcttcaacgctgactcgggacgcaaacgtggccaaagaaaaatttattggcttgaagaccgacaatgacgtcgctaacattctggaagttccagtgggtcagctcctgcatatcctttacagccaaaaacaaaactacgatagcttcgtcatcaaaaagaagagtggcaaatctaggatcattgagtcgccaaaaacctccgtgcgcatactacagaacaaggtgcgacctctcatcgaggcgcattacagggtgaagaagccagttcacggtttcgtgggtgggggcaaatctatcgtgagtaacgccgagcagcacaagaagaaaaattacgtgctcaacattgacctggtcgatttcttccactcagtgaactttgggcgagtgcagggcatctttcgcaatactcccttcaatatgggaatacccgctgctactgtgctggctcagctgtgtacccacaatggccggttgccccagggggcttctacctctccggtgttaagtaacctggcctcgaccacactcgataagaagcttgttcagatcgccaagaagtttcacttaaaatacacgcgatatgcagatgatcttaccttcagttccaacaaacccttttccagcattctggtagataaggagatacaagaggacggacagtataaatacaaggcaggcagagtaatcgaacaggccatcaaagagtccggttttagcattaatcacaataagacacggttgcaacataaatcccagagacaggaagttactggcctggtcgtgaatgacggcgtgaacattaaccgcaagtttatcaggaaaacccgtgccatgatcaatggctggcgtcaggatttactagaagcggagcgcagattcataaaaatcaggtatcatgccgcagagtctgacatcgacgcgagcaaattggatggatcaatcttcaagagggccgtttacggaaacctgagctttattaaaatggttaagggggaggagcatagcccttacctaaccctgtgcaagcaggtgcttgccctcgataataaccctccagagtttgtcaagaagctgaagggggtcttcgacatgtatgatattttcatctgtcacgcttccgaggataaagccgaagtcgctatccccctgtataattccctcaaggaaagagacatcaacacattcattgactgctatggacttatgtggggggacagcctcgtggccaagataaacacagcccttcagaagtccaagtatgtcattgctatcataagcgaggacagtgtcaagaaaacatggccgatgaaagaactgaatgcagttctgtcagcagaaattggcagcgaagagactaaactgctccctcttatggtgggagacggggaagctctgttagagcaactgcccctcctccgggataagctgtttgtatcctacgacgataatatagaggaaattgtaggaaaagtggaggcattgttgatctga

SEQ ID NO: 7651 - RNA, 1584 nt, synthetic construct
  source 1..1584: mol_type = other RNA
atgaatcaagccaactttgtgtttagggatttcgaaccaaaaaagttcagctattcaggcaaccagtattgggtgaatccatccctgtctcacgagctggccggagacattgacaacgcgatacagcaatttatcggcttgaaaactagtgccgatctggcttcaattctcgaagtccccgttgggcagctgctgcatattttgtatgcccagaacaaccagtatacgagctttgaggtgaagaaaaagagtggtaaaagcaggcttattgagtccccccggaacagcatccgcatactccagaataaggtccgccccctgatagaagctcattatcgggtaaaaaagcctgtgcacggttttgtgggcggagggaagggtattgtgtcaaatgcagagcaacacaagaaaaagaactacctccttaacatagacctgcaagacttctttcacagtgtgaactttgggagggttcagggcatcttccgcaatacacctttcaatatgggcaagagcgccgctacagtccttgcccaactctgcacttacaatcaaagactccctcagggagcctccacctccccagtcctgagtaatttagctgcagcatctctggataaaaagctggtgaaaatagctaagcgtcatcacctaacttacacccgctacgccgacgatattaccttctcttcgaataaaccgtttagcacaatgctggtggaccgagaaattttggaagatgggacatataagtacagggcggggaaactgatcgatcaggcggttgaggactctggattcaaaatcaaccattccaaaacacgagtacagcacaagagccagcggcaggaagtcacaggactagtcgttaatgacggcgtgaacgtcaatcgaaagttcattagaaagactcgggccatgatcaatgaatggagaaaagacatcctagcagcagagatccgtttcatcaaagagagatatcatgccgatgaagcagaaatagacgtgtcaaaactggatggctccattttaaaacgggctgtatacggtcacctgtccttcattcgcatggtgaagggcgaggagcactccccctacctgaccttatgtaaacaggtccttgagctggacggcaatccacctgattttgtcaaaaagctcaaagggatctttaatatgtacgacgttttcatctgccatgcttccgaagacaaggaagccgtggccaccccactgtacgaaagcctcaccaaattgggtatcaacactttcatcgatagtgaggcaatcaagtggggggattcactggtgtctaagattaacaccgctctgaagaagtctaagtacgtggtggccgttatctcggaggagagtattaataaatcttggcctatgaaggagattaacgctgtactttcactcgagatcggagaggaaaacacgaagttgttgccccttatggtgggggacggcgacgcgttgctcaagcagctgccgctcctaggagataagctttttgagagcttcaataacaacgccgaggagatcgctaggaaactggcagaaagattacagaagagctga

SEQ ID NO: 7652 - RNA, 1473 nt, synthetic construct
  source 1..1473: mol_type = other RNA
atgactcagacaaactttttcttcggcgattttgagcccaaaaagtattcataccgcggcaatcagtactgggtcaatccttcgctatcgcatgagctcacaggcgatctggacaatgctatccagcagttcattggactgaagaccagtgctgatctggcttccgtccttgagatacctgtgggccagttgttgcacattctttacgctcagaacaatcaatacacctcttttgaggtgaaaaaaaagagtggcaagtgccgcctgatcgaatcccctagaaattctattcgcattttgcagaacaaggtgaggcctttgatcgaggcccattatcgggtaaagaagcccgtccacggctttgtaggaggaggaaaggggatcgtttccaacgccgaacagcacaagaagaagaactacttactcaacatagatctccaggacttcttccacagcgttaacttcgggagggtgcaaggtatcttccggaatactccattcaatatgggcaagtccgcagccacagtgctggcccaactctgtacatacaatcagcgtttgccgcagggggcctcaacgtctccagtgctgtcaaatctcgcagcagcttctttagacaagaagttagtcaaaattgccaagaggcatcacttaacctatacccgttatgcagacgatataacgttttcaagcaataagccgtttagcaccatgctggtggatagagagattctcgaagatggcacttataagtatcgcgccggtaaactaatcgaccaagccgttgaggacagtggcttcaaaataaaccactccaaaactagggtgcagcataagtcccagagacaggaagtgacaggtcttgtggtcaacgacggggtgaacgtgaataggaaatttattcgaaagactcgggccatgataaacgagtggagaaaggatattcttgcagcggagattcgattcattaaagaacggtaccatgtagacgaggcagaaattgatgttctgaaattggacgggaatccccccgacttcatcaagaagctgaaaggaatcttcaacatgtatgacgtctttatctgccacgctagcgaagataaagaagctgttgctacaccactgtacgagtctctgaccaaactcggcatcaacacctttatagacagtgaggcgatcaaatggggggatagtctggtcagcaagattaacaccgctctgaaaaaatccaagtacgttgtggccgtgatcagcgaagagtctatcaataaaagctggcctatgaaagagatcaatgccgtgctttcactggaaatcggagaggaaaatactaagctcctgcccctgatggtaggggacggagatgccctacttaaacaactcccactgctcggtgacaaactgtttgagagctttaataacaacgccgaggaaatcgcactgaagttggcggaaagactgcagaagaactga

SEQ ID NO: 7653 - RNA, 1479 nt, synthetic construct
  source 1..1479: mol_type = other RNA
atgaataccgacacctcatcagacataagtgtcacaacttcatttgagcccaagcgtataattgcctacaatggccaccaatggatcaaccctaaactctcccctaccattctcagtgatcagcttaaggctgctgaaaagatcatcggtctgaaggaggcttctgacgtcgccaacatcctcgagataccagttggtcagctgctctacatcctataccagcagaataagaagtatacctcattcaccatcaaaaagaaatccggaaaggagagactaatcgaaaaaccaaacaactccctgcaaattttgcagtccaagatcaaaccccttatagaggcccactatcgggtgaaaaaaccggtgcacggcttcgtttctggagggaaaggcattgttagcaacgctgaacaacataaaaagaagaacttcatcctgaacatcgacctgctcgacttttttcactctgtgaacttcgggcgggtgcaggggatctttcgaaacatcccttttaatatggatgtgccggccgccacaatactcgcgcagctgtgcacttataatggaaggttacctcaaggggcctctacttcccccatcatttccaatctggctgccgccacactggacaagaagctggtacagatcgccaagcgcttccatttgacttatacccgttatgcagatgacattacatttagtagcaaccgagaatttcccgcggtaatcgtccaacgggacgtgaatacccaagacaaattgaagtacatcgtgggccctcttctggagagagcaattacagacagcggattccatgtgaatcacaataaaacacgcgttcagcataaatgtcagaggcaggaagtgaccggtcttgtcgtgaacaatggggttaacattaatcgccagctcatacggaacactagggcaatgattaatgaatggaggaaggatctgcagtcagctgagattagattcatcaaacacagataccacgtcaacgagaatgatattgagatcaacaagctagatggcagtatctataaacgggcgatatacggcaagctcagcttcattaagatggtgaggggagaggatcacagtccttacctgaaactgtgcaagcaggtactggagttagactcgaatccaccaccctttatcaaaaagctcaagggcgtgttcgatatgtatgacgtctttatttgtcatgcatgtgaggataaaaacagagtagccattccattgtaccatgcattagaaaagaaaggcatcaagacgttcattgattgctttgctattgggtggggtgacagcttggtcggaaagattaacacagccctgcagaagagcaaattcgtgatatccatcatttctgaagcatctatagataagagctggccaatgaaggagattcacaccgttcttagcatggaaatccgcaatactaaaacgaaactgcttcccctgatcgtgtga

SEQ ID NO: 7654 - RNA, 1578 nt, synthetic construct
  source 1..1578: mol_type = other RNA
atgcagcaacctttggagttctcggagtttgaaccaattaagttcggcaacggcgacgaaaccatctgggggaatcctacgctgtcacctaggcttacccgggatcacaaggtggcagagacactgcttctgaatctcgagtccgacaacgacgtcgccaatttgctggaaatccccaccggccagctgctctacatactgtacgagaaaccaaagcgatataccatattctccattaagaagaagagtggcaagccgcgtctcatcgagagcccaaacagttctatccgcatattacagaacaagcttcgtccacttttggaggcccagtataaaataaagaagcctgtgcatggcttcgtaggcaacgggaagtccattatcagcaatgctgagcaacacaagaaaaagaactacctcctcaacattgacttactggacttttttcattccgtcaatttcggacgggtgcagggcatttttaggaatactcctttcaatatggggtacaaggccgccactgttctagcgcacctctgtactcacaacaaacgactcccacaaggggctcccacaagccccgtgcttagtaatctcgcatctaccactctcgacaaaaagctagttcagctggccaaaagatttcagctgacctacaccagatatgccgacgatattactttttcatccaataggccttttccacccctcctggtagaaacaatccacttagaagacggtacaagccatcaccgagtgggaaaggcactgaaacaagccgtcgaggacagtggtttcgctgttaaccccaataagaccagagtgcagcacaggagtcagcgccaggaagtgacaggcctgatcgtgaatgagggtgtaaacgtgaacaggaagttcattagaaacacaagagccatgctgcacagctggcggaaagatctgattgaggcggagttgacctatctgaagaaccgctatcacgctgttgatgtcaacaagtcgaacctgactggcgatatcttcaagcgggcaatctacggccgcctgtcattcattaaaatggtcaaagggcaggaacatggaccctatttgaatctatgccggcaggcactcgaacttgacaataatccaccgaagtccattgctaaactgaaaggggtcttcgaaatgtttgatgtgttcatttgtcatgcgtctgaggataaagaagctatcgcactccccctttatgatgaactgaatacgctgggtgtgaaaacttttatcgataaggttgagattcagtggggggactctatagtgggaaagatcaactctgccttacaaaaaagcaagtttgtggtcgcaatcatctcagagagctctattggaaaagcttggcccctgaaagagctccatgccgtgcttgggatggagatcggtagcggagataccaaattgttgccgctgatagtaggaaacgaggaagagctgttaatgcagctgcctctgatcaaagacaaggcttacctgccttacacgaacaactgctcagaaatcgccaaaatcctaaaggataaattggacacatccaattga

SEQ ID NO: 7655 - RNA, 1572 nt, synthetic construct
  source 1..1572: mol_type = other RNA
atgcaactgactcttgaatttctcgatatctctgaattcgagccaaaaaggattgaggctagctggagtaatcccaggttatctcctacgctaaaacgggagcgcgatgccgtggcgcagcgtttaatcggaattcaaaccgataacgagctggccaacctgttggaaatcccagtaggtcagctcctgcacattttatacgaggaaaagaagcgctaccatgagttctacatcaaaaagaagtcaggacagcttagagttatagagagccctaacaagagtctaaaaattctgcagcacaaggtcaaacccctcatcgaataccattatagagtgaagaagagttgtcacggatttgtcggcaacgggaaaggaatcgtgagcaacgcagaaaagcacaaaaagaagcagtacgtcctgaacattgatttgaaagacttcttccatagcgtgcacttcggtcgggtgcggggcatattcatgaatgtgccctttaatatggggaactcagccgcatccgtgctcgcacagctgtgtactaaccattctaggttacctcagggggctcccacatccccggtgctatccaatttggcggcctccagtctagacactgctttgacaaaaattgccaagcggtaccacctgacttataccagatatgctgatgacattaccttttcatctaacaggaagttccccctggccattgtcgaccgttttgaaaccgacctgggaaaggtagaatggcgggtggggtcattacttcgtcagagcatcgaggaatcagggttcaccgtaaacgattccaaaacacgagtccagcacaggtcccaaaggcaggaggtaaccggtctggttgtgaatgacggcgttaatgtctcacgcaagtttattcggaacacgagagctatgcttaactcctggtccaaagatctggtggaagccgaacgaagatttctgatgacacgctatcatatgagcgaatctgaaatcgacagtaagaagctggacggtagatatttcaagaatgctatctatgggcgcctctcttttatcaagatgattcgaggcgaggataacagcagctacctcacactctgcaaaaaaatcctggagctggagcccagtccacctaaaagtatcgccaagcttaaggagaggtttgagatgtatgacgtcttcgtgtgccacgcctcggaggacaaagatgacgttgcgatcccgttgcatagagcgctcgaagataaaggcatcaaagcattcatagactgctttgagattaagtggggcgactccctggtggctaagattaataccgccctgcagaagagcaaatacgtcgttgcaatcatatctcaacactcggtgaataaggcttggccaatgaaggaactcaatgccgttttgtccagcgagatagactcaaagcaaactaaactcttgcctctgatagtgggcgaccagaatgcccttattgaggagctgccactgcttgcagataaactctttaaggtgttcgatgatgacatcgatcagatcgcatctgagctggagatgcgcctgaaatga

SEQ ID NO: 7656 - RNA, 1566 nt, synthetic construct
  source 1..1566: mol_type = other RNA
atgatgacacttttcagggacgactttcaaccaagaaaaacccgtaaccaatttggtgaatcgagctggttaaatcccaaactgaatccatatctaacggccggccaagaagaggtgaatcagaagctgaagaatttaaatgacgtcagcgatgttgctaacctgctggaactgcctactggccagctcacctatatactgtacaacaagaagccggcttacaaaactttcggcattaaaaagaagagcggtaaagtcagaataatcgacagtccaaacaattccattctgatcctacagaacaaaatcaaacccgtgatcgagagctattaccgggtcaaaaagcctgtccacgggttcgtcagcggacgatcaataatcagtaatgcagagcagcacaagaaaagcaagtacattttgaacctcgatctaaaggatttcttccatgccgtcaactttggacgggtgaaagggattttcaagagtaccccatttaactttggagacaaggcagcaaccgtcctcgctcagctctgcacctatcagggacggttgccgcagggagcacccacatcccctcttttatctaatctggccgccacctcgttagaccgcgagcttgtacacctcgcgaaaaggtttcatatgacgtacacgcgctatgccgacgatattactttctcctccaataaaaagttcgacgagcagatcgtgaccttcctgatcgagaaggagtgttttgaggtgggggttctgctgaggaaaaagatcgaggagtccggtttcgaaatttctgaaagcaagactagagttagccatcgctctcagcgtcaggaggtgacagggctgaccgtcaacgataaggtgaacgttcctcgcaaatacattagagaaactcgggccatgctacactcttggggccttgggctcctggaagcggagaggaagtatctgtctttgaaaaaaggatggacttccgaaaagcttaactctacaaaactcgatggctcctactttaaaagagccatctacggcaggctcggtttcatcaagtccatccaaggggaggactcaagtccttatttgtcactctgcaagaaggccattacactggacagtaaccctcccaaatttattcaggttgctaaggaaaagttggacatgtacgacgtgtttatatgtcacgccagtgaggataaagaagctatagtgtttccactggaaaaggccttagtggcaaaaggcgtgaaggtattcgtggattcatctgtgatcaaatggggagatagtctggtggataaaatcaatcatgggcttcgagtatcaaaattcgtcattgcggttctgtcccccgctagcgtaaataaagcttggcccaagaaagagattaacgcaatcatgtcaatggagataaaggccgagaagaagaagcttctgccactgctcgctggctctgacgacctcatcaatgaatttcccttgatgagcgataagctgtacaagaagttcgataataacgtggacgaaattgtggatggcttgtgcgagatgctgcaggagacatga

SEQ ID NO: 7657 - RNA, 1407 nt, synthetic construct
  source 1..1407: mol_type = other RNA
atgaaagatatcgacgatctggcacgtgtcctggaggtccccaagggaaatctggtgtatattgcgtatacaagaggactgtcagcgcagtacaagacgtttgaaatcagaaagaagtcaggagggactaggattattcacatgcctaaaggggggttgcgagtgctgcagcagaagctcaaaaagatcttcgatttccttgatcgtaaacccaaatgctcccacgcttaccataaaggcaagtccttccttaccaacgccgtggagcacaagaaaaagcgctttgtctttaatatggatctagaggaattctttcctagtattcattttggaagagttcaaggggtactccgcgccgcctataaaatgccaccttctgttgccaccttcatcgcacacttatgttgctacaacggttctatcccacaaggcgcacccaccagcccaagtattagcaacctggtgagtaacaacctggacaaaaagatattagccttggccatcaagcatcacgtgtcctatacacgctacgctgatgacattaccttcagctatcgatacaggaatttcccacctgccatcggacacttcgcggcaacaggccaacttttcggccccgccgctgttggagccacattagagcagctcatcaaagatcagggtttccaagtgaaccataagaaaactcggctgcagtacaaccactaccagcagtccgttaccggggtgattgtgaatcagttcccgaatgtccgaagaagaaaggttctagaggtccggaagctgatttatctctggaggacgtttggcctggagaaagcagagacttttcgcttcgagaaggctgagggtggagattactttagggccgtgctcttcggcaatctggcatacctcaaaggggttaggggcgagaatgacaaaattgtccggagcttttgtagggacatcctgcggatcaccacaaaggtgccaaactgggtacgcgtggcagcggaagaatttcaggtgaaggacgtgttcctttcacatgcctccgaggacaaggtggctgtagctaagccccttttcgatgcctgccaggctgtcggcatctcagtgttttacgacgctgaagatataaagtggggcgactctgttatcgaaaaaattaatcacggtctgggggaggccaagattatagtaccggtcatctcggagacttttttggaaaagaaatggcctgtgcgggagctgaatgtcgctctcagccggttcatgaaggacaaagcaagaatcttgcccattatatataacatcgaccacctcgacgattaccctttgctgagcgactttcattataaaaagtgggaagataacccagctgaactggtggcccttctaaaggaacgtctgaactctatatga

SEQ ID NO: 7658 - RNA, 1509 nt, synthetic construct
  source 1..1509: mol_type = other RNA
atgaacgtcttcatctccagcctggaggacccgattgtgtctcttcgcttcgctcacagtgtgcaggacgtcgcatctgttctcggcctggatccagcccgctttttctacgtggtccagaatgcagataacgggtcttactacaaacagttccagatccctaaaaaaaaagggggaaagagggatattagcaaacccgtgcgtggactggcccttgctcaggatcgactcgccgcgattctggctcagaagtactcgcccaagcaatacgtgaaaggatacgtgaagggagagagtttcctgaccaatgcccaatatcacgaaagacaacgctggatcctgaatatcgacatcaaggattttttcccttccattaacttcgctagggtaagggggttattcatgtcaagctatttcgggtttaacgaccgagtggcaacaatactagctcggataaccacttttaatgacggattgcctcagggcgcgactacgtccccaatcatagcgaacctcatcgcccataatctcgataagaaacttctctctattgctatttctgagaggctgcgctattcacgctatgccgatgacatcacgttcagctctaaccagaagacagttcctgcatcagttattcgcagctgggaaccactacatggcgagcggagcgtggaactgggtaacgcaattagggaagcttttcggagtgcccggtttgaagtgaacgaagaaaagactagaattctgttctcgtctgagagacaggaagtaacaggtctgatcgtgaatagaaaggctaacgtttggaggggggatgtggccttactccgtatgaaactgcacagtgccagagtccacggcgcccagaacgcagcaaaactgtggctgaaaaccacagacaaccctgaccatttttggcgacacattgagggctggctggcttacatctctcaggtcaggggtcgagacgacccggtaactgcaaaattatgcaagatggctgtactaagtgggctgaagggagccgagtggatcgaaaagtacgctgatatggtgagagagttcgatgtgtttttgagccatgccaccgaggacaagccaaccgtcgtgaagcttaagagaaagttggagagcctgggtataaaggttttttttgacgtcgattccatacagtggggcgacagcatcgtggagaagattaaccacggccttttgaaatcctcattttttgtgccatttctgtccgacacattctccgcaaaaggctggaccaataaggaactcaactccgcaattgccatgaatatcaaccggaaaggccgtatcctccccatctgtgaggccaatttctcaattgccgataattatccccttctcaatgagactctgtatcaacggtggcctgaggatcccgcgttggaagcggccttcgtcaccagtgtcgccgatcagatattgaagatcgttcaacaggagaaatccaagcccaatgacctgtcagactga

SEQ ID NO: 7659 - RNA, 1533 nt, synthetic construct
  source 1..1533: mol_type = other RNA
atggtcaagagcgaaggccaggcgctagagactagagagactcccattaataatgccctactccagctcaggatggcccattcagtgaccgatgtagcatttagtctgggactggaaccaagtaagtttttctacgtggtgcagaacgctgacaacggacgttattacaaggaattccagatacctaagaagaaggggggcatgcgacacatagcaaaaccagtccgcggcctcgctttagcacaagaccgcctggccgcaatcttgcgcgataaatatgaaccaaagcccttcgtgaaaggctacgtaaaaggccagagtttcctcacaaatgccagatatcatgagcgtcagaagtgggtacttaatatcgacattaaggacttcttccccagtattggctttgcgcgggttagaggactgtttatgagttcttacttcggcttcaacgatagggttgcgaccatccttgctaggatcaccaccttcaaggacggcctgccacagggggcaaccacttcaccagttattgctaatatagtcgcccacaatctggacaaaaaactcctggctatcgccgtgaaagagcggctgcgctatagccggtacgccgatgatataacgttttcttctagccagaaagcagtacctccttcagtggttaggggttgggagccgatgcatggtcctcggacagtggatctaggtggggccgtcttggaggcctttcggtcagcccggttcgagataaatgacgagaagacgcgaatccttttggcctctgagaggcaagaagtgaccggcctgattgtgaacagaggcgcgaatgtctggcgccgtgacatcagcttattaagaatgaaattgcactctgctcgcgtgcatgggcctgagaaagcagccaaactctggctgaagacaactgaatcgcccgttcatttttggcaacacattgaaggatggctttcctatatctcccaggttcggggaggtgatgaccctgttacggctaagctgtgtaagatggcagtgcttagcgggttcaagggaaccacatggattgaggcatacgctgagatggtgagggaatttgacgtgtttctgtcccacgcctccgaagacaagcccaaggtgcgaatcctgaagaacaaactggaatactacggcattaaggtgttctttgacgctgatagcatcgagtggggggacacaatcgtcgagaagattaatcacgggctcctgaaatcatcctattttgtccccttcctgtccaaaacattctcgagcaagggatggaccaacaaagaattgaactctgccatcgccatgaatgtcaaccgaagaggaaggattctgccgatctgcgacggtgacttctctattgaggaaaactacccgcttctgaacgagacattgtataaaacttggcccagcgatccaaccgaagaggatcagtttgtcacttccgtggctgatgagatcctcaaaagagtgcaggataagcaatcccagcaaaacgatctcagcgggtga

SEQ ID NO: 7660 - RNA, 1506 nt, synthetic construct
  source 1..1506: mol_type = other RNA
atgaccataacactggggctggacgatccactcctgctcctgagactggctcactcaatccaggatgtagccttcgctttaggcctcgagccggccaagtttttctacgtggttaagaattccgacaacggccgctattacaaacaatttcagatccccaagaaaaagggaggcatgcgcgatattgctaaacctgtcagaggcctcgcactggcgcaggacaagtttgcagcaatcctcgcccagaagtatgaacccaagcagtttgtaaaaggctacgtgaaaggtcaaagtttcctgactaatgctcagtatcatgaacggcaaaagtggattctaaacatagacatcaaggacttcttcccatcaatctcttttgctagggtgcgaggccttttcatgtcctcctacttcggattcaatgaccgagtggctactatccttgccagaataactaccttcaacgacggactcccccagggagcctccactagtccaatcatcgccaacatcattgcacataacctggacaagaaattagtcgagatcgccattagggagaggttgcggtacacacgctatgccgatgatataacattctcaagcagtcagaaggcggttccgtcatccgtcgttaaaagctgggaacctctgaatggagctcgtacaattgcattgggaaatgacgttatcgatgcctttagatctgcccggttcgagattaacgatgagaaaacacgtatcctgttcccctcagagcgtcaagaggtgaccggccttatcgtaaatcgaaaggccaatgtgtggcggagagatatatcgctgctgaggatgaagctacattctgcgcgcgtgcatgggcctagtaaggctgcaaaactctggctgaaaacgacagaaaatccagttcacttctggcaacacgtagaggggtggttgagctacgtgggacagattaggggccctaacgatgcagtcgtggcaaagctgtgcaaaatggcggtgttaagcgggcttaaagggtctgaatgggtggagcgctacgccgacatggtcagagagtttgacgtgtttctgtcgcacgccagcgaagacaaaccaaaaatccggaagttgaaggacaaattggagagctatgggttaaaggtgttctttgatgaaacctctatctcttggggcgacagcattgtggaaaaaattaaccacgggctccttaagtcttcctttttcgtcccctttctatccgaaaccttttccaccaagggttggactaataaggagcttaacagcgccattagcttgaacataaataggaagggtcggattctgcccatttgtgacggcaacttttcagtggagaataattaccctctgctgaacgaaaccctgtataaaaagtggcctacggatgctgctcaggaggaggaattcctggtcagtgtcagtgatgccatcctcaagaaagttcaggacgcccaggcaacctccaacgatctctctggttga

SEQ ID NO: 7661 - RNA, 1518 nt, synthetic construct
  source 1..1518: mol_type = other RNA
atgagcgatccccaggcaaaagtcgatctgattgatctgactgccgacccaatgtttcgcctgttaaccgcccacagtgtggtggatgtggcccacgcacttcaccttgaccccgcgaggttcttctacgtggttcagcatgctcaggacggcacctattataagagtttttctatcgccaagaagaaaggcggtgttaggcacatctccgccccgaagaaaggcctgagactcgcccaagcgcgacttgctgcggtgttgctgaaagcctataagccaaagcctttcgttcatggatacgttaagggccagtctttcttgacaaacgctaaactgcatcaacggcaacgatgggtgctcaatctcgatatcaaagacttctacccaagcattacctttccccgtgtccggggtctattcatgagcagtgccttcgggtttaacgatcgggtggcgacgatcctagcacgcattaccacaacctcaaatgggttacctcagggggcccggactagtcccgttatcgcaaacatgatagcatatactctggacagaaagctgatcgagctggctacgcgccaccgtctcacatacaccaggtacgcagacgacgtcacattgagttcttccagaaaagaagtgcctgccgatgtcgtcaaatcctggtcccccccttttggggaaaggcagttggacctgggaggcgtcttgagcgccgccttccagacagctgggttccagatcaatgatgccaagacccgcctgtcatttcagtatgaacgccaggaggttacaggcgtagtggtaaatcaaaaggctaatgtctggcgcaaggatatctccaggatgcggatgattttacattccgctcgaaagcacggagctgctcaagccgcaacggtctgggtgggcaaagacgcaaacgccgacagattttggagattcgtggcgggctggctctcttttttcgcacaggtgcggggaagggatgaccctgtagtggccaagctgtgtaagctggctgtgttcgctggtcttaaagggatcgagtggattgagaagggggctgatatggtaagagagtttgacgtgtttctgtctcacgcttcagaggataaggagagagtacgtaaactcaacgatcggctggttgacctgggtgtcactgtgttttttgatgaaagcagcataggatggggagattccatagtggaaaaaatcaaccatggccttctgaaatcatctttcttcgtgcccttcctgagcgattcgttcgcaagaaaaggttggacaaataaagagttgaactcagcaattgcaatgaacatcaacaggaagggccgaattctcccaatcaaggacattgggttttcgcttgaggacaattacccgctcttaaatgagactctctaccgcacttggccagccggaggcgaagacgaagctgcctgcagcctggccgacgagattctcctgaaggtccagaccgcccacgaaataaggtccgacctaggatga

SEQ ID NO: 7662 - RNA, 1446 nt, synthetic construct
  source 1..1446: mol_type = other RNA
atgcaggacgttgctttcgcactcaatctggacccagctaaattcttttacgtggtccagcatgcggatgacggcagctattatcgcgagttcgttatccctaagaagcgtggtggtgtgaggtcgattagcgcaccacagaaggggttggccttggctcagaccagattctacgagctgcttcttgagaaatacaaacccaagccattcgtgaagggatacgtcaagggggagagcttcttgaccaacgcgaagtatcacgaaaaacagaagtggatcctgaacatcgatatcaaggacttttatccatccatcacctttgctcgggtatacggcctttttctgtccccgtatttcggattcaatcgccgcgtttcagcaatcctcgccaggattacgacttaccggaatgagctccctcaaggcgcgcgcactagcccaattatagccaacattatagcatccaatctggataagaaactggtaagtctagccgccgatttaaagctgaaatacagtcgatatgccgacgatattactttcagctcttcccaacgaagaattcctgcaggattagttaaggggtgggaaccatcttttggagatagagaaattaagcttggcgctgctctcttggaagcctttaacggcgctggcttcagagtcaatgatgctaagacacggctgttgtttagctacgagaggcaggaagtgacgggcttggtggtaaatcagcaggccaacgtgtggcggaaagacataagccgcctgaggatgatcattcacagtgcacgaaaacatggaccccgcgaggccgcctcaatatgggtgggaaaaaacgcctctgaggaagaattctggcaatttctctgcggctggttggcttacgtagcacaggttcgtgggcagtccgatcccgtggtcgccaaactgtgtaaactggccgtcattgccggtctaaaggggcctaagtggatagaccgttctgcagatatggtgagggaatttgatgttttcctgagccacgcgagtgaggacaaacctagagtcagacttctctatgagaaactggtggaagtgggggtgaccgtctttttcgacgaagactcaattgcctggggtgatagtatccccgagaaaatcaatcacggcctactcaagtctaactttttcatcccgtttttatctaagcggttttcagaaaaaggatggacaaataaagagctgaactccgctatctcaatgaacatctccaggaaggggcggatcctgcccataattgacggccatttctcggtggaggagaattaccccctccttaacgagacactgtataagaagtggcctatcgaggtggaactgcaagccaaattcatctccaccacagcagacgagattctgaaaaaggtcgtggctgaaaagctcaagaagcacgacctgggatga

SEQ ID NO: 7663 - RNA, 1431 nt, synthetic construct
  source 1..1431: mol_type = other RNA
atggcatttgctctggggctcgacccagaaaaattcttctatgttgtgcaacacgccgctgacggcacctactaccgcgaatttcaggtgcccaaaaagcggggcggggtgagaaacatatccgctcccaggaaaggtcttgctctggcgcagaatcgtcttgccgaggtgattcgcagtcattatgtccctaagaaatttgtgaagggctatgttcgaggagaatctttcttgagcaacgcacggtaccacgaaaagcagaagtggattttaacagtggacatccaagacttctaccccagtataggtttcgccagggtcagggggctgttcctgtctcggtactttggctttaatgagcgtgtggctaccattttggccaggatcactacatacagagacggtctgccacagggagcaagcacgagccctctgatcgctaacatcatcgcgcacaacctcgataaaaaactcgttgccatcgccgtaaaaggacagctaaagtatacacgatacgccgatgacataaccttcagctcatctcggagagctgtcagttccgacgttgtgcaatcatgggagcctgcattcggccggcgcgaagtacatctcgggcagtctataaccgaggcgtttaaacactcgggctttgaaatcaatcataccaaatcacggatcttgttcccatttgagagacaggaggtgaccgggctagtggttaaccgtaaagccaacgtgtggagacgcgatattgctcggctgagaatgaagctgcacagcataaaacgcttcggggcaaccgaagcagcgaaagtgtggctgggaccaggtggcgacaagcagaagatgtggtcacatgtcgccggcaacctggcctttattcgccaagtccgagggatgacagatcctgtgctcgccaagttatgtaaggatgccgtaattgccggtatgactggcccgtcctgggtgcttcagatggccgagatggtcagggagtttgatgtgttcctcagtcatgctagtgaagacaaagaaaagattaggcgattgaaggacaagctagaagagtgcggagtaaaggtctttttcgacgagacgagcattaagtggggagattctatcgttgagaagatcaacaacggactgttgaaatcctcctatttcatcccgtttctttctaaaacattcagcgagaaagggtggactaataaggaactcaattctgctatctccatgaatgtttccagaaagggaaggattctgcctattatcgactcgaattttagcgtggaggaaaattatcccctgctgggcgaaacattatacaagaagtggcccgccgatgagtcaagcgaggatgcattcattggcgaggtcgccgatgcaatcctgcaccttatcgagaagaaagtcacttccgtggcaacttga

SEQ ID NO: 7664 - RNA, 1533 nt, synthetic construct
  source 1..1533: mol_type = other RNA
atgaagggaaaggatcggggctcatctattctgttgccagagaatccattcagtgaccctatattccgtctgaaaattgctcacagcgtccaagacgtggcatcagccctcggtctagactctgcgaagttattttacgtgatcagacactgcgacgatggccgctattacaaaaagttcaagatccccaagaaaagtggtggcttcagggatatctctcgcccaatcagaggactggccatggcccaagatcgattggctacgatcctcaccgcccactataagcccaaaagcttcgtgaagggttacgtaaaaggggagagctttctgtctaatgctcagtaccatgagagacaaaaatgggtgatgaacatcgacattgaagactttttcccaagcattgggtttgcaagagttcgcggactctttcttagctcctactttggattcaattcgaacgtgagcactatcctggcaaggattactacatttaacaatcagctgccgcagggggcctctacttctcctatcctggctaatatcctcgctaacaatctcgacaaaggcatcctctcaaccgccattcgcggtcggctgcgttattcccgctatgccgacgatatcaccatctcaagttcacagagacacgtgccctcccttattgttaaaaactgggagcccgataagggtaagagagagattagagtcgggaacgacatcgttgacgcctttaagaaggcccatttcaagatcaatgaaaaaaaaacccggatccagtttacctatgaaaggcaggaggtcacagggttggtggtcaacaaaaaggcaaatgtgtggcgaaaagacgtgtctaagatccggatgaaactacattccgcaaagaaatacggagcggaaaacgctgctaagctgtggctgggcaaggacaagtcaggcaaagatttctggatccatatagaaggctggttagcgtacattaggcaggtcaggggcgttgatgatcctgttctggccaagctctgtaaacaggccattctttccggactgaaggctagtaagtggatccagaggtgcagcgatatggtgcgggaattcgacgtatttttaagccacgcatccgaagataaagaaaaggtccgaattttgaagaatgcccttgaaattaggggcattaaagtattcttcgatgaagactccatagagtggggggactccattgtggagaagataaatcacggcctactgaaatcatcgttctttatccccattttgagcgataagttctctaagaagggatggacaaacaaggaacttaatagtgcgattcacatcaacataaaccggaaaggccgcattctcccgatagcaatcaacggattttccatagctgagaactatcctctgctgaatgagacactgtacaaggtgtggcccaacaacgagattgagcagaatatattcatcgaggaggtcagtgaccaattgctgctcaaaatccagaaaacccatagcgagtccgccgggcttgggtga

SEQ ID NO: 7665 - RNA, 1494 nt, synthetic construct
  source 1..1494: mol_type = other RNA
atgagcgtgtttgatgatcctatcactaaactgcgcctggcacattccgtgcaggacgttgcatttgctctgaacctggacccagccaaattcttctatgtgattcagaattctgagaacggaagttactacaagaagttcgagatcccaaagaagagcggcggggtgaggcagattagccgaccactgcggggtttggctttggcccaggatcggctgtcagctgttcttactgctcattataaaccaaaaagcttcgtcaaaggatacataaaaggggagagctttttcacaaatgctaagtaccacgagaggcaaaaatgggtcctgaaccttgacatcaaggatttctttccttcaatccatttcggcagagtcagaggcctgttcatttcccagatgttcggctttaatgagcaggtttccaccgtcttagcccgcatcgtaacctttgagaatggtctgcctcagggagcatctacatcccctatcatagcgaatatcattgccaacaacttggataaacagcttatagccattgcggccaaagagcgtttgcgatacacgcgttacgcggacgatatcaccttcagtagctctcagaaaactgtaccctcggccctgattaaactttgggagccagacaaggggaaccggcagataaccctcagctctgccgtgcatgacgccttccgccaatccaatttcgcaataaacgaggataaggtacgcatccaatttccgtatgagcgccaagaagtgacaggcctaattgtcaacaagaaggccaatgtctggcgccgtgatgtgtcgaaactccgaatgaaaatccatgctgcacggaagcacggggctgaatcagccgcgaagatttttatcggagaaagcgcagacggcgaaaaattctggcaacacatcaccggttggctcgcatatgtgaggcagattcggggtaacgatgaccccgtggtggccaagctgtgcaagcaggccattctggccggcctcaatggagctgaatggatcagacggtacgcagatatggtcagggaatttgacatttttctgtctcacgcctccgaggacaaggagaaggtgaggaaacttaaagacaagcttgaaggcaaggacgttagagtgttctttgacgaatcatcaatttcatggggggatagtatcgtagagaaaatcaaccacggcttgctgaagagtctctatttcgttcccgtgctctccgagacatttgccaagaagggatggaccaataaggaactcaacagtgcaattcagagcaatattgggagaaaaggaagaatcctacccatcgtgatgcctgggttctctgttgctgaaaactatccgctattaaatgagacgctgtacaggtcctggcccgctcaagagcagaaggagggcgagtttctggaagaaatatctgaccagatactcctgaagatccagaagagtcaccacgaaaaaactgatttaggttga

SEQ ID NO: 7666 - RNA, 1497 nt, synthetic construct
  source 1..1497: mol_type = other RNA
atggcactaccagagaatttcgatcctgaacaggcccacttgttccttggatttgcttactccatccaggacatcgccagcgcactgcacatgaggccggatggcattttccatatcactaagacaagcgaagatggaggctactatcgttcttttcgcattccaaagaaaaatggaggcgagaggagcatcgaccaacctctacgcggaatggccatggcacaggagcgattggccgccatcttacgggcgacctacgtgccaaagtcgcatgtgcatgggtatgtttgcgacaggagcttcctgaccaacgcccagtaccatgtcggtcaaaagtggattctgaacgtagacatcgaggactttttcgggtctattaccttccccagagtgcggggcttgtttcagacctacttcgggtactctgaccgggtggccaccacacttgcccgcatttgcacataccagggtaagctcccacagggcgccaaaacatcccctgttctggctaacctcattgcgcacaacctggataaatctttgctagctatcgcgactaagcactcattaagattttcccgatatgcagatgacattactttcagtacgagtcagagaaggttccccccttccctggtaaccgcctgggaacccctgtatggtgatagggagatccagctcggtgggcccctgaaggacgcattcatgaaagctggtttccgcatcaatcaaacaaaaacacgcatccaaaggtacgatgagagacaggtggtgactgggctggtggtgaataagaaagccaacgtttggcgatcagacataaaaagacttcggatgaagttacactctgcccataagtttagcgcagacgaggcggctaagatatggataggaccgtccgccacgcaggaagacttcgttgcgcacgttgaagggtggctggcttttatacgtcaggtcagaggaaagaacgatgccgtgctcagtaaattatgtcaacaggctgtagtcgctggcgtcacccagcaggcatgggtcaaagagctggctaagaccgtgcatgagtttgacgtgttcctgtctcacgcatcagaagataaacccaaagtacggttgcttagagacgccctggaacacctgggcgtgaatgtttttttcgacgaagatagcattacatggggagactccatcgtggaaaagatcaatgaggggctcctgcgctcaagttttttcgtgccctttctgtcagagacttttgcagccaaggggtggactaacaaggagcttaacagtgccataaccaataacgtccaaaggaagggccggattttgccaattacggatgctggctttgaggtcgaggataattatccacttctcaacgacatcctctataaaagctggcctgctgaaggccctgagcaatccgcccagattgaagaactggcagatcagctcctggctgtgatcgagaaaaataagctcaaagcacagtga

SEQ ID NO: 7667 - RNA, 1497 nt, synthetic construct
  source 1..1497: mol_type = other RNA
atggggctgcccaaccatttcgatccggccacagctcacctccttattggtgttgctcatagtgtgcaggatgtcgctggtgcccttatgatgcgtcctgggggattgctccgtattcttaaaaacaccgagactggtgagtactataaaacgtttgagatccctaagaaacggggcggcacacgaactatcgataagccattgcgcgggctggcaatggcccaggaacgatttgcagccgtgttgctcgaggtttacaacccaaagccatttgtgcacggatatgtcagcgggagatctttcctgagcaacgcccagtatcaccagaggcagagatggattctgaatatcgacatcgaggacttctttgggtccatcggattcgcacgcattagagggatcttcatgtcaaaacttttcggctacaatgacagggtcgccacaatcctcgcgcgaatctgtacctaccaagatagattgcctcaaggggcaaagacatcacccgccttggccaatctcatcgcccacaacctggacaaggagttaattgctctggccgcgaaagaaaatctccgtttttccaggtatgcggatgacataaccttctctagcagcagcaaacgcataccaaggaccctgatcaaagcttgggaacctgaatatggcgacagggtggtagagctcggcgaacggctggaagaggcattcagaggaagcagtttccagataaatcgggacaagacccgcgtgcagctgtttggcgaaagacaggttgtcactggcctgattgtgaatcaatgccccaacgtttggcggaaggacgtcaaaagattaaggatgaagctgtactctgctaagaagtacggattagagcaggcagcttctctttggattgggctcgatgccaagcctgaagccttttggtcacacgttgaaggatggctcggctacattaaacaggtgcggggagagggtgatcccgtgctatccaaactgtgcaaacaagctatggaggcaaatccaaaaagtagtgactggatccaggagcacgcccatatgattcatcagtttgacctgttcctatcacacgcaagtgaggacaagccccgcgtgaagaagctacacgacaagctggtggtactgggagtgaaagtcttcttcgaccaatcctctattagctggggcgactctatcgtggagcagattaacatcgggctcatgaaatcgaacttttttgtcccgttcctttccaacacgtttgctgaaaagggctggactaatcgggagttgaattccgccatatccataaacatcaaccgaaagggcaggattctgcccatatgtgaccatgattttcacgtaggccgcaactatcccctactggccgatatcctgtacgaatcatggccaggtcctgatgccgatgaagaggctaagctgaatgagatcgccgataagttactggcagctgcggaaaaggcaaaacatagccagtga

SEQ ID NO: 7668 - RNA, 1461 nt, synthetic construct
  source 1..1461: mol_type = other RNA
atgctccttggcgtcgcgcacagcgtacaggacgtggctcatgcactgtcgatgccggcgggaggcttgttttacgtgctccaaaacgcagacaacggcaaatattaccagtcttttgagataccgaagaaaagggaaggtacccgccctattgacaagcccgttagagggctggctctggcccaggaacgactggctgccgtgcttaaacagtcctacaggcctaagtcatttatccatggttatgtaaccgagcggtccttcctcactaatgcccggtaccatgagaagcaaaaatgggtgctgaatattgacatcgaagacttcttcggaagcattggattcgctcgaatccgcggcttgttcatgagccaattcttcggcttcaaccacagggtggctaccatcttagcccggctaacaacgtacaaggatgcactcccccagggggctaggacaagtccaattctgtcaaatatcattgcccacaacctggataaacatcttgtcgagatcgctgtgaaagaacgactgaagtattcacggtacgctgatgacatcactttttcttctagccgcaggaagattccaccatcattggtcagaacctgggagcctgagtatggggaccgggaagttatcttgggggaaaaaattactgatgcatttaagaccgcgcattttaggatcaaccccgataaaacacgtattcagctcttccgagagagacaggtggtgacagggctgatcgtgaacgaaggcgtaaatgtctttagaaaggacatttcccgcctacgcatgaaactccattccgggaaaaagtttggactggaacaggccgcaaaagtgtggatcggtcccactgccacagtgaaggattactgggcacatatagagggatggttaggccacataaagcaggtccggggtgacgacgatccagtgctcagcaagctgtgcaagcaagccgccgacatcaaccctgcagctcctgagtggataatacggcacgccgaaatggtgagagagtttgacatttttctgtctcacgcaagcgaggataagccacgtgttagaaaactaaagaaaaaactggaggccgtaggaattaaggtgttcttcgacgaagaaagtatcacctggggagattctatagttcagaggatcaaccacggcctcttaaagtccacgttcttcgttcccttcttgaccaatacctttgccgccaagggctggactaatagagaacttaatagtgcgatcagtgccaacgttaatcgccagaaacgtatcctgcctatttgtgaccacgattttcacgtcgggaaaaattatcccatgctcgaggatgtcctttataaaacgtggccaaaggctggccccaaggaggacgagtggctgaacgccattacagatgagttgcttgcactggtcgaaaaggtgaagctggagacttcctga

SEQ ID NO: 7669 - RNA, 1524 nt, synthetic construct
  source 1..1524: mol_type = other RNA
atggccaataggggggcgcgcatagaagtgaagaatgaagaacaggctcttctacttccctccgaggaggagaaagccttattttcgctgcagtatgcccactctatacaggacgtggcatttgccctggggctagaccctgccaagttcttttatgtggtaaagaattgtgactcaggtgaatactacaagagtttcaccattcctaagaagaatggcggggagcggaagattagcaagccactcagagggttagcccttgcgcaggtgcggttgctgatcatccttaagcacgtttataagccaaagggttacgtgaaatcttacgtggagggagagagcttcctgacaaatgcaaactaccactccaatcagaagtgggtgctcaacttcgatattgaagattttttcggaacaatcacctttccacgtgttaggggactgttcatgtccaaatttttcggttttaatcccagggtatctactatcttagcaagaatttgcacacacgagggctcattgcctcaaggggcacctacgtctccgatcctgtccaacattataggcaatgctctggacaagaatctggtcgctctcgcccgggaatacaagctgaaatacacccgctacgccgatgacataaccttcagcagttctcagaaactgccaccaggagccgtaattagtttgtgggagcctaaattcgggaagagagaaattaccctcggcaaagatattcgggaggccgtcaaaaatgccggattcaggatcaaccccgagaagacaagaatacaatttccatatgagaggcaagtcgttactggcctagtcgtcaacaaaaaagcgaacatccgtcgggctgatatagcccgactgcgtatgaagatccatagcgcacagcgctttggcgcggaatccgcagccaaggtttggctcggtcccaacgctactgcttcatctcttcaaagccacatcgaaggacatctgtcctacgtgcgccaggtgcgcgggaaagacgacgtcgtgctggccaagctgtgtaaatctgcaataatcgccggacttgctaacgccacgtggatgaaagctcaggcagacatggttcgagaatttgatgtgttcctgagtcatgcatccgaggataaagagaaatatggcaagctcaacaaagctctcaaggctgtgggcgtgaagacttttttcgatgtcgacgtgattcagtggggggactcgattcccgagaaggtgaattttggtttgctgaaaagcgactacttcattcccttcctgagcaacaacttcacccgaaagggctggactaacaaagagctcaattcagcaattagtatcaacatcaaccggaagggcaggatcttgcctattatcgattccgacttttcagttgatgataattatccgatcctcgctgaaaacttgtataagaagtggcccgagaaagagagcgaggaagatgacttcattgaggaaatctgcgccgaaatcacaaaaagaatcgtaagatga

SEQ ID NO: 7670 - RNA, 1521 nt, synthetic construct
  source 1..1521: mol_type = other RNA
atgaagtcaaaggagcgcggcagctcccaggtgaaagcaagcattgtctttcacaccgatttccgattgattcaacttcgcgcagcacattcagtccgagatgtggccctcgctctcggattagatccgaaaaaatttttccacgtcctgaaacataccgacgatggacggtattatcgcgattttgagattcctaagaagactggcggttaccggcagatctccaagccggtgaagggactggcactggcacaggaccgcctgtcaactatcctcgatcacgtgtacaatcccggctcttacgtaaaagcgtttgtaaagaaaacctccttcgttgagaacgcccggtatcacaaggcacagaggtggattctaaatattgacctcaaagacttcttcccatctatatcctttcctcgggttcgggggctgttcctcagcacactttttgggttcaatgagagagtggccaccatattagcccgtatctgtacctacaaaggatctctgccacagggggcctccacatctccaaggctggcgaatattatagcgaagtcgctcgacaaaaagatcctggagattgctaaaagtcatcagctgaagtatactcggtacagcgatgacatctctctgtccagcagtaagaaagtgatccccacgctggtggtgaagaactttcacgacaaccctgacggacgagatgtgattctgggcgacggattgaagaacgctgttcggtcaagtgggttcttcataaacgcgtcaaaaactaggctaatgatgccaaataaccgtcaagaagtcactggtttagtcgtgaataaaagggtgaatgtccgccgaacagatattgccaagcttagaatgaaaatccattccgtgaagaaagtaggcttcagtgaggctgctaaagtttgggtggatggtaacgaagctcaactgaagaaccacctcgtagggtggctcgcccacattaggcaagtcagaggtccgtccgaccccgtcttggctaaactttgcctgcaggcccatgaggcagggcttacagaaatcaagtggatcgaggagctggccgacatgtcaaaggagttcgacgtgtttctgagtcatgcttccgaggataaagaaagagtaagaaggctacaggccgagctggaggaacgtaaggttagcgtgttttttgatgagtcaaccataaaatggggcgacagcattgtggaaaaggtcaaccacggcctccttaagagcacattcttcatccctttcttgacggaaacgtttagcaagaaaggctggaccaacagggagctgaattctgccatccagatgaacatgactagaaagcgcaggatcttacccatcaagagtccagattttgacgttgactcgaaatatcccttgctgaatgacacactgtacaagacctggcctagagatcccgcagacgaggccgctttcatctctgaaatttccgatgaactcgtggccttgatcgaaatggaaaagagctctgtttga

SEQ ID NO: 7671 - RNA, 1482 nt, synthetic construct
  source 1..1482: mol_type = other RNA
atgaatgaactcgatttatgtctgttccaacttaagatcgcgcactccgtgaaggatgtatccttcgcactgaaactggacccagaaaagttcttttacgtgcttcagcatactgacgacggcagatactaccacacgtttgagattccaaaaaagaatggaggaaagcgcgctatcgccaagcccttgcgtggtcttgctcttgcacaagacaggctggcccccctgctgcaccacgtttataatccgggcccccacgtgaaagctttcgtgacaggttcatcttttgtcagcaatgcctcttatcacaagggccagcggtggatcttaaacattgatctctccgacttttttcctagcataacctttcctcgcataagagggttatttcttagcaagctgtttggcttcaatcccaacgtgtctacaattctggctcgaatttgcacgttccagggcagtctgcctcagggagcaagtacaagccccgtgctcgcaaatattattgctaattcgctggatcgcaagttcttggaaatagccaggagtgaaaaaatcaaatacagtcgctattcagacgatattactttttcaagctcgaagaagtccattcctaaatgcctggtgaagagcttccatgaccacgaggatggcagagagataatcctcggcaacgacttgcaggatgccgttagggccgctggcttctctctcaacgatcagaaaacccggctgatgaccccaaataatcggcaggaggtcactgggctcaccgtcaacgagagagtgaacgtcaggagatcagacatcaaccgactgcgtatggtgattcacagcgcaaagaaggttgggttcgaggaggcgtccaaggtgtggcttccagacggaaagaacaatttacgggagcacattctagggtggcttgcccatatccgccaggtaaggggtgcctcagacccagtattggccaagctctgtctacaggcacatggcgcgggactgacaaaggtcgggtggattgaggagctggccgatatgtccaaggactttgacgtgttcctcagccatgcctcagaggataaagaccgagtgaggaaattgtctgatgcgctgaccgccggcggtgttaaggttttcttcgatgagagcagcatcaaatggggggacagcatcgtcgaaaaggtaaaccatgggctcctgaaaagtcgtttttttatcccgttcctgacaaccactttttcaaagaagggatggacaaacaaagaactcaattcctctatatccatgaacatcagtcggaaaggaagaatattgccaatcaaatccgaggatttcgaaatcggtgatcggtaccccatcctgaacgaaactctatataaaacctggcctaaaagttccgttgatgaaaccgcattcatccaagaagtcgtggactctattatcaaactgattgaggaagacaaagctgctccttctgtgtga

SEQ ID NO: 7672 - RNA, 1518 nt, synthetic construct
  source 1..1518: mol_type = other RNA
atgcgagtagataaggtgaagtccgagggaagggctgacacagtcaagtctgaggcggaggttctgtttagcctgcagacagcacactccgtcaaggacgtggcctacgctttgggccttgaccccgaaaagtttttttacgtggtgcagcgggccgacgatggccactattacgacactttcaaaatccccaagaaaagcggcggcgaacgggacattgcgaaacctaagaaaggattagccctcgcacaggctcgtctggttcccatccttagcttcgtgtatagccctggtgaatgcgtcaaaggatttgtaaagggcagcagttttttagacaacgcccattatcaccatgcacagagatgggttcttaatattgatctgttggactttttcccatcggttacgtttgcccgagtgagaggcctctttatgtcgtcactattctcctttaatccccgggtagctacaattctggcaaggatatgtacctttcagggagggttaccacagggcgccaccacttcccctattctggcaaacttaatcgctaaatctcttgataaacgcttgacaggactagccagaactcaccgcttgaagtactccagatattcagacgatatcacactctcttgctccaaagcatacgtccctaagagtatcgtctctgagattatcgaaatcgacagtgcttgggaagtgcagctggggagtgaacttaaagatatcattaggcattccggcttccgggtgaatgacaagaaaacccggctaatgaggcgcaataatcggcaggaggtgaccggcctcgttgtgaatgaaaaggctaacatccgcagggcggatatccaacgcctgcgaatgaaaatatattccacacgtaagtacgggcaagctgaggcctcactgctctggctcggggacagcagcaagtctataagtatgcacctggtcggctggctggcctatatacgccaagttagagggcaatcagatccggttctggccaagctgtgtcagcaggtcgtggccgccggaatcagcgacatcgagtggatagtccggctcgctgatatgacgaaggagttcgatgtgttcctgtcccatgcgagcgatgataaatctaaagtgcgtccattgtacgagtccctcaactccgccggggtcaaggtattcttcgacgagagctcaatcaaatggggggattcaatcgtggaaagggtgaaccacggtttgctcaaaagtaggttctttgtgcctgtgctgagcagtaccttttcacgaaagggttggactaacaaagagtctaactcggccattgcaatgaatatttctcgcaagggtagaattctgcccattaagttcagcgagttcgacctggacgggaggtatccaaccctgaacgacaccctctacaagacctggccggaagattctggtaaagaggacgatttcatcagagaagtgactgacgatctgattgcacttgtagagcaggataagcagcttggatga

SEQ ID NO: 7673 - RNA, 1479 nt, synthetic construct
  source 1..1479: mol_type = other RNA
atgaagctccttaatccttccagccggagcattgcaaagcttaactcactcgatgagttatgtaatctgctggggattaataaaggccatctgctcttcatttgttataagcgtcctgacgaactaaaatacaaatctttcgagatgcgcaaaaagcgagggggcttccgcaaaatcgatagcccccagaaaggactgagggttattcaaggcaaactcgcagagttactcgaagaaaatgtcgagtttaaaacctgcgtgcaagggtttgtgaaggagagaggggtcttggagaacgcgaccctgcacaaaaagagtaactgggtcctcaacgttgacatcaagaacttcttcggctctattaactttggtcgcgtgcgcgccgtgtttgtcgctaagccttttgagattcaccccgacgtagctacggttatagcccagatctgctgctttaagaattacctgccacagggggctgctactagcccaatagtgtcaaatatagtggcatccacactcgataaccagatcatcagaagaatcagaaaccaccggttgctgtatagtagatacgctgacgacattacaatctctgctaagcgggtgtttcctcgagaattggcctacatatccgagggcaggactatcgtgggggaggatctggttaacatcttcagcagagcctccttcgaaatcaatcagaaaaagtcacggctccaatccaaatattctaggcaggaagtcaccggtctgattgtgaataggaaagtcaacgtgcccgccgaatataaaaataaactgcgggctgccatacaccattgggtcgacgatcccagggaggcggagaggaagtactatgtggacattcttggccttacaccggaggaggccgaactgactgatgatggctcaaaacttcgacgcaatatttatggtcgtctgagttttctgaacatggttaagggaggagatgacccaacatacatcaagctgattttgaaaatggcagagcatgatcctctgccaccaaaatttgtgaagaacatcaaggcagagtacaagatgtatgatgtattcctgtgtcacgccagcgaggataaagccgacatcgtagaacccctttaccaagaattaagtaagatcggagtccatgctttctacgataagaaagaaatcggttggggcgactccctggtcggcaccatcaataaggcgttgttaaagtctaagtatgtaattgcagtgatgaccgacaactcggttggaaagtcttggccccagcaggagatcaactccgtgctcaatggcgacattagcggaggaacgaagcggttgctcccgctaatattcggggacaaggagaagattctgaataacaacttcctgatgaatgacaaactatacgtggaatggaaggacaaccctactgaaatcgcccagaaagtgcaggaattgctggcccagaagtcgaatgagtga

SEQ ID NO: 7674 - RNA, 1476 nt, synthetic construct
  source 1..1476: mol_type = other RNA
atgaagttgttatctccattgaaccgctctatagccaaactatccagtctggatgaactctgcgggttgcttggggtgcagaaggggcacctgttgtatatttgctacaaaaggagcgacaatgcgaagtataaaagctttgaaatgcggaaaaagcgcggtggctttagaaagattgactctccacagaaaggactccgggttattcagaaccagctggctggacttctacaggaaaatattgagttcaagagctgcgtcaagggattcattaaggaacgtgggattctcgacaacgcagcacttcataagaaatctgactgggtgctgaacgttgatattaaagacttcttcggaagcattaacttcggcagggtgagagccgtgttcattgccaagccgttcgagatccaccccgatgttgctaccgtgatcgctcagatttgttgtttcaataattacttgccacagggtgcagcaacttcccctatagtcgccaatattgtagcttcaacactggataacaggatcataaaacacatccggaaccaccgcctgctgtattcacgatacgcagatgatattacaatctccgctaaaagaatctttcccagacaaattgcctacataaatgatggccagaccatcgtgggtgaagacctggccagcattttcgcgcgcagcggatttgagattaatgagaaaaagagccgtcttcaggccaagtttagtagacaggaggtgacaggcctgatcgtaaataagaagctgaacgtcccagctgagtataagaataaattacgaacggccatacatcactgggtggacaacccggtagaagcggaacggaagtactatatcgacatcctcggcctgagccctgaggaagccgagttaactgaggacggatccaaactcaagcggaatatctacggtaggctgtcttttctggccctggtgaaaggggctgacgatcccacgtacgtgaagctcatcctgaaaatggccgagcatgactccacacctcctaaattcattaagtccataaaggctgagtataaaatgtatgacgtctttctgtgtcatgccagtgaagataaggaagagatcgtgaagcctctgtacgacgagctggaaaaattgggcgtccacgcattttacgacgcaaaagagatctcatggggcgattcactcgtcgggaccatcaacaaggcccttcttaaatccaagtttgttatcgctgtcatgactgacaactcagttggcaaggcctggccccaacaggagatcaattccgtactcaatggtgatatcagtggcgggaccaagaggctcttgcccctgatatacggcgacaaggattcgatcctgaacaacaacttcctaatgtctgataaactctatgtggaatggaaaggaaatccagaggagatcgcacagaaggtgaaggatttacttacccaaaaagcgcaatga

SEQ ID NO: 7675 - RNA, 1488 nt, synthetic construct
  source 1..1488: mol_type = other RNA
atgaaattgcttaatcccccatcgcgcagtattttaaagctgaactccatcgacgaactgtgctctatcctaggggtccagaagggacacttgctgtatatctgttataaacgctctgacgatcttaagtaccagtctttcgagatgcggaaaaagaggggcggcttcagaaagatagatagtccacaaaaaggtttacgcgtgatccagaaaaagctggctgagatctttgaggaaaatatcgagttcaagtcatgcgtgcaaggcttcatcaaaagcagaggaattctagaaaacgcagccctacacaagaagtcaaattggatcctgaatgtcgacatcaaggatttctttggttcgatcaactttggacgggtgcgtgcagctttcattgccaagccattcgaatttcatcctaacgttgccaccgttgtggctcaaatctgttgcttcaagaattaccttcctcagggcgctgctacaagccccattgttgcaaatattgtggcctcaactctggataaccggatcctcaagtacattagatctcagcgtctgatttacagcaggtacgccgatgatataacaatctcagccaagcgagtcttccccaatgaggtggcccacatcaacgacgggaaaaccatcataggagaggatcttgcaaacatcttctcaagggcaagctttgaaatcaatgaaaagaaaagccggctccaaagcaaatattcccgccaggaggtcactggactgatcgttaataaaaaggtgaatgttcctgccgagtataaaaataaactgaggaccgccattcatcactggatagacgacccagtggatgccgagcgaaagtactatattgatgtcctgggtctgagtcccgaggacgcagaactgacaaaagacggctccaagctgaagcagaacatttatggtaggttgagttttctctccatggtaaaagggaaggacgatccgacctacatcaaattagtgttgaaaatggctgagcatgaccctagcccacccaagtttattaagtccattaaggcggaatacaagatgtacgacgtctttctgtgtcacgcttccgaggacaaggagaagatcgtggagcctttgtatcaggagctcagtaaaatagggatccacgccttttatgacaccaaagagatagggtggggcgacagcctcgtgggagtgattaacaaagctctcctcaaatccaaatatgtaatcgcggtaatgacggattcaagcgtcgggaaagcgtggccccagcaggaaataaattctgtgctgaacggagacatatccggcgggactaagagactgcttccgctgatttacggcaacaaggataacattctgggcaacaatttcctcatgaatgacaagctctacgtagaatggaagaataaccctgatgaaattgcaaaaaaggtgcaggagttgctgacacataacgaatctcttaactctagatga

SEQ ID NO: 7676 - RNA, 1476 nt, synthetic construct
  source 1..1476: mol_type = other RNA
atgaagctgctgaaccccccctcacgctcaatcctgaaattatctagccttgactctttatgtgagctcctagaggtgcaaaaaggtcacctcctgtacatctgttacaagcgggccgatgatctaaagtaccagagttttgagatgccgaaaaagagggggggcttccgcaaaattgacgtgccgcagaaaggccttcgagtgattcagcaatccctcgccaaactgctcgaggaaaacgtcgaattcaaaccttgcgttcagggttttattaagaagaggggcattctagagaatgctaacctccaccgaaagagtaattgggttctcaatgtcgacatcaaggatttctttggttccatcaacttcggccgggttagagccgtgttcattgctaaaccttttgaaatgcatcccgacgtcgccacagtcatagcccagatttgctgctttaataattatctccctcagggggcagcgacatcccctattatatcgaatatcgtggcatctaccctggacaatagaatcattaagcacatacgctcacaccgcctgatctattctagatatgccgacgatattagtatctccgcgaaacgtgtatttcctcgtgagatcgcccacatatccgagggcaaaactattataggtgaggacttgtcaaacatcttttctagggccaggttcgagataaacgagaaaaagtcccggttgcaatcaaagtacagcaggcaagaagtgaccggcctgatcactaataaaaaggtgaatgtgccagccgagtataaacataaactacggaccgctattcatcattggattgacaatccagtcgaagccgagagaaagtactatatcgatattttgggcctgaaagtggaagatgctggactgaccggagacggcagtaagctgaaacggaatatatacgggagactcagctttcttgcaatggtcaaggggagcgatgaccccacttacgtgaaactgatcttgaaaatggcaaagcacgaccctagcccaccaaagttcatcaaacccctgaaagagcagtaccagatgtacgatgtattcctgtgtcacgccagcgaggataaggcagagattgttgaacccctttataacgaactcaataagcttaacatccatgctttctatgacgcgaaagagatcgggtggggagatagcctgatcggcacgattaacaaggcactgcttaagtcccgctatgtgatcgctgtcatgacagataagagcgtaggaaaggcttggccacaacaggaaatcaattctgtgttaaacggagacataagtggagggacaaagcgattgctgcccctgatccacggagacaaggaaaccattttggggaacaacttcctgatgaacgataagctctacgttgagtggaacaacaatccagctgaaatcgcacagaaggtgcaggccttactggcccagaaggctgaatga

SEQ ID NO: 7677 - RNA, 1467 nt, synthetic construct
  source 1..1467: mol_type = other RNA
atgaaactcctgaatccgccatcaagatcgatccacaaactggactccctggacctcctctgcaatctgctgggggtgaaaaagggacaccttttgtttatttgctacaaacgagccgacgagaagaagtataaaagctttgagatccccaagaaacgtggtggactgaggaaaatcgactcaccacagaaaggacttcgtgtgattcagcaaaaactggctgaattgttgactgaaaacctggagttcaaaccctgtgtccagggctttatcaaggggcgggggatcctacagaatgccatactgcacaagaagagtaactgggtgttgaacgtggatattaaggactttttcgggtccatcaattttggcagggtgcgcgctgtttttattgcgaagccctttgagattcatccagacgtggccacagtgatcgcccagatatgttgtttcaataactaccttccccagggcgcagcaaccagcccagtagtttctaatatcgtggcgtccatcttagataatcggatcattaagcacgtccgatcgcacaggctcatctattctcgctatgctgatgatattacattgagcgccaagagaaatttccctagggagatagctcacgtgtcagatggtagaacaatcataggagaggacctggccaatatattctcaagagcaagttttgagatcaacgagaaaaagagtcggctgcaaagcaagtatgatcggcaggaggtgacggggctaataaccaacaaaaaggtcaatatcccagctgagtacaaaaacaaggtccgggccgcaatttaccattggatccaagatccgaaggaagccgaaaggaagtacttcatcgatattctaaagctcaatcctgacgaggtcgaacttacggaagacggcagaaaactgaaacataacatctacgggcgcctgtcttttatcgcgatggtcaagggtaaggacgaccctacctatgttaaattaatactcaagatggcagagcatgataaaactccccctaagttcctgaagagcatcaaagaggaatacaaaatgtatgacgttttcctttgccatgcttctgaggataaggcggcaatcgtagagcccctctacgaagccctgactaagattggagtgcacgctttctacgatagcaaggaaattgcttggggagattcccttattgaaaccattaacaaagccctgatcaagagccagtacgtcattgccgtaatgaccgataactctgtggttaaagcttggccacagaaggagattaatgcagtactgaacggcgacatttccggcggcacaaaacgcctcctgcctctgatccacggcgacaaggaaaagatcctcaacaataacttcctcatgtccgacaaattatatgtggtgtggcaagagaaccctgacgaaatagcccagaagattaaagccttattggcaagttga

SEQ ID NO: 7678 - RNA, 1467 nt, synthetic construct
  source 1..1467: mol_type = other RNA
atgaagctgttaacccctccgaaccgtagcatctataagcttgcttccctcgaccggttgtgcgaactgctgggggtaaagaagggcaacctattgttcatttgctataagagggcagatgctctgaaatacaagagcttcgagatcccaaagaaacgagggggccttaggaagatcgacgcaccccaaaaaggcctgagagtggtacaaaataagctggccgaactgctaaacgaaaacctcgagtttaagaactgtgtacaggggttcgttaagaaacggggaattctgcaaaacgccatgctccacaaaaaatcaagttgggtgctgaacgtggatatcaaggatttcttcggtagcatcaactttggccgggtccgcgctgtctttatcgcaaagccttttgagatacacccggatgtggccactgttattgcccagatctgttgctttaataactatttgccccagggcgcagcgacctcacccatagtttccaatatcgtggcttctaccctggacaataggatcattaagcatgttaggagtcaccatctaacctattccagatacgctgatgacgtgaccattagctcacgacgggccttcccccgcgaaatcgcacacattattgacggacagacaattgtgggagaggagttatcgtcaatattcgctcgcgcgcgctttgagattaatgagaagaagagtagattgcagtccaagtacgatagacaggaggtgaccgggctggtaactaataaaaaagtgaatgtccccgccgagtacaagaacaatgtgcgtgccgccatttaccagtgggtcaaggatccaaaagaagctgaaaagcactattacatcgacgtcttgggcctgaaacccgaggatatttcattaacggacgatggttctagactgaaacataatctctacggaaggctttccttcatcgctatggttaagggcaaagacgaccccacttacgtcaagctcattctgaagatggctgaacacgacaagtctcctccaaaattcttgaatgcgatcaaggaagaatatgagatgtacgatgtgtttctgtgtcacgcctccgaggacaaagagacgatcgtggagcctctgtacaatgagcttaaaaaactcggagtccatgcgttttacgatacaaaggtgatagcctggggagatagcctgatagaaacaataaacaagggcctcatcaagtctaaatatgtcgtggccatcatgacagaaaactctgtgattaaggcctggccacagaaagaaattaacgccgtgttaaacggggacattagcgggggtactaagcggcttctgcctcttatccatggtgacaaagagaagatactctcttccaattatctcatgagtgacaaactgtatgttgagtggaaagaaaatccagaggagatcgcaaaaaaaatcaaagacctcctggcaagctga

SEQ ID NO: 7679 - RNA, 1491 nt, synthetic construct
  source 1..1491: mol_type = other RNA
atggccctcaagctgctgaatccaaccgccaaccccctgttcagactcaatagtttggacgctctctccggactactagaggtgaaaaaaggccatctgctgtacatctgttataagagagccgatgtccacaagtataagagtttcgaaatcccgaaaaaaaacggcgggattcgcaaaatcgatgccccccttaaagggcttcggctgatccagaaccggctggcagcgattttgacggagaatattgaattcaagtcatgcgtgaaggcattcgtcaagggagaaggcatcttcaataatgccgtgctgcataagaagagcgactgggtgctcaatgtggacgtgaaagatttcttcggctccatcaatttcggcagagtgagggctgtctttatcgccaaaccttttgagatgcatcctgatgtggcgagcgttgtggcccagatttgtatttttcaaaactctctgccacagggggctgccacctcacctgtagtagcaaacatcgttgctagtatgctggacaacaagatcattaaacacatcaatggggtgaaatctgggcgcctcgtgtactctagatacgccgatgatatcacaataagtgcaaaacgattctttccttctgagatcgcccacttaagcgaaggtaaaaccatcgttggagaatctctggtgaacttattttcccgctccggctttgtgataaacgactccaagagcaggctccagcccaaaatcaaccggcaggaggtcactggactggtggtaaataagaaggtcaacattcccagcgagtacaagaacaaactccgatccgcaatcagccagtggatactgaacccaaaggaagcagaacggaaatattttgtcgacatcctcgggttgaatgaatccgaatttgaagcatctgctactggtgagaatttgaagcgcaacatctacggtagattatcattcatgtcaatggtgaagggaaaagatgaccctacatatctcaaactgatcctgaagatggccgagcatgatgacagccccccgaagttcgtgcgtcttataagggctcaacacaatatgtatgacgttttcatttgccatgcctctgaggacaaagcagagattgctgagccattgtaccacgcactgactgccctgggtctgaatgtcttttatgacgccgagagtattgagtggggggattcgcttatagagacaatcaacaaaggcctgtacaagtccaagtatgttatagctattatgaccgacaattcagtagttaagaagtggccacaaaaggagataaacgctgttctgaactcggatattagcggcggacagaacaggttactacccttgatccacggcgatgcggagaatattctctccgccaattttcttatgagcgacaagctttacgaagtctggaaaggtaacgccgaagagattgctggaaaagtgaaggtcaagattgaaggcagggcgcgttga

SEQ ID NO: 7680 - RNA, 1473 nt, synthetic construct
  source 1..1473: mol_type = other RNA
atgaaattagtcgagcctgataaaaatccactcctaaagctcgccacacttgacgagctctgttcccttctgaatgtgaaaaagggtcaattgctgcatatatgttacgaccggagcggacccgccaagtacagcagtttcgacatgaagaagaaacgtggcggagtccgcaaaattgaggtcccattgaaggggctgggcctggtgcagaagaggctgtctattctcttgtctgatttcatcgcctttaaaccctgcgtcaaaggctttgtcgagggcgaaagcatttgcactaatgcatcactccacaagaaatccaagtggatcctgaatgtggacatccaggacttcttcgggtctataaattttggccgcgtgcgagccacgttcctggcaaagccatttgagatgtcaaacgaggtggcgacagttatagctcagatttgtaccttcgaaaaccacttaccccagggtgcacccacgtcaccggtagttgccaatataatcgccagcatgttggataacaaaatgctccgcctcgcacagaagtatcggctgaggtacagcagatacgctgatgatatcacactcagtagccctagaggttttcctggcgaggttgccaccgctaccgaaggcagaactatcctaggcgaggagctgaaattgatctttgacaaagcccgttttactatcaatcccaataaaagccggctgcaggcaaaaaattcgaggcaagaagtcaccggactaattgtgaacaaaaagctgaatattcctgctgagtataagcataagttacgaactgccatcaagcactggaccagtgatcctgaggaggctgaaagaaacttttacctgaacataaagggcgaggaccccgctacatttgccgtttctaaggggggagaacggttgaaggggaacatttatgggaggctcagtttcatctccatggtcaaaggctcagatgaccctacatatatcaagctcgtgctgaaaatggcggagcacgacacccaaccgccaaaattcatccagaaaatcaagtctgaacataacatgtacgatgtgttcttatgccatgcctctgaggacaaggatgctatcgtgaaaccactttatgacgaacttaaggaactgggactgtccgtattcctagacggagaagagattggatggggtgacagtctgattgatataatcaataaggcgctgcacaagtccaagtatgtgattgccgtaatgactgagaactccgtggataagaagtggccgcagaaggagattaatgccgttttgtccaacgagattaagcacgacaagaacaaactgcttccactgatccatggggacgctgaagaaattctgggtaaaaacttccttatgtcagataagctctacaaaaaatgggaaggggaccccaagaaaatcgcacaagatgtgctggctcttctgcagaaaaacgcatga

SEQ ID NO: 7681 - RNA, 1470 nt, synthetic construct
  source 1..1470: mol_type = other RNA
atgaaattggtgaaatcagacaaaaatccacttttaaagctgagtaccctggatgacctttgtagcctgctgtccgtcaaaaagggccaactgctctttatatgttataaacgttccgacaaggcgaagtattccagctttgacatgaagaagaaaagcggcggggtgaggaaaatcgaggtcccaattaaaggcctcggattgatacagaagcgactgtccgtccttctgtctgagttgatcacattcaagccatgtgttaagggctttgtgaagggggaaagcatctgctctaatgcaagtcttcacaagaaatctaagctggtgctaaatatcgatgtgcaggattttttcgggtcaatcaacttcggaagagtccgcgcaacctttatggccaagccattcgagatgagtaacgaggtcgccaccgtagttgcccaaatctgcacattcgaaaatcatctaccccaaggtgcgccgacctctcccgttgtggccaacattattgcttctatgcttgataaccgggtgctccgcctcgcccagaagtacaggctgaagtactcgcgctatgccgatgacattactctcagttctcctcggaaatttccgcccgaagttgctgcaacagtagagggtagaacggttctaggggaggagttgaaaacgatttttgagaaagccagattcgtgatcaatcctaacaaaacaagattacaggccgctaacagccggcaagaggtgactggcctgattgtgaataaaaaactgaacatccctaaggagtataagcacaaactccgtgctgccatcaaacactggataagcgatcccgtggaagctgaacgcaaattctacgttgacattaagggagaactgtccgaggagtttgtaagtcaggggggcgagcgactgaagaataatatttatggacggctgtccttcatgtcaatggtgaaaggtatcgatgacccaacctacattaagttagccctgaaaatggcagagaatgataatcagcctcctaagttcatcaagactatcaagtcggaacacaacatgtatgatgtgtttctgtgccacgccgctgaagataaagaaactatcgtcaggcccctgtacgatgaattgaagaagctcaacctgaacgtcttcctggactccgaagagatacattggggggactccctcatagacattatcaacagggccttgcacaagtcaaagtacgtgatcgcagtgatgtcagagaattctgtagaaaaaaagtggccacagaaggagattaatgcagtgctcagcaacgaaataaagcatgacaaaagcaaactcctacctctgattcatggaaacgctgaggaaatcttgggcaccaatttccttatgagcgacaagctctacaaggagtgggagaacaaccccgaggaaattgcacaggcggtcttaaagcttctgcagaaagctggttga

SEQ ID NO: 7682 - RNA, 1473 nt, synthetic construct
  source 1..1473: mol_type = other RNA
atgcgtttggtagaatctgataagaacccacttgttaaacttagctctctcgacgcgctctgtgcccttctgaatgtgaagaaaggccagctactctacatatgctatcagcggtcaaataaggcaaagtacgactcattcgaggtgaagaagaagagaggtggtgttcggaaaattgaggtcccacaaaaagggttggctgtggtgcagaagcggctctgcaaactgctaagtgagtggattgagtttaagccttgtgttaagggctttgtgacaggcgaatctatttgctccaacgccctggtgcacaagaaatcaaaatgggtcctgaatgtcgacatccaagactttttcggaagcattaacttcggaagggtgcgcgcagcattccttgccaaaccctttgagatgtcttcagaagtggctagcgtagtcgcacagatctgtacattcgagaatcatttaccacagggggctcctactagccccgtagttgccaacatcattgccagtatgctcgacaacaaaattctaaggctcgcacagaaacaccgactgcgttactcccggtacgcagatgatataaccttatcctccctgagatccttccctggggaagtggccaagctgcttgacgggcgcacttttgttggagaggagctcaggctggtgttcgaaaggtcacgctttagtatcaacccgcagaagagccgattgcaagctaaaaatagcagacaggagatcaccggcatcatagtgaacaaaaagctcaatgtgcctatagaatacaagcagaaattgcgcgctgccatcaaacagtgggctctggatcccgaggccgctgaacgcaacttctacattgatattaaaggcgaggatcctgaaacctttaaagtcatcgaaggcggcaggagactacgggataatatctacggcaggttatccttcgtgtcgatggtgaagggctgtgatgatcccacatatattaatttggcgctcaaaatggccagacacgacacccacccacccaagtttatcaaaaaaatcgaaggggagcacaacatgtatgacgtcttcctgtgccacgcttcggaagacaaggatgccatcgtcaaaccactgtatgatgagctgaaacggttggggcttaacgtgtttcttgatgacgaggagattggatggggtgacagcctggtcgatattatcaataaggcattacatcgaagcaagtatgtaatagcggtgatgactgagaactctgtcgacaagaagtggccgcaaaaggagataaatgctgttctgtcttccgagatcaagcatgacaagagtaaactgctccctttgattcatggagacgccgagattatcctgggaaagaatttcctgatgagtgacaagctgtataagaagtgggaaggtaaccccgaaaagatcgcccaggacgtgctggccctgctgagaaaaaagacgtga

SEQ ID NO: 7683 - RNA, 1467 nt, synthetic construct
  source 1..1467: mol_type = other RNA
atgaaactaatcgaaaaggaagagaaccccctgcgcgatatcaagtccatcgatgatctgcttagcgttctgaacattgagaaaggcaaactgttttacgtactctacgaggtgggcgtggacaagaggtataagaagttcagcatccctaagaagcgtggtggagagaggcccatttcagccccaacaaaaggcctgaggctcgcccaatacaggcttttcaagcttctgacggacaatattgagttcaaacagtgcgcaacagggtttgtctcgaagcgcgggatcattaaaaacgcaaaagtgcacaagggtaccaaatggatcttaaacgtggacatagaggacttttttgggaccattaattttggacgcgtgagaggagtgttcatgtcaagcccatttgatatgcctaaacaggtcgccaccctgatcgccaagatttgcacttttaataatgccctgccacagggagcccctaccagtcctgtgatcagcaatataatcgctagttccctcgacaataagctcttacggttaagcaagcagtacagactgaggtatacaagatatgccgatgacattacactgtccggcttcgggcagcctccgcaagacatagcgaagatcgtggagcagaagaccgtactatctgagaaattggtcgctgccttcacaaagtcagggttcaaggttaatgaaagcaaaactcggctgcaaaaaaaggtggtccgacaggaagttaccggactcgtgatcaactccaaagtgaacgtgccagtcgagtttaaaaaaagtttgcgggcagctattcatcaatggtgtgataaccccgaggaagccgaacggaagttcttggcctctactggcaaaattaaagaaggcgaggaagttactcaggggggtcagatcctgaaaaggaacatctatggccgcttgtcatacctcgctcaggccaagggcaacgaggacccgacctacatcaagttggccatgaagatggggagagcggaccccgaaccccctaagttcctgagacgaatcatggagaagtatcacgagtaccaggtgtttatatgtcacgcaagcgaggacaagactaagattgcctctccactttatgaagcactggaggagcgagagatttctacgttcatcgacaataaagtcattgaatggggcgattccctagtcgatacaattaaccatgcgctttataaggctaaactcgtcgttgcagtggtaagtgagaactctctgggtaagtcctggccccaaaaggaaatcaatgctgtgctcgcatcggaaattcagggtgaatctaagctcttagttctggtagatggagatggacaagagctgctgggccggttgttcctgctgcaggataaactctaccgccagtgggaagataatccagacgagcttgctgacgaaatcgctcgtatagctatgaaaatacagtga

SEQ ID NO: 7684 - RNA, 1695 nt, synthetic construct
  source 1..1695: mol_type = other RNA
atgccccccctgcctgattacgcctctactgagctcctgctgggactgaagaccagaaaagatctagcctcctggctgggagtgagcgatcgggcattaaggtatatgctctatcggctgggcgatggcgacaaatacagcactttcagtatcagaaaacgaaacggggggttgagagagattcacgccccaaaaaaggcccttaagtacctacaaaataaggtcgcgcatgcgcttgccggtgtggttcccgtgcgacagatcgccaagggatatgtcccaggcaggagcatctacgatcacgctaagatgcacagatcaaaaaagtgggtcgtgctcgtggacttgaaatcctttttcccttccattaacttcggccgcgtcttgggtctattacgagctccccccttctctcttgaaaacgaggttgcagtagctgtcgctcagctgtgtacaagggctggtgaactgccacagggtgcaccctcatccccagttatctcaaatctcatctgtcgaaaactggatagacagctgcttgagctcgcaaagcaggcagggtgtggggtaagccgctacgccgacgacatttgcttctctacaaatcggaagagggtgagtgtggaaatatgcgactttgttaacgaacatggatgggtgcctggggccggattgaaacaactgatatgctcaaacggcttcgaaattaacttcagtaagttccgcgtgcatgaaggtcgggatcgcaaactggtgaccggactggtggtcaataaaggcgtatccactcccagcaggtggcgcgatcagctgaggagttcacttcacgtgattgataaatacggagaggccgcaggagtagaaatcatatccggctggacctccggcttttttcgcaaggagcctggggacgtcctgagaacaattagggggaagctgggctatttaaaatggatcgacaaggtggcaaatcaccttgctaccgatgccctgaggcgcaattttccctctttggccagtttaatgcctatcagcaacgacggagtctcatttcgtatcatggctgagggcccaacggacttgctgcatctggaggccgcgctcgactatctgcgcaagtcggggggcttcctggatgtaagaccacggttccagaacttcttaggcgacgttggcgattctgagctttgggagactcttctccggatagctaaggccgatgtgaatgaactgaccattggagtgtttgattgcgattcacctgcttttatgaagaaaacgtctctggttccgggcggtaacatccagctagggccgagggtttacgcgttttgcctcgcaccgcctggaacatctatcagcaacaatttctgtatagagtccctctattctcgtagcgacgcgaccctcgtcgacggaagtggcagacggctctttttcggggacgagttcgactccgcctccggcttcagccacgatggcttgtacaagtgtctgcatccaaaaaagaaggctattgtggttagcgaccaagtggcacgagtccacgatggggccagcgtgctcctctcgaaagctggttttgcatctcaggtgaaggacaaagccccaccttttgacgtggtcagtttcgacggttttagacccacatggttggggatccgtgcactggccattgctgccgtgcggaagtga

SEQ ID NO: 7685 - RNA, 1689 nt, synthetic construct
  source 1..1689: mol_type = other RNA
atgccacctcctagcagtacagttgaagtgttcctgtcactgaagacgagggctgatttggcctcttggcttggcgtgagtgatcgggccctcagatacatcctgtatcggctcgaagaggctgagaaatataagaccttcttggtgcgcaagcgtgacgggggatttagagagattgacgcaccaaaacccgccctaaagtatctccaggagaaaattgcgtccgcactgatcgaagtgatgcctgtacgtcaaatagccaagggttatgttccaggcaggagcatttacgaccacgccaaggtccatcgcacaaaaaggtgggtggtgctagtggatctgaagcagtttttcccgtcgatcaacttcgggagagtgttagggcttttaagatctgcccccttcaacttggagcaggaagtagccgtcgcagttgcgcaactttgtacaaaagcaggtgctctgccccagggcgctccatcttctccggtcatctccaatctgatctgccgaaaattagatcggcaactgctggagctggcgaaaaatgccggctgttccgtctctcgctacgccgatgatatatgcttgagcaccaatcgcagacaggtgagtaagagtatctgcgagatccttcccgaacacggttgggtccctggggtcggtttgaagcaggtgatttcctccaacggcttcgaaatcaacatctcaaaatttcgggtggcatctggcagggagaggaaactggtcaccggactggtggtaaatcggggcgtcagtgtgccaagacgatggcgagatgagcttcgcagctcactgcacgtcgttagcaagtacggcgagttgcggggcgccgagatcatttctcagtggaattcgggcttcttcagaggggacggatcaaatgctctgcggaccattaagggaaagcttaactacctggactggatcgatcgcgtcgcgaggcgttctgctatcggggctctgagacgacagttcccttctctcggaacactaatgcctcggcccaggggcggcataccatttcgagtgatggccgaagggcccaccgacctcctccacttaaaagcggcttttgaccggtttcgggatgacggacacctctttgacatcctgccccggttccagaatttcagcggggacgtaggggacagtgagctgtgggagactctgcgacgcatagccaaagccgacgtgcatgagctcactgtgggcatctttgactgcgattccccagcttttcttaggaaatcttccctcgcacccggaggacacgtgcaagtgggagagaaggtttatgcattctgtctggccgctcctaactcctcactctcaggtgagttttgtattgaaagtttgtacagccgcgaagacgctaccatgttggacggcagtggcagaaggctcttttttggagatgaattcgacgcaactaacggactgtcacatgatggtgagttccgcaggttacatcctcagaagaagtccatagtggtgagcgatcaggtgacgcgcgttagcgggggaggtagcgttctcctgtcaaaggccaattttgcctccctgattagcgaaaaggttccgccattcgatagagtaagctttgaaggcttcaaggaaacttggcgtgggattagagagctagtcattgcaaactccaggaaatga

SEQ ID NO: 7686 - RNA, 984 nt, synthetic construct
  source 1..984: mol_type = other RNA
atgtccgttaagagtcggtctgacttagctggctggttgggggtttccgagagggccttgcgctatattctgtacaagcttcccgacgagcggaagtattcaacattcgaaattaaaaagcgcaacggcaatgcccgggtgatagatgcaccgtccccagcattgaagtttctgcagagcaagctggcagaaaccctttctgagatcgccccgccccgtcagctcgctaaaggttacgtgagggaaagatccatcttcgatcatgcgaaagtgcaccggtctaagagatggctagtgctcgcagacatcaaagatttttttcccagcatcaacttcggcagggtgggagtatttcgggctgccccattttcgttcggtcacgaggtcgcggtttgcctcgctcagctgtgcaccaaaggtggacagctgcctcaaggcgcccctacatcccctgtcatatctaatatcgtgtgcagacgcctagatagagaattactggagttgagtaagcgaagccgttgttcagttagcaggtatgccgatgacgtctgtttcagtactaacactagggacatctccgctcgcgtggctgacttcgttggggaagcaggatgggtgccaggcctggaactgaaaagcgtgtttcagcgcaatggattccaaattaatcctaacaagttcatggtccggtgtggccgagagaggaagctcgtaacggggcttagcgtgaactcaggggtcagtatcccccgttcatggagacgacagctccgctctgcccttcatgtgatcagaaaatatggcgaggtccccggggactccattgtcctgtcatggaggccagcctttcaacgcgggagtgctgtgaatattggccaggtaattcggggtaaagtgagatacgcccattggatagataggctggccgggagaggctctgttgaggcactgcaccggaactaccgagcgggaagcatgggatga

SEQ ID NO: 7687 - RNA, 1695 nt, synthetic construct
  source 1..1695: mol_type = other RNA
atgggcccgctgtcactgagccctgaagccattgccttttctggcctaaaaactcgggccgagctcgctggatggttaggccttacagacaagaagctctgttaccttctctacgtgctacccgcaacacagaaatacattactttccaggttgccaaacgggatggatctagccgaaccatcgatgctccccaccctgccctgaagcagattcagagaaagctcctgagtgttttccgcgaactggctccggctacaggggttgccaaaggatatgtcaacggagtgggggtcatcgaccatgcacggctgcaccggagacagcgacacgtcgtattggtggatcttgaaaacttcttcccatcaattacctttccacgagtgagaggtgctttgctgggcaagcctttcctgtttcccccgaaagtggccacgtgcatcgctcagttgtgttgcaaggacggagttttgccacagggagcgcctacctcacctgtgctgtccaacttaatttgcaggtctttggatcataagctgcttgcactggccaaagcaaaccgttgccgggtgtccagatatgctgatgatatctgcttctcgacgtccctggttgaggtcccctccatcatcgccactctttatgacggtaattacctggtagggccagccttgatcgcagccattcacgccagtggctttaccatcaatcagaagaagttcaaagccaagtcccagcgaacccaacagctcgttacagggctggtcgtcaatcgcggggtgtccctgccaaggagatggaggcgtcagctgcgcgtgctgcttcatctcgcagacaagaagggtgctgcacgggcaaccgagatcgccagtgcctggaccaagccagtagcgtttagacgtggctcggggagtatagaacagttagtgcgcgggaaaaccaattacgctcaacatgtggacttgaggtgtgacaaatctttcagtgagtctatttataggaactatggcggtgtgcggaagctcatgcccagaccactgagaggcatagctttcagggtcatgacagaagggaagactgacctgttgcacctggaatctgcgttaaagtggttccaggagagagctgagtttgcagagttcaaaccccggtttctcaatttccctggcgacattggcgacgtagagctgctcaaaactttacagcgtatagcaaaaagcgacgttcccgaactaaccgtcggcgtgtttgattacgacaatatcaaggacatgaacaaaattgggctcgcccccggagcgcatctgcaactagggagccgcgtctatgccatgtgtctgggtgagcctgctggtttcacgggaacaaggttctgtatagagaacctttaccaaaaaaaccagctcgtagctatgacatctgaggcgaggagggtgtttcttccagaggatttcgaccaagatggtatcagcctagacggcctgtttaagcgagcccaacctcgcgctactgccgcgatcgtctcagataaagtggtgaggctcagcgatggctttagcgcctcactgagcaaggccgaatttgcagagatgatattccgctccgtgcacccttttgatcagatcgatttttccggcttcggacccacttttaatgcactgcgccggattgtggaagaagtgagcctcgccggatga

SEQ ID NO: 7688 - RNA, 1692 nt, synthetic construct
  source 1..1692: mol_type = other RNA
atgggaccgcacagctatagtccaggcgcacttgcttttttaaaccttaagacacgagctgatttggccgggtggttgggactgaccgataggaagctctgctacctgctctacgcactcgatgcctccaaaaagtacacttcctttcagattgccaagaagaaaggaggggtccgcactattgatgctccccacccggccctgaaatacattcagcgtaaactgatgcacgtgctagtggaactagccccaccaacaggcatcgctaaagggtacgttgcgggtgtgtccaccatcgatcacgcatggctccaccgacgccaacggcatatcatcctggcggatctggactccttcttcccaagcattacgttccagcgcgtgcgtggtgcactgttggccaagcccctgagcctgaccgcaaaagtggctacctgtattgctcagttatgttgcaaagatggagctcttccccagggggcccccacatcacctgtattctccaacctgatttgtagatctctcgaccacaaattattagcccttgctaaagctcatagatgtaaagtttccaggtatgccgacgacatttgcttctctactgaccttaaagttatccctaccacaatcgccagctgggtgggtgataggtatctagccggaccctcccttatcagcgcagtgtcttcgtccgggttttctctcaacccaagtaagttcaaggtgcggtccaaagagtctcagcaactggtaactggactggtcgtcaatgacggcgttagcctgcctaggcattggcggaggcaattgcgggtcatcctgcatttatcatcgaagaggggcctggtgcgcgcaaaggagattaccgacggctgggcacgacctgctgcttcaaggtgtgaggcagattcactcgaacactttatccgaggaaagacttattttgcgcagtacgtcgattttcggtgccggagaaagtttagtgagagcatataccgaaattatagtggaatgagaaagcttatgcctagacctctgtctggggctagctttagggttatggcagagggtaagactgatctgctgcacctggaggtggccctgaagtggttccagagtaatggggaatttacagattttcggccacgtttcgtcaattttcatggcgagacaggcgacgtcgaactcatgaagacactcgaacgcatagccaaatctgacatacccgagctcacgattggcatcttcgactgtgacaactcaaagttcatgctgaagaacggcctcagcccagccacccatcagtctctgggcgggaaggtctatgccatgtgcttgggcgcacctctggcgctgaccaagtcaaccttctgcatcgagctactgtaccccaggagccaactcctcacaatgaccagcggagggagacgcatctttttgcccgacgaattcgaccttaacagtggcctgacccctgacggtctatacaaaaataaattccccaaagccacggccccgatagtatcagaccacgtggaacgcgtggtggatggtttctccgccttgttgtctaaggctgattttgcagatatggtccaccaggccgtgcatccattcgatgctatggactttagtggcttccgggccactttcgacgcggtaagaagagtggtggacgaggtttattcgtga

SEQ ID NO: 7689 - RNA, 1656 nt, synthetic construct
  source 1..1656: mol_type = other RNA
atggctctgtctagcaggcaggatcttgctaagtggctggggctgactgaccgcgaactacggtatgtgctttatgcgctgtcctctgacaaaaagtacaccacctttactatcaagaaacgcacaggtgcagaccgggttattgaagcaccccacccagcgctcaaaaatctgcagaggaagctccttaccgcgatctccgaaattgccccggcgagtggcctggccaaaggctatgtcctaggacgctctacgattgaccatgcatggctccataggagaaagaggtttgtaatcctcgcagatctgaaggaattcttcccaacgatcacctttcggagagtgcgaggcgcccttcttgcaaagccgttccaattgccgtcggctgtggccacttgtgttgcccaactctgttgtaaggatggcgtcttacctcagggtgcccctaccagcccagtgttgtcaaacctgatctgccggagcttagaccacaaattgctgcagttggccaagaaacacagactggccgtttctcgctacgttgacgacatctgttttagtacatctcggcctaccattccaggtaatattgctgtcccacatggtgccgagtgggaagctggccctgagctcactgaggccattcgtgtctccggattcgagttgaaccacagcaagtttaaagttcgatctcgcgagactacccaactcgtaaccgggctagtcgtgaaccacggtgtgtcgctcccacgtagatggcgtagacaacttcgggtgctgctacacctggtgaaaaagcatggagaaaagaaagcaggggagatagccgctagctgggtcaggccaactgcctccaggagaggctttgcgagtatagagcaggtaatacgagggaagtcacattttgcccagtacgtggatcgccgatgtaaccgcgcttattccgacgcactgttccgaagctacccaggacaacggagactgcttcccaggcctcttaggggagtgcagctgaggttaatggccgaggggaagacagacttattgcacctcgaggctgcccatcgggcctttaatactgccggcgaatatgcccacattagacctaggttcgtcaactttccctcagacacaggcgatgtcgagctgttaaagacactgaatcgcattgccaaatctgacatcccggagctcaccatcggcgtgtttgattgcgacaatcccaaattcatgaaggacgctggactccagcccgctggatacgtgcagctggggtccaacgttttctgcatgtgcctggcacctcccccatcccttgctggagtgcccttctgcatcgagctgctgtatgaaagagatgaactgtgcgcaatgacgacagatgccagacgggtgttcctccctgatgaatttgaccaggcaaccggtttgtcacacgacgggttgtaccggagaacaaatcccaaaaaatcagcactggtagtaagcgatcaggtggttcgcgtcagtgacgggtacagttccctgctggggaaggctgatctcgctacactagtgagccagcaggtgcctcccttcgaggagatgaacttcggaggctttcagcccaccttcgatctgatcggcagcatcatagatatggtgcatggccgttga

SEQ ID NO: 7690 - RNA, 1734 nt, synthetic construct
  source 1..1734: mol_type = other RNA
atgtcagcatcacctccacctattaaaaaaacttcgctgctgagtcctaacgcaattgccttcagatctatcaaatcaagaagcgagctggccaattggattggtatcaaggagtccacgttgatttacatcctatatcgtctgcccacttctaaaaagtacacagacttcctgatccctaagcggaacggtggcaccagaatgatttctgcccccagaaaggctctcaaatacgcacaaaaacgaatctcctcggtgttatacgacatatcaccaccccggaacctgagcaagggctacattccgggacgagggattttcgaccatgcctataggcaccgtcgccgctccacagttgtcaccgccgatatcaaaggcttttttcccagtatcaattttggcagagttagagggatgtttgccgcagctccttttggcctgccactggacgtggcaactatgctggcacagctgtgctgcaaggatggagagttgccccaagggagtccaagcagcccagctatcagcaacatcatatgcaggtccctcgatctggatctagccggcttcagcaggaaacacaggataacagtcacgaggtatgcggatgacgtgtgctttagcactaatatgaggaagaatctctttcccctggtggaacggaatgacctactgggcgaagtgccaggaggagaggtcagtcgtattttcgagaaaaacggattcgagcttaacctgaagaagtttaacttgtccaagtctaactcccggcagatgatcaccggactgatcgtgaattcccacgtaaatgtgccgaggcagtggaagcggcagttacgcacgctgttgcatttaaggtcacgcatggaggatgcgcaggctactgaaatagccaacacatgggctaggcctcaggctagccggaaaggtgtcaccgagtctattgatcatcttatccgagggaaggcctctttcgctgcgtatatagactctaggtccggcactcggcacattgctagcttgcacagggggtatccaaaactgcgtcaaatgctcccccgaatgaatccttcattccctgtgcgcattatggcagaaggacccaccgacctcttacacctagaggcggcgctgcggcactgtagtgacagaatcgatttctctaatgttgctttgagacttcacaactaccagggcgatgttggggacaccgatatgatcaagacactccatcgcatcaataaggtcgatgtggaagaactgaccatcggaatttttgaccacgacaaccccagcttcctgaaagagataagcctcaacgaggggagtcatgtccggcttgggcgcatggtgtttgccgcttgtctttccagaccgaaattcgtgaccggtaattactgtatcgaaagtctctatcggcgaattgactcctccagagtcacttcggaaggccgacggctgtatttctccgatgagttcgatgctgagggcctccattcacagggtgttctgagacgccagtacccgaagaaaaccgccctggtgctctctgaacgcgtgtttgacccaaaggatcccaacgtatcacttacattaagtaagacagactttgcagccatggtaaacgccggagccgccccattctctgatatggacttctctgggttcttgcctacccttgcacatctccgcaagatgatcgacgaagccatgtactttagcggcaatagctga

SEQ ID NO: 7691 - RNA, 1737 nt, synthetic construct
  source 1..1737: mol_type = other RNA
atgccttcctctccccccgtgaaaaaaaacagtcagcagttgtctgacagagcactagagttcaaggccatggctagtcggtccgacctggcacagtggattggcataaaggaaaagactctactgtatatcctctacaagcttagtgattcggagaagtacaaagactttacgatctcgaaacgtgatggaggtacccgtctgatcagtgccccattgaaagcgctgaaattcagccaaaagaggatctcagcgatcctgcaggagatctccccacccaggcacctggcaaaagggtacgttcctggaaaaggcatattcgaccacgccttcttgcacaagcaccggaagaccgtggtaacagcggacataaccaacttcttcccttccataaattttggaagagtgagggggatgtttctctcccccccgttctcacttccaacctctttagccactatgttagctcaactttgttgtaaagatgggcagctgcctcaaggttccccctcttctcccgccatctccaatatcatttgccgctccctggatttagaacttctggaattctccaaaagacaccggatttctgtgagccgctatgccgacgacatctgttttagtactaacatgaggaaacccattttcgggctgtatgaaattaactcacagtttggcaactttccgggaacagagctctccgatatcttcactcgcaacggcttcaccctgaacatcaagaagttcaaggtgtcgaaatccaatagtaggcagatggtgacggggctgattgtgaatgacagagtcaacattcctcgggcctggcgaagacaattacgggtcctcctgcatctgcgtagccgcatggaggatgcagcaactaccaaggttgttaattcatggagctcccctttaccctcacgcaagggcgagacaagtagcattgacaatctaatacagggaaaggccagctttgcagcttatattgacaggaggtctggtacgaatcatataggcggcctctaccgaagctatcctaagctgcgcggcatgttgccacgggtcacgcagacatttcccgtgcggattatttctgaaggcccaactgatcttctgcacctccaggctgccctggagcattacggttcaaagctcgacctgagcaacattagcattaagttccataattaccagagcgaccagggggatgctgatacccttcaaacactgaggaggatcgctaaggtagatgtcgaggagctgactatcggaatcttcgattacgataatcctaagctcctccgagatctttccctggacgccgggggctatgtaagattggggcgaatggtcttcgccgcatgcttggctcgaccggctcaaactaacggcatgtactactgcatcgagagcctgtatagaagagatcaggcctcacggaccacaaccgaaggaagaagactatttttcgctgacgaatttaaggaggatggatcaagtcaggacggctcactgcgccgggagcatccaaagaaaagtgccctcgtgctttctgaacgagtctttgatccagcgaaacctgaggtgtctctcaccttgagcaaaaccgactttgcctctatggttttcacaaaggctgcaccatttagcgacatggactttagcggttttctgcccacactcacactgttgaggcgtatggtggacgaagccatgcgctaccagggaatcaaatga

SEQ ID NO: 7692 - RNA, 1725 nt, synthetic construct
  source 1..1725: mol_type = other RNA
atgcccgtcaaaccaccaagcttgtcgaacagaagcctccagttcttggccattagaacaagggcagacctggctaactggatcggcctgtcagagaaggcgctgctatatatcctctacaaattgagtccagagcgcaagtataccacctttctcatcaagaagcgcaacgggcagtttcgccggattagtgcgccccagaaggccctcaaattctcccagcaccagatttctctagcaatccaagaaattactcccccacgacacattgctaaagggtatgtgaagggcaagagtataagcgatcatgcacgccagcatgttcgcaaaaaaatcgtggtgataagcgacctgaagaacttctttccatccattaacttcggccgagtgagggggttattcctgagcccgccttacagttttcctacagacatcgccactattcttgcccaaatttcatgtaaggacggagaactgccccagggatcaccgtctagtcccgcaatcagcaacgcaatctgtcggaaacttgacaggcagatcttgcagctcgcctctagaaatcgggtgtccgtgagccggtacgctgatgacatttgcttctctagcaataagaagatcagcctttcaatctgcgacacctcactgataaccggagatgtcgctggtcaggccctgaggggaatcatccaaaataacggcttccaggtgaatgatgccaagttccacagaatcccctataatcaacgacagatggtgaccggtctggtggtaaacgaaggtataagcataccacgtaagtggcggcgccaactgcgggcaattttacacttgcgaagcaaatttgatgaccctaggtccactgagattgtgaattcctggtcatcacctcaggccagtcgcagtggcaaaattacgtctgttgaccatctgataaaaggtaaagccagcttcgctaagcatattgataggacaagtggtagacgtgtcgtcgagtcattacacagaggctacccaagcctgtccgaactgtttcccagggtgtcccccgaattcccagttcggataatgaccgaaggctctaccgatctcatccacctggacgcagctctccaacgatatgaaaagcagcttgaactgttcaatatctctataaagctgcacaattacatcggggacacgggagatgtggacgtgttgagcactctccgaagaatcgcgaaagtcgacgtcgacgagcttacaattgggctgtttgattgtgataaccctcggctcatgaaagagatctccctcgaggccggctcctacgtacggcttggaaggatggtattcgcagccgctctggctcctcccaactcttccaccgtgcctcctttctgcatcgagtccttgtatccgcgcgagcagtctactcgtaggacaaaagaaggacggcgtctttttttcggcgatgaatttgataagtccgggaagttcattggggaggacatcaatagagagtttcctcagaagaccgccgtagctctctccgagaaggtctactcaagttccgacccctctacatcgctaacgctgtcgaaagttgactttgccaacatggttagctctggggcccacccattcgaggacatcgatttttctggatttctgccgacattaaatctgcttagggcaatgattgatgatgcgactaggcatcgctacagaggcaaggagagatga

SEQ ID NO: 7693 - RNA, 1584 nt, synthetic construct
  source 1..1584: mol_type = other RNA
atgagtccagaaaaaaagtacaaaagcttccggatttcgaaaagaaatggaggcgaacgggagattagtgcccctacaagcgtcctcaaaaagatacagaaacgtattgctttcggagtcgacggcgtccgcaagaaaagcctgatcagcaacgggttcgaaaaggggcgatccatttttgaccacgcacagccacacaaacggaagtccctggtgattacagcggatgtaaaggacttctttccgtccatcaatttcggcagagtgagaggcgttttcctgagccccccctttggcttcaataataaagtggcaacgttgctggctcaactatgtacagacggtgccagtcttccccagggagcacccagttcaccatcaatcgccaacgttgtttgcgtccaattcgaccgattacttgttaccctcgcaggaaagtgcaggtgtagcgtaactaggtacgcagatgatatctgcttttctacgggaatggctgacgtgcctaagtacattgcagtgcgaaaagacggaaactatgtgccaagccaggccctgatcaagacctttaaagatggtgggttcgagataaacttggataaattccgggtggtagatgggaaggacgccctcgtcacagggttgaagtatcggggaggaatcggcctgcccagaaagtggcgccgcagacttcggactgagctgaatctgctacgcaagtatggcgacggcgccgagaaaatcatagcgtcatggggtggcgttactgaggttgctggcttgcccgagtcccaagggagccctaggatcctcggaaagattggcttcctccgctggcttgatggcaaagctggatcctctaacgccctccgaatggccaggtcttacccccagctcaggaaagaatttcgggcggtaatcccatacgaaaatattgacttactcgtcgagggtgtcaccgataaggtgctgctgctagctgccctgtccgccttgcaggcaaagggcagcttcagtgatctgaagctgaacttccctgagtcagctatgaagggcggcccagacctggaaaaaacagtgcgtctggtagcatctaccggtgcccgccgcaatttgactatcgccctttttgattccgacgattcagaggtgttagctagggcagggctggcgccccaaagtggagtctactatagggccatcgccagcggggtgtatgtgatggccttaaagcctcctccttggatgctggtggaatccttttgtatagagaacctgctcagaaacgacactttttctgtggaagatagccacggtagacggatgtttctcgcgaatgaattctctgagaacggtctgcatcagtctaaggagttctttagaacccgtccgaataagaaagctatcgttgtggactccgacgtgtattccgtcaaatcagggaagtcgatggctttggctaaatatgccttctcagagcttgtggcaaacgggcaggctccagaggaagattactacggctttcatgggacctttagtctgattcaggaagtctcttacgattttgcccttgacaaggtgaggtga

SEQ ID NO: 7694 - RNA, 1584 nt, synthetic construct
  source 1..1584: mol_type = other RNA
atgtcagcagaaaagaaataccgatcattccaaatccgaaaaaagaatgggggtcagagggctataaccgctccaaccgacgtgctgaagaggatacagaagagaattgcatttggcgtagatggagtcagaaaacgcagcttaatttcacacggatttgaaaaaggcaggtctatcttcgatcacgcgcggccccacaaaagcaaatccttcgttattacggccgacattaaggacttttttcctagcatcaactttgggagagtgcgcggcgtcttcttgtctgcgcctttcggctttaataataaagtcgccaccctgctggcccagctttgtacagaaggaaattgcctcccccaaggagctcccagctctccctccatcgctaacgtggtgtgcgtacagctggaccgccttctggtcctcctggcagggaaatgccgttgttctgtcagcagatatgctgatgacgtctgcttctcaactggaagttcgactgttcccaagtatttaagcgtgcgtaaggacggaaaatacgtcccatcccaggccctcctgaagacattcaaggattgtggcttcgaagtgaacttggagaagttcagagtcgttgatggcaaggacgcgctggtgaccggtctgaaatacaggggtggcatcggactcccaaggaagtggcgcaggcgcctgcgtactgagctaaacctcctgcggaagcatgggtctggggcgaacaaaataatctctggttggagtggggttcaagagatcgccggcattaccgaaaaaagcgactgccctgggatcagcggcaagattgggttctcccactggctcgacgtgaaagccgggagtagcagaacgctgcgaatggcaagaagttatccgcagctgcggaaagaattcaaggctgtgattcctcaccagaagatcgatttgcttgtggagggagtgactgacaaagtgctcctgcttgcagccttggccgcccttcaggtgcgaggaggtttttccgacctcagtttcaattttcccgactcggctatgaaaggcggcccggatctagagaagacaatcaggctcattgcctccacaggcgcaaggcggaacttaacaattgctttgttcgactcagacgattcagaggtcctggccaaggtagggctgagccctcaaaccggaatttactaccgggcggtggccgagggtgtgtatgtaatggcactgaaaccacctgattgggtaatctccgaaatcttctgtatcgagaacctacttcgcaaggacacatttgcagtccaggatgctaacggacggcgaatatttctcgcctctgaatttagcgagaacggcctgcatcagagtaaaaatttctatcggattcggccaaataagaaggcaatagtggttgattcagatgtttactctgtgactaccggcgaatctatggccttggctaagcatgcctttagtgagttagttgccgccggggaggctgctggtgaagattacaatggcttccgctatactttttccctgatccaggaggtgtcctacgagtttgcactggagaagtccagatga

SEQ ID NO: 7695 - RNA, 1725 nt, synthetic construct
  source 1..1725: mol_type = other RNA
atggccagcctgtcacctaactcctttggcctgactgacgctgaccttatcaggttcctgtcaatggcttcaagaaacgaactcgccgcttggctcggcgtctccgagagacagttaaaatatgtggtgtacgccatgccgttgcacaagaagtacaaggtgttcaggattaagaagaagaacggaggcgagagggaaattagctctcctaccgacattctgaagcggattcagaggcggatagctagtgcagttgacagcgccagaaccagatccctgatctcaaatgggtttgagaagggtcgttctatcttcgatcacgccaggccacacaagggaagggtcttcgtcattacagcggacataaaggattttttcccaagtatcaacttcgggcgagtgaggggagtattcctcgcccctccctttcggtttaataatgtggtggccactctgctggctcagctctgtactgacggagaatccctgcctcagggtgcaccgtcctctcccagcatagcaaacatcgtgtgtgtccagctggaccgcctcctaatggagctggccaaaaaaagcaagtgttctgtcacgcgatacgcagacgatatctgctttagtaccggtattgcccaggtgcctaaatatcttgccgttaagaacggggatgactacatcccatcccaggccctgtgcaagatactcaacaacaacgggttcgagatcaatctggagaaatttagggtttgtcgtggtaaggatgccctcgttacagggctcaaatatcggggaggcatcggtctaccgagaaaatggcggagaagactgcgaagtgagcttcaagtgagccggaagtacggagctgcagcggccaatattatagcggcttgggacggctcggatgaacccaagcttacaggcgagaacaacgagcttctctgcgtatccggaaaaattgggtttagtaaatggctggatgggaaggtgggcgcccaacgtaccttggccttggcacgatcatatccacaacttcgcggagtttttaaagccgtcatcccacaccgcgaaatcgatctgctggtcgagggcgtgaccgacagaatcctcctcatcgccgccctgttggctctgcaaaaacgcggcctgttcttgagcctgaaattcaatttcctctcttctgcaatgaaaggtggcgctgatctggagaagacagtgaagttactagcagcaacgggcgctaggcggaatctgaccattgcacttttcgactccgacgatggagaaatcttagccaaggtgggcctggtccctgcaagtggggtgtactatcgcgccattgcggagggagtttacgctgtggctctgaaacccccctcttggttaaccgcggaaactttctgcattgaaaatctactccatccagataccttcagcattgaagatgacttagggcggagaatattcttggcaacagaattctcagagcgaaatggatttcatcagtccggcaaattctttcgcgtcaaacccaataagaaggctatcgtagttgactcggatgtgtattccacaacgagcggcgagcccgtggcattggctaaacatgccttttcagagttggtagcccagggggctgcccctagcgaagacttttatggctttcacgagactttttctctgatccaggagattgcttacgaattcgggcttgccgcgggtcgcacttga

SEQ ID NO: 7696 - RNA, 1698 nt, synthetic construct
  source 1..1698: mol_type = other RNA
atggctccgccactttctaaaaaagagatcgtcaatttcctagccatcagcaatagatctgagctggccacatggttatctgtttcagagcgccagctcaagtttgttgtgtacgctctcccaatcgactgcagatatcggaagttcaagattgctaagaagaacggcggaacaagggagatctctgcccctgtggaggtgctcgctactatgcagagaaagatagggtcagcaatcgacagtatacgcaagagaagcctgatctcaaatggctttgaacgaggccggagtatctacgatcatgctaaagcacacaaaggcaagtccaagattatcacggtggacatcgaagattatttcaatagcatcaacttcggacgggtgagaggtatctttctgagcagcccattcttattcagccccacagtggcaaccctactggcccagatctgtactgacggaaagtcattaccccaaggggcccctagctctccctctattgctaacctggcgtgcgtgcgcctggataggatgttggtggagattgcctctaaagcccgttgctccgtttcacgttacgcagacgacatctgtttttccaccgggttgtctgaagtgcctaaattcctggcatacgaagacgatggatcatatctccccagtaacgtactcgctgacatttttaaatccaatggcttcagcattaacaaagacaagttcgccgtcaggagtcgaaataaagcgatggtcaccggtctgaaatttcatggtggaattggcatgccgcggaaatggagacgcaggctccgtagcgaattacaagtatgccggaagtacggagatgaagccgcttctattatatcctcctggacatttggccctaatcgggtgcagctcaaaagtcatggaataagctccgtagcggggaaggttggctatcttcactggctagatggaaagagcggcgctgacaaagtcaggagattggctgagagttatggccaactggcgggtatttttggaccattgatgtccttcggtgaaattgacctgctggtcgagggcatgtcagatgagatcttgctgaacgctgccctccgaaacctccagaaaaaggggatgttcgagggtctgaagtttaacttcctggaactaggcaagaaagggggccctgagctggagaaatctgtgcgccttttggtcactaccggagcccggcggaacctgacaattgccctttttgactgcgacgataacgatgttctgactaaggtcgggctggaacccgccaatgggatcaactttcgaaggctgagcgacggtatctatgtggccgcacttagacccgcaggctggactcagtcggatcagtattgtatagagtcactcttaaggcgagataccttcgagttgtccgatatttccggcaggaaactgttcctttccagtgaattcagtgataacggactccatcactctatgaatttctacaggaccactccaaagaagaagacactggtggtggacagcgaggtctactgtgttcgcaccggggcatcgatggcactttccaagatagtctttgcccagattgtggcatcggggaccggagtggccgaagacttttacgggtttgtagagacgttcaagatgctgtacgaaatccacctgaatcaccgcgttgtggccgtaaaatga

SEQ ID NO: 7697 - RNA, 1686 nt, synthetic construct
  source 1..1686: mol_type = other RNA
atgccgctggaagagcgagaggccgaattcctggcactaaggaccagggaggcacttgcctgctggctgggtatcacagataagcagctgcgatttttgctctacaagaaactcgatcagtcttatcgaactttcgtgattccgaaggcccgtggcggatctagggaaatcactgccccctcaaaatttcttgcccgtctccagcggaagatcgccctggtcgtagctgccatatcacccccccgcggattggcgaaaggattcgttaagggcctgtcagtcctcgatcacgccgcactgcacgctaataagcgctgggtcgtgtgcctcgacctgaagaacttttttccctccatcaattacggtcgcgtgctgggggtgttccgttcgaggccattcgaattccctgatgctgtggccattcccttgtcccagatatgttgctatttagggctgttaccacagggcgcgccctcctctccagctatttctaacgtcgtggccaggcaattggaccggaggctggccgaatttgcccgaaagaacaagctttctgtatcccggtacgccgatgacatctcctttagcacaaacgctagaattgtgcctgtaggccttatgttagaggacagatcaccaggcaatgaaatccttgaactgttggttcaaagcggcttcgtgattaatggcgagaagtttcgggtcaggcatgctagtgagagacagcaagtcaccggactcattgttaacgacagacctcgaatgcctcgtttctggcgcaggcagaccagagtcctcatgcaccttaggagagtgcatggggatgaaaacgccttgagcatcgctaaagactttagatccaaacggaagctgagcgacgtgaaatccatcgaggccttagttcgcgggagagccacatttgcgagccacctggatgatcggttccaaactgacttcgtggaatcccttgcccgtgccttcccagaacagcgcagcgttctggagagccgccggaaggtggcacatattcgcgtggttgctgaggggaaaacggacaaaaaatatattgcacaggcattttcggcattgtctggtcatgacagcaggtataggagagttaagatcgagttctcagatctgccagataagagtgagggatttggggacgtggcgctccggaagcatgtccaggagattagtactgtgcaactaccagtgttcaccatagctctgtttgactgcgacaattcaaaactaatggcagacctaaacctcacagctgctagttacgtcccgttaagtcccacactcgcgatcgcatgtctgccccagcctgcacacgtgtcagatgcagctttctgcatcgaacactttataccagcccacatacgcgctctgagggacagtaagggtcggagaatctttacagtcgatgagtttgattctaccaatggacggcaccgcaccgaatccctgtacagaatccatcctaaacaggcgactctgatcgtggacagcgacgtatttagcatgaccagtgccgagagcgtggcactctctaaatcgcagttctgtgacctggtctgtgagcgggcccctcccttcgaagatttcgattgggaggtgttccggcctgtaattgatttcctgctctccgtttacgagggcgctacgtctcgaagatga

SEQ ID NO: 7698 - RNA, 1692 nt, synthetic construct
  source 1..1692: mol_type = other RNA
atggcaccgcccgacttatccctgcaggctgcctccctgctggcagtgagcaatcgggccgagcttgcggaatggttgggcacgactgataaaagacttcggtacatgctctatggtcgcggaaatattggtctgtataaggtgttcgaggttgctaagagatcaggcggaactcggaaaattgccgcaccgaagccttttttaaaggcgctccaacgtcggctggccgctgtcttcccccttatcagcgctgcccgaggcatcagcatggcctacaccgcagggcgcggcatcatcgagaatgctaaggttcaccgtagaaaaaggtgggtggtggccacagacctggaggagttttttccatcaatcaacctgggccgaattagaggcctgtttctgagcgagcccttcaatttcccaaaggaagtagctaccgtgttggcccaggtttgctgttatcagggggcacttccgcagggagccccaacatctcccgctctctctaacattatttgccggtccctggataggaagctggtcgagtttgcccgccggagtgggatcgccgtgactagatatgccgatgacatagtgttttcgttcaatttcaaagagtgccccgactctctggtaaataaggtggatggcagatggatagtgtctgatattctcagcgaaatcatcgaatcctccggtttcaaagtcaaccataagaaaacacgagtgacacctcggagccagaggcaattagtcaccggcctggtggtcaaccaaagacccgcaatgccaagagaatggaggagacggaacagggtaatcctgaggctgttgcagacctacgggaaagagcgcgccagtcagatcatatccgaatggaaaggacttcgtcgccctggcgcagacgcagaagcaatcatcaggggggccaccgccttcgccagtaacctagacaagaattttaacggtacatacacttcatccctgcgaaggaactaccctctcctctcgcaggttatttcctactctcccgatctagtccccgtggaggtcttgaccgagggaaaaaccgatagactcttgctggaatttgcctatgctcagctcagactccttccagagtttcaggatctgcggctgaagttctcccgactgtccgatactgcgggagacggagcactcgccaagcgactagacgagttagcagctcgcggcgtacggaccttgacgattggtctgttcgacgctgataacgaccaatacttatctaagtacaggatagccgcaggggagttttcagctgtgtcaaagaccagcgactacgtgtactctgggatcatccctaagcccactgacgatgcgccaagtagattttgtattgagcattacttccctcgtgactttatatctaggaccgacgaatttgagaggcggttgtatttccttgatgaattcgacaaaaggaatggacgccacaaaagcctgcctctatataagattagcgagaaatcaacgctcattgttgatgacaaggttttctcaatcatgactgacgatgatcgcaactacgccatgacaaaggcggacttcgctgaaaaagtcgtgagtcgcacaccaccttatgaagacgctgatgtgaattggtttagtccagtcttcaaaatgctgaagaacttcagcctccgctatagttga

SEQ ID NO: 7699 - RNA, 1626 nt, synthetic construct
  source 1..1626: mol_type = other RNA
atgaaggatataaagacctatgaagatctatgcatggtcctcgagataaatcaaggctatttctactccgttctgaacaagatcaagaacaagaagggttatacgaaattctccatccctaagaaaaacggcggtgctagggaaattctggccccgtcacccattataaagagcctccagttgaagatcaaggcctacatcgaaggaaaatatttcccacacacgtgcgcaaaaggctttaaaaagggttgctgcaatgtcgacaacgcgaagatgcacgtcaaacggaattggtgtcttaatctcgatctcaaagactttttcccaagcatcaattttggcagagtgtacgggctgctcatgtcagagccctttaatgccaacaagaaaattgcagtggcactcgcgcatatcctgtgttatgacaatgaacttccccaaggagctccttcttcaccactaattagtaacttaatcgcttacagtctggacaataagctgttggcccttgccaaggagtatcattgcaactatagccgttatgctgatgacatatccttttcctcaaatagcactcatatgcctaagcagctggtggtgtttgacgacctgatccatgaatggattattggtgatgatttacagaacaccattgaatcctgtggcttctcaattaatcacgggaaaacaagactgctgaaaaaaaatcagcgccaggaggttacagggatcatcgtaaacagtaagctcaatttaaacaggaagtattaccgggagatccgatccatattccacaagataaaggttaacgggatcaaagaggtcgccaaacagaaccacgaaaggtacgggaaatgtaaagataacagcgaattcggcctaatcagcttcattaacggcaagcttgcctactataagagcgtggtcggagaggataatccatgctacaacaagctgtgcaaactttacaacaacaccattgagtacaaatacaagaactgtaagtcttcgaaacaggagttgattgataacgctatgttcatcattgagacatcagaaggccaaggaacagcctttttgctcaaagatttgggactggtgacctgtaagcactgtttgggattcaagcacgacgacttctgcactgaggaggagctaatcatcttcaataagcagaatgaagacatcatatacgcataccgagtgtctaaccccgagaatagatttaagctcaagctgaagaagatctttaaagagagcgaccttgctatactggaattgctgactgacgaaattcttcagtactatttctatccgtctaaagagcggctggatattcattctaagaattgcaccctgctgggttttcctaaccactctaaaggttcctcgatttccgagatcaataacatccaagtgagtagcaaaaaagcctactttgggcgcgactactactgtctcgacaaacccatcattacaggaaactctgggggcccactgctcaatgaacagaatgaagtactggggattgcttgcaaaggcgcaggagatatcactagtgcgagtgagactgacttcaatggcgtgatccctattgagttactgtataccgagaaggatgcctga

SEQ ID NO: 7700 - RNA, 2073 nt, synthetic construct
  source 1..2073: mol_type = other RNA
atgacgaagctgccctccatggatcagatcatcgaagccttggtgcgttcatcgccgtctttttttagtaggcgggtgttgggcatgagttatgaccacctgaaggccatagtgtaccctaggccctcataccagagtttcaccataaaaaaacgggacggcaccgacagaactattcatgagccccggaagccattgaagatcattcaggtgaaggtcctggcttttctgaaagagcggtcctcacctctgaaacccgccgtccacgggtttgtggccaaaagatcaatcctcacaaacgcattagttcactgttcaccaaaaaccaagcacgtcttcaacgtcgatctggaggatttcttcccctctattactttttacagagttaggggtgttcttctgcatcacccatttaatttcagccatcaggtggccacggttatcgcccatatctgcactctggataacgtacttccgcagggtgcccctacctctccctttctttctaacttagtttgccgtactatggaccgggatctcacagatctggctcggagatccatggctcggtattcgagatacgcggatgacattacgttcagctttcgcgtgtcaaagaccctgaaacttcctgctgcggtgtgctccgtgaatggcgatggcgatctagccataggaacagagctgcacgacatcatcgttaacaaacaccatttcaagataaacagtgcaaaaactaggctgagtgatagaacaagacgtatggaggtgacaggattgaccattaaccgcttccccaatgtgcctcgggtgttcatcgatcgtatcaggggggcgctgaacgcatgggaaaagcatggttatgaccaggccgacaaggcatggcaggcgaggataacagccgctgccactggcgcgtatgagaagaaaccgtggaaacgccagatcaggactggcaaagctcctgccctgaagaacgtactgtggggcaagttgttatacctgcgcatggtgcgcgggaaggacgatctaatctatactagactggctgaaaggtacaatgcagcagcagcagctaccacagccgccggaagcttctccgcgcctaccttaccggtggagccagtggtgcgagacaaagagactgccctagacgcctgttttgtcgtagactggtatggcgactacaagcaccctgcccttggggatgagatgcccatggcccaggggaccgccttcgtttaccgggaactcgggctcattataacgtgcaatcatgtgttcgaatgggaagggcaggtaggaaaagtcgacaccgtcatcgattacgaaagcccatacctcacaaacaaaattctccaactcattcaacccggtaccaagaagtcctggcccgctaaggtcttgtttagggacaagccaatggacttcgccatactcgctttcgctgaggagcctccccagcacagatatttttccgcaatggacacacccattgagcccggggcacaaggcgttctgatcgggtaccctgcctggaaacagtggaccctgcctgattttaatgatcagaaggtgctcaaccgcacatctccgcatgccggcatgaattccttcaccatcaccggcgccggttccatccgaccaggtaattctgggggaccctttaccgacgacaggtttcgcgtggccggcatggctcaaaggggagcatacatgggaagcggccacgatgaaagcctgtgcttcgaaattatcgatgacctcatcgctaagtataaggcctctcttgtccctccacccgcagccatttctgtgccacctgccgctcccgtcattggtagcggagccccaccagcaactcccccagcaagcattccagtgcttcctgctccaccagctccggcacctcctaatgcgggctgtactcgaacatgtcgctccgccgatgctacaggacccaccgcaagggtacgacgcatgaatcgaactaccgcgcaagctgactatgctattacgagacgacgcttgagccggtcaagtgaccggctgagaagcggaacagcagtctga

SEQ ID NO: 7701 - RNA, 1917 nt, synthetic construct
  source 1..1917: mol_type = other RNA
atggctatactactgggcaccgatcagattacagaagcgttggtgcgtagcaacccgtccttcttttcgcgacgcgttctgggcatgccgtatgatcggctcaaagccatagtatacccacagcctccatataaatcttttatcctcaaaaagcgcgatggcaccgataggaccatacatgagccccgcaaggctctgaagatcatccagaataaggttctcgcctttcttgaggagcggtcaccagcacttaagccaacagtccacgggttcgtcgctaagagaagtattttaaccaacgctatggtgcattgcagtcataaaacccagcacgtctttaatatcgacctggaagacttctttccttccatcacattttacagagtgaggggcgtgctgcttcaccacccattcaaactttcacaccaactcgccactgtgattgcacacatctgtacgctggaaaatgttctgcctcagggagctcccacgtctcctttcctgtctaacctcgtgtgccggtctatggacagagatttggccgatttagccagaagatcattggcccgctatagccggtatgccgatgacattaccttttctttccgcgtgagcaagacattgaaactccccgccgcagtctgctcggtggacatcagtgggaacctgaccattgggaccgagctccacgatatcatcgtcaacaagcaccacttcaaaattaattcagccaagacccgaatcagcgacagggcaaggaggatggaagtgactgggttaactataaaccgatttccgaacgtaccacgcgtgtttatcgacaggatccgcggggccttgaatgcctgggagaagtatggttacgaccaggctaacaaaacctggcaagctagagttacagagggtgctaccggaacgtacgaaaagaaaccgtggaagcggcagacacgagggggccaagtacctgcccttaagaatgtgctgtggggcaagctgctgtacctgcggatggtgcgtggtaaggacgacctgatctacacccgactggcagaaaggtacaatgccatggttgcgacttccaccgccgccggacagttctccgcatccacactgcccgtcgaaccagtggtgcgtgacaaagagactgcactcgacgcctgtttcgtggtagagtggtatggggactataaggatccgacgcttggggaggagatgcccatcgctcagggcacagcgttcgtgtacagggaactcggcctaatagtgacctgtaatcacgtgtttgagtgggcgggacacgtaggcactgtcgaaactgtcattgattacgagtccccctacctgaccaacaaagttctccggctgattcaacccggaaccaaggctagctggcccgctaaaattgtgttcaggcataaacctatggacttcgccatcctcgctttcgtcggagaaccacctcagcaccggtacttctccgctatggacgctccaatcgagcccagtgcacagggagttctgattgggtatcccgcctggaaacagtggacaccacccgatttcaacgacctgaaggtcttgaatagaacatttcctcatgcaggtatgaacagtttcactataagcggagctggctccattcgcccaggtaatagcggcgggccttttacggacgatcggctgagagtggccggaatggcacagagaggcgcctacatgggaacaggccatgatgagagcctatgctttcagatcattgacgaacttatcgcaacatataaggcaagtttactgccacctctagccgccagcacattgggtgctgcagcgcctcccactacttcacctgcgcctatttctcatcccccatctcatcccgcccctccagttcaagatgcccccgcatcagatacttga

SEQ ID NO: 7702 - RNA, 3675 nt, synthetic construct
  source 1..3675: mol_type = other RNA
atgaccacgttgtccgagctaaatcgttgcgacgtggcaactttcatcgacagactgcgtggtatctatgaacacagtccatggattcctgagcgcgctgccactcatcgcccgttcgcaaatgagacagccctcaagcttgcattacaggccgttgtcacacacgctactgagggcgaacagctgggcctcatccgggaacacccagagttggccggcaaagccgctgttgccggagagctcaccatggagtcgacatccgagcaagctgcatccggcctgcacctgtgctccgcagatgaatacgcgaccctgcaccaattaaacgcagactacaacgctaaatttggatttcccttcatccttgccgtcaaggggcccaccggaaaaggccttacccgcagacaggtgatagcagcctttaccagacgactgaagaatcagcgggctgacgaaatcgccgagtgtctgaggcaaataaaaagaatcgccgagatccgactgaacgacctgctgggggtgtctctcgagtttgggcccgctattatgcagtgggcggaaactattgcggcttggtcggatgccgataatgcggcagacgctgattttgatttgacctgtgcttatatgacaccagctcaccgcaggacggctgaccaattgcgcgactggatgaccgatgcagggatggatgctcatatcgacgccgtcggcaatgtagtgggggtttatcgctctcctgtgcccggagcaaagaccctgatgaccggttcacattatgatactgttcgaaacggcggaaaatacgacggtcgactcggaatattgcttcccattgcgattgtcaggcacctgtacttgcggggtgaaacgctgccctttcacttagaagtcgttggctttgctgaggaggaaggagtgaggttcaagtctactttcctggggagtaatgccattactggacatttcgatctgtcactgctagatcaggtggacgctgacggcgtgtctatgcgggatgccttgaccgccgccggacatgacgtcgctagaatacccgccctggccagacagcctgaggacattttggccttcgtcgaggtgcatattgaacagggccctgttctgctgcaaagagatctggccctgggagtggttaccgccattgccgggagtagtcggtacctggttcagctcacaggattggcttctcacgctggcacgacacctatgtccatgaggaaggacgctgccgcggcagcagctgaaatcgtacttttggtggagcaacggtgcgcccaaggccagtcccttgtcggaactgtggggcagcttgaagtacccggcggaagcgtgaacgtgatccccggagcctgtaaactgtcattagacatacgagccgcagatgatgctgtccgcctcgccgcagtacaggatgtgctggacgggatcgccagcatctgcgcagagcgacaggtggcctttgccctcgaaaggattgtggatgcttcagcagccccatgcgcaccccaccttatgcagcagcttggagcagcaattgaacgggcgggcctcccgaggtttgagttgctgtccggtgctggccacgacgctatggccatggccgctatcactgacgtggccatgttattcacacgctgtggtaacggtggaatcagccataacccactggagacaatgaccgccgacgatgccgacattgcagcaagggcctctcacgaagtgaccccaagggcaaccgataggcgactgtataactgggctattatccaggtgcaggaaaaggatactggtggtagattactattcagcattcgcgcatatatggctatccttcccaatatggaccagataattgaaacactagtccggagttccccctctttttttagtcagaatatcctcgggataaactataacgaactgcgcgccattatctatcccagaccaagctaccagagctttacaattccaaaacgtaacggcactgtgcgcacaatccacgagccttcaaagacactcaagattatacagctgaaggtattgaatttcctgcttgagcgctccagtcctctcaagccagcggtgcatgggtttgtagccaatcggagcatactgaccaatgccctggtacattgtagctctaaaacacagcacgttttcaacatcgacctgaaagatttcttcccaagcatcaccttctacagggtgcggggggtcctgactcatcatccatataatttctcacacgaagttgccacagtcattgcccacacctgcactctgaacaattcactcccccagggcgcacccacatctccgtatctcagcaacctggtgtgtcgcacaatggatagagacttaacggagctagcacgtaggagcctggctaggtactctcgttacgccgatgatatcacgttttcctttcgggtcagcaagacctcaaaactgccggcagcggtgtgttcggtggatagtgacggagatctcgtcatcgggtccgagcttcatgacataatcgtcaacaaacaccacttcaatatcaacagtgcaaaaacgagactgtctaatagaacacgccggatggaggtgactgggctcactatcaatcgattcccgaatgttcctagggtcttcatcgaccgaattagaggtgccctcaacgcatgggagaaatatggttacatcgatgctgagaaaaagtggcaagagcgggtgacatctgctgcaaccttggcctacgagaagaaaccctggaaaaggaagacccgagctggccgggttcctgctctgaaaaacatcctgtggggaaaactcctctaccttcgcatggtgcggggaaaagacgacctcgtatacacaagactagccgaacgttataacgctgccgtcttaaccgcgacttcagccgggcctttttccgcaccaaagttaccagtcgagcctgtggtaagagataaggagactgccctggacgcatgctacgtggtcgagtggtatgcggacttcaacgatccgaccattggcgaggagatgccactggggcagggcactgcctttgtgtacagagagctggggctgatcgtgacctgcaatcacgtgctcgaatggaacggcgaaatcaataacatcggcatcacaatcgactatgagaacaagtacctaaccaataaggttctgaagcttatccagccaggcaccaagaagagctgggcagctaaggtgattttcagaaacaagcagatggatttcgccatcctcgcgttcgctgatgagccacctcctcatcggtacttcgccgctatggatgcccccatagagcctgaagctaacggcatgttggttggatacccagcttggaagcagtgggctctgcctgactttaatgaacaaaaggtgcttaataggacaacaccccacgccgggatgaacagcttcaccattacgggcgccggcagcataaggcctggtaattcaggtggcccctttaccgatgacaggtttcgtattgccgggatggcccaacggggagcatacatgggggaagggcatgacgaaaacctatgctttcagattatggacgacttgatttccaaatatagagcgactctccgcattcatgtagcgatacctcccgcctccggcgcgtga

SEQ ID NO: 7703 - RNA, 1944 nt, synthetic construct
  source 1..1944: mol_type = other RNA
atggaccagatcatcgaggccctggttagaaaacacactagcagcttttcccagcgggtgctgggcatgccatacgacgccctgaaggccttgatctacccacgtccctcttaccggtcttttacaatcaaaaagcgcgacggctccgataggaccatccatgaacctcgcaaagcactgaagaacgttcaactgaaagtacttgcttttctccaggaaagaagctctccattcaagcccgctgtgcatgggttcgtcgcggatcactctatcttcaccaacgctctagttcactgttcgcccaaaacccagcacgtctttaacctagacctggaggatttttttccctctattacattctaccgggttagaggcgtgcttctgaaccaccccttcaaattctcgcaccaggtcgcgactgtcatagctcatatatgcacacttgataatatgctcccacagggcgctcctactagcccgttcctgagtaatttggtgtgtcgaaccatggacagggatttgacagagctcgctaggcatggccttgcacgctatacacgctacgctgatgacattaccttctcctttcatgtgagtaagaccagtaagctgcctgcctccatatgcagcgtcgacgatgacggtgccctggtcgtgggaagcgagttaagggccatcatagtcgacaagcatcactttaagattaatgccgccaaaacccggctgtccgatcgcacccggagaatggaggtgacaggcctgacgatcaaccgattccccaacgtcccaaggatttttattgaccgagttagaggtgctttgcgggcctgggaaacttacggctacgaaaacgccgagaaggtatggcatgcgcgagttgctgctgctgccactgggccttacgaaaagaaaccctggaaaagacaaaccagagcaggaggccctcccgctctgaagaacgtgctctggggtaagctgttgtatctccgcatggtgagaggtaaggacgatctcatctacaccagattagccgaacggtataatgccgctgtgcttaatgagcaggctgccggtgccttcgtagccgcaactctgccggtggaaccagtggtcagggacaaatctaatgtgttagatgcctgcttcgtgctggaatggtatggcgactattcatctcctactctgggggaggagatggttggtgggcagggcactgcttttgtgtatcgagagctcaatctgctcgtcacctgttcacacgtgtttgaatggagcgggaagattggaaaagtggatgcagagatcgatatcaatgatccatgcattgcaaccaaaacactccaacttgttcagcccgggacaaaaaaagcctggcccgccaagattctgtttagggataagcccatggacttcgcaatcgtggcctttgaagacccacctccccatcgctacttcagtgcaatggataatcccattgaaccgtccgcccaggggttcctcatcggataccctgactggaagcagtggaacttgccggatatcaacggcctaacggtactgaataggaccatgccacacgccggaatgaatagcttcactatcactggagcagggagtattaggcctggcaacagcggagggcctttcacggatgaccgctttcgtgtagcaggaatggcccaacggggcgcttatattgggcgtggccacgacgagaacctgtgtttcaagattatagacgcgcttatcgccaagtataaagctaccttgccatcacctcctcccttagcgccagcggtgatggctgcatcagcacccgcatcagccgcaccgatcgtggtcccaacgtccacagacgccctaagtgctacaccatccgcagcgggagccacacccatagtgcctccatccgagggagagtcacctcctccggacgcaatttga

SEQ ID NO: 7704 - RNA, 1920 nt, synthetic construct
  source 1..1920: mol_type = other RNA
atggcaattttgctgtccttggatcagatcgtggaagcactggtgagatctgagccggccagcttctcgcgcgatgtgctaggaatgccttacgacagtctgaaggccattatttatccacgccccccatacaaaagctttaccataaagaaacgcgacggctccgaccggaccatctttgaacctcggaagcgactgaaagtgatacagcttaaggtgctggactttctgcaaaagagaagcacacctcttaaacctgccgtccatggctttgtcgccaagaggagcatactgactaacgctcaagtccattgctccccaaagaatcaccacatcttcaatattgacctggaagacttcttcccctcaattaccttttacagggttcgaggcgtgctcctgcaccacccgtttaagttctcccacgaagtcgcaaccgtgatcgcgcacatctgcactttagataaaaccttacctcagggggctccgacatcaccctttctgagtaacctagtttgtcgtaccttggatcgcgatctgaccgagctggcccggagatgcttggctagatattcccggtacgctgacgacatcacattttctttccgaacccggaaaacaattaaactccccgcagccatctgtagtgttgattcggatggtgataccgtgatcggtacggagctacatgatataattgtgaatcagcaccacttcaaaattaattccgctaagacccggctctgcgaccgcaaccgaaggatggaggtgactggccttacaattaatcagttccccaacgtccccagggtgttcatcgacagaatccgcggcgctctcattgcttgggagtctcatggctatgcagccgcgaacaaggtgtggaacgaaagggttactgccgctcgttccggcgcctatgagaagaagccatggaagcgccagacccggcgaggtcaagtgcctgatctcaaaaacgttctctggggcaagctgttatacttgagaatggtaagaggcaaggacgaccttatctatacacggctggcggagagatataatagcgctgtgttaataacagcagccactggaactttcaccgccccaaaactgcccgtagagcctgtagtgagggataaggaaacagccagggacgcctgtttcgtcgtggagtggatgggggattacgatgagcctggggttgggactgaggtgcccatctctcaggggacagcatttgtctaccgggaactcaatttgctcgtaacttgcaatcatgtgctggagtggcagaacggcgaggaagggaaatttctggctcagatcgactatgaaagcccctttctcagcgataaggcccttaagcttatccagcctggaacaaaaaaaagctgggatgctaagattctgtaccgtaacgagcaaatggactttgctctgctcgcgttcgaagaccccccacagcataggtacttttctgcaatggacaatcctattgaaccgggcgccaaggggttcctgatcggttacccagcctggaaacagtggaacttggctgacgttaactcacagacggtcctgaaccgtacttcaccccacgcggggatgaatagtttcaccataaccggggcgggctctatcaggcccggaaattctggaggacccttcacggacgaccgcttcagagtagccggaatggcccaaaggggagcatatatgggtgatggacatgacgaaaacctgtgtatcgagattatcgatgagctcattgccgcctacaaggccagcctagtcgctcccgccgtgcttgttcccgctgcatcagccgcagcccctgctagtccagctacggcagcaccgtccgccaaacctactgcgccaccaccagcaccaacaccacctcctccagtcatgccctga

SEQ ID NO: 7705 - RNA, 1995 nt, synthetic construct
  source 1..1995: mol_type = other RNA
atggccatcgtagccagcatagacgaaattatcgagagcttagtgcgtaacaatcccgcctggttcagtcggagaatcttgggcatcccctactccacactgaaggaaattgtctatccacgtccaccctacaagcgctttaccatcaagaaacgagatggcaccgatcgggtcatcttcgaacccagaaaccggctgaaaatcatccagcagcgcactctcaaatttctgcttgaccgcagtggccctttgaaacccgcagtccatggttttgtgtctaagagaagcatactcacaaacgcgcaggtacattgttctcctaaggtgcatcacgtgtttaacattgatctagaagacttcttcccgaacataagtttttaccgggttcggggtgtcttggagaagcacccgtttaattgttcccaccaggtagccaccgtgatagcccacatttgtactctcgacaaagtgctaccgcagggtgcccctacgagcccactattgtcgaacttagtgtgcagatcgttggacagggacttaaccgacctcgcacggcggagctttgccaggtactcccgatatgcagatgatatcactttctccttcccagtacgcaaaaccagtaggctgcctgccgcgatatgtcacgttgatgaggatggcgatcttctcatcgggaccgaactgcatggcgtcatcaccaaacacaattttaaaatcaaccccgcaaagacaaggctgagagatcggagccgaaggatggaggtgaccggccttacaattaatcgcttccccaatgtccctcgtcggttcattgacagaatcaggggtgctttgcacgcgtgggagaagtacggctacgatgctgcagagaaggcctggtctgagcgcgtggaaaaagccacaacgggaccttatgagaagaagccctggaaacgtcaaatgaggcgcgggagattacctaaactgaaaaacattctgtgggggaaactactgtatctgagaatggttaggggaaaggacgacctcatctatacccgcctggctgagagatacaatgatgctgttctggcagctcacgcagccggaccattcactgcccctcgattgccggtccaaccgctggtcagggacaaggaaacagcgcgagacgcttgcttcgtggtggagtggcttggggactaccaaagtgctgccggcgtgacggatgatataccaatggggcagggaaccgccttcgtgtaccgcgaactgaatctcctcattacctgcgatcatgtttttgaaggcaaggccaatgtcgggcacttcgaggtggagatggactacgaggacgttgagctggtgaacaagactctcaatctggttaaacctgatacacaccagaagtggccagcgaagatcctttaccggaatgcccagatggatctggccttacttgccttcgaccacccccctcagcataggtacttttctgcaatggataacccaatagagagcggagcccaagggattctgattggatatccagcttggaaacaatggaacctgcctgattttaacgaccagaaggtgctgaacagaacaaccccccatgctggtatgaattcatttacaatctccggggccggatccattagacccgggaattcaggcgggcccttcactgacggcaggtttcgcgtcgctggtatggctcagcggggagcttatatgggcgacggccatgacgagtgcctgtgcttcgaaatcattgatgacctcatcgacaagtatcgagccagcctcgttccccccgcaccagtaccagctccaactcccgccgtgggagctgctgctggacttgctgcagcaatgtccgcagcgccgccagcacctattcctattcctgccgccgtggcctcttatacggaagccccctcagtctccgcgtctgcaatcggctcagtggcaactcccgtgcagccacctccatcagacgaacctctgatgtga

SEQ ID NO: 7706 - RNA, 1983 nt, synthetic construct
  source 1..1983: mol_type = other RNA
atggcaattctggcatcactggatcagataatcgaaggactcgtaagaaaccataccgcttggttcagcagccggattcttggaatcccatattcaactctgaagggcataatttaccctagacccccttataagaggtttacgattaaaaagcgcgatggtaccgacagggttatctttgagcccaggaaccggcttaaaatcatccaggagagaacactgaaattcctccaggagagatgtgggccatttaagcctgccgtgcatggcttcgtcagtaagagatcaatcctcaccaatgcgcaggttcactgtagtcagaagatccaccacgtgtttaatatcgatctagaggacttcttcccctccataagcttctacagagtacggggcgttcttgagaagcatccctttaactgcagccaccaggtggctactgtgattgcacacatctgcactctggacaaaatgttgccacaaggggctccgacttctcccttcctatccaatttagtatgtcgctcgatggatagggatttaactgacctcgccagaaaatccctggcccgctacagccgatatgcagacgacattacattctcattcccggtgaggaagacctcaaggctgccagcatctatctgtcacgtggatgaagacggagagctgctgatcgggaccgaattacacgacatcgtaaccaaacactcattcaagattaacgctgctaaaacgcgcttgtccgatcggacacgtagaatggaagtgacaggactgaccatcaaccggttcccaaatgtcccccgggtcttcatagatcgtattcgaggtgcgttgcatgcgtgggagaagtatggatatgacgcagcggaaaaggcctggtctaagcgcgttgttaaagcagctctgatgggggccccctacgagaaaaagccctggaaacgacaggtacgccgcggacgcatgcctaagctgaaaaatgtgctgtgggggaaactgctctaccttaagatggtacgcggcaaggacgacctgatatatacgcggctggccgagcggtacaatgaagctgttctccgggcacaggctgccggaccatttactgccccgaggttgccagtgcagccagtggtgagggacaaagagacagccctcgaagcctgctttgtggtggaatggttgggagattaccagtccaccgctggagtcaccgatgacatcttaatgggtcaagggaccgcctttgtttatagggagttgaacctccttgtcacctgtcaccatgtgctggagggcaaagcgaacgtggggcattttcaggttgagatggattatgaggatgccgagctcgtgaacaagacacttaacttagtcaagccggacacaaaacaaaagtggcctgcaaagatcctgtacaggaatgcccaaatggatctggccctgcttgcctttgactaccctccccagcatagatatttttccgcaatggacaatcctattgaacccggcgcacagggcgtgctgatcggttacccagcatggaagcagtggaacctccctgatttcaatgaccagaaagtgctaaaccgtacgacacccaacgtcggtatggattctttcactattagcggggccggttccatccgaccgggcaattctggcgggccctacacagacgatcgattcagagtggccggcatggcacaacgtggggcgtacatgggcgatggccacgacgaatgcctgtgctttgaaattattgacgacttgatagctgagtatcgggctagtctcgctcctgctcccgtcccagccgtcagtactgccgcaacaagcgccactgtgactgccggaaccaccccagctgctgtcagtgcccctgctgcagctgccatgtcggcttctgccgccattgtccctagctccgcgatgagctctctgggcaccctagtgcaaccacctccccgagccgacgatacatga

SEQ ID NO: 7707 - RNA, 1932 nt, synthetic construct
  source 1..1932: mol_type = other RNA
atgaggactcaccttagcatagaggccattctggaagaactggcgagacagaaggtcttttggttttccacccatgtgctgggcatcgcctacagtgagctgaaggctatcatttatccgcagcccccctataagcatttcactatcaagaagaggaatggtacagacagggttattctggagccccgcaagcgcctcaaaatcattcaggagaaagtgctcgcttacctgcaaaatcgcgccggctcgattaaacctgctgttcatggattcgtgcggaagagaagtatcctgacaaatgcccaggcacactgcagcccaaaaaaccaccatgtgttcaacatcgaccttgaagacttctttccatccataaccttctacagagtgcgtggagtattggagaaacaacctttcaacttttcccatgaggtggccactgtgatcgctcacatctgtacactcgataaaaagctccctcaaggggcccccacatctccattcctttccaatatggtgtgtcgcaccatggatcgagacttggctgacttggcccggcgaaaccttgctcgctataccaggtacgccgatgacataaccttttcatttccagtcagaaaaactagcagactgcccgccgcaatttgtcgggtggacgacgacggcgacgtcctaatcggcaccgagctgcatgacctcattgcgaacaagcaccacttcaaagtaaacagcgctaaaactcgactctctgaccggacccggcggatggaagttacagggctcaccatcaaccgctttccgaatgttccccgcattttcattgatagagtccgcggggccttacacgcgtgggagaagtacgactatgccgccgcatcaaaagtgtggtccgacagggtcgtagccgcttccacaggcccttacgaaaagaagccttggaagcgacagacaaggtcagggaaagtgcccgaactaaagaacgtcttatgggggaagctgctgtacgtgaggatggtccgggggaaggatgacttaatttacacccggctggcagagcggtataacgcagccgtgttgaagacccgtgccgcaggaccctttgttgcacccaggttgccggtggagcccgtggttagagataaaactactgccagagaggcatgctttgtggtcgaatggtggggcgattaccagtcagcacccggacataccgatgatattcccatgggacaaggtacggccttcgtttatcgggaactgaatctgctcgtgacttgcaatcatgtattcgagggagtcgccaccgtgaataagcacagtttcaacactgattttgacgcccccgagatggtcaataagacactgaccctggtgcagccatcgactaaacagtcctggcccgctaagattctctatcgcaatcctcagatggactttgccctactggcattcgaagacccaccttctcacagatatttctctgcaatggattgtgccatcgagtcaggagcgcaaggcatccttatcggctttcctgcctatcagcagtggaacctgccggattttaacgaacagaaagtgcttaacaggacgctgccgaacgcgggtatgatcagttttacactgtctaattccggcagtgtcagaccaggtaatagcggcgggccattcaccgacgatcgattccgagtggcaggcatggctcagcgtggagcttacatggggacaggacacgatgagtgcctctgcatggaggtaatcgacgcccttataagcgaatacaaagctacgttagctagctctgcccctgtaacgccagcgtctgctttggatgcagctccaatagtggctcctagcggcgccgttatagctcctcgtacagctgccccagcacctgcagatccagaaggtcctaggcccccagccgatgcgtga

SEQ ID NO: 7708 - RNA, 1953 nt, synthetic construct
  source 1..1953: mol_type = other RNA
atggcctccattccaaacttcgacgctatcactgagagcgccgtgagaagcaacataggcttcttcagtagacgcgttctgggcatctcatacgatcggctcaaagccatcatttacccccgggctccctaccgctcttttattatcaagaagcgggatggaactgctaggttgattcacgaaccccgcaagcgtctgaaaattctgcaggaaaaggtgcttgcatttctggacgagagatccggccccgtcaagccaagtgttcacggtttcgttaggaaacgaagcattctcaccaatgctagagtgcattgtagtcccaaaacccagcacctccttaatatcgacttagaggacttttttcctagcatcacgttttacagagtgagaggggttctgagaaaacacccattcaatttctctcatgaggtggccacagtgatagcccatctgtgcacgcttgacaggactctgcctcagggagcccccacaagcccttttttctcaaacctgatatgccggtcgatggaccgcgatctgaccgaactcgcccgccattccctagcgcgatatacacgttatgcggacgacatcaccttctctttccacgtgcgaaacgcagccaggctgccagcagccatttgtagtgtggatgctgagggcgccgtccagatcggccaagagcttcatgacgtgttagtaaacaaacaccacttcaacttgaactctagcaagactcgtctgtccgatcgcagtcgccggctggaagtaacaggattaacaatcaacaggtttcccaacgtgcccagaattttcattgatagaatcaggggcgcccttaatgcgtgggagaaacatgggtacgatgccgctgagaagacttggcaggcaagggtggtggcacagtcaaatggggcgtatgaaaagaagccttggaagcggcagactcgtagcggaaaagtccccgagcttaaaaacgtcctctggggtaaactcttgtacttaagaatggtacgagggaaggacgatctcatatacaccaaactagccgaaagatacaatgccgcagtgggtgcggcacaagcaaccggtgtattccacgcaccaaagctgcctgtgcagccggtggtcagggacaaagttaccgctcaggaggcatgctttgtcgtcgaatggtatggcgattataacgaacccggaatcggcgccgaaatgccctatgtacaggggacagcattcgtttatcgggagcttaatgtcctgattacctgcaatcacgccctggtctgggagaatgaagaagggaagtttcctgccgtgattgattacgagtccgcccatttgagcggcaaagttttgagcctggtgcgacccggcacaaaagagaagtggccggccaaggtaatctacaggaataagccaatggactttgccctcctagcttttgacggcgctccgccactccaccggtatttctccgctatggacaaccccatcgaacccggggcccaaggattcctcattggataccccgcgtggaagcggtggaacctgcctgatatcaatcagcagaccgtcctgaaccgcacttcccctcacataggcatgaattcttttaccgtgacaggggctggatcaatccgcccaggcaattcaggtggtccctttaccgacgacaggttcagggtggccgggatggctcaacgaggagcacacatgggcgtgggacatgatgagaacctgtgtatcgagataatcgacgatctgattgccaagtatcgggcgtcgatggtgcctccacctccagctgctccagcaccagccgatccagctgctagtgtttctgctccggtgttgggggtcccaccacctgcaccttctgcacctgccgcccctgcttcctcacagaatgctgcaccggttgccttgccgcctccccaaacggatacttga

SEQ ID NO: 7709 - RNA, 1908 nt, synthetic construct
  source 1..1908: mol_type = other RNA
atggccattgtaaaaatgaacgagatgcacgaagccttaagtaggaacttcgtgacttggttttcgaataatgctcttgggattccatactccagtttaaagggaatcatctaccccagacctccctataagcagttcgtgataaaaaagagggacgggtccgccagggtgattgcggaaccacgcaatagactgaaagtgatccaacagaaggtgctgacgttcctaactgaacgcgccggacccttcaagccagtggtgcatggttttgttcccaagaggtccattttgactaatgcccagatccactgtacccctaaaaatcaccatgtcctcaacattgacctgaaggactttttcccatctatcaccttctttagagtccggggcgtgctgaggaaacatccgtttaatttttcccatgaggtcgcgactgtcatcgcccacatctgcaccttggacggtacacttccacagggcgcgccgaccagcccatttctgagcaatttggtgtgtcgctctatggatcgggatctgacagacctggctaggcgtaatctggctcggtacagcagatacgcagatgatataacgttctcctttcctgtgcgcaaaaccagtcgacttcccgcagctgtgtgtattgttgacgacgacggacacctccaagtcggcgctgaactacaggacctcataaccaataagcaccatttcacaataaaccccgcaaagtctcgactcagagatcgcggacggcggatggaggtcacaggtctgaccatcaatcaatttcccaatgtaccccgtgtctttattgatcgcatccgcggagcactgcatgcatgggaaaagtatggatacgaggcagcagataagcagtggaacgacctcgtcaagaacgctgtgactggggcattcgagaagaaaccttggaagcgacagacccgaagaggcaaaacccctgaactgaagaatgtcctttggggaaagctactttatctccggatggttcgaggcaaagatgacatgatctatacccgccttgccgaacggtttaacaacgcagtccttgcaactcacgtggccgggcctttcagcgctccaaaactgcccgttcagccggtagttcgggatatcactacagcccgtgatgcgtgctttgtggtggagtgggttggggagttccattctactcctggcacgtgtgatgacgtgatgtgtaaacagggcacagccttcgtatatagggagctgaacctactggttacttgcaatcacctgttcgaacacattgctaccatcaacaaacatgagtttccaacagattacgaggcccctgaaatattcaacaaaactctcaacctggtacacccgggcactaagcagcattggcccgccaagatattatatagaaacgcacctatggacctcgccttactcgcctttgagggtccagtgccacctcaccgttacttccccgctattgactctccaatcgagccgggcaagcagggcattctgatcgggtaccccgcctggaaacaatggaatctccctgattttaacgatcagagggtgctgaatcggaccagtcctcacgcgggtatgaacagcttcaccatcaccggcgcgggatcaattagacccgggaactcaggggggcccttcacagatgaccacttcagggtggccggcatggctcaaagaggtgcatatatgggcgacggacatgacgaatgcctgtgcatccagattattgacgacttgatcttgaaatacaaggccagcttgacgctcctgacagtacccgctttggctgctgtttcccctgatgaggccgccgtggctgccacatcaacaccagccctgacatcacctgccccaacgaccccagctgtgaccgtctga

SEQ ID NO: 7710 - RNA, 1785 nt, synthetic construct
  source 1..1785: mol_type = other RNA
atgctgcggaatcatgtcacttggttcagccggaacgccctgggggtcgactacgaaaagctcaagcggatgatctatccgcgtccgaagtacaagcatttcactattacaaagcgcaatggttcaccacgcgtaatcagcgaacctagaaagagactcaagatcatacaagagcgagtcctggccttcctcgagccacgaagtggcccactgaagcccgcagtgcatgggtttgtgccaaagaggtcaattttaacaaatgcgagggtgcactgcagccccaagaaccaccacattttgaacctcgatctacaggactttttcccctccatcaccttttatcgggtgcgtggggttcttcggaagcatccttttaacttgtcacatcacgtcgccaccgtaattgctcatatctgcactctcgatggcacactcccacagggtgcacccacatctcccttcctgtctaatctggtgtgcaggtctatggacagagatcttactgatctggcacgcagaaaccttgcaaggtatacaagatacgctgatgacctgaccttttccttcccattgaaaaaaacctccaatctacctgctgcggtctgtgttgtcgacgaagatggagggatcaccttaggcgcagagttacacgacctgatcaccaacaagcaccatttcgccattaaccccgctaaaacccgattgagtgatcggggccgcaggatggaagtgactggccttacgattaacaaattccctaacgtgccacgcatatttattgatcggatcaggggcgcactgaatgcctgggaacggaatggatatgacgccgccgaaaaaggatgggaagagcgcatcggtaaggctgctacagggccatacgagaaaaaaccctggaaaagacagactagaggtggcgcggcccctaaacttaaaaatgtgctctggggaaagctgctatacctgaaaatgatcagaggaaacgatgacttgatttatacgaggctcgccgaacgctataacgcggccatcctgaaagaaatggcagccggccctttcagcgcccccaaactgcctgttcagcctgtggtgcgagattacaagactgcacgagaggccgtttttgtggtggagtggctggccgattaccactcatcccctggccaccacgagtgtcccattgaggcacagggaacagcctttgcttaccgtgagttaaatttgctcgtcacctgtgatcacgtgctggtaggcaaggccgagttcgccgggatggaagtgccagctgactttgacgcgcctgaagtggtgaacaagatgcttactgtggtgcgccccgaaacccaagagagctgggcagcacgcgtggtttacaggaacaagcagttcgatttcgccatccttcagttcgaggagcagcctccccaccatcggttcttctccgcaatggacacgccgattgcccctcatgccgacggagtactgataggctttccggcttaccaaaactggaacctcccagacattaatccccaaaaagtcctgaataggaccttgccgaatgccggtatggtttcgtttacaatagccaataccggaagcatcaggcccgggaattctggcgggccattcacagatgacagactgcgtgtagccggaatggcacagagaggagcgtatatgggtgtcgggcacgacgagtgtctgtgctttgaggtcatggacaaatttataggcgagtggaaggctaagagtgctgctgctgctcccccagctgttccttga

SEQ ID NO: 7711 - RNA, 1911 nt, synthetic construct
  source 1..1911: mol_type = other RNA
atggtagcaatacccagtgcagacgcactgtttgagtccttagcgaggaacaacgtgaattggttctcacaccacatactggggattagctatgcccacctgaagcgcatgatctatcctcgcccaccttataaacattttagcatcaccaagcgcaatggatcccccagagtgatcagtgaacctcgccgtaggcttaaggtcgtccaggagcgagtcctggcgttcttagaggcccgcaggggtcctctcaaaccagccgttcatggctttgtgtccaaacggtccatagtgacgaatgctagagcacactgtagcccaaaaaaccaccatatcctcaacctggatttacaggacttttttccatctatcacattttaccgggtccggggcgtgttacgaaagcaccccttcaacttctcacatcacgtcgccacggtgatcgcccatatttgtaccctcgatgggacactccctcaaggagctccaacatctccactgctgtcgaacctcgtgtgcagatccatggatagggatctgaccgaccttgctagacggaacctggccagatacactaggtatgccgatgatatcactttcagtttccccgtgaagaaaacttctagactgcccgcagctatatgcgtggtggacgacgatggcggtgtcaccattggggccgagcttcatgatctaatcgctacaaagcatcacttcactattaatgcagcgaaaacacggttgagcgataggttccggcggatggaggtgaccggcctgaccatcaataagtttcccaatgtgcggcggatcttcatcgaccgcattcgtggggctcttaatgcctgggaacgtaatgattatgccgctgccgagaaggggtggcaagaccgagtacagaaggcctccgctggagcttacgaaaagaaaccctggaaacgacagacgcgcggctcagcagtgcctaaactgaagaatgtactgtgggggaagctcctttatctcagaatggtgaggggaaaagacgatttgatttacacacgtttggctgaaagatacaatgccgccgtcgacaaagagatggctgccggacccttcgcagccccaaagttgccggtagagccggtagttcgcgaccacgacacggccgaggaggctgtttttgtcctcgaatggtttggcgactaccagtctcaacccggtcataccgacgatatggtgatggcccaggggacagccttcgtgtacggcgaactcaatctgcttgtgacctgttcacacgtgttcgaggcagaagcaaaggtgggcaagatgatggttcccactgatttccaggcggtcgaaatggcgaacaaaactctgcagctggttagacctgggactcagcaagcctggcctgcgcatatcctgtacaggaacaagcagatggactttgcgttggtggcgttcgacgatccagttccccagcaccgctactttagcgtcatggacaatccgatccaggcccgagccgatggaatcctgatcggattccccgcctatcagaactggaacctgcccgattttaacgaccagaaggtgctaaacaggacaataccgaatgccgggatgaacagttttaccattgccaatgccggttctattaggcccggaaacagcggaggtccttttaccgatgaccggttccgagttgctggcgtagcccaaagaggcgcttacatgggcactggccacgacgagtgcctctgcttcgaaattgccgacgctctaattgcagcatggaaagctaccttggtgccacctgcaccaccaccagcacctgcagctgtcgttcccccacctgcacctcctccgattgctccagcaggtcacgccccgacagctcctccaacacccccaaccactccctga

SEQ ID NO: 7712 - RNA, 1830 nt, synthetic construct
  source 1..1830: mol_type = other RNA
atggtagctatcactagcgcaatggcgctgaacgaaagtatgctcagaacttcagtcacctggttctcttctcacgtattaggcgtgccatatagccagctcatgagaatgatatatcctcgacccccttataaacggtttactatcacaaagcgaaatggctctccacgagccattgccgaaccccggcagaggctcagaatagttcaggagcaagtgctggcatttctaaaagagcggagtggaacggtgaggcccgctgttcatgggtttgtcgttgaccgctcaatcgtcacaaacgccaaggtgcattgtctccccaaaacacagcacatcttgaacctggacctacaggacttcttccccagcatcacattttatagagtcaggggggtgctgagaaagcaccccttcaatttttctcaccacgtcgccaccgtggtggcccatatatgtacattggacggcaagctgccacagggagcccctactagtccgtttctttctaacctcatctgcaggagtatggatcgcgaccttaccgagctggcccgacgcaatagagctacctacactcggtatgcagacgatattacgttctcttttaatgtgcggactgcatccagattgcctgtagccatttgcgtcgtcgacgacgatgggcatgtgacactggggaccgagttacatgacctgattactgccaaacaccatttcgcgatcaacgccgccaaaacaaggttatcggacaggcatcgacgtatggaagttaccggtctgacaataaacaagtttcccaatgtgagaaggatctttattgatcgtattcggggagcactgaacgcctgggaacgcaacggatacgaggcagccgaacaaggttggcaggatcgggtcatcatcgggggcaaggtgccttacgaaaaggtgctgtggaaaaggcagacaagatcgcgagttgtgccaaagctgaagaacgtgctctggggtaagctgctgtacctacggatggtccgtggcaaagatgatgtgctctataccagacttgcaggtcgtttcaacgctcttgtggacttcgaacaatccttcggatccttcgctgcacccaaacttccaatcgagccagtagtgcgggatcatgatacggctcaagagggcgttttcgtggtggagtgggccggcgattaccactcaagccctggccgccacgaggacacactgcaagcccagggcaccgcctttgcttatcgcgaattaaacctcctggtaacctgcgatcacgtgtttgaagtcgatgctaccgtcggaagccttaaggcaccgactgactacgaggcccccgagattgttaataagtccttgcgcctcgttaggccaggaacgaaagactcctggcctgccagaattgtctaccgcaatcggcagttcgacttcgcgatcttgcagttcgagggccctgtgcctcctcacagatacttctctgctatggataccccgattaaaccccgggccgatggactgttgatcgggtttccagcataccagaattggaatctgcctgaccagaacgagcagaaggtgctcaataggacagagcccaatcggtccatgttcagctttaccatctccggtgcgggctccatacgcccagggaacagtggggggccgtttactgacgaccgttttcgcgtagctggcatggctcagaggggagcgtacatgggcgacggtcacgatgagtgtctgtgcttcgaagtgatggatactttcgttaccgcatggaggagcagcacaaagtcaacgccaaccacctcagaaattcccgcttga

SEQ ID NO: 7713 - RNA, 1806 nt, synthetic construct
  source 1..1806: mol_type = other RNA
atgccaaacccttttttgtttccagctttgaccgactcactgattagaaatgacgtggcacagttctctcgcaggatcctgggcctgccctactctcagcttcagaagcttatctatccccaacctaactatagggtctttactctcacaaagaggaatgggaagctgcgtagcattgcagagccattcgctaacataaaggcgttccagctgctaatcctggagtacctgacaaagaagagtagccccttcaaacctagcgtgcacggattcgttccccacagatccattctgacaaacgccaacgcccactgttcacctagaacacagcatgttctcaacattgacttacaggactttttcccgtccatttcgttttaccggattagaggcgtgttgcagaagaggcctttcaacttttctcacgccgtagcatcagtggttgcccatatctgcacgtttgatgggtcactcagccagggggccccaacctctccctttttctctaatttagtgtgccgatccatggaccgcgacctgcaagacctcgctcgcaggcataaagcagcctacactcggtacgccgacgatataaccttttcctttactacgcgaaattctctcagcctgccaaagaatatctgtatggaggcacctgatgggcgcgttgtgataggagccgaactaaatgaccttattaccgtgaaacatagtttcgctatcaacgctgacaaaactagactgtccaatcgagctcggaggatggaagtgacgggactgaccataaacgagaacccaaacgtgcggcgaattttcatcgataggatacgtggcgcactcagagcctgggaaacacatggatataacgccgctcaatctgtgtggcaggccaaagtcgcaaagtctatcctggctccccacgagaataaaatttggaagcggcagaccagaactggctccaccccacaattgaggaactcaatatggggtaaactactgtaccttaagatggtgcggggcggaaccgatcccctctacaaccacctggcggagaggtataatgcggttgtggaaatcgaaaaatcactcggtacctttgtggcaccacggctgcctgtcgatcccgtcgtgagagatgaacgcggggcccgaaaagcagtcttcgtagtggagtggtttggggacttcgagctatccgctactgccgccgacgttgtcagtggacaaggaacagcttttgcttaccgcgagtccaacttgctgattacatgcgaccacttattcgaagcaacagctaccattaaagataagagttaccccgccgatattaatgcgcctgagatcaagaatctcgctttgttcgcaatcctgcctgacattcctaaaaaaacttggcccgtacggatcctgtatagaaatgcctacgatgatattgccatcctttgctttgaaggcgagccgccgccacacaagtatttcaacccgatgagcgctcccatcaccagaaatactaacgggatcctgatgggctatcctgcgtataagcagtggaatctccccgacttcaataggcagtccgtcttgaaccggttcttaccagcagccggtatgagcagttttaccatcacgggtgccggcagcatacgtcccggtaatagcggcgggccattcactgatcttgagtaccgcgtagctggtatggcccagcgcggaagttatgagggccgtggccacgacgcgtgtctttgttttgaaatcatcgataagcatctgcagaagtggaaagcctcgacaacactcaactga

SEQ ID NO: 7714 - RNA, 1872 nt, synthetic construct
  source 1..1872: mol_type = other RNA
atgggccttactatcgagcaaattaccaagatactcatacgcagccgcgtgtcggacttttgtgacgaaattttgggagtgccctactccgagatcaagaaactgctgtaccctagggcaccctatctgttcttcgagttaaagaaaaggagtggcggagtgcggcgcattgcgaagccaacaaaacgtctgaaagagatccagcttcgcgtcctggaattcctggaaaagaacagagggccttataaagcaagtgtccacgggttcatctcaagaaggtccatagtgaccaatgcccggacccattgtagccccaagactcatcagattttgaacttggatctcgaggacttctttccatctatcactttttaccgcgtaagaggtgcgcttcagtcccacccctatcactgttcacacgctgtggctacggtgatagcgcaggtatgtacagtagacggagttctgccgcagggagcccctacaagccctttcctctcgaatttgatttgtcgctcactggatgctgacctcaacaacctagcccggagaaaccgagctaaatacacccggtacgctgatgacattacgttcagttttgccactcggtccagtactgggctccctgccgccatctgcagcgtaggtgcagatggcagggtcaccctcggcgctgagctgaatgacctgattaccacgaagcacaacttcaagatcaaggaatcaaagaccagagtctctaacagagccacaagaatggaggtgactggcataacaataaacaagcatccgaatgtgccacgaattttcatcgacagagtgagaggggcccttaatgcatggaagaagtacggctatgcagccgccgaatctgcatggcagaagcgtgtgcgggaatccggcaccgttgcctacgaaaaaaagccgtggaaacgacagacaaggctgggagtgccaccattactgaagaacgtgctttggggtaagctactgtacttaaggatggttagggggtccgaggatctgctgtacacccgcctcgccgaacgttataatgcactagtagaatttgaacagagcattggtcccttttcagctccaaaactccccgtcgtgcctgtggtgcgagatcataagacagcaatggacgctaccttcgtggttgagtggtccgccgactatcgtatctctaaagaggatgtggattctatcatcggccagggtaccgctttttcatataggcaacagaacttcctagtgacctgcagccacgtttttgaggggaaagccacagttgggtctatggaggttcccgtcgatatcgacactgcagagctcgagaatttgtctattcacgtcgtgcacccccatctgaaggaacgatggcctgccaaagtcctttataggaaccgccagttcgactttgccatcatgtgcttcgatggagagatcccaccacatcgcttttaccctgctcttgaaagccctatcgaagtccgggatgagggtatgctgattggctttccggcttataagaattggaacctgccagatatgaatgaattggcggttctgaatagatccgagccccaccgaggaatgaggagtttcaccattactggcgccggcacgattcggcccggcaatagtgggggaccttttacagacatgaggtttcgggtcgcgggaatggctcaaagaggagcttacctggggaacggccatgacgaatgcttgtgcttcgaggtcatggacgatttaatcgccaaatggcgggagaaaatcgcagctgagtgcgcgaacgccactacaaaagccgcaatggccgagaataaggtggacgcaagcgggagcctcgaacaactgccctga

SEQ ID NO: 7715 - RNA, 2022 nt, synthetic construct
  source 1..2022: mol_type = other RNA
atggccgctgctgtcatggagaaggatggtaggggccgccatcctgatttgagcgaggcccgcattcagtctctggaggaggttgccgagaggatcacccggaccgacgtgcctatcttttgccggagtgtgctgggaatcgaataccgacagctcgccccaataatatacccaacgcccccctacaaacatttcgctatcaccaagcgcgatggctccccccggtatattgccgagcctaggaagcgccttaaaattctccagtacaagcttctggagtttctgactgaacgaatgacacccttgaagcccgctgtgcacgggtttgtacctaataagtcaatagtgaccaacgcgctggcacacgctcacagacgaaaccatttcatccttaacctggatctcgacgacttcttccccacaatcagctttaagagggtaaggggcgtgatgatgaacagaccattcaacttctcttttgaggtggccaccgtgattgcacagatgtgctgtctgaatctgaagttaccacaaggcgctcctacaagccccttcctgtctaatctggtgtgtagaactatggacagagatctcacggacttagccaggagaaatagggcgacttatactaggtacgccgatgatatcacctttagctttattgtccggagtcgaaaatcactcccggcggccatttgtaccgccgacgacgaaggccatttggctctcggggcagagctgcaggagcttatcacaacaaaacaccacttcactataaatgaagcaaaaacccggctatccgacagaaaccggagaatggaagtcaccgggctgaccattaacaagttcccgaatgtcagaaggaagtttatcgatagaatccgcggagctctaaacgcctgggaacgcaatgactatgcaaaagtccagaagggctgggaggatagaattgcagccgccgaaaagctacacgttgatctcaagccgtggaaaagacaataccgatcaggccgtctggctcagcttaaaaatgtgctctggggtcaactgctatatgtgcgtatggtgcgcggcaaggacgacctcctgtacacccgcctcgccgaacgatacaacgcagtagtagcgaaagagcgcgccgccggaccctttgcagcgaaagttctgcccgtggaacccgttgtgagagacaaaactaccctgcgggatgcctgcttcgtcgtggagtggacgggggattacgacgagccaggtggtgggtccgaaataccctattcgcagggcactgcgtttgtttaccgtgagctgaaccttcttgtcacatgcaatcatgtgctggaatgggagaacgaagacgcgtctaaattcccagccatgattgactatgagagcccatatttgacaggcaagagccttaatctcgtccagccagggaccaggttatcctggcctgccaagatactgtaccggaacaagccaatggatttcgcaatcttggcatttgaggaccccccgccccacaggtattttagtgcgatggacaatcccattcagcccggcgctcatgggtacttggttggatatcctgcctggaaaaggtggaacttgcccgacgtgaacgctcagacagtgttgaatcgtacttccccacaccacggaatggatagcttcacaatcactggagccgggtctattcgccccggcaattccgggggccctttcacagacgatcggctgcgggtggcaggtatggctcaacggggagcccatatgggaagtaatcacgacgaatcgctctgtctggagatcatcaacacactgattgatacctataaggccaccttagctcctcccgcccctgtaggtgctgccgatgttgtggctctgccacctgctccggcaccaatcgcagtcccttcagctcaagtcgcacctgttccaactgccccagccgaagggaccgctgctcctatcgcacctcctacaggcgcaggagccccagacggattacagccgacgtga

SEQ ID NO: 7716 - RNA, 1839 nt, synthetic construct
  source 1..1839: mol_type = other RNA
atggaagttaatatcttcgacctcgaagagataggcgagaggctgacgagaacagacgtccccatgtttagcagaagcgtgttgggcatcgaatactctaagttagcttcgatcatatatcctaccccaccatacaaacatttcacgataaagaagagagacgggtcatctcgccatctggctgaacctcgccgaaggctgaaggatctgcaatataaggtgttggggttcttgaccgaacgtatgaccgcactgaaacccgctgtgcacggattcgtgcctaaccggagcatcgtgagtaatgcgaacgcccacgcccataggaagaaccacttcatcctaaatttggatctggaagacttctttccgagcatcaccttctacagagtgaggggagtcctgacctcccggccattcaatttttctcatcaggtggctactgtgattgcgcacatgtgtacgcttcatggcactttgccccaaggtgcccccacatcaccattccttagtaatcttgtgtgtcgcaccatggatagagatctaaccgagcttgctcgccgaaaccgggccacctatactaggtacgccgatgacatcacattcagctttattgttcgggcccggaggggtctgcctagtgcaatctgtacagctgacgatgaaggacacctggccctcggggccgagttacaggagctgattacaaacacgcaccatttttccatcaatgaagccaaaactcgcctatccgaccgacaccgccgtatggaggtgaccggcctcacaataaataaatttccaaacgtgaggcgaaagttcatcgatcgcatcagaggggcactcaatgcctgggaaaggaacggatacgcagcagctcagaaaggttggcaggacagaattgccgctagtgcctctcacgcctatgaggagaggccgtggaagcgccaatatagatcgggcgggactgcagagctcaagaatgtcttatggggtaaactgctctacctccgtatggtccggggcaaagatgacctgatttacacccgcctggccgaacggtataatgctcaggtccagaaggagcaggaggcgaaaccttttaccgcatcactactgccagtagaacccgtagtgagggatcatgcgaccgcactggaggcctgcttcgtggttgaatggttcggggagtactgcagcagagcaggtgtagtggatgacattcccatgggacagggcacagcctttgtctatcgagagttgaatctgttagtcacttgcgaccacgtgtttgaagcctttgctaatgtaaacggacactcatttaagaccgattacgaggcgcaggaggtgatcaataagactcttaaccttattcggccagatacacaacaacggtggcccgcgaagatcctctatcgaaatgcccagctcgatttcgcccttctggcttttgaggatcctgttcccccgcaccgttacttttccccaatggacaaccctatagagcgcagaagcgacggcgtgttgattggctttccggattggaaacagtggaacctcccagacttcaacgaccagaaagttctgaacagaaccgaacctaacaagggaatgatttccttcacaattactggcgccggatccattcggcccgggaattctggcgggcctttcaccgacaacaggctcagggtcgcaggtatggcacagcggggagcacacatgggctctgggcatgacgagtgcctgtgtctggatattatcaacaacctgatcgccaagtacaaagctgccctgactacagttgcttccactcccacgacatatgctgtcgactga

SEQ ID NO: 7717 - RNA, 1986 nt, synthetic construct
  source 1..1986: mol_type = other RNA
atggacatccatagcctggatgacctgggtgagctcctgacccgtaccgacgtggctgtctttagcagatctgttctgggtattgagtactctaagctcgccagtattatctaccccacaccaccgtataagcacttcatcattaagaagcgtgacggctctcctcgctatatcgccgagccccgcaaacgcctgaaggtcctgcagtataaggtccttagctttctaacggagcggatgactccgctcaaacctgctgtacacggattcgtacctcaccggagtattgtgtccaatgcaaaggcacacacgtcacgaaaaaatcacttcgtgttgaacctggacatcgaggatttttttccctcaattacctttttcagagttcgcggcgtgttaactagccgaccttttaattttagccaccaggtggccaccgttattgcccatatgtgtactctcgggggaaaactgccccaaggagcccctacttccccgcttctgagcaatcttgtgtgccgcacgatggacagggatatgaccgacctggcgaggcggaatagagcgacttacaccagatacgcagacgacattaccttttccttctccgttagggcacggcgatcccttccccaggccatttgcgcggcggatgatgaaggtcatgtggcattgggcgcagagctccaggatctgatcacaacaaagcaccatttttcgatcaacaccgccaagactagactctctgaccggcacagacgcatggaagtgaccgggttaaccataaaccagttcccaaacgtgcgaaggaaatatatcgatcggattcgcggtgccctcaacgcttgggaacgaaatgactatgctgccgctcaaaaaggatgggaagcccggatcgccgcttcgactactctactgtacgaacagaaaccttggaaacgacaataccgttccggggggatcgcggagttgaagaatgtgctgtggggaaaattgctctatctgagaatggtgagggggaagtacgatagtatctatacccgcctcgcggagaggtacaacgcccttgtgcagaaggaacaggctgctggtccgttcgccgcacctatactgcccgttgctcccgtggtcagagatcacccgacagccctagaagcctgctttgtggtagagtggctgggcgaatatcactctacaccaggggtttccgatgatatacccatgggccagggaaccgctttcgtgcacagggagttaaatcttctggtgacatgtaaccatgtcttcgaagccgtggctcacgtgaatggccatccatttgagactgactatgaggccgtcgaagtggtaaacaagacgctgaacctgattcggcccgacacccagcagaagtggccagctaagatcttgtaccgcaatgcccagatggattttgcaatccttgcctttgaggaccccgtccccccccatagatacttctcacccatggacaaacctatcgagcggagggctgatggtacgttgattggattccctgattggaaaacatggaacctccccgacttcaacgatcagagggtattaaaccgtactgaaccaaataaaggaatgttcagtttcaccattacaggcgcagggtcaatacggccagggaattccggcggccctttcacagacgacaggctgagggttgcaggcatggctcaaagaggcgcccatatgggctcagggcatgacgagtgcttgtgtctcgacatcatcaacgatctgatatctaagtacaaggcaaccctggcaccacctgcagcacacgccaatgcccctgctgtcagtgcaacaatgcctgcccccgtcgcctctccacctataagactcctggccccactacccctgagcgatccagcacctgaagctccagcgcaagctgccagcccacctacagccccaccattggctgctaacagcgagcccccgcttggagacgtttga

SEQ ID NO: 7718 - RNA, 1977 nt, synthetic construct
  source 1..1977: mol_type = other RNA
atggtgatcccatcactgaacgtgatcttcgaacaactgacgaggaccttcgtgccctcattcagccaggctgctctggggattccatacgctcaacttaaggacataatatatccgtcgccaccctacaagcacttccagattaaaaagcggaacggatctcctaggttcatcgccgaacctaggcaaaggctgaaggtaatgcaggagaaggtgctgactttcctcgaggaacgcatgagccctctcaagcccgccgttcacgggttcgtccccaaacgcagtatcgttacaaacgctcgcgcccactgctctagaaaaacacagttcgtgttgaacttggacctccaggactttttccccaccatcactttttttcgcgtacgaggggtgttacggaatcggccctttaattttagtcacgaagtcgcgacagtaatcgcccacatgtgcactctcaacggaagtctaccgcagggggccccaacctccccatttttgtcaaatctggtctgtcgaacaatggatcgggatctcaccgacctggctcgtagaaacagggccacctatactcgttacgccgatgatatcacgttcagtttcgccgtgagaactgcgtccaggcttcccgcggccatttgcgtggtggatgaagacggccatctgaccctcggggccgagcttcaggacttaattacaggcaaacaccactttacgatcaatccgcccaaaacccgattgagcgaccgggctaggagaatggaggtcacaggtttaacaattaacaagtttcctaacgtgaggaggaagtttatcgaccgtatccgcggcgcattgaacgcgtgggaacgcaatggatatgcaaaagccgaatcaggctggcaggctcgggttgcaaacgcagagagcggtccctacgaaaagaaaccctggaagagacaaactcgcacgggtgcccctcctaagctccagaatgtcctttggggtaagctgctgtacctccggatggttcgcggcaaagacgacctgatctataccaggcttgccgagcgctacaataaagccgttctgaaagagcaagctgcgggcccttttaaagcacctaagctgcccgttgagcccgtggtgcgggacaaagttacagcacaggatgcctgtttcgtggtggactggtacggggattataaggatccaacactgggggaggagatgcctatggcccagggaactgcctttgtgtacagagagctcggtctgctcgtaacctgcaaccacgtctttgagtgggagggtaaggtcgggaaggccgacacggtgatcgactacgagtctccatatctgacttccaagattctacagcttatacaaccgggaaccaaaaaatcctggcccgcaaaaattttgtatcgagacaagcagatggacttcgccctactggcttttgaaggcgatcctccccagcatcgttatttctccgctatggataatccgatcgaaagcggcgcccagggagtcctgattgggtacccagcatggaaacagtggacctggcctgattttaacgatcagaaggtgctgaaccgaacctttccgcatgtcggaatgaatagcttcactatatctggggctggcagcattcggcccggtaattccgggggccccttcacagatgacagattcagagtcgctggcatggcgcagagaggcgcctacatgggaaccggccatgatgagtgtctgtgtcttgaaatattagatggcctcattgccaagtataaggccaccttagttccacctgtgccaccagcacctgccacagtattgggagctccgccaactccagcagcgggatctgccgctctacctctgcctgtgcccgcagcaccagcagctaccgtcaatggagctgccgctccagcagcaagagccccagcacatcccgtgcctgctgctcctatcccccctacactgccatga

SEQ ID NO: 7719 - RNA, 1875 nt, synthetic construct
  source 1..1875: mol_type = other RNA
atgaatctggatgctttcgacgagatgcagaagagaacatctgtgtcttggttctcacacatagtcctgggtactccctactcccagcttaaaacagtggtgtaccccaagccgcactacaaaagcttcgttatcaagaaacagaacggcggacctagggtcatccacgagcctcggaaggagctcaaactcatccagaaaaaaatcctggcctttctgagcgagcgagccggtcccattaagccagccgtgcacggctttgtgcacaaaagaagtatcctcactaacgcattgaaacattgtagcccaaccacacatcacatcttgaatttagacctgaaggatttctttcctagcatcacctttaggagggtcagaggcgccctgcggaagcatcccttcgattgttctcatgaagtggctacactcattgcccacatctgcacgttcaatggtaccctcccacagggcgctcccacaagcccttttctgtctaatatgttgtgccggagaatggaccgggaccttactgatcttgcccgtcggtatcgggcaacctatacccggtacgccgacgacctgaccttttcctttaatgtcaggagtgcagagaggctcccctcggctatttgcatggtggaagatgggaacgtagcaccaggaactgaattgactgaactgataaccaccaagcacggcttcgccatcaacccgacaaagacgcggctgaacgacaggttcgggagaatggaagtaactggattaaccgtaaacaacttcccaaatgtgaggcgcaacttcatagatcgaatccgtggggccttaaacgcttgggaaacatatggctatgctgccgctcagctggaatgggagaagcgcaatgccacttacatagcggccccctatatcacaaagctgtggcgtagacagacccgagccaatttcgtacccaaactgaagaacgtcctgtggggcaagctcttgtttgtgagaatggtgcgtggcaaggaagacgccctctacacccggctagctgagcgctacaataaggcatgtgcagctgagcaagggaccgtgccttttgtctatgaaaaacttcctatcgagccagttgttcgagactacgggtctgcggaggacgcagtgttcgttctggaatggatgggcgactaccacagttcccccggcgtctttgaagatatggtctgctcccagggtacggcattcgcctacagagagctgaacttatttgtgacctgcgatcatctcctatctggagctaaggccaaagttggtactttcgaggtggaggccgattacgatgccaaggaaatggtgaataaaactcttcagcttgtccacccatttacgaaacagagttggcctgccaaagttctttataggaatgcacaactcgacattgccttgattgcttttgacatgccacaaccgcccccacatcgatactttgctgcaatggagaatagcattcgcgtgcgcacatccgggatactaattgggtttcccgcgtataagaattggaacagacctgatttcctggaggagaaggtgctgaacaggacagaacctaataagggaatggcatcattcacaatcactggagccggttccattcgccccggcaacagcggaggaccgtttgtggatgaccgcttccgcgtagctggagttgcccaaaggggggcctatatgggggatggccatgacgagtgtttgtgtttcgaggtcctgaaccagctgatcgacaagtggaaggcgccacaagcgaaatcagtgctgccagagaacaaaattgctgcaaccattgtggctacgtcacctggcgcggtttcgaccgctgcacctcagacatga

SEQ ID NO: 7720 - RNA, 1806 nt, synthetic construct
  source 1..1806: mol_type = other RNA
atgaccacgacattgtccactataagcctgaatgacatactcctaaggcatgacgtccaccatatgagctcaaaaattctgggcgtcccttacagtacactgaaggccctgatctatccactgccaccctataagtcatttgttatcactaagcggaacggttcccctagacttatccaggagccacgccgcgcactaaaagagttacagtacaaggccctggattacttttacgaacagtgcggactcccgaaaccctgtgtccacgggttcaccaaagacaggagcatcgtgagtaatgctaagagccactgctcagatcaaactcagcacctgcttaacctggatctggaggacttcttcccttcgatcaccttttatcgcgtccgaggtgtgctgcagaagaagcctttcgaactgtcccatcaagtcgccacagtgctggcccacctctgtacattcaaaggcgtgttgcctcagggggctcccactagcccccttctcagtaatttgatttgcaggtcgatggaccgcgacttgatgtcccttgcaaagcgccacagagcgacctacactcggtatgccgacgatctgaccttttctttcagtgtgcggaggtccgagtctttgccaagcaacatctgttctttcgatggcgggaatctgaccttggggaacgagctgcaagccataattgctgctcattctttccggattaacgctgagaaaacgcgcctgagtactaggttgcacagactggaggtcactggcataaccatcaatgagtttccaaacgtgcggcgggtgttcattgatcagatcaggggcgcactcaatgcatgggagaagtatgggtataaccttgcccagaaggattgggaacgcaggatcacagacggggtagccagcgcgtacgaaaagcgtccttggaagcggcagataagagccaattcccctcctgatctgaagaacgttctctggggcaagctcttatacgtgcgaatggtaaggggcaaggatgatgtgatctacacaagactggctgagcggtacaacgccatctgtgaaactgaagatgcaaaagggccatttgccttcagtcgtctaccggtagagttaatcgttagaaatgcccaggatgccgaacgcgccgtttttgtggtagagtggagcggagattaccagcccgagggcaacacagcaccactagacgtcgtgctgagccagggtaccgcttttgcctacaaagacgtgggactcgtgacctgtgaccacgtcctgagctattctggaaagatcggaggtgtgacctacacaaccgacgttcaatcatctgacgtaattaacaagacactcacagtgagaaatccagttaccggcgctagctggcgtgtcaaagtggttcacagagacgctacgagggaccttgctattctcgtcttcgatgaagcgcccccggcgcatcgacatttttcctccatggtggctcccatgaaccaaggtatgaggggaattttaatgggctttcctaactggagtcccgggcgccgtgtcaatcagacgaaagccgatgtgttatcatgctatgctcgatctgcccttaaacgattcgaaatctccactaatattcggcagggcaactcaggaggcccctttgtggacgagtcttatagagtggcaggagtggcccagcagggtgcaagacaagatgccggaaatgacgaatgcctctgcgttacagacctggacgcttggattgcacagtggaaagcatctgcaatggggaccatggccgcgtcctcatga

SEQ ID NO: 7721 - RNA, 1809 nt, synthetic construct
  source 1..1809: mol_type = other RNA
atgaacgacattctgctgcggaatgatgtgcattatatgtcttctaaagtgttgggcgtgccatatagcactttacaggccctgatctatccccgcccaccttacaagagcttcactattaacaagcgcaatggctctccgagattgatccaggagcctagacgggcgcttaaggctctgcagtataaggtgctggattacctctatgaacactctggtctacccaaaccttgcgttcacggctttacaaagaacagatccatagttagcaatgcaaaagcccactgtaatcggcaaacgcagcatcttctgaatatcgatctggaagacttcttccccaccatttcattctaccgcgtgagaggggtgctccagaagaagccttttgagttctcccatcaagtggccactgtgttggctcacctctgtaccttcaatggtattttacctcagggagccccaacatcaccgctcctgagcaacctggtctgcagaagcatggaccgtgatctcatggccctggcaaaacggcatcgcgccacatatacgaggtatgcagacgacatcaccttctccttctctgtgaggcggagtgagtcgctgcccgcaaatatctgttcgttcgacagcggcatccttacactcgggcatgaactgcaggctaccatcgcaactcataattttcgcgtaaacgccgccaaaagtcggctttcaaccaggttgcaccggctagaagttaccgggattaccatcaatgaattcccaaacgtcaagagggaatttattgatcgcataaggggggcgcttcacgcgtgggagaaacacgggtatgacctagcccagcgtgcctgggagaagctggtaagcgacggagctattggcacctacacaaggcgaccttggaagaggcaaacccgtatcggcaaactgccaccgcttaaaaatattctctgggggaagctgctgcacgtccgaatggttagaggcaaagacgacgtgatttacaccagacttgcagagcggtataacgcagtgtgcgaggccgagaacgtgaaaggtccctttgcctactctagactaccggtgggcctgatcgtgcgaaacgcacaggatgccgaacgcgctgtgttcgtagtagagtgggacggtgattaccagcctataggatccgctgcgcccctcgacatggtaagttcccagggcaccgcttttgcatataaggatgtcgggttgatcacatgcgatcatgtgttatcatactccggaatgatagatggcaagagttttacaacggatgtccagagcggcgatgttatcaacaagacatttactgtgcggcacccagctacaggcgagtcttggaaagttaaagtggtccaccgagacgccgccagagatttagcaatcttggagttcgatgacgagatcccttcctacaggtacttctcctgtatggccgcgccaactaatcagaatatgcgaggactcttgattggtttccccaactggagtcccggtcgtcctgcaaaccaatcaaaggcagacgtcctctcttactaccctagatcaggactgaaacgctttgaaatttccacaaacatcaggcaaggaaattcaggggggccctttgtggacgagtttttccgcgtcgctgggatagcccagcaaggagctaggcaggatggcggaaacgacgaatgtctgtgcgtcactgagctggacgcttgggttgctcagtggaaggccgccaccactgctagcattagcgctccaacgctggtcgaaccagttgccaagagttttccctga

SEQ ID NO: 7722 - RNA, 1788 nt, synthetic construct
  source 1..1788: mol_type = other RNA
atggctgttcacgtgccactgacaccatcagcactgcatacactactgatcaggaacaacctgccatacatgtcccggcacgtcctgggtgtctcttatgacactcttcaggcaatgatatacccgctgccaccctacaagacattcgctctgatgaagcgcaatggcactccacgagtgatccatgagccccggcaaagactcaaggtgctgcaggagcgagtgctagccttcctctacgagcatgccgcccctgccaaaccgtgtgtgcatgggttcaccccgaaacgctccatcgtgactaatgcccaaatgcactgttcccagaagacccaacacctgttaaacatcgatatcgaggatttctttcctagcattaccttttaccgcgtgcgtggggtgtttcaaaaaaagccctttgagttctcttttcctgtcgctaccgttctcgctcatctgtgtacattcagcggtgtgttgccacagggagcacccacttccccgctgttatccaacttggtgtgcagatccctggatcgcgatcttatgacccttgctaaacggcacagagccacttacacgagatacgccgacgatctgacattgtcattcagcgtaaggagagccgaaagtctgccaagcaacatctgttcctttgacagtggaatactcacgcttggtcacgagctccaggccctaatcgagcaccattcttttagaatcaaccccaataaatcgcgactcagcacacgtctccaccgccttgaagtgacaggtatcacaataaacgaattccctaacatcaagaggaagttcacagatagaattcgcggagccttacacgcctgggacaagtatgggtatgaccacgcccagttggaatgggaaaggagggtcaacaaagcagctgaggaggcatacgccaaaaggccttggaagagacaaacccggacccggacggttccagctcttaaaaacgtgctctgggggaagctgttgtacgtgcggatggtcaggggggctactaacactctgtatttgcgccttgctgaacgctataatgcgctgtgcgcgcgcgagcgactgaaaagtgagtttgtttgctctagtgtgccaattgatagcattgttcggaatagcaatcaggccaagaaggcagtctttgtcgtagaatggtatggggaactggacggcaaagacgtgggaggcctaggaaccgcatttaagtatgaggacgttggcctgattacttgcgaacacgtaattaagcatcaggaccatggcccctacgcggatgacatccctagatcagagatcttcgtgcgggacgctgaaaccgatgaaacctggcctgtccgtatagttcacagagacaaagatcatgacctcgcaattctccagttcgatacagcgaatccccctgtgtctcgacactttattaggggcgagaagcccatcaccgtgaatgagtctggtgttttaataggcttccctaaccccactcgtggccggcaggcaaatcaggtgaacgcccaggtagttaacgtcttcccaagggccggcctgcccaggtttgagatcaaggagcggattaggcagggaaattcaggcgggcccttcgtcgacgagaattatcgagtggtcggcattgctcagcagggagccgaacaaggaaaggggaatgacgaatgcctgtgtattacggaggtgaatagatggctcgatgcttggaaaaccagtttggtagtagcagtggcggtcgcatcagcccctgatcctatcccctga

SEQ ID NO: 7723 - RNA, 1698 nt, synthetic construct
  source 1..1698: mol_type = other RNA
atgtctgatcagctctttggcataacttatagtgaactacaggctttactgtatcccaggcagccctacaaaacattcatcatcgccaaaagaaatgggtcaccccgggtcatacacgaacctcggatcgccctcaaggttgtgcaggagaaactattgcatttcttgtacgaaaacgctggcatggcaaaaccctgcgtacagggctttacccctggcagatccatagtgactaacgcgcaaaaacattgttctccacgcaccctgcaccttttgaacatcgatatcgaaaactttttcccgagtatcacattctaccgcgtgaggggcctgtttctcaagaaaccttttgagttctcccaccaggtggctaccgtccttgctcagatctgcacctaccagggaattctgccccaaggtgctcccacatctccgatggtggccaatctgatatgccgatcactcgacaaagatctgactctgctggcaaagagacaccgggctatttatacacggtactgtgatgacattacttttagcctctccgttagagatatcgccaagctacctgtaaacatctgtagtttcgactcaggggtcctcacccttggagatgagctgcagagcatcttcgttaagaattcgttcaggattaatcccttgaaatctcgcctggggaacaggcgacatcgtctggaggtcaccgggatcaccattaacaagagtccgaacgtcaagagatctttcatcgatagcattcgcggcgcgctgcatgcctgggataagtatggttacgaagccgcaaccgcggagtgggaaaagaggccatataagcgtcagagacggattggggggattccatccctcaagaatgtgctctggggaaaactcctttacgtgaggatggtgagaggtggcgatgacgtgctgtatacccgcttagccgaaagatataatatgttgtgtgagaaggagcaggccgcccgcaaatcatttacgtacagttccctgccaattgaggcagtggtccgaaatgccgcagacgccgaaaatgcagtgtttgtcctggaatggctgggagattacaagggagagccagtaggcggccaaggcactgcatttgcctacaaggacgtaggacttctgacatgcgagcacgttttccatacagtgactgaaaacggcgagcccgtgagcttcgacgaggtgaagggtgctactctgacgctccaaaatccctccacagggaagttctggccagcaaaactcatccacaaagacccataccgagacttagctgtcgtgcattttgacacacggattcctcctgcacaccgccacttctcagctctcgaggcccagatcaaccggaattccaagggaatcctaattgggttccctaattggagccctgggaagcgagccaaccaattatatgtcacggtgctgaataggttccccattaccggcctgcagcggatagagatcaatggtagcgtgaggaaaggaaacagcggtggaccatttgtggacgaattgtttcgtgttgccggcgttgctcaacagggcgccacacaggcaaacggaaacgaccagtgcttatgtgtaactgagctggataagtggctggtcgagataaaagggcttgcccacggtttgtctcttgacgcgctgcctgataccccagttgctgactga

SEQ ID NO: 7724 - RNA, 1746 nt, synthetic construct
  source 1..1746: mol_type = other RNA
atgaccgtcaactttcatgagattctcattagatgcgatgtcgattacatgtccaaacatatcttcagcacctcttatgccgacctggccaaattaatttaccccagcccccggtacaaagcattcgtgatctcaaagcgggacggtacgcctcgcgtcattgaagagcctttccgaaagctgaagcgtctgcagtacaagttacttgactacctgagtaggaacagcagtacaccaaaagtttgcgtacatggattcattaaggagcgtagtatcctgtctaatgctagagtccactgttccagtaaaactagctaccttcttaacgtggacatcgagaatttcttccactcaataaccttttatcgcatcaggggagtttttcagggagaaccctacaactttagctatgagatttccactgttctggcccagctgagcacctttaacggtagactgccccaaggtgccccgacttccccgttcctttccaatctgatctgtcgaagtctggatggggaacttatgcggcttgctaaatcacatcgaggaatgtacacccggtatgcagatgacttaacattctctttttcagctagaaccccactggggctgccaaaaaatatctgtgagttcgacggcgggaacttgcacatcggaaatgaactgctctccatcatcgagaagaattcgttcaagctcaacgagaaaaagtccagaatctccagtcgcaagcataggctagaggtcacaggtcttacaattaatgagtttccaaatgtgcgccggaactacgtagatcaaatcaggggggctatacacgcatgggatgtgcacggctatgaggccgcccagaagcggtggatcgagaagaacaacgttgccgtaaaagtaagacagacaagaaacctctatgcaccacagctcaaaaactacctctggggcaagctcttgcacttgaaaatgattcgaagtcggggggaccccatctatactagactcgccgaaaaatataacaccctgtgcgcgaaggaatctgggaaaggcttcatctttgcgcctaagttacctatcgagccaatcgtgcgcaatgcaaatgatattgagtctgcagtgttcgtcttagaatggtcaggagactacatactgaatgaagcttctcccgagcatacagaggtggttggtgctcagggaaccgccttcatttacaaggacttcggcctcattacctgcgaccacgtattgtcgtctatgctgcgtatagggggtgtggatgtgagcgttgatattgactctgaccggattctcaataagaagctgtatgtgtgtaaccccctcctggccaagagcttgcctgtgagggtgattcaccgcgatcgccacctggacctggctgttctggaattcgtggatggagtggtgggcaaccgctatttttcttcagcggagcgtcctatcctgaggaatgaacagtgcactctggtcgggtttccaaactggactgtcggcagaggcgtgaatctattgcctgtgtcagtggttatccgctttttcaggtccctatttaatcgaatcgagatttccggcgcaatcaggaaagggtacagcggcggcccgctaatagatagcagctttagggtcataggaattgcccaggaaggcgccacacaagctgacggcaacgacgaatgtttgtgcataacggaagtggataagtggctttcggggctcacggtccggccctaa

SEQ ID NO: 7725 - RNA, 1866 nt, synthetic construct
  source 1..1866: mol_type = other RNA
atgaaagatgtcgaggtggcaacagcgtgggctcatatgactgattcggatatccacttcgacgtgctgaatctgccattccgtgaagctctaattcggaccaacgtggagtttatgtctaggtatctgctaggtatcccatacagcgaggtaaaaaaaatcatatacccaactccttcctacaaaatcttcctcatcactaagcgaaatggaaaggccagaatcattcaggaacctcggaaggctctgaaagagcttcagctgaaggtgttaagttttttagagactcgcgggggcaatcctaaggcgtgtgttcatggctttactaaaaggaggagcatcctcacaaacgccctcagacattgtagcacacagactcatcacctgttgaatatagacctacaggattttttcccaagcatcaacttttttcgggtgaggggggtatttcaaagcaagccgtttgagtgctcttattctgtagccaccgtgctggcacatctctgtacccaccgcaatgaattgcctcaaggcgcacccacctcacccatcctagcaaacttagtgtgtcgaaaaatggacagcgaactgatggccctcgctcgaaggcatcgggccacctatacgcggtatgctgatgacatttctttcagcttctccatacgtgacgcagtccgattgcctgagaacatttgccggtttgagagtggaacactgaccctgggacaagaactccagtcaatcattctggaaaactcctttaacatcaattctacgaagaatcgcctttccaataggctgaataggctggaagtaaccgggatcacaataaatgagttccctaacgtgaaacgcaattttatcgatcggattcgcggcgccttacacgcctgggaggtgtttggttatattaaagcgcgtgatcagtgggacgccttgatatcagaaggcctccgcctcaccagagaaaagagaatttggcttaggcagaggagaacacgggccgtccccgaattggcaaatgtcctttgggggaagctcctgtacctgagaatggtcagaggcgctgatgatgcgatttatacaaggctcgccgagagatacaacgtgctgtgtgccaaggaggttgaggagggcagaaacttcttcttcagcaagctgcccgtcgagcccattgtaagaaatagtcatgatgttgaccacgcagtgtttgtcgttgagtggggcggtctgtatcccgtcgaaggggctaaggccccagaattcgtctgcggacagggtactgccttcttataccagtccaacaattgcctggtgacgtgtgaacacgtgttccggtataaagagtcagttaagatcacaaagtacggggaggaagttgaggagattcttgatactggctacatgtcgcctgacgtgtacgagaaaaacatcaccatacactccccagtccgaggacagacttgggacgcaaagctcgtgcactacgacagtgaccgggacctggctatcctcgaattcgtttcccctccagaaaacgttcgccacttcacaagtctggacgcccccatcaagaaaaatgagccggggtacttgatcgggtttcccaactggaacccggggcgtttcagcaaccagaccaatgcttcagtgctgaataggtttccccggaaaggactgcaaagaattgaagtgagtaccaacgtccgcaagggaaactctggcggcccatatgtggatgagcttttccgcgtggcaggtattgctcaggagggagccacacaatccggaggcaacgacgaatgcctttgcgtgtcagagttgaacacctggcttaaaaattctaccaacaagaaggagacgtga

SEQ ID NO: 7726 - RNA, 1722 nt, synthetic construct
  source 1..1722: mol_type = other RNA
atgtctaaaaatctgcttggaatgccttacagtgaaatacagaagataatctaccccacacccccttacaaggtgttcgtcatcactaaacggtccggcgggcccaggctgatccaagaacccagacggaaacttaaagagctccaactgaaggtgctggcctttctggaggagcacggaggaaagccgaagccatgcgtccatggctttaccaagaatcgctctatagtgacaaacgcacgtaagcactgtagtaggcagactcagcacctgttgaacatcgatctgaaagacttcttcccatcaattgggttcttcagggtgagaggcgtattgcagaaaaggcctttcgcatgttcacactcagtggccaccgtgctcgctcacctctgcacccatagaaacgaattacctcagggtgctccaacatcccctatgttagccaacctagtctgtcgaagactcgactccgaccttatggacctggctcgaaggcatagatcgacttatacacggtacgctgatgatttgaccttttctttctccgtccgcgacacatcccggctacccgagaatatttgcgcctttgagtctgggggtttgactattgggcacgagctgctgagcattattgataagcacaacttcgacattaacccgacaaagagtcgactttccacacggttgcatagattagaggttaccggaatcactattaatgagttcccaaacgtgaagaggatttttatcgatagaatccgcggggctttacacgcatgggaaaaacatggcttcgacgccgcgtcagcagaatgggagcgacgcatcacgaagggcaaaacctgcatctatgagaagaggccctggaaacgccagacaagaactcgtaaaataccagagctgatcaatgtcctgtgggggaaattgctgtatgtgcgcatgatccgtggcgctgacgacgtgatctacacgcggctcgctgaacgatataacgtgctgtgcgaacacgagcagggcctgagcgccgattttagcttttcaagactacccattgaaagcatcgttcgcaacgctaatgatgctgagcgggccgtattggtggtgagctggctcggtgattaccagccagttggcgtcgcggagagtgaagccgtcggaggacaggggactgcctttccatatcaaagcaataattgtctggtgacttgcgatcatgtactgaggtgggagggcgtcgtgaatgagaataatgtcagcacagactgtaccagcgtcgatgttcatggagcaaatctgaaggtgatctcccccgcactggggcttgagtggccagttcgagtggttcacagggatgtcgaccgcgaccttgcaattcttgaattcatcggccctccgcctaatattcggcattttgctggactcgatgcccctattaagcgcaatgaaactggctatctgatcggataccctaactggaacgccgggagggtggccaaccaggtgaacgttgtggtgaccaacaggtttgcgagaagaacgtttcagcggctcgaaatatctaccacaattcggcaaggtaactctggtgggcccttcgttgacgatctcttccgtgtagcgggtgtagcccaagagggcgcaacccaggtgagtggcaacgacgaatgtctgaccgtagacgagctcgacacctggatagccacctggaagacgcggaattga

SEQ ID NO: 7727 - RNA, 1740 nt, synthetic construct
  source 1..1740: mol_type = other RNA
atgagcacattcccattgggtatcctcacgcgcaattttgtggagagtctctctgcaaacctgttcgggatgccgtatagcgatttgcagaagatcatctatcccagccctaggtacaagtctttcatcattaacaagagaaacggttccccacgggtgattcatgagccccgagccaagttgaaagctctccaggataaagttctcctgtttctggaagagaatgctgcaccagtcaagccatgcgtccacgggtttatcatcggcagatcaatcgtaacgaatgccaaaaaacactgctccccacagacaaagttcctcctgaatgtcgacctaaaaaactacttcccctcaatcaatttctacagagtccgcgggatattcatgaaaaaacccttttcatgcagtcacgcagtggcaaccgtgttggctcaaatttgtacccacaacaatgaattgccacagggtgcacccacttctcctttcctcgccaatttagccagcagaaggttagacactgagttaatggatttagccaaacggcaccgagctagttacacacgttacgcagatgacctcacctttagcttttccgttcggaaggccagttccctccccgagaacatttgctcttacgattcgggagtactgaccctcggcaaggaattgatatctacgattgagcataactcctttaacataaatcccgtcaaaagtagaatctcaactcctctacaccggatggaggtaaccggcctgacaatcaacgaatttccgaacgtgaagcggaacttcgttgactgggtgagaggaacactgcatgcctgggataagtatgggctggctgcgactcaagtggaatgggagcggaaaatggaggccgcaaagacctccccttacgagaagaagccctggaggaggcagaggagatgcaagggattcccttcgttctataagattctgtgggggaaactgctgtacctcagaatggttagaggacctaatgacgccctgtatacccgcttcgcggaacgatttaatggcctttaccaaagggatatgggcggagccgccctgctgctacctattgagaatatagtgcgtaacgcggctgacgtcgagagggcagtgttcgttgtatcttggatgggggattatcagctggagggtggcgcatcagaattttgtgccagccagggaactgcttttgcctatatgagcgctaataagctaatcacttgtgagcacgtgctgcggtgtgaactcgaggtcaatgggcaggtgttgatggtggattttcaggacgcccagatgcggaacggagaaatgacagcacattctcccacccttggcttttccgtgccagtgagggtcgtgcatcgcgaccaggatcgtgacctggcggttctggaatttgtaaacccgccacctgccaacatccgtcacttcgtcggacgcgactccctgatcaagcgcaatgaacatggcattcttgtcggctatccaaactggaatcctgggaggatcgctaaccaagcggccgccaacgttctgaataggttcccccgacgcggccttcagcgcatagagattagcaccaatattcggagaggcaacagcggtggaccctacgtggacgagcttttccgagtggctggggtggcccaagaaggtgctacacaggctgatggcaacgacgaatgtctttgcgtggaggagctggacaaatggcttgattga

SEQ ID NO: 7728 - RNA, 1794 nt, synthetic construct
  source 1..1794: mol_type = other RNA
atgaaagatgtagaggtgacacccccgatgcccgtggtcagtagccccatagacctgcatggggtgtttctgaaagtcgatgccgactatttctccaggcacgtgtttggcgtaccatattcctctctgaaagccgtactttaccccacgccgcgataccgggcattcattatcgcgaagcggaacggaagcccacgcatcatccacgaacctaaacggcagctgaaagagtttcagctgaagttactgtcattcatggagagtcaggtgacccagatcaagccatgtgtgcacggctttgttaaaggccggtccatcgtgtcaaacgctgagcgccacctggaaacccaaccacatcacctgttgaatctcgacctggaggactttttccccagcatctccttctacagagtgcgcggggtctttaagaaagctcctttcggcctgtcccacgaagttgcgactgtgctcgcgcagctctgcacatattctaattctctgccccaaggagccccaacttctcccatgctttcaaatttagtgtgtcgttcacttgatagggatttgaccgccttagcacggagacacagggccacatacaccagatacgcagatgatctcaccttttcttttacggtacgggaccccaacaggctgccatcgaatatttgctcgttcgactccgggatcgttaacctgggacatgagctacaagctttaattcaggagcagcatcacttcaggattaacccaaaaaagacacgtatgagcacaaggttccataggatggaggttacaggtctgaccatcaacgaatttgccaacgtcaagagagagtttatagatcgcataagaggcgctttaagtgcctggaagaaatacgggtacggaaagagtcaggccagttggcaggaccgcgtgattgacggccaaactaaaccgtacgagcagcggctatggaggagacaagttcggggcgggggtgtgccagaactgaagaatgtgctgtggggcaagcttctctatgtccgcatggtgcgagggcgcgacgatagtatttacactcggttggctgatctctataatgagctctgcaagcaagaaaagaaagtggataaggacttccttttctcttccctccctgtcgaaaaaatcgtgaggaacgcggtggatgcagagcgagccgtcttcgttattgagtggtcaggagactactgccctcccggagccagcgctagcgaaatggtaggaggccagggcactgctttcgcttataagaaggctgaccagttgatcacctgtgaccacgtgttcaattgggaagggcaatatgcaggggcctcagttagcgtcaactgccagagcagcgatgtacacggcctgactctgcgcgcagtgaatcccgctaccggtctgtcctggccagtgaccatcgtcagacgcgacgcacctagagatttggctgtgctacagatagccggtggctctctcgctcatcggcattttgtcgccattgaggcccctctgaagaggaatactagaggattcctaataggatatcctaactggagccctggacgtgtggcaaaccaggtgacagccaacgtccagtcactttacaacagatctgccctggcacgtttcgagatttccacgttgatccgacagggtaatagcgggggtccttttgttgacgcccagtttcgacttgtgggggttgcacagcagggcgcgacccaacagagtggtaatgacgaatgtctgtccgtcctcgagctcgaaaagtggttgtga

SEQ ID NO: 7729 - RNA, 1764 nt, synthetic construct
  source 1..1764: mol_type = other RNA
atggcatttctgggagtcaaggagtttcatgactacatgttaagaagtgatgtgccttacttctccaggcatatctttagagctgagtactcctccgtggaggggtatctctacccacatccacgctacaccagctttgtgctcgccaaagctaacggcaagaaccgatttatcgccgaaccttcgaagaaaataaaagagctacagtaccgagccctgcggtacctggagaagacagtgccccagcccaaagcatgcgtacacggttttgtggaggggagatctatcctgactaatgctcgtaagcatttagagcggcgcccataccatatcctcaacttggatttgactgatttctttccctctatcaccttctttcgggttagaggtgcactgatggcccctcccatgaagttcagcttcggggtcgccaccatgcttgcccacctgtgcacacacgaaggaacgctgccacagggggccccaacttctcccttcctggccaatttaatatgtagatctctggactcccagctcactttattgagcaagcgccaccgggccacctataccagatatgccgacgacttgacattctccttcagtcacaggcacgccaacaggctaccagctaacatcgttaattttgacggcggaacagtctccatcggctctgagctgagaagtatcattgagtcaaacagcttcggcattaataatgataagacccgcgtaagcacccgcatgagacgaatggaaattaccggcgtggtggtgaacgaggatcctaacgtgacaagaaagttcatcgataagattaggggggccctccatgcatgggaccgctatggttatgttgcagctctggcaaattggaacgcacgcgtagctgaaacgctaaaggaaccccgggcgggtaaacaatgggcgaggcagacacgtacaggcaacataccgagtctccagaacgttctatggggacggctgctgtttgtgagaatgattcggggggacgatgatcttttgtatactcggctggctgaaaagtataaccacctttgccgcacccacaaagctatagacccggagtttagggccgcaagcttacccattgcactgcaggtcaagaatagccttgacgctgatttcgctacttttgtgttcgagtggtcagcggactatgccgcctccgatgctcacgaatcagagcctctggtgagtcagggatcagcctttgcatacggcgacggccgtcgattcattacctgtgaccacgtgctgaaaggacagtcggctgacggcgaggttgatgtggcaaatcccagggtcaggaatctcaccatgaatctccgcaatcccgtgacaagaatagactttcaagcccgggtcctccatcgggacgcgcatttggatcttgccgtccttgaactggtggatcctgccgccagggccaaacggtacttcgacggcaggactgaaccactggagcgagatgcgcgtgcgaggttgatcggattcccgaactggactcaaggtcgaacggcaaataacagtgtcgtatctgtccagcagcgtttccctcgggctgggctccaaagaatcgaaatcggtggatctatgattcgccaggggaattcaggcggacctctcgtggatgctagctacaaactggcaggcgttgcccagcaaggcgctagccagtcatccgggaacgacgagtgcctgtgtattatggaactggacaggtggcttgcctccctgtga

SEQ ID NO: 7730 - RNA, 1761 nt, synthetic construct
  source 1..1761: mol_type = other RNA
atggctatactgggtaaaaatgaattccacgattttctcctgcgggctgacgttccttatttctctcgtcacatctttggggccgagtattggaagattgagggactgttataccccacacctcgctataccaatttcgttatcgctaaggccaacggtaagaatcggcatatagcagaacccagtaagaaaataaaagccctgcagtaccgggctcttgcctacctaaaaggaaccgtgccacccgctaagccctgtgttcatggcttcgttgaaggcaggagtatacttaccaacgcagaaaaacatctcgaacgcaggccgtaccacattttgaatctggatctgtctgatttctttccgaccattactttcttccgggttcgaggcgccctaatggcaccaccaatgaagtttagctttgaaatggccaccatgctcgctcatttgtgtacccacgagggctctctgccacaaggagcccctacttccccgtttctggcgaatctcatttgccgtactcttgacagccagttaactctgctgtcaaagaggcatcgggctacgtatacacgttacgccgacgatcttaccttttccttttcacacagaagcgcagagaggctgccagccaacgtagtcgcattcgatggggggacagtctctatcggatccgagctgcggtcaatcatcgagtctaattcctttcacatcaacgagggaaagactcggatttcaaccagactcagaagaatggagattacaggcgtggtagtgaacgagttccctaatgtaacccgcaaattcattgataagattcgaggtgccctgcatgcatgggaggcccacggatacgtagccgcccaagcgacatggactgctcggatcacagagaaattgaagaaccctcctcgggagcgaccctgggctagacagacacgcaccggcaacatcccatccctgcagaacgtgttatgggggcgcctcctctttgtgagaatgatcagggggaacgatgacctcttgtatactagactcgccgagaagtacaatcacctttgtaggctgcaccagacaattgaccccggttttaggggcgcatctctaccaatcgaccttcaggtgaggaatacgctcgacgtcgatttcgctacgttcgtcttagagtggtcaggggactacacggctccaggaaccgacgagtccgaacccctggtgagccagggcactgcgttcgcatatggaacaggcagacgcttcattacctgcaatcatgtgctcacaggtcagtcaaaagatgaagagattgacatctcgaaccctttcgtgcagaacgtgtccatcgttctgcggaacccactgacagggactgtctccccggccagagtgctaaatcgggacagcgcccgtgatctggcactgttggagtttgtggacagcgaaacacgagcgcagcgctattttgatggccgacccgagcctttggagcgaagcgctcaggccagactgatcggtttccctaactggacccccgggagaactgccaacaatacggaagtgagcgtgcaacaccgctttgctagggcgggccttcagcgcctcgaaataggacagaccatcaggcaagggaattcgggaggccccctggtcgattctagttacaaattagccggcgtcgcccagcaaggggcaagtcaaagtagcggcaacgacgaatgcctttgcgtgatggaactggacaggtggctgaccgcattgtga

SEQ ID NO: 7731 - RNA, 1929 nt, synthetic construct
  source 1..1929: mol_type = other RNA
atgaacaccccaaacactattctgattcaggcccttgttgagaatcaggaccttatggacgcgtgggagcggatggacgtgcacgtgtttagcactggcgtgttgggagtgccctacgagcaggtgcagaaaatcctgtatccgcaccccccttatagggcctttctaatggcaaaaagatctggggggtttagactcattcgggagcctcggagacgtctcaaggttttgcaggaaaaggtcctggctcacctatacgagcgagccgggaccccaaaaccatgtgcccacgcattcatcaaagaccggtccatagtaacgaacgcgaggcgacatctggagagacggccaacattcgttttaaacttggacctggaagcatttttcccctcaatatcattctaccgggtaaggggtgtcctcaagaagcccccgttcaattatagccatgaggtcgcgacagtcctcgcccagatgtgcgtggtcggaaatgaattgccacagggcgctcccacttctcctttcctgtccaaccaggtttgtaggagcatggatagggacctcatggccctggcaaagcgtcaccgcgctacgtatacgcggtacgcagatgatatcactttcagtttttctgctccaacccgcgccgctttgccttccaacatctgtacctttgatagcggagttgttaccctgggccaggaattagtggggattatcaaccagcacaacttccagataaacccttctaagacgcgaatgtccacccgccgtcgaagaatggaagttaccgggatcgtgatcaacgagtttgccaatgtgaagaggattttcatcgacaagatccgcggagccctccatgcttgggatcgttacggttacgcagcagcacaagctgcctgggagcagcgagtgaccaatggtacaaccctcgcctatgagaaaaggccctggaaacggcagacacgcacaggacaaactcccgcgctgaaaaatgtactgtggggcaaactgctctatgtgagaatggtgcgtggggacagtgacgcaatttacacacgcctggccgagaagtataacagactggtggcccgagaacgcgacggaaatgccgacttcgccgcgtcgactctgcctgtggaagcaattgtgagaaatgtcgaggacgccgaaagggccgtgtttgtggtcgagtgggcagcagactaccaaccacccgtgccagggcagccaacaatggtcggaggccagggtacagccttcgcctacaagcagagaaatagactgatcacttgcgaccacgtcttccgcgcagagggagaatatcagttaggcgatgggcccaacgcacaggaaatcccctttaccactgatatcaatgaggctgcggtccaaggactgaacgtgaccgcgatcgatccggtcagtggtcaacggtggcccttgcgggttgtgcacagacatgctcatagagatcttgccctacttgagtttgaaggggccccgcctgaccaccgccattttagcggcatggaggcccccatcaataggcacgcacctacacatcttataggcttcccaaattggaataacgggaggagggcgaacattgagcccgccatagtcacagctcggtttcctcggaccggactgcagcgcttcgagattaaccagctcattaggaagggcaattcaggcggccctgtggtggacgaacttttccgcgtagctggtgttgcccaacaaggcgcccaacaggatgccggcaataacgagtgcctctgcgtgctggaactggatgcctggttagccgaatacgatgccgatgtagcagctccagccgatgtgcccgctgctgaacctgctgctcctgctgctgccgctgaagccccagctgctcctgtagcaccagcagagccggctgcgtga

SEQ ID NO: 7732 - RNA, 1887 nt, synthetic construct
  source 1..1887: mol_type = other RNA
atgaccaccccactgttaactgccaaggacgctgctgaggctgccaaatgggccgagatttgggctaggactgacgtccacttgttcgccgcagacgtcttcgacctcgcatacgaagagattcagaacatcatttacccaacccccccgtacaaggcctatctcctggccaagcgatctggcggccaacgcgttatccgcgaacctcggaggaggctgaaggatttacaggtgaagttgctgaaataccttatagagcgcgccggtacccccaaaccatgtgcccatgcatttacagaagggagatccatcgtcaccaatgctcggaaacacctggagcgaaggcctcactttgtgctgaatcttgaccttgagggcttctttccctccataagtttttatcgcatcaggggagtgctgcggaaggcacccttcaacctggctcatcccgtggctacaatgttggcccacatgtgtacggtaaataatgaactaccacagggagcccctacaagtcctttcttctctaaccaggtttgtcggtcattggaccgcgacctcatggctctggccaaaagacatcaggcaacgtacactcgatacgttgacgacataactttttcatttagcacacctaatcagatcgcactccctgccaacatctgcacattcgatagcggcgttgtgacccttggccaggagttggtgggaatcataggccagcacaattttcggatcaatcccgcgaaaactcggatgtccactcgtcgacgcagaatggaagtgaccggaatcgtcatcaaccagttccctaacgtgaaaagggctttcattgataagatcagaggtgcgctccatgcatgggacagacacggctataaggccgcggaggagaattggcaagccagagtgtctaacggtgctcgtctcgcctatgaaaagcgaccgtggaaacgtcaggcccgattgggccagccaccagaactcaagacagtgctgtggggtaagctgctgttccttagaatggtgcggggggctgatgacacaatatacacaaggctggctgagaagtacaacagattagtggaacgcgaaagggccggtgatgccccctttgtcagcgcgacacttcccgtggaagccattgtgcgaaatgccgaagacgccgagcgggcagttttcgttgtccagtggctcgccgactatcacccacctaacgccggaacgcaggaagctgttggcgggcaggggacagcgttcgcttataagcgccataataggctgattacctgcgaccacctgttcagagccgatggcgagtatcgccggggcgaagatccgcaagcacctagggtgccctttactaccgatctgactagcccccaggttagaggcgcaatggtcagtgtgaccgatcccgtcaccggacaagagtgggcggtaagggtagtgcaccgcgacgctcatcgcgatctcgccattctggaatttgacgaggagcccccggcacatcggcacttttccgggatggatgcacctatcacgcggcacgccccaggccatctagtaggattcccgaattggaataacgggcgtcgcgccaacattgagcacgccattgtgtcggcccgtttccccagaaccggactgcaaaggtttgaaatcaaccagctgattcggaaaggaaactcaggggggccattcgtggatgagttatttagagtcgctggtgtggcacaacagggggcccaacaggatgctgggaataacgagtgcctatgcgtagcagagctcgatgcttggatcgaggcgtacgaggcaactagggtcagacctcccccagctccaccagcaccagctgcagtcgaacggggacctgcggcttga

SEQ ID NO: 7733 - RNA, 1821 nt, synthetic construct
  source 1..1821: mol_type = other RNA
atgctgcagaagacccaagtcaatagttttagctcagccatcctgggggccccttatgccacggtgcaaggcatcctgtacccaaggccgccatatcgctctttcgagctggccaagcgctctggaggcatccgtgtgataagagagccccgaaaaagacttaaactccttcagttgaaggcactggaggatctggaacagagggctggacggccaaagccctgtgctcacgggtttgtcaaggaccgctccatagtgaccaacgctcggaaacatctcgagcgtaagccacactttcttctgaatctcgacttggagaagttcttcccctctattaattttttcagagtgcggggggtgctgaaaaaaccgcctttcgggttttctcacgaagttgccactgtattggcgcagatgtgcgttttagacaacgagttaccccagggagcaccgactagccccttcctatccaatgaaatatgcaggggcctggatagggatctgatggcactagcgcgccggcatcgtgccacctataccagatacgccgatgatatcactttcagtttttccactcctaacgccaccagcttgccagccaatatctgtacgtttgatggcggcctcgtcaccctgggccaagagttaatctcaatcatcacttcccatagctttcagattcaccccacgaagacacgcatgtccacccgaagacggaggatggaagtgacaggagtggtcattaatgagttccctaacgttaaaagggtgttcatcgaccggattaggggagccctccatgcctgggaccgatacggatatgacctggcacagaaggcctgggcgaatagagttcaggcaggcgccagtacagcatatgaaaaaaggccctggaaacgacagacccgatcaggtaacccccccgagctgaagaacgtgctctggggtaagcttctgttcgtgaggatggtgcgaggggctgacgacgcgatatacacacgactggccgaaaagtataatcatctgatccaacgtgagcgggggactaagccagactttgcggcctcctcacttccagtggaagctattgtgagaaacgccgaagatgctgagagggctgtgttcgttgtcgagtggagcggcgactacttacctaccgggacgaccgaggctaccatggcgtacggccaaggcacagccttcgcctacaaaaagaaggatcggctgattacttgtgaccacgtctttacagctcggtgcgagattgccggggcatctgtcgatgtcgatattcagagcaaagacctgcgcgaagttagcttggaagctcacgaccccgcaacaggtaaccgctggcccttgcggatcgtgcacagggatgcccctagagatttggccatactccaatttgagggggaaccagcggcacagcgtttcttcagcggcatggatgcaccgatcaatagacacgccccaggtcatctgattgggtttccaaattggtcacctggacggagagcaaatgttgagcctgctattgtaactaaccgctttagaaggtccgcactccagagggtggagattaaccagctaatcaggaaagggaatagtggcggaccttacgtagacgagctcttccgcgtcgccggcgtagctcagaaaggagctacccaggacgatggtaacaacgagtgcctgtgtgtggctgaactcgacgcatggatcaacgcttctggagaagcaccccctcccgctgcttcgacagccagtgcaggcggtggtagagccggagaacctcttagacgccggccaacacgctga

SEQ ID NO: 7734 - RNA, 1674 nt, synthetic construct
  source 1..1674: mol_type = other RNA
atgcatgtgtttggagtgcagtattccgagctggagaaactcctgtatccaagaccatcctacagggcattcttgatacccaaaaaagacgggggccttcgtgccatccactcccctagactccaccttaagatcatccaaaagaagttgttggagtacctagagagagtcggcaaccctcctaaagcatctgcccacggtttctgtaaagatcggtctatagtgacaaatgctgctaagcactccctggcaaggaccagattcatcctgaatattgaccttgagaacttctttccgtccattaacttctttcgggtgaggggtctgctgttagctccaccatttgggttgagctaccccgtcgcaagcctcgtagcacacatttgcacttatcagaatgagcttccccaaggggcacccacctcaccctacatttcgaaccagatagcccgcagtcttgaccgggatctgatgaatctggctatgcgtcatcgagcgacctatacccgctacgttgacgacattacattttctttcagcgttaggtccgaagccgccctgcctgccaatatttgctcttttgatagcggaattctgtccctgggagccgagctccaggccctaatcgccaagaatggattcaaactcaacgaaaagaagtcacgaattagcagtagccgccggcgaatggaagtcacgggccttaaaatcaatcgcttccctaacgttagacgcaattttatcgacgaaatccggggggctctgaaggcttgtgaaacccatggctatttaaatgccgatgcccactggaagaggtcatttagaagtgacttcggcgtgaaaagagcgaacacatatcgggctctccgcgacgacaaatatcagccagaactgaaggatttccttaggggtaaaatattattcgtgaagatggtgagaggcgaggacgatttgatctacaatcggctcgcagagcggtttaacgctgtaatgccatccacaacagtgcgacctttgaaggtctaccctgttgtcaaaaccgaggatgacctccgaagagcctgctttgtgatctattggcaggcggctatcatggatacggcctctggcgaacgcaagatgctctcgggccagggtactggatttctgtatggcgatgggaacctgatcacgtgtgatcacatcttctacgacacaacagcactcgagggggtacagaaggacgtgcatatcactgaccgggagctggaggatattaagtgcgtcgccattgatcaccaacatatggagcacgacctcaccctgatgcgctgggacgtccctagagacttagccctactgcacttcgatcgtaacgccccacataacaaacacctgacccccgcactgagttctgctaagcgtcatgaccggggatggttggctgggtacccggattggactagtggacgcccggccaatgtggtagaagcacaagtggataactcatacgtgaggtctgggttagcgcgactagaactgaaccagactattaggtcagggtactccggcggcccctatgttgataaaagctacaggctcatcggaatagcacataggggtgcgacccagagctcaggcactaatgaatgtctggccagccacgaactggacaagtggattgctagtccctga

SEQ ID NO: 7735 - RNA, 1707 nt, synthetic construct
  source 1..1707: mol_type = other RNA
atggctgatgccttcgatgaaatggtgctggccatcgacgtgcgatactttgccagcactgttctcctggaggattataagaagattgcggcacttatttaccccaaacctcgctatagggagtttaacatcccgaagaagtctgggggaaagcgggcaatagctgcgcctagaaaaaagctcaagattctgcaacaacgcctgctgtcttacttggtggccaaaatagatccgccaaaagcttgtgttcacggattcgtccctgggaggaacgtcgtcaccaatgctagcaaacacagcgagcggaaccccagatttatccttaacgtggatttagagaacttttttccaacgatcaccttctatcgcgtacgcggtgtcttcttaaagcgcccttttaacctgagttactctgtagcctccatgctagctcatctgtgttgccataatggcgtgctggcacagggctcgccaacatcccccatactgagtaatctagtctgtagaaagctagacaacgatcttagtgccttagcgcggaaatatcgagctgtgtacacacgttattgtgacgacatcacaatgagtttcgtggcaaaaatggcagataacttgccagctaacatctgcagtttcaacggtgaagccgtgaatattggcgacgaactgaaggcagttattgccgccaatggattcgctctgaacgatgaaaagtcccgactgtcaagctcttcacataggcaggagatcacggggctgacagtcaatgacttcccaaatgtgagacgccagtacatcgactccataaggggcgccctgcactcatgggaggtgcatggctacaagctggctgaggcacggtggcaggaaaccccctataagcggattagagtgtccaacactgttccaaagctttgtttcaacctcaagggtagattactgtacttgaagatggtgcgtggaggcgatgatgagatttatggacggctggcctccaagtttaataagctggtcgctataggagtagtaggggaggtgcctccctgcaaacctttgcccatcgactactcggtcactactgccaacggcgcacggcacgcggttttcgtgctccaagcccaatggttcgagaaaaatgagctgatctttgaaaggcagggaacagccttttttgttggacagggatatcttctcacatgcgaacatgttgtgagcaatgaattgtctagcgatgaaaaagacgatgcgatgggggaactcgagcaagcaagacacaccgtactgatcccgggggggaaagaatatccagttgaactcgtggcagtgcacgagcactacgacgtcgccctcctcaagttttctggcgacggccccgagtatattagaaggttcaagctttcccaggctagcgccaccgtcggccagaaaagctgcctgttgggcttccctaattggagtaacggtcgtcccgtgactgtggtgaatggggaagtaaccagcgtctactctaggtccgctacccagaaattggaaacctcacagcagatccgaaaggggaattcagggggacctttactaaatgcagagcttgaggtggtgggtatggccactgacggcgccacgtacgagaaaggtaacaatgagtgcctcacatcaggccagattaggcagtggctcatcgacattaaagccgaggttcagctgtga

SEQ ID NO: 7736 - RNA, 1662 nt, synthetic construct
  source 1..1662: mol_type = other RNA
atggaatatgagaaggttggttccgtgatctatccatcaccgctctatacacagttcaccttgccaaagaaatccggtggggtgaggataatcgacgcgcctttccaggagttgaaggagctccagcacaaactgctcgtatttctcaagactctggtagatcctccgaagagctgtgtgcacggatttgtgtctgggcgcagcatcgtgactaatgcactggcccactctgagagaagccccaagttcgtgctaaacatcgacctgaaaaacttctttcccacaatttcgttttacagagtgagaggcatctttttgaaacggccctttagttttagccaccaaattgctagcttaattgcgcatatgtgctgtaaagacggcttcctggttcagggcgcgtcaacctctcctctgatttctaacctaatttgccggaacttggataatcagctccgggggctatcactgcgacataatagtgtatacacacgttactgtgatgatctgactttttctttcccacgggaaagggccgagtctctgcctggcagtatctgttcgttcgctggcgagatcgtgacccttggcgctatgtcattagagataatcgcttcaaacggattcgagattaattccgataaaacgaggatcagctcctccaagagacgtctggaagttaccggcctggtgatcaataaattcccgaacgtctccagagactacgtagaccgattacgcggcgccctacatgcttgggacgtgcacgggtacccaagagccttgaggtcttggaagaacaagattccctatgaaagggctggaaggcgacctaggccaccccttgcagggattgttcgggggcgccttctgtttcttaagatggtgcggggagccgatgatgacctgtacgtgcgcctggccaccaaatttaatatcctcaggcagagggatagtatataccggaaaatccgggcgttgaagagtcttagcgtggactccgtggccaagacggccactgcagctcgcaaggccgtctacgtcattgaagtcgtgtggaccgatgctgctgatgacatgcctcttgttgatcgccgggggaccgtcttcgtcactgagtatgatttactgatctcctgccatcatgttattgacccagatttcagtgacgatgagcgtaaagaaatcagtggaaaaatcctgaaccgctccgtcaagcttattgtgcccgagactaatgacacgtattccattgacgtaatcaagttcgacagccacctcgacattgccctgctgaagttctctgaagcaaaacccgccggcctccgcaaattgctgttttctgaacgtagccctgttcagtcttcaggtacaaccctgctcggcttcccaaactggaagcagggaaggcccctgacaagcgcaagcggtgaaattacatcaatctatcccagatccaacacaaatagattagaggcaagccaagccatacgacaaggaaattcaggaggtcctctcgtcgaccctgattttcgagtgataggcatggccatagaaggggcaacctacgacagaggtaataacgagtgcctggcagccaacgagatcataaattggatccagccagaagtcgacaagctgaagagtcaactcaaattctga

SEQ ID NO: 7737 - RNA, 1728 nt, synthetic construct
  source 1..1728: mol_type = other RNA
atggcttctttggaatttgatatccggaagattgatgttgagctcatggcacaggacatcttcggcagaccttacgcagagatatcaaagattgtgtacccgcgccctaaatacaagtacttcgtcctcccgaaaaagagcggcgaatataggtctattgtagcacctagtctgaagttgaaaaacatccaggagagcctattagattttctccagcgggagtttccgctcgccaagtcctgtgtccacgggtttcaccgggggaggtcggtcgtgactaatgcccaagcccactgtaacagagacacgagttttgtcctgaatatcgacctggaagatttctttccatctatctcttactatcgcgttcgcggcgtgttcgagaattccccttttggatatgcacggaatactgcctctgccctggctcatatttgctgtaataacggtatactcgctcagggagcccctacttcacccattatctctaatctgatatgcagaggtctggataaagatctatctgccctggcgagaaaacaccgagcgatttatacacgctattgcgacgacattacattcagctttaaaagtggacgagtggataggctgcctgcttccatttgcaagtttgatggcgatgttctggggatcggtgatgagctcaccgagatcatcagttcccatggttttcggattaagcataccaaaaatcgcattagctcccgtcagcgtcgaatggaagtgaccggcatagtgatcaacaaattccccaacgttaggcgcctctatgtcgacaaaatcagaggggcacttcacgcgtgggaaacatacggatatgagatggcatcaaagatctgggaagaaaaaaagtactcccggtccttacgaaccggcgccatcccaaggctgtacaaaaacttgtatgggaaactgctgtacctgaagatggtgaagggcgatagcgacgacgtgtaccggctccttgctatgaagtacaatagggtgtttcttaaaagccaatctctcggcgagctgggagatggtaagctgctatctttaggcagccgggtggtcaatgcttcccatgttaagtcagccgtcttcgtgattcatgcccgatggggccttgacgagctgggcttaccagaggaggaagtccaagggactatcttctgtcttgtcgggaaaattttgatcacgtgtagtcacgtaattgagaaacccgaacatatcaagaccgataccgtggagtactatcttgtggagcccacaagtggaaaggagcacaggctcaacttgatatgcaacgactcacacaaggatatagccgtattgagattcgtggaacagggcgtgccagacgctcgggaattagtgctgtccgagcagccaattagccaaaacgcggacgtgatgctatatggattccccaattggaccagaggtcgtgcactgaacagcttgccaggcacggtcacatcaacctttatcagatccaatatcgactgccttgaagtggactgttcgatcagacaggggaactcgggaggacccctgctcaacgtagggatgcgcctggttgggatggctactcagggcgccgacgtaaagagcggaaataacgagtgcgtgactgttagcgaaatcagggacttcatactgaggtgcagcacatcacatcccctgcacttcgacaagagtttcaacatttccaatctgttctga

SEQ ID NO: 7738 - RNA, 1701 nt, synthetic construct
  source 1..1701: mol_type = other RNA
atggcaatccacaagaatatattcagcaaaatcagcactctggatgagcttgcatacaagctcgctggaattccttacaatctgctagcgaaactcatttatcccaccccccgttataagtgcttcgacctcataaagaaatctggcggcgtgcggaccattaacgctcctcggagaaagattaaaaagattcaaagggaaacccttgagctgattaaagagtactatcaatccgtaaagagcccggtgcactcttttgtcaaagacaaaagcatcgtgacgaatgcacagcagcatataggcaaatccttcatttttaacatcgacctggaaaacttcttcaccagcatacactttggtcgtatccgcggaatcttcctgaagaagcctttcgaattttcatacgacatcagtacagtgctggcacatatatgctcgaaggacggaattttgccacagggtgcaccaacctcaccgatcatctccaacttgatttgcaggtctttagactctgatttacagaagcttgcacgaaagtaccgcgccacctacacacgatattgcgatgatattacttttagcttcacggttaggagaataagcgatctccctaaacagattgtcgatctttcagttgcgccagccaacattggcactgagctgctcgccatcatcgacaagcacgagctcaaggtaaattctagaaaagtgcggctggaagggaggtcaaacagaatgcaggtcactgggttgactgttaacgagcagccaaacgtgcctcgtacctttgtacacgaaatccggggcatgctgcatgcttgggaaaggtatggcttaaaaaaagcccaggatcaactcaagacaaaatacagtcggcaactgaggaccaccgagatcccccccttttataatgtgttgcgcgggaagttactctttttgaaaatggttataggggagacttccctggtttatgcccgcctggccatgcggtataataagctgatcgatcgagataatttgaagcagaattcgaaactgccactaagtcgcgaaatcgctaatgacattgatgccaaaagggcggtgcttgctatagaatgttgtgaggatatccccagactaaaggaaagcccactcgtgtccatgggcaccgcattcatttaccgcaagaagtacatcatcacatgctggcatgtcatttcccagaaagtcgagtcactgggggaagacattacgtttcatgagacatccatcgagctgtacgactataaaaagaagaagctggaggtgaccattctggctggttgtcctcggagggacgtcgccatcttggctccgaaattcgacatcacggtgtacccatatttttctcccgccactacacctcccctgagtggtgactctctccaaatgcttggatttcctaactatcaggtgaacaagaagatctcatacacaaagactaaacttctgacagaggaatacactaagagttgtgttcagtacattgaaatcagagacacaattagaaagggcaattctgggggacccgtgttcaacagcaattgggagatagtgggcattgctgtagaaggggccacacaggccgacggagacaacggagtcgtggtcacctccgagatcgatcgagtgatcgattccagtgagttcaaataccagcagaaagataagaaccactga

SEQ ID NO: 7739 - RNA, 1680 nt, synthetic construct
  source 1..1680: mol_type = other RNA
atggcgattcacactccattatctactattcccgacttagagaaattggctgaccgtctggtgggcaatagctatagcgtgcttgccgatctgatctaccctaaaccccgctacaagaccttttctattgctaagaaaagcggcgggatccgaacaattgatgcacccaagaagaagataaaggcgattcagtggaaaacgttggcactgattaaagaatattaccagtgtgtgaagacccccgtgcatggattcgccaaaggcaagtctatcgtgaccaatgcacaacaacacctggagaagaccttcgtttttaacgttgacctggaagattttttcccatcaatccactttggcagggtcaggggtatcttcctgaagaagcccttcgagtttagctatgatattgcttccgtcctggcacatatttgctgcaaggacggcaaactcccccaaggtgcacctaccagtcctgtgataagcaatctagcgtgtcggagattggactccgatcttcaggaattggcacgcaagtaccgcgccacatacactaggtactgcgatgacatcaccttttccttttccgtaaaacggatcaccgacctgccgaagcagattgtcgaccagagggccttccctgtgaaccctggcaccgaactcctggccatcatcgagaaacattcttttcgcgtcaacagcggtaaggtcaggctggagggacgtagcaaacggatgcaggtaacggggttaacggtgaacgaacagcctaatgttccacgaattttcgtgcacgaaataagagggatgattcacgcctgggaaagatacggtcggaacggggccgagacatacctggcctcaaagtattcccggcagctccgaaacccagttagtccaccatttcacaacgttctcagaggaaagctgctgttccttaaaatggtgcgaggggccagttccccggtgtatgctagacttgccgccaggtataattcgctgattgaccatgacaaacttcaaccaaacagcaagcttcctatttctcgtaccgtggctaatgacatcgatgcagtgagggctacatttgctatcgagtgtgtccaggattttcctgagctagccgggctcgagttatcgcccctggtgtcatctggaacagctttcatctaccgcgagaaatatatcgttacttgctggcacgtgatttcacccagaatagaaaaactcggtaagtccttcacttttgatgaagccagtatcgagatctacgactacaaaaagaagaagctccaggtcactgtcctagctaaatgtaaagacagagatgtagtgatcctcgcacctaaattcgacgtgaccgagtatccctatttctccccagcccagctgtctccgagttcaggagatatcctgcagatactgggattcccaaactatcagatgtcaaaaaaggtgagtcggactaaaacagagttgatcaccgagcagtacgccaagcatggggtccaatacattgaagtaaaggacacaatacggaagggcaacagcggcggacccgtattggattccaatcgcggggtcgtaggcctcgctgttgagggagcgacacaggccgaaggcgataatggcgtggcagtcactctggagatcgatcacgtgatcgactctatagttgtgtga

SEQ ID NO: 7740 - RNA, 1686 nt, synthetic construct
  source 1..1686: mol_type = other RNA
atgccggccccactgtccaaagaggcaacacagctgttaaccctgaaaactcatgaggacgtggctcgtttcttcggttacccaaactatgtctctctccagtccctgatctatccccgccccctgtatacctcctttgttatcccaaagcggacggggtctattcgtattatcagtgcccctcgtcgacgcatcaaggacgtccaaagattactgagcacagccctgcttgatctgtacggccatggcagaaaaccggtacatagttttatgaaagggagatctgtggtcaccaatgcacgacaacacgcccagagtcgctttgtgctgcgcgtggacctgcgagacttcttcggttcaatacactttggaagggtcagaggggtgttgcttaaccgaccttttgcactgcccgaaccggtggcaacagtattagcccacatctgctgtctggacggtaaactgccccaaggcgcacctacatcccctatcatctcaaacctcgtctgtcggggcttggacacagccctgatgaagcttgctggagagtgtcgggctacctataccagatactgtgatgacttggtcttctcattctctatacggcaggctgggaagctgtccgcgaggattgtggcttctgaaggaggagttgtgggagtggggcatgagctcgaaaccgctatcaaacgcgagggttttgaaatcaatgtcgccaagacgcgcttatatcactacggcgccagacagaccgtaactggcctagtggtgaatgagttcccaaatgtgagcaagaagtactataggagccttaggacagcactctacgcttgggagaaacatgggtacgaaagtgccagcctgaacgtacctgggaccatacagcatcgccggtatagatcgggaaaaccccgctgcttgcacaggcttctctgggggaagctacagtacatgagaatggttaaaggagagcgcgatgcgagcctgatctccttggtccaccggttcaaccggctgctagctagagacgctgctgtggtggagaagccagtccctccagcaatacatgtgaagcccaccgttgcaagggcgaaagacgccagggccggtacgtggatgctcgaagctattacacacagggatacgcccgacgaactcctcaatgaaggcactgcgttttacgtccgtggcgtgggatttatcacatgcgcccactgcttgcttaatacctacgtatctcctcctactgcccataatgaattcttcctccactcccacgaccgaaggtataagtaccaggtgactccacaccaatttgattatggcctcgatctggccgtcctagctcctgattctagcttcgtcgagaacgaacacctggcctttgagattgaccctgcactgccagctgtaggcactgcggtggttttgtgcgggtatccgggcaactcaccaagtcggccccccgttatttaccagtcagatgtgagcaggacagttactgtgtcaggcgtgtcgagaattgagattgataagcccgtgcatccaggttccagtggaggacccctccttagcgccttaaccgggaaggtgctgggggttgttgccactttcaagaagggcgatgcaggtgccgatgccgcaatcgccatagcagagattagccggctgggcgctcccaaatga

SEQ ID NO: 7741 - RNA, 1644 nt, synthetic construct
  source 1..1644: mol_type = other RNA
atgaacaaggaagatttcctcaaaataacgacacacaatgaactagcatccatgttcggcatgtcttatgcgaagctcaccaaaatcatttataaaaccgacggagtgtacaaataccaccagtttcaaataccaaagaaaaacggaggacaccgcgaaatcgcctctccgtccaaaaagctgaaaaagattcagtccgagctcaaggagctattttatgagatctaccctagcaagccttctgcccatgggtttgcgaaaaacaagtccatcgtgacaaacgccgaaagacacctggataagcgattcatcttcaacatcgatctgagtaattttttcggctcgatacacttcgggagaatcaggaacctgtttaagtcaagcccatttaacttcaacaattcaatcgcgactattctggctcaaatctgctgtttcgataattctcttccacagggcgcccccacttcccccattctctccaatatgatcgcatggaaactggatacccagctccaaagcctggcgaaaatgactaatggaacatacacacgatatgccgatgacataagtttttcatttacgacgaccaagggccggctgcctgaggagattgttattttgaggggaggggaagctgcacctggccatgctttgacccatatcatagaagagaatgggttcttcatcaattacgataaagtgcgtctgtgtagtaggttgagcaggatggaggtgactggattgacagtcaatgagttaaccaacgtgaggcgcaagtatgtaagacagctctcaagtatgctgcacgcttggcgaaaacacgggtacgagctcgctgagaaagattttaatgagaagtatgacactcggtacagggcctcaggtaagcctaagtcgttccttcacgtggttaagggtaagttggcctttttacgctctgtcaagactgagcgcgacccgatctacatcaaactggccactcaattcaacgacttggtgacagacgagcacaagtttaaaattaaggtccccagcgaccccgagaagaatgcaattaatgcactgtgggtcatcgaggcatgttacgacaacgaagaaggcgaagctatggtgccacagggctcaggcttccagctggaggacatcgggatcgtgacctgtgcccatgtcgtttccgagaagggcaaaatcttcgaggacctcgaagcttttaagcatgatgatagcaccgttaaatacaagcttagagtcgaacggatttgctcccatcgggatatagctatctgctcacttctagtggaagaaggtaaagagccacccaaacactctgttagccgtagtgcaaacaacgtcgaaatgggccaggacgtaaagcttctgggtttccccgcttatgcccctggacattcttatttcatggtagatacaaaggtggccaaaatttatacccagagccttgtgagaaagtttgagataaacgccctcattcgcgagggcaatagcggagggccaatcattgacagtaagagctccgtggtagggattgccctggagggcgcacggaaagaagccggtaacaatgggtgcctgaccattcccgaactggaggacgtgttatctgacgacaaatacaagatttga

SEQ ID NO: 7742 - RNA, 1644 nt, synthetic construct
  source 1..1644: mol_type = other RNA
atgaacaaggatgacttcctcaagattacccgtcataatgagttagcttcatactttggtatcacctatccagtgctgaccaagattatttacaagaccgacgacgcctacaaataccaccagttccagattcccaagaaaaacggagggtacaggaaaatcgcctcaccatcaaagaagctgaagctgattcaggaacagctaaaggacgtgttttatgagatctaccccactaaaccaagcgcgcatggatttgcaaaggacaaatctattgtgacgaacgccgaacggcacctggacaaaagattcatcttcaacatcgatctgtccgacttctttgggagtatacactttgggagagttcgcaatctctttaagagctccccattttatttcaacaacacagtgtccacgatcttggcccagatctgctgctttaacaactctctgccccaaggagcccccacaagtcccatcctttccaatatgatcgcttggaaattggattctcagctgcaacatctcgccaagctaactaattcaacctatactagatacgcggatgatatctctttttccttcaccagcaaaaagcgaaggctgcctgaagagatcataatcctccgggacgatgaaggatctcctggccacgcgctgactcatatcatcgaggagaatggcttcaacattaattatgagaaggtgaggctgtgtagcgcattttccaggatggaggtgaccgggctcactgtgaatgaatttctgaatgtgagacgccagtacgtacgccagatatcaagtatgctgtacgcctggaggaaacacggttacgtactcgcagcaaacgagttcaatgaaaagtacgataagcgatatcgtgctagtaaaaaacctaagagcttcctttacgtggtcaaagggaagttagcgttcctgcggtcggtcaggacagggagagatgccatttttaataagcttgccaagcagttcaatgatctggtggaggatgaatacaagttcaaaatcattgaggtcacagaccctgaaattaatgccattagtgccttgtggataattgaagcctgttatgacgacgagaagggggaggctgttattacacaaggtagcgctttccagcttaaagggatcggaatcgtgacttgcgcacacgttgtaagtgagaagggcaaagtgttcggctcactggaggcatttaaacactctgaccctaccgtacgctatgagctcaaggtcgaacgcatctgcgctcaccgagatgtggctatttgtagcatccttgtgaaggaaggaatcgagccgcccgaatatggcatagagaagtccctcaacccaattgagatgcagcaatctgttaaactgctaggctttccggcctacgctcctggccagtctcattacatcgttgattcgaaagtcgcaaaggtctataaacaaagcgctgtcaacaaattcgaaatagactccttaattcgggagggcaatagcggcggcccaatcatagacgctgaatcaaacgccgttggtatcgcattggaaggcgcccggaaggaatccggaaacaacggatgtttggtcataagcgagatagacgatgtgattggtacagacgagtataaaatttga

SEQ ID NO: 7743 - RNA, 1644 nt, synthetic construct
  source 1..1644: mol_type = other RNA
atgaaagatgcatttctgaacattaaaacgcaccaggaactggccaagtactttggtctaagctacgccgacctttctaagattatttacaagacagacttcgagtacaagtaccaccactttgttattcctaaaaagagcgggggcgagagacacattaacgccccgagcaaaaaacttaaactcatccagatcaccctgaaagacgttctctatgatatttacccaacaaagccagccgctcacggattcgtcaaaaataagtcaattgtgacgaacgctgaaaaacatttggacaaaaggtacatcttcaacatcgacatagaaaatttcttcggcgagatccactttggccgggtgcgcaacctgtttaagtcaagcccattcaacttcaataacaccgtcgcaaccatactcgcccaaatctgttgctttgagaatgcacttccccagggtgctcccacttcccccataatctcaaacatgattgcttggaaactcgacagccagttgcaacagttagctaaaatcaccaattgcacctacacaaggtatgcagacgatattagcttctccttcacttgcaacaagaaccggctgccagaagagattgtgtccgtgagtgaaggagacgccagacctgggcgtaccttaacagggatcatcgaggataacgggttccgaattaattactcgaaggttcggctccgcggaaaatactccagaatggaagtgaccgggctgaccgttaacgaatttatcaacgtaaagcgaaagtttatccggcagctgagtagtatgctccacgcatggcgtaaatttggctatgataaggctgaagaggagtataataacaagtacaatcgcaagcatagggctagcggcaaagagacttcttacctgcatgtagtcaagggaaagctggcgtttctgaacaatatcagatctaaacgcgaccccgtgtacataaaatacgctaagcagttcaacgaactggttggcaatgagcataagttcatcatagtcgaaattacagaacctgagcaaaatgcaataaattccatttgggtggtggaggcatgttatgactataatgacgaggtcagagtttctcagggaactgggtttcacttgtcagatgtgggcatcatcacatgtgcccacgtcgtgagtaatgatgacggggaaatctatgaggagatagaggtgttcaagtattctgagactacaaaaaggtatacgatcaaggtcgatagaatttgccgccatagggatatcgccatttgttccctggtggtggacgaggatgaaaatccgcccaacaatgagctacagaaaagccagtccattccctatatacaacagcaagtgaagctgcttggctttcctggctatgcgccaggtcattcttactcaatcgtggacgccaatatcaccatgactttcgtagaatctggagttaacaaggtcgaaatcaatcagcttatacggtccggtgatagcggaggtcctatcgtagatgccgattcgaacgtgattggcatggcccagaagggggtggacgagaagtataagcgaaacagttgcgtcgtattgcaggagattgaagcggtgtataactcagacggatacaaaactgagtga

SEQ ID NO: 7744 - RNA, 1632 nt, synthetic construct
  source 1..1632: mol_type = other RNA
atgaaactgaaagagtttcagaaaatcgagacaagtgaggatttggcaaagatttttggcatgtcgtacaaggaactttccaagatcatctataagctaccgttcgaatatagatatacatacttcgagatcagcaagaaaaacggaaccaaacgcctgatatctaagcccaataagaagctgaagcagatccagaacaaattgtccgagacgctatatagcatctacaaacctcgaccttctgtgcacggatttgtaaagcagcggagcgtgatctctggcgccgaaaagcaccttaataaacagtcgattctcaacatagacctcgagaattttttcgacagcatccactatggaaggattaaatacctcttcatggcacacccattcaactgtaatgaaaccatcgcgacgattttggcccacattttttgccatgagaacaaactgccccagggcgcctcaagttcacccatactgacgaatatgatctgctataagctggacaaagagcttcagaatctggccaaacattgtaatgctacctacactagatacgcagatgacataaccttctcttttaccaccaacaagaagaaaattagcaagcagatagtagaggacaccgaagtgctgaccatttcacccgtgctccagcagatcatcgagaacaatggattcaagatcaattacaacaaggtccacctttataaaaagaatcagcggatgctggtcactggcatcaaagttaatgaattcaccaacgtgcagcgcaagtacatttcaaagattcgtagcatgttatactcctgggaagagcacggttacattaatgctaaaaaggaattcgagagcaaatatttgactgagagacatcgggtgttttctagtttgccagagtacaggaacgtgattcgtggaaaactgaattacctcaagatggtcaggtctaaacgcgatgtactctacatcaagtatgccaaatggtttaacaagctcgtggacgagttctccgaacctcatcttgagtacttagaaatcactcccgaggaaaagctcttaatgcagagtgtgctggtgattgaaattctatacgacaactcagaaggggaatgtgtttgtaaccagggaactgggttttatctgaaggatgttgggatcgtaacatgcgctcatgtggttacagatgataaaaataaccccctcgacaacatcgatgtctttcgatatgacaagattacagagaaattccggtgcactatacaaaagatagattccatcctggatctggcgattctgcaacctgtggatccggaatcactgaaggacattcaaccacttgagcagtctagtgagactatagattccttgcacacagtcaagatgattggctatccagcctacaaaatcggccaaaccccatacatcgttgacgctaaaattgctagcatctattgccaatccacaatcaacaagttcgagatagactccctgatcagggaggggaacagtgggggccctatcttaaacagcaacaataaagtcgtgggtattgccgcagaaggggcagaaaagtccggtggcaataatgccgtcctgcgcattgacatgctggagagaatcaagtcttga

SEQ ID NO: 7745 - RNA, 1638 nt, synthetic construct
  source 1..1638: mol_type = other RNA
atgcccgagaaatcattcctgagcgtgaaaagtcctaaagagctctcactgtattttaacctggagtacgcagcattcagcaaaattttctataaaaccgcaagcgactataagtacaagaagttctacctttctaagaaaaccgggggcaaacggataatctccagtcccaatagaaagatcaaagaaatacagcgttgcttagcctacacactcaagaatatttatcaggtaagaccctccgtccacggctttgtcgagaagcattctatagtcactaatgcaatgccgcatctcgacaagaagttcgtgttgaacctggacatcaagaattttttcgattccattcacttcggaagggtaaaacatctcttcatgtcccagccctttaattttgtgcactctgtcgctaccgttctcgcccagatttgttgttttgaaaacaagctgccacagggtgcgccaaccagtccaatcttgaccaatatgatctgttggaagatggatgcccaactgcaacaccttgccaaaattaaccactgcacgtacacccgctatgtggacgatatcacattcagctttacgtgcaacaaaaaacagatcccaaaaagtatcctgatccagcccgagtctgagctggtggtgggacaggacctaaaaatcatcattgagaagaacggatttgaaataaacctagcaaaacttcgcctttatgggcggaaccaaagaatggaagtgacaggtttgactactaacgagttccctaatgtgcgaaggaagtacatcaaacaaattcagagcatgttacacgcttggcgcaagtacggctatggcctggccgaaaaggacttcaaggagaagtactataagaagcaccgagcttcccagaaaatcccatcgttcgagaatgttattataggtaagctggcgttcctcaaaagcgtcaggggactgaggtcacaggtgttcataaaactggccaagcagtttaatgatctgactgagtccggaaaaatgaagttcaactacatagagaagacgaaggatgagactgacatttccaatagcctgtgggttatcgaagtgttgtacaacgacaagaatggcatccttaaagctgggcaaggcacaggtttttactttgagaacaaaggcttaatcacatgtgctcatgtggtatccgaaaacgacgaaaattttgagaagattaacgctttccagtttgataagccttcaaagaagtatctgttgaagatcaagaagattgacaaccatagagatattgccctttgtgaattcagcgattgcaccatgaacgacattcagatcaataagctcgacagtatcactgtttcaaatgaccaaatttctcagttcttggaggtcaaactgttcggctttccggcctacaagattgggcaaacaccttacatcgccgatgccaaaatagccacaatttatacccagtcggcggtgtctaaatttgaaattgatcaccagattcgggaaggtaacagcgggggccctatcctaaataaagataataagctcatcggagttgcactggaaggggctgagaaagggtcaggctctaacggatgcctccagctggacgaaatagtcaaatttatcaactga

SEQ ID NO: 7746 - RNA, 1683 nt, synthetic construct
  source 1..1683: mol_type = other RNA
atgacctccctggaaacactccaggccctgacaacttcccaggacgtggccacgctcttcggaaagagctacaccgaactctctaaaattatctatcgcactcctgagaaataccggtatagggtcttcacaatcccaaaaaagaccgggggcctccgcacaattgctagcccaaggcgaaagattcttgaaattcaacgacgcatatccatactgctgcaggacacctatcagcctcctccttccagtcatggtttcgtgagaactaaatccatcgtctcaaacgccgaacgtcacttgaacaagcgttttatattcaatgtggacttagagggcttcttcgattcactgactttcggaagagtgaaacggtttttcatggcacaaccatttaacattcccaacgagccagcaacagttctggctcacatctgttgctttcagaaacgcctgcctcaaggagctccgacctcacccataattaccaacctaatttgcaggaaaatggataggcaactccaggctctagctaaccagaatcatgccacttacactaggtatgccgatgacctgactttctcttttacgcgggggatgagtaagttgccttccgctatcgtgtctcataaagacggcttgcccggcagcggtctgatggagatcatcaaagaaaacggcttcaagattaacccacagaagactagattgaattccaagcatcagaggctggaggttacaggccttatcgtgaacaagtttattaacgtgcaccgcaaatttatccggcggaccaccagtatgttatatgcttgggaaaaatttgggcttgagatggcagagaaagagtaccttagcgtatactctaacctgattagaccatatgcctccgggcaccatccaaagtttcacgaagtcgttaaaggtcgattggccttcttacacatggtgcggggaaaaagggatccgctgtacatcaagctggcaaagcgattcaatgcggttctggatgacaagacctcctctcttccctatatcgaaacgtctagctacgaactgtcattatcggaggccatctacgtaattgagattttgtatgacaagaaggtcaagaagggcaagaatgtgtcagaagaggcggtggtcatgcaaggaactggcttttttctcaaagatattggattcgtaaccgcagcccatgtcctgctcgataataaaggcgtagaacaccccgaaatagaggtgtttagccccaaaaatagcggagtgagatacaagctttccatccagacattggacatccaccgcgatctcgccgtcggaatactattcggaccggacaaaaagaagcacaccagttcaaaccagctgaccgctcagaaatcgctccctgtgcagagagacgcgattaccctggtcggttttcctgggcataaggtaggccacacaaagccctatatcgatgacgggaagatcggtaatgtttacacgcatcagggggtgcaagtgtacgatatcacaacacagatccgtgagggaaattctggcgggcccgttctgcttgggagcacctacgaggttataggtgtggccagtagaggcgcagaggggaagacaggctctaatactgtgatcgcagtcagcgagctcttcaatctgctgagcaagtcaaacagtaaaaagtga

SEQ ID NO: 7747 - RNA, 1788 nt, synthetic construct
  source 1..1788: mol_type = other RNA
atgcatctgaaccctctaagtaaggccttaagttctgtatcttactctgacttgaccgcaagttttctgcaggtgaagactccagaagaccttgcactttggttcggcttctcaaaatacgccgccctgggtttcttgatttttccacggcccaagtacaccgctttccttataaaaaagaagaacgggagcgaaaggctcatccaagtcccaaacaagaaactcaaagagatccagaaacgtctgctccacgtgctaaatgagctcgataacagtcgcccctccgcacacggcttcaggaagaagttgtcagtcgtatcgaacgccgaacaacatagcggacataagaagcattatgtctttaacctcgatttgaaggacttctttccctcaatcacttttccccgcgtccgaggagtgttcctgtcagagcctttcaagttcccggctaatgtggccaccgttttggctcggatatgtacatgcaatggagcattgccacagggggcacccacttctccaccccttagcaattacatttgccggggactcgatgggtccttacagcagatcgctaaagcatcttacagcacatatacccggtacgccgatgacctgaccttctccttcacaaacaaaaaaagacatcgtctgagccctaacctcatcaatacagccgtcgagaacgctacggtgtccctcaagctgaaagagattatcgaggatcacggattcaagataaactttgaaaaggtgagactcagaagcagacatgccagaatggaggtgactggactgacagtgaatgaattcccgaatgtgaagaggaaattcgttgacgagattcgcggtatgctgcatgcatgggaaacatatggactggaaaaagcccaggagggctttctttcacgactgtataaacgtcaacttcggagcggcggcgttcctgcgttcgagaacgtcctaaggggcaagctgctgtatttaaggcaggtgaagggtgccgacgataaggtgtataatactctggcgaggcgctttaacgcctgttcgaaccttattggcaagaattttcagatggctgtacctatgatcgatgtggcgctaagcgaacaggatctggaaaaggccatctacgtgatctcttgcgtacacgaagagtatgattttgagattaaaggcacgtgcttcttcttaaaaggcgtaggcgtggtgacttgtgaacacgtcatgcgatacccattaaatgtcgacgagaaaggaaacaaaatacacaactttcccagagagctcactgaatcctactttggcctctctcatggtcgcatctttattcaggacaccattgaaaatcctctgtgtgagctggaaattgtttggctggaccggaatgctgacgtggtggtcctcagacccaaagatgaaattaagatcgagcacttgacgctcattggagcaaccgcggagacaaagaccaaagaggtgaggcttgtcggctttcccttccacacccctgggaaatccctgtccgttgctgagggcaaaatcaggtcccgataccggcactttggttatgagaactacgacatcacctcattgatacgccaggggaatagtggcgggccggttctgaatagcgactttcacgtggtcggagttgctaaggaaggggagagacaagatggggggaataacggggttctgatgctggccgagctgatcaagctgcacgcccactataagaacgtgcagggtccactgcctaaaaataaggtgtggagttcctga

SEQ ID NO: 7748 - RNA, 1653 nt, synthetic construct
  source 1..1653: mol_type = other RNA
atgcctctggtggacaacattcaccagatcttaattaagtctgacgttcagccgttttcacggtactacttcgacctgtcatacgaagagctatcaaagatcatctatccgactcccaaataccaaaccttccacataaagaagaagaatggtactgacagagttattcactcccccagctataaggtaaaacagcttcaatacatagtcattgagaagatcctgaaagagacaatagtgcctcggccatctgtgcacggatttgtgaaggaccgcagcatagttagcaacgctaagctccatgttggcaagagacatgtgttcaatgtagatcttaaggatttctttccctcgattaattttcatagggtgaagggcctttttagaggcaagccctttaactttgcaaataacattgctgtgtgtctcgctcagatctgctgctacaaaacaaagctgccacaaggcgcgccaacttccccaatcctgagtaatattatttgccgtggcttggatggggagctgcaggtactggccaagaacagtcacgccacatatacccgctactgcgacgacattacattctcctttaccaagccgaatcctagcaaaattccaagacatattgtccaagttgactctaatgtggcttccgccggggaaaagctcaacgacattgtcgtggcgcacggcttcgaaattaattgcgagaagaccaggatgtatgactggaaacgccggatggaggtaacaggattgactgtgaacaagtttccaaatgtgaaacgtaagaacattgaccggatccgcatgatattacattgctgggagaagttcgggtacaaaaaagcccaggaaaactacatcgagttcactaaaatcgaaaagtccgatttccgaggcaaatgtttcctcagttacaccaggggatatttgaattttatcaagtcggtcaaagggatggacgaccccgtgtatagaaagctggcaaagaaattcaacacgcttatcgatttcgagttcgatggcaaaagaaaagatctccctgtggggtcagtcgtcaaaattagggaggaactagataaagcaattttcttgatccagtgtgaaaacgcagccggacagtgccaacagggaaccgccttcttcctgaaagatgtgggttttgtgacatgcgatcacgtgaggtggctcaacgaggagaacatccctaccgacgaatatataggctacttttttgaacgggagatcaaaatcctgaatagcgaggagcaggaagtatgtaaagtccgcatcaaaaagtacgatgccaggaaagatttcctgattctcgaaccaaccgaacaggtcatcgtgaacatggcccttctgcctcaggtgaacatccctcagcagggagatcccttaatcctgtgtggttatcctagcccctttatccaccgacagacattgactatcatcaataccactctaatcacgaactataatacgtttggggctgaccatatagagataagcacacaaattcgaaagggtaattctggcggacccgtcctgaactcttcctttgaagttgttggaattgcaaagaccgggtctgagcagcacgggggtaaggacagtgtgctgtgtatacgggagatcttcaattga

SEQ ID NO: 7749 - RNA, 1572 nt, synthetic construct
  source 1..1572: mol_type = other RNA
atgacccagcggtttattgagatacaaagtaccgacgaactggccgctttttttggtctggactataagcgcctggctgcggctctgtacaggactgacgcaagtcatcggtatcacgagtttaggatacctaaacgaagcggcggagctaggacaatccacgccccaaatcgtagaatcaaggcactccaaaggagactcgcaggcgaactcgacgccctgtacgtacccccgccatgtgtgtacggttttgttaacggccgggggattcgcaaaaacgctgatgttcacgctggcagaacatttgtgttcaacgtggacttaaaggagtttttcccctcaatccatttcggccgcgtgcgtggtgtttttgaaaaggcacccttccacttcacgagagaagtggccaccgtgctcgcccagctttgctgccatcagaatggactccctcaaggcgcaccaacttctcctgtgatttcgaattggatctgtcgcgggatggaccgggaactgatggctctcgctaaatcctccctggcaacatatacccgctacgcagacgatctcaccttcagctttacttgctcataccggaggctgccaggagccttggtcgacgtcagaggcagaaaagctgaaacaggagatgccttgcaaaaaatcatcgaaaaccaccggttcaaggtgaacactgataaggttaggctagccgggaaaagcacccggatggaggtcacggggctgactgtgaatgagtttcctaacgtacagagaaagtatgtacgacaggttcggtctatgttatatgcctggcgagaacacggactgcccgatgcggagcgcgaattcaatgagaaatacgatagagggcatcggccttccggccgacccaaaagctttacagcagtggtagccggaaaactagcttacttgttggacgtgaggggggctgagaaccccacctataataggctggccgccgaatacaatcgccttgttggcgaacagggagatcatctgcctcttgcccctccggggccccttgaaagggaccttatgggtctgcaggcgatgcgaaaggggaaggcccacgctaagcagtacgagaatatcgtcgagtccttactaacacaactgctcagcccatcactggagaatccgcagaaccaggtcagaattaatggaggccgcaaaattgtcgatattacattggataaccacgcaacctcaggcttcttccactatatcgccctgaactacaacgctccccatatcattgtcgagtgcaagaactattctggcgatccagccaacccagagctggatcagttggtgggacgtttcgcccagaaccgtggtcgggtgggtatactcgtgtgtcgaagttttggatccgcagccaagaagaagagattcctggagaggtgtcgcgacactgcaaatgccgggaatggcttcgtgatagccttggacgatacggacatggcgctccttgtcgaggagcgcctgaggtacggggagaaacagtcttatagattactgatggaacggttcaaggcgcttgtgatgtga

SEQ ID NO: 7750 - RNA, 1626 nt, synthetic construct
  source 1..1626: mol_type = other RNA
atggctacactgaccacccgtaggagcatcgccgaattgatcgaaatgtctccgaccctgctggacgggcttgccaacagcctcaatagaagagcctatcaccggttccacgtaccgaagaagagcggcggatcgcgagtgattactgctcccaccgcgagactaaaagaggttcagaggagactgtaccgagtgctgagcgcactgaccgttccccccacttgtgcatttggtttcattgagagaagaagtacagtacacaacgctcagtctcatactcgttctagatgggtgctcaacatagacctggaagaattttttccttctatccactttgggcgggtgcacggtatgttgatggcccctccatatcacataccagaattgggtgcacagcgcatcgccgctctatgctgccatgaatcagtcctccctcagggcgctcccacatccccaattctggccaacatgattgcccgaggcctcgattttgcgctcagggactttgcaaatcaaaaccggtgtcattacactcgctatgcagatgatttaacattctcacagttccgaaagcgctttccatccgcccttgttactcggggcgtggacaatgtgacacgcgtgtccgatgaacttcgccagatcgtcgagagccatggatttcgcttgaacgccaagaaaaccagacttgcacattatagtgagcggcaggaggtaactggactgatcgtgaatagtaagcgacctaatgtgccccgcgagtttatccggaatctgagagccatgctgcatgcttgggagaggtacggggaagaggcagctgaggccacttaccggaggacattcgcacctagggatgcttcagatcacgtcggactgttcagggagacactgctgggacgtctatcatacctcgccatggtgaaaggaaggtcggaccccgtatacgtcgagttaatccgaagagcaagggagcgagtcgaccgcaagcacggcacgaactacttcgacaccatgccaatccccgaagatggggtggctgttttgatgacgacggaggggagagatagagctggtgagcaaggcacgggatttgtcctccggaatattggcgttgtcacctgctatcatgtggtccggagggccgtaaccgtggaggcttttccatggcacgcgcctttgcgggccaccaacttattcatggaccggttcaatgttgattgggacctggcaatactgcgcggtaattacggagccaagtatcagttcgaggccggggatgacgcccaactgagaatcggaatgcctgttaggattgtgggtttccccaactgggcacctgaccgtccaatgtccattacagagactgtcattcagggcatgaacagtgattacttcggagctcgcaggttcaccgtgcgtgacgccattttcggcggcaattccggaggcccagtgcttaatggcgccgggaaagtgatcggcgtggccatgactgggatgttccaaacaggggggggcacagaaaacatgataaccccgatctcttatgtgcggcgcctcgcggaacagcctgcttacgacccctttagcaacgtcgcgagcaaaaccagggaacactcctga

SEQ ID NO: 7751 - RNA, 1713 nt, synthetic construct
  source 1..1713: mol_type = other RNA
atgaacctggacaccgcacagcgactcctcgaatgcgagactagagcagatctcgccgagtggctcggtgaagaccctaggaggctggctttttatgcttacgtgctgccggagcacaggcgctattcccatttcacaatagagaagagagcgggagggagccgtcatatccatgcgcccattgcccctataaaggaacatctgcggctcatttctgcagcactgtcccacttctataaccctcggaatgtggtaatgggctttgtgaaggagcggaatattgtcgacaacgctaataaacacagtcgccaggagtggattctgagggtcgatctgaaggacttctttccaactatccattttggtagagttgtaggggtgctgcaggccgcaccttttcagctccgttcagaggtggcccagacaatcgcacagttagcctgccaccaaggagtcctcgctcaaggcgcccctacttccccgatcttttcaaatctggtgtgtaggggactcgatcacgagcttctgaacttggctaggagagggcgctgcagatttactcgatacgcggacgatttgaacttctccactagcagaaagcggtttcctgatctgctcgcagcccgacagcttggtagtgagggccatacttgtgaagtgtctgctgccctgttacaggttataagcaaacacggctttacattgaacgacagtaagacgaggctcgtgcaccgcagtcaacgccagacggtgaccggactggtgtgcaatgaaaccgccaccgtcagcagacgctactatcggggtctgcgggccgttcttcacgtctggaggaaatacggagaagattccgccgccgaatggtttctggccaaccactacaagaggaacaaaccctcggggtctgacttctcctttaagaaagttgtaatcggcagggtgcagtttatcggctatgtttgcgggtggagcgccccaaagtaccagaagctggctaacctcctatcacagttagatccgacattccggaaaaagacagccaagacaccccccccagaaaagccatctggcttggtcatttggggagagggcgagacggactatctgcacttcttcatggcttggaactccctgcatcaggactatccaaaccttacaattgagttcccccaccctgctaaacgaacgaagggggctccaatgctagagaaaatgctggccgtgctcgaaaagacccccccactagaagcaaccgtttgtgtgttcgacactgacgaacctaagatcacctctagatttgagccagtcgagggaagcgcttaccttaagcttggcaccaacctgttcgtagtgctgctgcccactccaagtttcagaagcgggcgagatcccctctgtgtcgaactgctatacgaggaccccgcatcattacgcgatgagcgcggccggcgtctttaccttaaagacgaattccaggcggaggagccttaccacaaaaaagaaccgggagtgatgcggctgaaaccccgtagcaattcacttgtcgtcgaggatgtgcataatgggacaacccagcaaaatgttgcgttaagcaagatgggattcgcaaatttggtgcaatccaaatctacctcgtttgaaggcttcagagccctgttcgatgtgttgaatggcatcgtagaaacagagttgaccttgagtaatggttcttga

SEQ ID NO: 7752 - RNA, 1710 nt, synthetic construct
  source 1..1710: mol_type = other RNA
atggatgccagccttttcccgttccccatcgcgcccaagtgtaaagttgccaataataaagaactggctgctttgttgggaattaccacggccaaactaacctactatgcctaccatctggctgatgacgaaaagtacaaggaatttaccattaagaagcggaacggaggcgatcggttaattgaggcacccatcaaaggcctgaaagatattcaggagagtatcgccgatattcttgaggaaaattacaaacctcgagcctgtgtcttcgcatacgtgaaagatagaggaatcgtcgagcacgctgctacacatattggccagcgttggctattacggctggacctgaaagactttttccacacaatctctttcatcaggatcgctggtatcttacgcagatcaccttataacttcgcagagactccagctaagacctccgcgctgctctgtactaaaggccagaggctgccacagggtagccctgcatctcccgtgatatccaatatcctgtgcaaagggttggactacaaactgaaagagttggctgcacttaacaaatgctattataccaggtacgcagacgacatcttcataagcaacaacgggtcaaagtttccaccgtccatagcaatccgggatgaggacgggtctgcagaactctcagacaccctcaagaagattataattgatgccgggtttgaggtcaatctggataagacaattctacgaaagagatcggaacgtcagctcgtgaccggcgtggtggttaatcgcaagtctaatgttcccaaggagctgatcaaaagcattcgagccgcgctctacgcctgggaacagcatggactcgaagctgccgaagactactggaagagaaaaatcgataagtctaataggttcgatggcgagtcccctcagatgaagttggtgctcaggggcaagatcactcacgtaggtcatgttaagggttattcggacggcactttcctcacgctcgtgaaacgattgcaagccctcgatagtgactatcacattgatgagcaaaagattagtcgtactataacaggggagatccacatttacacggagggcgtaaccgacaccaaacattttcaggcggctcttagggcatttcagcggagtggcgagtttgccggactgaatcttattttcagaaacagcaagaagaccgggagcagtggattaaaagccttgtgcgagaacctgtgtgaaacactgcagaggcaccttactatatgcatctttgaccgcgatgaaagacctattatcaacgagatgtctgggtccccaggtaattaccgcgatcacacaaacaatgtcttttccctgattatcccaacacccgaattccgcgacccctccgatctgatctgcattgagcacctatatcaagacgcccaaatctatactccagacagccagggtaggcggctgtatagtaaggacgaatttgattctcttggatgtcataaggacaaccctcagctgttctgcagagtgagcaaacaatcactgatctatgatgaccaggtgattaacctgcaggagaagaagaacatagccctgcctaagaacaaattcgccgactacatcttcaacggcgcaccacccttctcaaatgtcgacttttcagggtttcgcggaacatttacccagatagtggctatcgccgcgagctactcccggtga

SEQ ID NO: 7753 - RNA, 1707 nt, synthetic construct
  source 1..1707: mol_type = other RNA
atggacgccttcttccccttcgacccatctcccaagtataaaatcagcaacaacaaagagctggcagctctcctgggcattagcacagctaagctgacttactatgcttattatcttgctgatgacgacaagtacaagagcttcaagattaagaaaagagcgggcggggaacgtttgatagaggcccctaacaagggcctgaaggaaatccagaaaaacataagtgtgtttctagcccagtcttacaagcccagagcctgtgtatttgcctacattcaggaccgaggcatcgtcgaacatgccgctacccacataggacagcgttggctgctgcgtctggatttgaaagatttctttcactccatttcgcttgcccgggtaagtggtgtcctgaggcgcgcaccatacaatttcgccgagagtccagcaaatacaactgcaaggctgtgcaccctcgggagaaggttgccccaaggatcaccagcttcacccataatttctaatattctatgccgcggactcgactacaagctgaaagaactcgccgcgtccaacaaatgctactacacaagatatgcggatgatatcttcatttccaacaatgggtcagccttccccgccagcatcgcgatcaggtccgaagacgggtcagctgagctctctgacacaatcaagaagattattacggacgcggggtttaatatcaactttgagaagactatcctccggaagaggagcgagcgacagctggtgaccggcgttgtggtgaaccgcattagcaacgtccctaaggattttataaaaagcatccgcgctgcactttacgcctgggagaaacacggactcgaggctgctgaggagtactggaagcgctcaatcgcccagacaaatagatttgacggggaatcaccgcagatgaagcttgttgtgcggggcaaagtgactcacgtgggacatgtcaaaggatattccgacggaaccttcttaacgctcgcaaaacgattgcaggcactggattctgaatatcggatcgacgaacaaaaagttctcaggaatataacgggggagatccacatatatactgaaggcgtaactgacaccaagcactttcagaccgcactccgggcattgcaaaggaggggcgagttcgtgggtcttaacctgagtttcagaaactcccgaaaacccggttctagtggtctgaagctgctgtgcgagagtcttagcgaaaccttgcagagacacctgacaatctgtattttcgatcgcgatgagcgccagatcattaatgaaatgggcgggagccctggaaattaccgggaccatgccaataatgtgttctccctgatcattcctacaccggagttcagagattctggcgatttgatttgtatcgagcatctataccgggacgcccagatttatttaaccgataatcaaggccgcaggctgtattccaaggaagagtttgattcgttagggtgtcataaatccgagcctgatctgttttgcagaactaccaagcagagcctgatctacgacgaccaggtgatcaacttacaggagaaaaagaatgttgcccttccaaagaacaaattcgctgattacattgcagccggtgctccacctttcagtaacatagactttgaaggatttcgaggcacctttacacaaatcgtcgaaatcgcctcttcatattcccggtga

SEQ ID NO: 7754 - RNA, 1707 nt, synthetic construct
  source 1..1707: mol_type = other RNA
atggataccttctttccttttaacacttccccaaagtacaagattgagaacaataaggagctggccgaattattgggggtcactacggcgaaactcacatattacgcatattacttgcgggatgacgacaagtaccacagtttcaagattagaaagcggattaatggggagcgactcatcgaggccccaaatcgaggcctgaaagacatacagaagacaatttcacatttccttgaacggaactatacaccaaggtcatgcgtgttcgcttatgtaaaagagagagacatagtggagcatgcaagcattcatgtgggacagcgttggctgctgcgcctggaccttaaggatttttttcacagcatctcatcagcaagagtatccggggttctcaggcgcgcccccttctgttttgccaagtctcctgctaataccgtggcaaggctgtgtacgaaggacggaagacttccacagggaagcccggcttctcccgtgatttcgaatatactgtgtaaaggcttggactacaaactcaagcaattggcctcttccaacaaatgctattatacccggtacgccgatgacatcttcatctcaaataacgggagtgtctttcccagtgcaattgctattagaggcgatgacgggaacgtcgagttaagcgaagagatcaagaacataattatcaactccggcttcgaggtgaacgccggaaaaacgacacttaggaaaaagagtgagcgacagttggtgacaggcgtagtcgttaataagaagaccaatattcccaaggaatacattaagtccatcagagctggtctgtatgcctgggaaaaatttgggttggtggccgccgaggaatactggaaaaaggagatagagcggagcaataaattcgacggccagcccccacagatgaagctcgtgattcgcggtaagattatacacgtcgggcacgtgaaaggctacaccgatgcaacattcctaactttagttaaaaggctgcaggcgctggacagcgaattcaagatcgatgaacaaaagttccgtcgggaaattacagacgaaatccacatctataccgagggcgttactgataccaaacatttccaggccgccctgaatgcgttccaaaagagagacgaattcctggatctaaagatcatcttcaagaactccagcaaacctggctctgctagcctaaaaactctctgtgaaaacctgagggaaaccagccaaaagcacctcactctgtgcatctttgatcgagatgaaaagaatatcgtaaacgagatgtctggatcacctggaaattatcgcgatcatggtaacaatgtcttttcgcttatcataccaattcctgagtttaggaagggaaatgactctatctgcattgagcacctgtaccgcgacagcctcctgtttacctatgactccgaagggcggcgcctctactttaaagacgagttcgattctcttaactgccacaaaaccgatcccaacctgttctgccgtatctccaagtcctctctcgtgtacgatgataatgtcatcaacctgtcagagaggaaaaatgtggctctgccgaagaacaaatttgcagactacgtgtgtagtggccagcctccctttaacaaagtggactacggtggtttttacgaggttttcaaacagatcttagagatcgctagtacttataacaaatga

SEQ ID NO: 7755 - RNA, 1707 nt, synthetic construct
  source 1..1707: mol_type = other RNA
atgaaagaacctaagttcatgcagaacttgcccagctataagatctctaacaacaaagacctggccctgctctttggagtaccgacagccactctcacatactacgcgtatcacctgtcagatgagcggaaatacaagtccttcaaaattataaagcgcagcggcggagaaagactaatcgaagcccctatcaaaggactcaaagaccttcaaaaaacctttagcaactttctgtccgaaaatttcaagcctagagcttgcgtttacgcgtatgtcaaggataggggcatcgtcgagcacgccgcaacccacatcggtcagcgctgggttctgcgtatagatctcaaggatttcttccactctataacaagcacacgcattactggccttctacgcaagtccccgtacaattttgccaagagtcctgcggaaactgtggccaggctctgtaccattgacgggcggatgccacaaggctccccagtcagtccaatattctcaaacattatttgtcggggcctcgactataaactcaaggaactgtcgagcctaaacaaatgttactacactagatacgcagacgacatctttatttcaaataatggcagcctcttcccaagcgccattgcttctagaaacgacgacggttctgtacagttaagcgatgctatcaaggacattattacgaaggcagggtttgtgatcaatatcgagaaggtgatccttaggaaacggagtgaacgacagttagtcactggcgtggttgtgaacaaaaaatctaatgtccccaaggtgtttgttaagagcattcggtcttcactgtatgcttgggaaaaatttggcctgccggccgctgaggactactggaagcgcgagatctacaagaataatacccataacggtgagattccaagtttcaacttggttattagggggaaggtgacacatgtggggcacgtgaaggggtatgcagaccctacctatctttcactggccaaacggcttcaggcgctcgattccgaattccatatcgacgaggagaagatattcaacacgatcacttctgagattcatatttacaccgagggagtcaccgatacaaagcatttccaggctgcactcaacttctttaagtccaagggagatttccaggccctgaacctggtgtttaagaatccccgaaaaacaggcagtgctaaccttaaagcactgtgcgaaaacctgagtgaaacccagcagaaacatctgtccatttgcatctttgatagagacgagcccgctatcatcaaagagatgtcgggttcacctgtaaactatagggaccacaacaataatgtgttctccctgatcatttcagtgcccgacttcaggcgagacttggattacatctgcatagagcacctgtataaggactccgatttatacatcgccgatctggaaggaagacgtctgtattccaaggatgagtttgataatctggggtgccacaagtatttggataatttgttttgtcgctctagtaaaagctccctgatctacgacaatatggtcatagatttacccacgaaaactaacgtggcattgcctaagaacaaattcgctgagtacattatcaatgccaaagcaccctttaatgatatcgacttcgaggggttcaggccaacctttaatcaaatctttgagatagccagcacctatagaaagtga

SEQ ID NO: 7756 - RNA, 1719 nt, synthetic construct
  source 1..1719: mol_type = other RNA
atggattcattttatcccttcattcccaatcccccctataagatctcaaataatactgaactggccaatcttcttaagattccagtggcacgcctgacttattacgcctactatctgccagatgagcagaaatacacttcttttaacatacgcaaacggaacggcaacccgcgactaatcgaagcacccatcaaggggttaaaagacatccagcgcgcgattagcgtgtatctttacgaacaatataagccaagatcctgcgtgtttgcgtacgttcagggaaaagggatcgtagaacacgcttcaatacacatcggacagcgttggctgttacgcttcgacctgaaagacttcttccatacaatcaagacgtccagaatctcgggactgctgcgacggcccccttattcccttgctaaaggccctgccgagacaatcgccaggatctgctccaaagacggtaggctgacccaggggagcccctctagtcctgtcattagtaacctcctctgcaaggggctggactacaagattaaggagttggcagcaaagaacaaatgttactattcccgatacgccgacgatatttttatcagcaacaacggatcagtgttccctagcgccatcgctatccgtaccctcgagggaaccgcggagctcagtcttgcccttcaggaaatcgtaagtgcgtctggcttccagattaacaaaagcaaaacaactctgcggatgaggtccgaaagacaaattgttaccggtatcattgtcaataggaagtctaatataccgaaagaattcctcaattctgtccgggctgccttgtacgcatgggagagatttggcttggaggctgctgagaattactggcggaagaatatagaccctaaaaacggctttaaccaggaggacaaagagggcccacgcttgaggtgggttatccgcggaaagatcaaccatattgcccatgtgaagggttattccgatagcacttttttgagtctcgctcggagactgcaatcactggattcctcttataagatcgatgaacaaaagatcctccatgccctgacagacgaaattcacatatacacagaggggatcaccgatacaaagcacatcgaatctgctctgaagaatttcaagaaaaaccaggagttttccaacctgaatttggtgctgaaaacccccaggaaaccaggttctgcttcactaaagtcgttatgcgagagcctctctgtcgcccctcagaagcagctaaccatttgtatatttgatcgtgacgaaccaaacatcattaaggagatgggcgggtctagcagcaactaccgagatcatacaaataacgtgttcagcatgattatacctaccccagacttcagggacgctaatgagccactctgtattgaacacctgtacaaagatgaggcaatctacatcaaggatagtcacggccggagactgtacagtaaacacgagtttgatagtctggggtgtcacactttagagccgggactgttctgtagaatttccaagaatacgctcatttatgacgacaacgtgatagaacttagcaagaaagccaacattgcattgagcaaaaataagtttgccgactatatatccaacggtgcccctcccttttgcaatattgatttctcaggcttcaggaatatgttcagccagattacgcaaatcgcaggcctgtacaagtcaaactga

SEQ ID NO: 7757 - RNA, 1707 nt, synthetic construct
  source 1..1707: mol_type = other RNA
atggacgcatctctgcctttcgggcaatttcccaagatttccataagctcaaacaaagagttagcagtgctgctaggaatcagtgttaataagctgacgtactacgcttattacctggatgaggagtcaaagtacaagacattcaacattagcaaaagaaacggcggagtccgagtcatcgaagcgccggtgaagggcctcaaagacatacagaaaaacatcgtcacattgattgaacctaactataaagccagatcttgtgttttcgcgtacgtcaaaggccgcggcatcgtggaacacgcagctgtgcatacaaatcaacgctggctgctgcggttcgacctgaaggacttttttcatactatttccgccgtacgcgttgccggtcttttccggcatccgccatttaatttctccaaaaatgtggccgagacgatcgcccggctatgcaccaaagctggcagactgacccagggtgcacctacctcgcctatcataagcaacatactctgtcgggggctggattataaacttaaagaactcgcttcacagaataagtgctattatacccgatattctgacgacgtattcatcagtaataacggatcattgttcccttctgcaatcgcggaacgggggagcaacggcgtggtgaagcttagtgatgacgtcctggagattattgggggcgccggcttccagctgaatctgagcaagaccatcttgaggaacagagccgagcggcaactagccacaggggtcattgtgaaccgcaaactcaacgtgcccaaggaatatataaagagcgttcgagctgccctctacgcttgggacaagtacgatcttaaacaggccgaagagtactggcgcgagcatattgatgaccgaaacaggtggggagacagtttaccaaggctatcctgggtgatcaggggaaagattaatcacatcggtcacgtgaaaggatataatgaccccgtgtttcttaccctggcaaagaagctccagtcactggatcccacttaccggcttgatgagaggaaaatcctgcgttctttgactgacgaaatccacgtatacgcagaggggatcactgattgcaagcacctcgaaacagccttgaagttttttaaagccagaggggagtttacaaacctcaacctgaacttcaggaacactcggaagcctggctcctccgtcttaaaagctctgtgtgagcatcttagtgaagccccccaaaagcacttgaccatctgcgttttcgatcgcgatgagaggccgattatcagcgagatgggtggaagccccgggaattatcgcgatcataccaataacgttttctctctcataatcccagtgccagacttccgtgattccgacattatctgtatcgagcacctgtacaatgatagtcagctgtacattcccgacaatcagggtcgaagactgtattccaaggaagagttcgattcactgggctgttttaaaggggaagcgcacttattctgcaggatgaacaagcagtcgctcatctatgacgacaatgtaattgacatggtggagcgtaggaatgtcgctttgcctaaaaacaagtttgctgattacattgtgtctggcgccccaccatttagcaatatagatttctccggctttagaggagtgttttctcagattgtcgaaattgcaggattttacggtaagagatga

SEQ ID NO: 7758 - RNA, 1737 nt, synthetic construct
  source 1..1737: mol_type = other RNA
atggtgctgctgaactttccactgaaggaacaggctccagagtataccatcagtaataacaagcagatggcacaagtcctggggattaaaccctcgaccctgccctactacgcttactacctccccgacaacaaaaagtataccagcttcaacatttcgaaacggggcgggggtctgcgtctgattgaagctcccaataaaaggctgaaggatctgcagagggcaatcgcagagtacctgggagagcattataaaccacgggcctgcgtatttgcctatgttgggaaaaggggcattgttgagcatgcatcagtgcacgtatgtcagagatggttattgcggctggacctaaaggatttttttcattctatcacagctcctcgcttggcaggattactctcagcccccccattcttgctcgcaccaaacttagcccgcacgctatcctttatatgtacgaaagatggccgactcactcagggggcacccgtctctccggtcgtatctaatataatttgtagggggctggactattccctgaaggcctacgcggcgaaaaataagtgctactacaccagatatgctgatgacatctttttcagcaacaacggagccatctttcctagttccctggcccggaaagacgaggccggaacagtgatcctgggcgatgaattgcaggagataataaaagccagcggattcatcattaatgagtctaagacattcctgcgaagtcgcgcagaaaggcagatcgtcactggagttgtcgtgaacaagaaacttaacgtgccaagagaatacgtgcgacagatcaaagccgcgctccacagttggcggaagttcgggttggaagcggccgagaagtactggaacgaaaaaatcgacaaaagaaacagatggtctggcgcctccactagcttcaaacttgcagtgcgtggtcagatcaatcatgtgggccacgtgaagggctattccgattcagtctacttactactagcgaggaagctttcccaactggataacacatttaacttcgatgaaagtgctattgccgagagcatcgctgaggagattcacgtgttctgcgaaggagagtcagacatcctgcacctgggtcatgcctttcgatgtcttaagccgcggtatccttcactcaatctgatcttcaaactgcctgggattggtaagggtgatggctctagcgtattgaagagtttttgcgacaccgtgcggaatcacccgcagaggcacctgacaatttgcctctttgatagagacgagcccagcatcatcagggagatggcaggctctgctgtgagctataaggattatggcggcaatgtgttctcccttgtcatgcctcccccttcctttcgcaagaatgataacatctgcattgagttcctctaccaagacattgaccttctcagaagagatactcagggccgccggttatatctgggagaagagtttgaccaaaatagctgtttcaaaggagaagaaatgctctttaagaaattccctaagaacagcttgattctcgattccgacattatcgacgctcgcactgggaataatgttgcccttagcaagataaagttcgccgagtacatatcttcaaaggttgacccattcagttccgttgacgtgtcaggtttcgctattatctttgacgagatagccgctatccgtgaaacctacatgcgccctttccacgacgtggatggggattga

SEQ ID NO: 7759 - RNA, 1719 nt, synthetic construct
  source 1..1719: mol_type = other RNA
atggtttctttgaacttttatctcaaggaacaggccgctgagtataaggtcctgagcaacaaacatatggctcagatcttaggggtgaaaactagcgtcctggcctattatgcctactatcttcccgacaacaagaagtacaacagctttaacatcgccaaaagaggcggaggctttcgcttgattgaagcccccaataagcggcttaaggacctccagcggataatcgctgaatacttgggtggttactataaaccgagggcctgtgtattcgcatatgtgggtaaaaggggaatcgtggaacacgctagtgtgcatgtgtgccagcggtggttgctgcgactggacctgaaggactttttccactccattaccgctcctagactcgctggcctattgtccgcacccccatttctgctggccccaggtgtagcgaggacaatttctttcatctgtacgaaggatgggcgtctgactcagggagccccagtttctcctgtcatttccaacatcatctgcagagggctcgattacagcttgaaaacgtacgcagccaagaataaatgttattacacacggtacgcagacgatatctttttctcaaacaatggcgcagtatttccttcctctctcgcgcggaaggatgaggctgggactgttattctgggggatgagctcaaggacataattaaggcaagcggctttctgattaacgacaataagaccttcctgcgctccagggcggaacgccaaatcgtgaccggcgttgtcgtaaataagaaatccaatgtgccccgtgaatacattagacagataaagtccgctctccatagttggaagaaatttggtctggaaagcgcagaaaactactggagcgagaaaatcgataagaggaatcgttggaacggcgctagcatctcttttaagcttgccctgcggggtcagatcaaccacgtgggccacgtcaaagggtactccgactctgtgtatctgatgcttgcccgaaaattaagccagctagataacacctttaattttgacgagcgaagtattgccgagagcatagccgaggaggtgcacgtcttctgcgagggcgagagtgacattcttcatctgagacatgctttccaatgtctgaaatcagagtacccctcacttaacttaatcttcaagctcccgggcattggaaaaggtgatgggtcctcagtgctgaagaatttttgcgacatggtgaaaaatcacacccagagacacctgacaatctgtctattcgacagggatgaacctaatattatccgagagatgtcagggtcagcagtgccttataaggattacggaggaaatgtgttcagtctggtgatgccttcgccagatttccggaatgagaacatatgcatcgagttcctgtacaaagacgttgacctgttacgccaggatactcaaggcaggcgcctctatctaggcgaagagtttgaccagaacagtcgctttaagggacagggaacaattttcaaaaaaattcccaagtcctctcttatcctcgatagcgacatcatagattatcaaaccggcaacaatgtcgctctctctaaggttaagttcgccgaatacataagcaacggagtcgcgccattcgacagtgttgatgtgtctgccttctcggtgattttcaatcaaatcgcagccatcagagactcctacatgtcattgggggtctga

SEQ ID NO: 7760 - RNA, 1734 nt, synthetic construct
  source 1..1734: mol_type = other RNA
atgtccgcccaggacgccatcgatgagaatctcaacatttacagtatctctaccaaccgggagttggccaaaattctcaaaactaagacgagtactctatcgttttacgctcattacctgcccgataaaaagaagtacaaaacccacaccatctccaagagaggaggaggagccagaataatagatgcgccaaacaagaaccttaagactctgcagaaaagtatcgcgagttttcttaacgagcactataaggcacgcgcatgtgtctttgcgtatgtggctaatagaggtatagtggaacacggagaagttcatgttaaccagcgttggctcctcaggctggacattaaggactttttccactccataaccaccgctcggctggtcggcttgcttattgcaccaccattctgcatagcccccaacgtagctcggacaatcagctttatctgtacaaaagacggcaggctgcctcagggctctcctgcaagccctgtcatcagcaacatcatttgtcgggggctggactataaactgaagacgatcgcctctaaaaataagtgctactatacacgctacgccgatgatatattcctgtcaaataatggggcgatttttcctccgtccctggctttaaagaacgacacgggaatcgtggcactgggcccagaaatttcagagattattaccagcagtggttttagcattaacgaagagaaaacctttctgcgctctaggggcgagcgccagattgtaactggtttagtggtgaacaagaagctgaatgtcccgaaggaattcgtcagaaatatcaaatccgctctccactcttggagaaaatttgggttcgaggccgctcagaaatattggagggacaaaatagacaagcgaaatcggtggcttgtggaacatgctgattataaactgagcgtaagggggcaaatcaatcatgtgggttttgttaagggctattccgaccccatttacctctcactggcccgaaagctgagcgaattggattcaactttctctttcgatgaggaggcacttgccaacagtatcgcagaagagatacatgttttctgcgaaggcgacactgacctcctgcaccttgaacatgcttttcagaagttaaaaaacgagtaccccacactgaatctgacttttaagctgcctaataccggcaaaggtgacgggagcagcatcctaaagaatttctgcaacagcgtgagaacgataccacaaaagcacctcacaatctgtctgttcgaccgcgacgagccgaccattatccgcgagatggccggctcagccttgccatatagagatttcgggtcaaatattttctctctcgtcatccctcagcccgattttagggatcacgaatgtatttgcattgagcacctatacaagaatgatgacttacttaagaaggacagccatgggcggcgattgtacttgaatgaggagtttgattctaactcaaggcacacaggaggagaattgctatttaaaaaaatccccaaggcaacactgatcctcgatgccgacgttattgatttcaagaccggagagaatgtggctctctcgaaatccaaattcgccaactatatttacaacgagacacctcccttcacctccatcgatgtgtccggcttcaaggtgatcttcgaccaaatcgcaacaatccgtgaagcctactccaacgggatgcatggccagaaaactatctga

SEQ ID NO: 7761 - RNA, 1737 nt, synthetic construct
  source 1..1737: mol_type = other RNA
atgtcagtgcccgaggtgtccccattgcctgcgagcttcttggacctccttgccccagccgtaaaaattaagaataacaaggagctagccgctgagctcggaatctctctgggccgtttgacttactatgcttatttcctgcccgaccacaaaaaatacaaaaccttcacgatctccaagagagggggtggagaaagaatcatagaggctccagtgaaggggctgaaggaccttcagaaaacgattcttgggaaattcgagccttactacaagcccagggcctgtgtctttgcttatgtgcaggatagaggaattgtggagaacgccgacgtccacgactttcagagatgggttctgagggtggatctgaaggacttcttccattctatcactcagcgtagagtaatcggaatcttctcttccccgcccttctctttaagtcgggacgcagccagaacactgagctttctgtgcactaaagatggcaggttgacacagggcgcaccaacctcccctttgatcagtaatctggtgtgtaagggactggattacaccctcaaagaactggccgcaaagaacaaatgctactatacccgctacgctgacgacatctttttctctaactccggcgccatgtttccccgcattatagctgagaagatggaggacggtagcgtgaagataggggaagagctgaaaaacttgatagagggtgccggcttcgctatcaatgaagagaaagcgttcttaagatcccgcgctgaacgccagatcgtcacaggcctagtggttaacaaaaaggtgaacgtgcctagggagttcactcgagaggtgcgagcggccctatacagttgggaaaagcacggcctggaatctgcagagaatttttggaaggaaaaagtcgacaagaaatcccgccacagcgaatctgacagcaggtttaagtgggtggtgaggggaaagattaatcacatcggtcatgttaaggggtattcggatccggtattcctgagcctcgcccgacgacttaaggccctcgacgatacctataagctggatgagcggaaaatcacagttgctatagcacaagaaatccacatttacaccgaaggagtgacagacaataaacaccttaagaacgcttacgagcacttcaaacgttctaaccaattcgacgacctgaacatcctctttaaggaaaccaagaagtcagggagtcccgccttaaaagcactttgcgagaacctgagcgaggccttacagcggcatctaactatctgtatttttgatagggacgaaaaggacattatctcaaatatggggggcagccctggtagttataaggaccatggcaacaatgttttttccctcgtaatcccggttcccgattttcgcgatactcaatttgtctgcattgagcatctgtacaaggatgagcagctgtttcaggaagacatagaaggccgccggctcttttccaaggatgaattcgattcacttagttgcttcaaaggcgagaaaccattgttttgtagactgcctaataagcagagcctcatttacgactcagagataattgatatgtccaagaaagtcaacgtcgccctctcgaaaaataaattcgcagattatatcctgagccgggtcgcaccatttgataagattgatctgagcgggttcacaggtacctttgaacaaattcgggagattgcgaggtcatatggaaataaacggtga

SEQ ID NO: 7762 - RNA, 1737 nt, synthetic construct
  source 1..1737: mol_type = other RNA
atgcttaacatcgcaggcaagcctttgtttgttccctttctggacgcacctctccccgaggtgaaaattaaaaacaacaaagagcttgcgggcttcctcggcatctccttgggacgattgacctattacgcctactacctcccggagaacaagaaatacgccagcttcaagataaagaagagagggggtggcgaacgcctcatagaagcgcccgttaaggggctgaaggatatccagcgagaggtcgtgaggaagttcgaagacgacttcaaacccagagcttgcgtgtactcttatgtaaagggcaggggtattgtggaaaacgccgatattcacgatctgcagagatggatcctccgaatcgacctcaaagatttttttcactccattactcagaagcgagtcgccggtattttcagcagtccacctttcatgctgagccctgacgctgctcgcactctctcattcatctgcaccaaggatggaagactgacacaaggggctccctcatcgccattcttaagcaatctggtttgtcgtggactggattaccggttaaaagagctagcagccaaaaacaagtgttactacacgagatatgctgacgacattttctttagtaactccggcgccatttttccaaggtctttggccgagcgcctagaggacaatagtcttaaactcggagaagagctgaccaatatcatccaaggggcagggttttctatcaacgaaaataaggcattccttagaagcagggccgagcgacaaatcgttacgggcttagtagtcaataaaaaggtgaatgtgccgaaagaatttatccggtctgtgagggcgtccttgtactcctgggagaagttcggactggaacttgcagagaaacattggcgcgagaaggtggacaagcggtcacgtcatgaacgggagtccccccgctttaaatgggtggttaggggacagatcaaccacattggccatgtcaagggctattcagatcctgtcttcctgtcactggcaagaagacttcaggccctggattcccagtacaaactcgacgaaatcaagataatcaacagtattgccgaggagattcacatctactctgaggggattactgatataaagcacctcaagaacgcttatattgaactgcagcgtagtggagaaatcaatgacctgaacatcgtatttaaggagacaaagaaaagtggctcaccagctctgaaagcactttgcgagaatctgtctgaggccctccagcggcacttgaccatttgcatctttgaccgcgacgagagggatataatcacctctatgggtggatctcctggttcctataaagaccatgggaataatgtctttagcctggtgattcccgtgcccgaattcagagagacagagtttgtttgcatcgagcatttatatagggatgaacacctattcctagaagaccaagacgggagacgcttgtttgctcgcgacgaattcgatagcgtgtcatgtttcaaaaaagaacggccactgttttgtcggtatcctaataagcagtcgctgatatatgacagcgacgtgattgatctggctgagcgtaagaacgtcgccctgccaaaaaataagttcgccgagtatgtgacatccaagactccgccattcgataacatggatataagcggcttccggtgtgtatttgaacagatccgggatattgcgaaatcctacaggagcaagaggtga

SEQ ID NO: 7763 - RNA, 1746 nt, synthetic construct
  source 1..1746: mol_type = other RNA
atggccaagttaccgcggaaattctctttcagtagctttttgaattcccctgcacccgaagtgaaaatcaaaaataataaggagctcgcagaggtgcttggtatctcagtgggaaggctaacatattacgcttactacctgtcagcagatgagaagtacagttccttcaacatcagcaagcgagggggtggggagaggcttatcgaggcacccgtaaaggggcttaaagacctccaaaagaagattgtcgagtacctgactactttctttaaacctcggtcttgcgtgttcgcatacgttgaagggaggggcatagttgaaaacgcggacgtgcatgacttacagcgttggattttgcgcgtcgacttgaccgacttttttcacagcattacacaaaagaggctggtgggcgtattttccagtcaacccttctctatgtctcacgatgctgctcgcacactcagttttttgtgcacaatgaatggtaggttggcacagggggctccgacctctcccattctctccaacatcatctgccgggggttagattataaactgaaggagctcagcgccaagaataaatgctattatacccgctacgctgatgatattttcatctcgaattccggtgcatctttcccacgtactattgctgaaaagctagaggatggctcggtggagctgagcgagagcttttgtgaagtagtgtccaacgcgggttttaaggtaaatctgaagaaggtcttcctgcggtcaagagcagaacgccagatcgtcactggactcgtggtgaacaaaaaaataaacgttcctcgggaatttgtcagaagcattcgggctgccctctattcatgggaaagcttcggactggaggatgccgagaagttctgggccagaaacattgataaaaaatctcgccacgagaggtccagcccacgttttaggtgggttctgagaggccagatcaatcacgtcggccacgtgaagggctattcagacagcgtgtacctaggactggccagacgactggccgcccttgatgactctttcaagttggatgagcgtaaaatccgaaaagccatcgctgaagaaatccagatttacacagagggcccaacggacatcaagcatctttcaaatgctttcgaagtgtatcagtctagaggcgagtttcaggacctgaagctgatcttcaatagaaccaagaaggccgggtcaagtgtgctgaaagttctctgtgagaacctttccgaggcccaacagcgccacctgaccatttgtatcttcgaccgagacgaaagggagtacataaagtcgatgggcgggtccccagggagttataaggaccatggcaacaacgtcttcagtctcgttattccagtgcctgatttcagggataccgacctagtgtgcattgagcatctctaccgggacgaagatctgtaccgggaagatgtcgagggacgccgactgttttccaaagaagattttgatgccgtcagttgttttaaaggagacagacccttattctgtagaatacccaacaaaaactccctgatatatgattctgacatcattgacatggtggagaagaaaaacgtggccctgagcaaaaatgcttttgcggacaacattgttactaagacggcccctttcaataacgtcgacctgtcaggatttaccgagacatttgaacagatccgcatcatagcgggcagctatcggaataggggcgtgggagtatga

SEQ ID NO: 7764 - RNA, 1737 nt, synthetic construct
  source 1..1737: mol_type = other RNA
atggccaaaccagatgagtttctggatctgcctctgcagcctcccattaagatcaaaaataacaaggagctagcagactttctggagatcaaggtgaacaagctgacttactatgcctatcaccttgacgatagaaagaaatacacgacctttgagatcaagaagagatcaggtggtctgaggaaaatcgatgccccgatcaagggactgaaggacattcatcggcaggtgctgctgaaactcgatccatactataaacccaggtcctgtgtgttcgcatacattaagaaaagaggcattgtggaaaatgctgacctccacaaggggcagcggtggattctcaggatcgacctggtggattttttcaacaccattaccttcgaacgtttaaaggggctttttgccagccaaccatttagcatgtctgagaacgctagccgtaccctgtcgatgatctgtactaaggatggtcacctcacacaggggtcccctgcttctcccctactctctaacattatatgccgcggcttagattataagttgaaggagatatccgccaaaaataagtgctactatagtcgctacgccgatgatatatttatcagcaataatggggccattttcccaaacgcgattgcggaaaagaagtctgacgggagcgttgagctgaacccgcagatcttgtctaccatatatgacgctgggtttagtcccaacaaagagaaaatcactctgaggtcaagggcagaaagacagattgtcgcgggcgttatagttaatagaaaaacaaacacgcctcgcgaatacatcaagagtataagggctacactttacagctggaggaagtacgggttagaatccgccgaggagtactggcttaagcatatcttcagacagtctccgcatggagataaccaacctagaatgcggtgggtactaaggggacaaattaaccatgtgggccacgtaaaaggatactcagacccagtctacattggcttggcaaagaaacttaagagcctggacccaactttcaagttcaatgaacagaatgccatcgattttgtccgagaggaaattcacatctattctgagggcattacagaccgaaaacatctggaaaacgcactgctgtccctaaaatcccaaggcttgttcacggaacttaatctggtgttccgagaaacctctacagacagcaaaaagcagggcagcgcagcattgcgctcactgtgcgagacattatgcgctgccacccagaaacacctcactatctgcctctttgaccgcgacgagaaagaaatcaccgaatcgatgggaggatccacccgtacatacaaagaccacggaaacaatgtctggagcctgataatccccgcaccagaattccggacactcacctccttctgtattgagcacctctatcgggatgagcagttgtatcagtatgaccaagagggccgacggctctactcaaactcagagttcgatgacaatcagtgtcatcgcgaccctgacaagttggtgtttcagaaacaccctaacaagaaagctcttattctcgacgatgccgtgatcgacattactactaaaacaaatgtcgctctgcccaagaataagttcgctgattatatcagtagtaagactgccccctttgacgacatggatttttccggtttcatccccacgttcgatcagatcatagagatcgccgcgcggtacaccagtaataaatga

SEQ ID NO: 7765 - RNA, 1677 nt, synthetic construct
  source 1..1677: mol_type = other RNA
atggcaattccgcagataaaaaacaatcaggacctggccgatttcatcggggtgaaaaaaggcgtggtggcatactatgcctattacttggacagcgctaaagcatacacgtccttcaccattaagaaaaggagcggcggagatcggactattgatgctccagttcgggggctgaaacagttacagcgaacgatactgaataagctgagtcccgaagcagcctttcgccattgcgtgtacggctacgtaccaggcagagatatcctgcaaaattctgctattcacgtgcgccaaagatgggtgcttcgggtcgacatcaaaaatttcttcccaagcatcacaactctcagagtctccggtatgttccgtagccctccctttgatatggaaccgaaggcagcccgcgctctggcattaatttgtaccaaggacggtcttttacctcaagggagcccactgtcaccctggatcaccaacgtaatatgcaaggggctagattacaaccttaagaggctggcctcaaaacataaatgttattactcccgctatgccgatgatctgttcttcagcacttcaaacggcctttttcctaccgccctcgctagaaaaagtgacactgagagcaatgttattatcggggaggaactcaagtccgagattttgagcgccggcttcctgcccaatgaagagaagacatcgctgaagcccatctctcagagacaggtggtcaccggtattgttgtgaattccaggacaaatgtccctcgggaatacatacgaaatctacgagcagcgttgtactcctgggataagtttggactagaggctgctgaggagcattggaggaacaaagtggacctgaagaaccgggtgggagagcaaccacgttttaggtgggtcgtccgcggccagattaacttcgtaaagcacgtgaaaggggaagcggatcccgtttatcttagtctcgccaagaaactgaagaagctggacgagaagtttacattcgatcccaaggtgagcgcgctgagcgtgaccgaagaggtgcagatctttgttgagggtatcacggataaaaagcacatcgagaaggccttcaggaacgcgcagggacagggactttatctcgacctgaacctgactttccccaaccaaagagaatacggttcgtctaatttgaagtcactgtgtgagacactctccgccaacgcacagcgttgccttacaatttgcatctttgatcgcgacgagcagccctatgtgaaaagtatgggaggatccagtggcgattatatggaccacaataacaacgtattctctctcatcattcctaggcctgagttccgggtcgaaccggacatctgtatagaacacctgtataaggactctgacctcttcaaacatgacttggccggccgaaggttatactctaagtctgaattcgataagcactcatgtcattgcgaggaccctaatatctttatacggaccccaccaaagagtttgatttgcgactccggggtcattaacatctctaccaaagcttcagttgccttgtccaaatttgacttcgctactaatatctacgatggggtgcctccatttgacagtatctcatttgaaggctttctgcctctctttacaaaaattcagcagatcaagaacctctttagaaagtga

SEQ ID NO: 7766 - RNA, 1677 nt, synthetic construct
  source 1..1677: mol_type = other RNA
atggctatccccccaatcaacaacaatcaggatctggccaactacatcggcgtgaaaaagggggtaattgcttactatgcgtattacctggtgagttctaaggcctataccagctttgccataaagaaaagatccggaggagagcggactattgacgcaccgatccgcgggttgaaagagctgcagcgtaccattcttgataaactgtcccctgagacaaacttccgacattgcgtgtatggctatatccccggaaggggtattctccagaattccgcaatccacgtgaggcaaaaatgggtgctgcgggtcgacatcaaagatttctttccatcgatcacaaccgctagaatctcggggatgctgaaatcccccccattcaatatggcgcctaaagctgcccgcgccctagctctgatttctactaaagacggggtactgccccaaggctctcctctgtccccgtggataaccaatgtaatctgtaagggtttagactacaacttgaagcgtcttgcctccaaacataagtgctattactcacgctatgccgacgacctttttttcagcaccagcaattccttctttcccactgccttagcacgaagaggggacgccgaaaagaacgtcataatcggcgaggatcttgaactagagatcctgcgggcgggtttcttacctaatgaagagaagacaagtctgacacctattagccaacgccaggtgatcacgggagttatagttaacagtaggactaatgtccccagggaatttgtcaagaatgtgagggccgcactgtactcatgggaaaaatttggattgaaggcagctgaagagcactggagatcaaaggtggattctcgaaaccgggctggagatccgccacggttccgttgggtgctgagagggcaaatcaatttcatcaaacacgttaagggcgaggcagaccccgtgtacatatccctggcaaagaagcttaagaaactggacgataactttacgttcgacgccaaagcatccgcactatcagtgatcgaggaagtccagattttcgttgagggcattaccgataagaagcacatagaaaaagcctttattgatgcccagaaacagggcttgtactctgatctcaatctgacatttcctaaccagagggagtacggcagcagtaatcttaagagcctctgcgaaaccctctctgccaatgtgcagagatgtctcacgatatgcatttttgaccgagatgagcctgcttacgtgaagaacatgggcggcagttcaggggactatatggaccacaacaacaatgtcttctctttaatcatcccacgccccacttttcggtccgaaggtgatatctgtattgagcatctgtataaggacgccgatttgtttaagtatgacaccgccgggcgcaggttgtactcaaagagcgaattcgacaagcactcatgtcatatcaaagaccctctgatcttcattagaactccaccaaaaagtctcatttgcgatagcggagtaatcaacattagcacaaaagctagcgttgctctctctaaggcggatttcgctaccaatatttacgaagagattccaccctttaacaaggtcagtttcgagggtttcctccctctctttacaaaaattcaggagataaagcatctgttcaaaaagtga

SEQ ID NO: 7767 - RNA, 1680 nt, synthetic construct
  source 1..1680: mol_type = other RNA
atggcaataccacccattgtaacactgcaggatttggcaaattacctaagcatcaaaaggggcaaactcgcttactatgcctactatataaagcctgccgacgcttataatactttcgcgattaagaaaaggtctgggaaggaccgctcgatagacgctcctatcaagggtctgaaggacattcagaaactagtctatgagaacttttctggagagatcgagtttcggaaatgtgctttcggatacatacctgggaggggaattctgcaaaactccgaacggcatgtccgacagcggtgggtcttgagagtggatttaaaagatttctttcccagtgtcaccgcggttagagtggctggcatgttctcctcccagcctttcaacctgagttacaaaactgctcgcgccctggctcttattgccaccaagcatggcactttgccccaggggtcgccactgagcccatggatcaccaacgtgatatgccgcggtttagattataatctccaaaagttggcctcacggtacaagtgctattacagtagatacgccgacgacctgtatttctccacctccaatagtctctttcccctggcacttgcacacaagtcagagaacgatagcaatgtcatcatcggagaagaactcaaggcagtgattctgaccgctggatttacgcctaatgaggagaaaaccagcctgcgtccgactagccagcggcaaatggtgacaggcattgttattaattccaagcccaatgtgccgaaagaattcattaagcagatccgtgctgctctctatgcatgggaaaatcacggcctggtagcagccgaggaacactgggcaaagaagagcgactttagaaataggtttgagaaggccaagcctagatttagatgggttctccgcggcaaaattaaccacctgcgacatatcaagggggaatctgacccagtgtttctgaagttggccaccagattaaagaagcttgacccaacgtatagcttcgacccaaaactcagcgcgcagtctatcacgcaagaggtgtgcctgttcgtggaaggcattactgatcgcaaacatatcgaaaccgcctttaaagacgcacagaacaggggattatacggtgacctaaaccttaagttcaacgagcctaaagagaatggctcctcaaacctgcagaaactgtgtcacaacttgtccgccacaccccaaaggtgtcttacaatttgcctgtttgatcgagacgagccatcttatatcaaatcaatgggcggttcaagttccgattacttggatcacaacaataacgtatacagcctaatcctcccctaccccaaattcagggccgagcccgatatatgcatcgagcatctctacgaagacaaagatctttttatgccagacagtaaggggcggcgtcttttctcacgagacgagttcgataagcactcttgtcacatcaaggaacctaacgtgtttattaaactccctgcgaagtccctgattgtcgacagcaacgttatcgatataagtacaaaggaatctatcgccctgtctaaaaatgattttgcctctcagatctatactgccacacccccgtttgacaatgtgagcttctcagggttcattccactgttcgataagatccaggagatcaaaaacctgttcatccgctga

SEQ ID NO: 7768 - RNA, 1677 nt, synthetic construct
  source 1..1677: mol_type = other RNA
atggccctacctgcaatcaattctctgcaagacctggccaactttttgtcagtgaagcgtggtctgctggcctattacgcattttatgtctcacctggtgatgcctatagcaacttcagtataaagaaacggtcaggttctgatcgaagtattgatgcgcctgtcaagggattacgcgacatccaaaccatcatatacaagaagttctccggagagatcgaatttcggaaatgcgccttcggatacattcccggcagaggcatctttcagaacagcgagcgccacattcggcaacgctgggtgcttcgaattgacctgaaggatttcttcccctccattactgcggtgagagtagccggtatcttcagtgcgcagcccttcaatatttcgtataaggcagcccgaactttggcgctcatcgctaccaaaaacggcgtgctgcctcaaggcagccccctaagcccttggattagtaacgttgtgtgtagaggcctggattacaccctccagaaattggctagccgccataaatgttactatacaaggtatgctgatgatctgtacttttctacttctaattccgtattcccatcagctctggctcataggtccgagaaagaaagcattatagtgatcggggatgagctaaaagctgccatcattgccgctggcttcactcccaacgaggagaagacgtcgctcagacccgccagtcagcggcagatagtcaccggggtggtggtgaatagcaaacctaacgttcctaaagaattcgttaaaggaatccgggctgccctctacgcttgggaaaaacatggactcttaagcgcagaggaaaattggcagaaaaatgtggacgtgcggaataggtgggattcagcaaaccccaggtttagatgggtacttagggggaagattaatcacctgaggcacatcaagggagaagccgatccagtttatattaagctggccagcaggctgaagtctcttgacaatacttactctttcgacccgaagttatccgcactgtccattacacaggaggtttcagtcttttcagaagggattacagacaagaaacacctggaaatcgccttcaagcatgcacagagcaaagggctttacccggatctaaacctgaagttttatgtgccgaacgaggctggcagttcaaatctccagaagctgtgctatggcctttcttctacccctcagagatgcttgacaatatgtctgttcgatagagatgagtcccagtacataaaatctatgggcggatcgagcagtgactatctggaccataataacaatgtctattccctcatactcccacacccagccttccgcacagagccagacatctgcatagagcacctttacgaggacaagtacctctacatgcccgactccaaggggcgtcggttttatagcaaaaatgaattcgacaagcacaactgttacatcaaggagcagaacatctttatcaaagccacctccaagtctttgattatcgacagcaatgtcattgatatctccaagaagacctctatcgcattagcaaagaacgaatttgctagtctgatctacacaagcacgcccccatttgacaaaatctcctttgacgggtttctcccactgttcgacaaaattcgcgaaatcaagaacttgttcaaatga

SEQ ID NO: 7769 - RNA, 1695 nt, synthetic construct
  source 1..1695: mol_type = other RNA
atggagatctcaagtgtgaaaaatttggatgatctggccaagtgtcttggacagtccaaaaaaaccctcgcctacttagcatatcatgctcccgtggataagaagtacaagacctttagcataagaaaacgttccggcgggaacagaacgatcacggcaccatgctcgaagctgaagagtatccagtatagcatctataatcagcttaatagcttctatcagcctaaaaaaagtgtgcacggatatgtaaaggacaagagcatcgttagcaatgcgagcatccacgtcggccaacgctggctgggtaaagtcgacgtcaaatcttatttcccttcaatcaccacaaagcgagtggtgggactcctgcgcaatgagccctttaacctgccaaacaagatcgccgctaccgtgggattgctggttacctataacggctacctaccactcggtagtccttgttcccccatcatttcaaacttaattacccgtcgcctggatgccaagttgtccgctctgtcacggggttataaatgctacttcaccagatacgccgatgacatatttttttccacaaaccgcaaggtcttccctcgggaacttattcaccacaacgaagatggcgtctctactatagggcataaattgaacgaagtgtttgaagaggagggtttcaccgtgaatactgacaaggttagcctgaaagacaagtcacaacggcaggtggtgaccgggatcgtcgtaaacgagcgaatgaatgttcctaaagaatacattcgggaactaagggcaatgctctattcttgggagaaacacggcttggaggcagccgagaaagactggctcaagaagtatgtgaacctgaatagaaacggacaggatatccccagccaaccgaggtacaggtggatggtgcgtgggaagctgaatcatatagccgctgttcgcggctctaacgatgaagtctatctcaagtacgcaaagaggctggctaggattgacaacacatttaagatcgatccaaaagccattactgcctccattgccagcgagattaaggtgcacattgagggaaaaactgacgccatccacatgagggctgctatgcacgctctccatggtgctggcaaatacacctctttaaagctgtctttcccaaatgaagacactgcgaagggagacggggagctgatcaaagcatgcaaagttatgagtagcagcaatcagacgcatctaactattttcctctttgattctgacgtggacaagacaactcgagagatgaaagggagtacacttgcctacaaggatcatggcaataatgtctactctgtggttatgcctaacccctcttttagaaatgacgaaaagatctgtatcgagcacctttacaccgacgaagacataatgaagaagacagaaaatgggctgcggatattcaagtccgacgagttcaataaaaagaacggactgcatattgaggagaaaggcattatacggctttaccccaacaactcaacattaattgtggattccaacgtcatcgacgtagagtccggcgagaacgtggcattgtcaaaagcgaagttcgcggaactgattgaatccaaaagagccccgttcgattcggtaagttttgacgggttcgagccactcctggatatctttgaaaagctgcacacagattacatcaaatga

SEQ ID NO: 7770 - RNA, 1392 nt, synthetic construct
  source 1..1392: mol_type = other RNA
gacgcggccggaggtttgcgtgggagaagccaggaaatctcccgatggacaaggcatacctcaattgttcttctgttagaactcgagactactgagctttgtgaagtcttaggcattaagacgtcgtatctgaactacctcctctataagttgaatgagggggagagatacgagagctttgaaattaaaaagcgcggaggcggtgctcgaaggatagatgcccctattaagccattgaaagtaatccaacgcaaactaggtgacttgttgaaagagatttactctccaagaattggcgtgtacggatacgtggagggaaggggcatcaaagaaaacgctgaggttcacttagggtgcaacgaagtttgccgaatagatgtgaaagacttcttcccatctattcacatcgggagagtcattggactgttcaaaagcaagccttttcttttccccgagcctctgagcgtcctgctggcacaaatctgttgcaaagatggagctcttccccagggggcacccactagcccagtaatttctaatatgatctgctggctgatggataaggaactctaccggtatgcccgtattagcggatgtcgctatacacggtacgccgacgacatctttttttccaccgtaaggaaacggctgtcgcggcgaatttgtagtgtcgagcattctgaatttgatttttcaatcgcactgtccccggcggtgatcagtataattgagaaacatgggttcaagatcaatgtccataagacatatatggctgacaaatcccagaagcaggtgctcagcggtgtgatagtgaacgaaaagctaaacgtggaccgtgagttcgtcctcaagctcagggctatgctacactgttgggagatggaaggtctggagaaggccgagaaaaagtttcattctaaattcgccaggaattacattgttccacccctgtttatgcaggtggttaggtcaaaggtggagtacctgggctatatcaaaggttatgacgatcccgtatacctgaaatacgccgataagctttccagactgcacccgcactacacctataacaagaggaaggtcgtggcccatggcgggaatttgatcagagtgtataccgaaggccccacagataagatccacttcaatgctgccttagagtggtttcggggccggggcgaatatgctagtctcggggttgtgttcgagcacctccctgaggcaaacggcggagactcactgatgaaacacgcaaagactatcagtaccgaagcacgcgccgaccggaaggtgttctactctataaaaatgtgccagaagctgatacgcaagctgatccgctcccaggaaagaatcaccgattttcttctgacgacattcggctggccttga

SEQ ID NO: 7771 - RNA, 1698 nt, synthetic construct
  source 1..1698: mol_type = other RNA
atggacgtgaatatccagaaatttctgaacatcgagtcaaaagctcagttaagcgcgtttttaggcatttccacagaaaagttaaactacttgctgttcaagctgccacatgaagagaagtacaattcattcgagattagcaaaaagactggcggaaaaagaatcattgatgctccgataaaaccgctcaagctgctgcaacgccagattgctactattttgttcgaggtttacaagccaaaaacaggcgtctatggctacgtgaagaatggtggcgtaaagaggaacgccgaggtgcacctcagaagtaaagtgctgttccgggctgatatcaagaacttcttcccatccatccacatcgggcgggtcatcggcttgttcagttccaaacccttctctttcccccgaaatattgccgtgctcctggcccaaatctgctgtaaggaagatgtgctgcctcaaggcagccccgcctctccaattatctcaaactttatttgtagggggctggaccgtgatctccttgagtacgccagatcggttagatgcaaatacagtcgatacgccgatgatatcttcataagcacctacaagaagtttatgcccggatctatctgcaaattggagcacgatgatggggtgggcttttgtaacataaacgatggactggaagacatattcgagacgcacggcttcagcctcaataagaacaagctatccgtggcatataagcataacaggcagatagctgcggggatcaagattaacgagaagctcaatgtagaccgcgagtatgtgctgaatttacgggccatgctccactcttggcggaaagacggttacgatgtagccgcagcaaaatataatgagctaaaacccaatccttcctatgcacgtgcgttcaaaaacgctgttcgatccaagctggagtaccttggatatgtcaaaggctatggtgaccctgtctatcttaaatacgccatgtggctaagccggcttgatgatgggtatacctttaacaagagaagctacgaaatggagaacaataagaagctcgtggtctacaccgagggcgttaccgaccagctgcatattcaggctgccaaaaattacttccgcgaaaagggggaatttatgcacctagactttcgtttcgatgataagtccgaagtcaacggagcacctgacctggagaaatacctgatccaggacagaaaggagcccaaccaagaattcaaggtttatctgttcgatgacgaccttaagaaagtcacaagcaaactcgacatcgccccaggtgaatcatctaggtggttcggaaataaaatttgggccgcattgacccctaaacctcagcatcgcaaggacgacgagttgttttgcatcgagatgtattactttgatgctgacctcgaaaggaaggactcttcaaataggcggatatacttgaactcggagtttgacgcaaaaggatttcacaacacagaaagcgtggtaaagactaagcccggttcaggactgatcgtggacaatgatgcttatagtatggtttccaaagaaaaggtgtctctgagtaagattgcattcgccgagaatatcctttataagaaacaggggtttgaagacgtgaactttgaagggtttcgcccactgtttgagctgcttcagaacatttacaatcaggcgtatctgcattga

SEQ ID NO: 7772 - RNA, 1845 nt, synthetic construct
  source 1..1845: mol_type = other RNA
atgtccggagaggccgaccagagaggtatgtcaccaggcatgcaggccgcaatcgaccggctcaatctcatgggaaccaacacccaggaggctctgttcagcggctttgctcagttgacttccaaggcacaactgtgtcagtttctagggattaaaactgctaagctgaattttctgctgtacaagcttaagcccgcacataggtacaaaacagagactatcaagaaacgcaacggggacgatcgattgctccgggttcctgtaccgctgctaaagcaaattcagcgaatcatcgcctctgagctcgcaaaggagtatcgccctcgacaacacgtgtacgggtatgtgaaaggcaaaaatattgcacagaaggccagaatacacgtcgcccagaaatgggtagcccgcgtggatctgaaggacttttttcccagtgttaatttcggccgcgttctaggaatcttccggggccatccctttcatttcaacgatgagctggctacagtcctgacccaaattgtcatggacggcaacgaactgccacagggcgcaccaaccagtcccatcatctccaacctgatttgccgctcgctggacttcgaactgaagaggatggccaaggaacatcgctgcttttacacaagatatgcagacgacctagtcttttctacaagtcttaagcggttatctccgcagatctgttccccagcggcccctgatggtgtgtcaatacaggcgaatgtgggggacggactgaggacgctcattgcacgccaggggttcacaattaacgacgccaagacaagaatattcgatcgctcaagccggcagcaagtcaccgggctcacagtgaatgaaaaggttaacgtgtcgcgggagtacgttagaggattaagggctgtcttgcacgcttggttcaagtttggtgaggagagcgctgcctcatggttctttgccaatcactacaaaaggaacaggcctgattggaaaagcactccagcggatttcagagaagtgattcgaggccgattagccttcatccgttttgtaaagggggctgacgataccacttaccttgccctggctaagaagctcgcgaaactggacgacggcttccagctgggtgtggaagaacagattcaggtgaacagcccaaggcttatgttgtataccgagggagttaccgacaccattcacttacgtcacgccctccaacggttcaaggcagacggacagtattctgatctgaatatcgactgggccgaccatagcgatagacctcgtggcgaggggaaactgtggcaaaactgtctgaacgatgctaagcgcgacgaattcagacaccagacacaggtgtacgtctttgatagggactccgatttcgctaaaaaggccgaagataaatatggcaaactgaaacatcacgggaacaatacgtactctctcgttctccctatccccgagcataggcaaggccgggcacagatatgcatcgagcacttgtacgtggatgatttcctttggcagcaggacgtgcagggacgtagactgtttgctcgggaagagtttgagcacgacggcaatcatgtgggaaatgttgaggtgatgtataggcaccccaaagccactaccttgatcgtggatactgacgtagtcggttatggttccctcagaagcaaacccgtagtgatgtctaagaagcagttcgccgacgcagtggaactgggcgtgaaaccgtttgacgccccttccttggtcggattccaaggggtcttcgatatgcttcgggatttaacgaagaaccttaccggtgaagtgaaagccgatgctagtgcgtttgtctga

SEQ ID NO: 7773 - RNA, 1779 nt, synthetic construct
  source 1..1779: mol_type = other RNA
atgtcaaataccactcaagcagccctttttaatgcattccccttcctgacatctaaggaacagctttgtcaatatttcggcgtgccaccgcggaaactgaatttcctgctatacaaattagcccccgctgacaggtataagacagtcgtgatcaagaagaggtcaggagctgatagacagcttcgcgtaccagtgcctctcctgaagcaaatacagaaaatcattgccgccgagttagcaaaagaataccggcccaggcagcatgtgtacggatatgttaaaggtaagaacatagcccagaaggctcgcattcacgtggcccagaagtgggtcgcgagaatcgatcttaaggactttttcccctctatcaactttgggcgggttcacggactctttaaaagccatccctttcagttcaatgatgaagtagcgacaatcctgacccagctggtcatggacggtaacgaacttcctcagggcgctcctacgagtccaattattagcaacttcatttgcaggagtctggacacggagctcaagcagatggctaaagagcaccgctgtttgtatacgagatatgctgatgatctggtgtttagtaccaatcttaaacggttgtctccccagatttgcagcccagcagcccccgacggagtttccatccaggcgaacgttggagaagggctgcgagctgttatacagcgccatggctttacagtcaacgatgttaaaacccggattttcgataacagtgcccgtcagcaggtgaccggcctcactgtcaatgagaaggtaaacgtgtcgagagaatacgtgcgaggcttgcgaatggtgctccacgtgtggcaaaagatcggcgaggcaagcgctagcgcttggttctttgaaaagcactataaacgcaatagacccggctggaaaagagctgaacctgactttagggagattgtgcgggggagattgaccttcgtgcgctttatcaagggtgcgaacgacactacatatctgaccctggccaaaaaactatcaaaactggacgatggctttcgcctgggcctcgatgaagagattcaactttcctctccaaggttgatggtgtatacagagggcgttactgatactatccacttaaggcacgcactccaacagttcaaggcacgaggagtatacaacgacctgaacatagattgggcagaccacgccgatagacctcggggtgagggcaaactatggcaaaattgcctctcagacgcaaagcgggatgaattccggcatcagaatcagatatacgtgttcgaccgcgatagcgactacgctaaaaaggccgaggatagctacggaaaggtcaagcaccatgggaacaatgtgtactctttggtcttgcccatccctgagcaccgtcgtggcaggaagcagatctgtattgagcacctctacgaggacgcctttttatggcagtccgacgcccagggaaggagactattcccgcgagaggactttgatcaggaagggcatcatacaaaagggctggaggtcatttatcgtcatccgaagagtgccactctgatcgtggacgccgatgtactggggtacgggccactgaagtctaaaccagtcgtcatgtccaagaagcagtttgccgacgccatcgaccaaggtgtcaagcctttcgacagcccttccctcgaaggtttcgaaggggtgttcaatatcctcagagagctgaccaactccctggcaggagaggttaggtccgatgtgatcgacctggtgtcatga

SEQ ID NO: 7774 - RNA, 1824 nt, synthetic construct
  source 1..1824: mol_type = other RNA
atgtccagagaaacagagcagccagatcgcagggtcgccggattgtctgccaccattggtaggctgaaccggatgggaaccaccaatcagaccacgctcttcggctcattcttagaggtgggcagtaagcaggacctctgcgcttttctggggctgagcgaaagcaagctgaacttcttattgtataaactgaccagtgccgaacgatacaagactgaggtcattaagaaacggaacggatctccgaggaccctgcggatccccattgcaccactgaagaaaattcagaaggttattgcaggcgaattgagtaatctctaccggcctagacagcacgtctatggatacgtaaaaggaaagtcaatcatacagaatgcccaggtgcaccttgctcaaaggtgggtggcccggatcgaccttaaggactttttcccttctattaatttcgggcggacacatggcgtgttcaagggccacccctttcactttaatgacgaggtggccaccctcttggcccagatagcgacagaccagaacgaacttccccagggtgctcccacttccccaattatctccaatttcatctgtcgatcactcgacctcgaactgaagcagatggccaaagaacaccgctgtttttacaccagatatgcggacgatctgatattctcaactaaccttaaacgtcttagcccccagatctgcgttcctgcagcaccagaaggggtgagtgtacaagcgcatgtcggcgatgggctaagagccatcatcgagaagcaggggtttagtgtgaacgacataaaaacgcgtatctttgatcgctcaggacgccagcaggttactgggatcacagtaaacgagaagttaaatgtatccagagagtatattcgtggcctgcgatccgttctccacgtgtggagcaagcatggagagccccatgctgcagcctggtttttttctaatgagtaccaccgtaataggccaggttggcggcctgacccccctgattttagagaggtgattcgcggcaagctgggctttgtgaggtccgtcaaaggtgctgaagatacgacatatctcacactggcgcgcaaactcagcctgttggacgacaacttcaagctgtctcaggcagagcaacagcaagctgagtctcctaggctcatggtgtataccgagggggtgaccgatgctatgcatttgcggcatgctctacaccagtttaaggcagacggcctgttcactgacctgaacattgattgggccgatcacaccgatcgcgctactggcgaaggaaagctgtggcagacatgcctatcagatgcaaagagggaagagtttagacaccagacacaaatattcctgttcgaccgagatagcgatttcgctaaaaaggccgaaagtaaaccagggaagttgaaacaccacggaaacaatgtgtactcgttttgtcttcccgttccggctcatagggtggacaggacacaaatctgcatcgagcacctttaccatgatgagtttcttttccaaaaagacactcagggcagacgcttattcgccagagaggaattcgaacaagatggcaatcatgttcgacatgaggatgtcttttgtcggtactccaaagcgactctgatcgtggatagcaacgtctcggggatcgggagcctcagaggaaaaccggtggttctgtctaagaaacagttcgccgactatgtcgagcaagccgtggcccctttccaaagcccatccctggacggctttcagggtgtattcgaggtcctgcagcagttcgtgcacaaccagattcagggtgacgcatga

SEQ ID NO: 7775 - RNA, 1776 nt, synthetic construct
  source 1..1776: mol_type = other RNA
atgggaacggacaatcagcagtcaatgttcaattcattcacatctctgaccagcaaggtgcaactgtgccagttcctcggaattaccacaactcggctcaattttctgctctatgggttgccatgcgaaagacgctataaaactcacgctatcaagaagcgcaacgggggagaaagacgcatccgcgaaccaatccctcctcttaagaagatccagaagattattgctggagagctcgcaaagcagtatcgccctaggcagcatgtctatggctacaccaaaaacaaaaacatcgtgcagaaagcccgtgtccacgtcgcccagaaatgggtagccagagtggatctgaaagacttttttcccagtgtgaactttgggcgggtgaagggacttttccggggccatccatttgattttaatcatgagatagccacactactggcacagttagtcatggacggaaacgagctcccacagggcgctccaacctctcctatcatcagcaacttcatttgtcggagtctggattatgagctcaaaaggatggctaaggcccatagatgcttttacactcggtacgcagacgacctggtgttcagcacatcacagaaacggctgtcccctcaggtgtgtagccctttggctgccgacgggataagtgtgcaggcagttgttggcgacggactgagggcagtggtagagagacaaggctttgtggtcaacgacgcgaagacaaggatcttttctaagtcgagcaggcagcaggtgactggcatcactgtgaatgagaaagtaaacgtatccagggagtacattcgtgggctccgtgctgttctgcacgcctggagaaaacacggcgaggaggctgccgcctcttggttctttgccaatcactacaaacgtaataggccccactggaaaagccagcccgccgatttccgcgaggtgattcgcggccgaatgacctttgttcgattcgtcaaggggggggatgacaccacctaccttacccttgcgaaaaagctggcgcaactggatgatggctttcagctcgacgcagctgaacagcttcaggcgatgtctcccaggttgatggtgtacacggaaggggtcacagatactatacacctgcggcacgctctctccagaatgaaaggagacggaaggtatgttgatttgaatgtggactgggctgatcactctgatcgaccccggggggaagggaagttatggcagaactgcgtgaatgatagtcggcgggaggaattcagacatcaaattcaggtttacctgttcgaccgcgactcagatttcgccaagaaggcagaggacaaatatggtaagctgaagcatcacggtaacaacgtgtactccctcgtattgcccattccggagcaccgacatggccgacaacaagtttgtatcgagcatctataccgggatgaatttctgtggcaaaaagatgcacaaggcaggcgcctgttcccaagagaagacttcgacctggatggtcatcatatcgggggtttggaagtcctataccgacaccccaaggccggaacgttaattgtggactccgatgtcgtcggctatggcggtttaagaggtaagcccgtggtgatgtcaaagaagcagttcgcagacgccgtcgacttgagggttgaaccttttcacgcgccgtcctttgctggcttcgaggccatattcgacacactgagcgaactgtcccgcagccttggaggtggccacagaccagaggccagtgatctgctttga

SEQ ID NO: 7776 - RNA, 1854 nt, synthetic construct
  source 1..1854: mol_type = other RNA
atgggtactttaaatatcacctcccttctggatgaatcagtacagccccccctgatctctccatttctcctgctgagatctgtcgaagacctgtgttcattcctggatatcagccatagaagactcaactttctcctatatgtactcactcccggcgacaggtatagatcttacgaactgaagaagaagaaatcgtctgggactcggacaattaagtcacctattaagcctctgaaagaaatccagcggaggctcgccaatgagctgtctgcggtatacaagacacctctgaatgtgtacgggtatgtcaagcaccgcgacgtggtggataaggctaagcaacatgtgggacagaggtgggttgcccggattgacttggaaaacttctttggaaccttcaactttgggagggtccgtgggatgttcagagccaaacccttcaatttcccagactcacttgctacagtgctggcccagatttgcgttgacacgaacgaactaccacagggagccccgaccagcccgataataagtaatattctcttctggcgcctggatgcccgactgcgaagacttgcaagggagcaccgctgcgtatacactaggtatgctgacgacttagtcttttccaccaataagcgccatatgtcctcaggaatttgtaccgtgctggatgagctttccgagactcctacaatcagggtcggcgaaactcttcggaaggaaatcgagggagaggggtttaaggtaagcgacagtaagaccagactcttcggtcgcaccgcccggcaacaggttacaggactaactgtgaatgaaaaagtgaatctgggccgcgagtacgtgaaagaactccgggctattctgtacgcttgcagaaaatttggggtcgaagcagcaaaggagcgcttcatggccagccactatggcaaaaacgttcctcctggcaaggccgcaccagcattcgcagagataatccgaggccgcgttatgtacgtgggcagaatcaaaggctattcttccagagccttcttggctctcgccaggggaatgccaatcctcgatcccaacttccgggtgcctgaagaacacgctgcgcccagagcgtacctgtttacagagggggtgactgactatttgcatctggacgccgcccttaagcggttccgcaaagccggcgaattcgccgatgtgaccgttgagtgggacgatcatacgaaacgggagcaaatgggcgacaaacgtctcctgcagatctgcgatgacattgcaaaaggccctaagcaagaccggctctgtattttcgtttttgatcgtgacgtgccagatacgatcacaaaagccgaggcccctgacggcagcccgaagttacgaggtaacggagtcgtgtccatgtgcctaccggtgccaaagcaccgagatcagtcgagtcccatgtgtattgagcacttgtactccgacgagttcttataccagtatgatgctgacgggaggcggctgtttgcccgtgacgagtttttgccatcaggtttccacaagagtgaggattttcttagccggcagcccaaaaccagcttaatcgtggatagcgatgtcgtcctgagtgcaggagaacgaaggggcacctccgtggcgttgtctaaacgccagtttgcaatgttcgtgaacctgcagacggcaccatttagtgagccagaccttagcgggtttaggcctttctttgaagctctgagacaattgatggaggctcacgaggctatccaggcaatgcccgtcacaccccccgctaacgatcgtgggcagagggttcccccacctggaacaggtgcaggtgcgacccagatagaggcctga

SEQ ID NO: 7777 - RNA, 1824 nt, synthetic construct
  source 1..1824: mol_type = other RNA
atgggaactcccaacttgaagtcactgaattttgaaccggagcaggccgcattaattcatcccttcttgctcctccggagtgtggacgcgctatgtcagcacctgggagtgtctaaacgcagactgtccttcctgctgtacgttctccccgccgcacagcgttatagaagctttgagctgaagaagaggaaaagcaaggctacccgtaccatcaaaaatcctgtgaaacctctcaaagagattcagcagcacctggcaaaggaccttttggacatttatagagctcctctaaacgtatacggctacgtaaaggaccgcgatatcgtggacaaagctgagaggcatgtggggcagcgttgggttgcaaggatcgatttagaaaacttcttcggcagcttcaattttgggagggtgcgcgggatgtttcgcgcgaagccattttatttcccagatgcccttgctacagttctggcacaactctgtgtcgactccaacgaactaccgcagggggcccctacttcacccgtgatctctaatattttaatgtggcgactggacgccaggctgcgaaggatggcgagggaacatcggtgcgtttacacacgttacgccgatgacttagtcttctcaaccaacacacgaagaatgtccagcggaatctgcaatgtgctcaacgccgattctgatgccccaattgtgcggccaggtgatgccctcttgaaggagatcagagacgagggcctggcggtgaatgactctaagacacgcctgtatggccggactgagcggcaacaggttactgggcttacggttaacgaaaaagtaaacctcgatcgcgattacgtcaaacaactccgggccgtgctgtatgcctgcagcaaagtcggagtcgaggcagctgctgagcgctttttcgcctcgcactatcccaagaacgtgcctcctgggaagagagtgccccaattcgctgacgtgattatggggagggtgatgtatgtgggtaggattaagggctattccagcggagcttttctcgctctggcatccagactgaagatcctggtccctgatttccgagtcccagagatgccagtcaccccgcgggtgtacatacacacggaaggcgctactgactatcttcacttgcacgccgccctgaaaaaactgcagtcgggcggtgagtttacagacctttcagttggctgggacgaccactccaagcgtgagcagcttggcgataagagactgctccaactgtgcgaagatactgcaaatggtcccagacaggaccgactgaacgtattcgtgttcgatcgcgatatcgcagacaccgtgaccaaggcagaaagggagggggagcctcgagtgaggggtaatggagtggtgagtctctgtcttcccgtcccagctcatagacccgcgagttctctcatgtgtatagagcatttgtacaccgacgaatttctgtaccaacaggacacggccggtcgccgcttgttcagtagagaggaatttcggccagacggctttcataacactgaggattacctataccggcagcccaaaacaacattgatagtcgattccgacgtgcttgttaccagcggcgaaaatcgaggaaaatccatcgccctgagtaagaaacagtttgcccggtacgtctcagaacaggtagagccctttgctgccccggatctgtctggattccggcctttcttcgagaggttaagacatattatagaggcacacgaatttctgcacgacgttccaaagcgcggcggggaaggaagcgatatctctcgggtagccgtcgataccccttga

SEQ ID NO: 7778 - RNA, 1629 nt, synthetic construct
  source 1..1629: mol_type = other RNA
atggccaaagtggagctgcgcattcttacatggctggcttggggtttaaatgaacagaggaaatacaccactttctccatcgctcgcaggaatggtagcgtcagacagatcagtgcccccataaagcccctcaaggagtttcagcaggctctggcggaatctctgttggagggctatcgggcgccagctcacgttcacggattcacgaccggtcgtggaccccgaactaacgcagaggtccatgtcgataagttccacgtgttcagggcagacctcgcagacttcttcccgtctatcacctacaggcgtgttagggggctgttcagacgatggcctttcgagcatccggacgatctcgccaaagtcctggctaggttgtgttgtcaccaggacgcccttccacaaggggcccctacatcccccatcattagtaatttcatttgcagacggatggatcgcgagctggcacagttagcggccgcagaaaggtgccatttcagtagatacgccgatgatctcgttttcagtactaatcaacacctgtttccccccgccatcgggctagtggaggaaggaacggccgtggcaggggatagacttaagggaatagtgacaactaacggattctcaataaatgccgacaagacgactctgacacgcgaaacccagcgccaacgcgttaccgggatcgtggtgaatgagaagatcaacccccccagagaatatgtgcggagcctgcgttcactcctttacatatggaaaacatatggacaacctgccgcagaggccgctctggctaagcatgatcctccttctggcaaccggccaccgggcaaatccctccctagattcgaacaggtagtgagaggaagggtgcagtatgtcggctctctgaaggaatttagaaaccctacctactatcgattggcaaaacaactgtccgaagtagacgagggtttctcaccacctccgatgcctatcattgaggctaacctatacaccgaaggcccatctgattggaggcatgtcctcgccgcccagcgccattttaacgagttgggcgagtttaccgactttcacctcgtgaaaggcaaggaggctagccgagaaggtgaaagccagctgcggaagttcgctgagaggctgggggaacgcgaacagtcagagttcagtgtgtgtttatttgacagcgacgtaaaacccgctcttgaagcggtgggtccagatgggtggcggcgttacggacctcgagtagtggctgttggccttgccgtcccagcagccatggatcgccgggaacccctctttattgagaaactgtactccgaggaagtcctgaaaacaaagctggccaatggccggcgagtgtatctgggcactgagtttaacccaaagtctggccaccatttagaggaggactgctccattgtaggggaaggcaaggagtttattcagcagtccgttcacgcctttgatactcacagcgttatcagcctaacaaaagtggacttttcgaaggcggtgtatgacgacccagagcacttcggaaccgagatctttgaggggtttcggcccacctttgagcggattgatgaagcattgagagactcatgggaggtcttgcagtga

SEQ ID NO: 7779 - RNA, 1659 nt, synthetic construct
  source 1..1659: mol_type = other RNA
atgctgacccaccagctgagagctaggcggcgtgaaaccatgagatgccctgcgcagtatcaagaacgacagaaaaggcatgatagagccgattactattttatgaccctgaactccgcttactccttctcttccctagctgccgtactcggcattactcctaagcagctcggctattacctgcacaaacgtccattggcgagccagtacaaacagttcaagatcccgaagaaaagtggggattatcgagtcatctctgcaccggccacaaacctcaagctgatccagaagtccattgccaagcagctgaacgagatcagattatttaagccttgtgtcaatggcttcgtgccgaagagaaacatcaggaggaacgcatctatgcatgtgggacggcgatttattctcaacattgacctagaggactttttcggctcaatcaccttcgcacgcgtctacggtatgctgcaaaaagagccatattttctagcacagccagttgccgcagcaatagctaaagcgtgcacattggatggagtgcttccccagggagctcctagcagcccagtgattactaacctgatttgtgccaagatggacgccgaattaacaaggttcgccgaatcgaatcgttgtaaatatagtcgctacgccgacgatataactttcagcaccactcggcccactatgccctttgcctcagctcttaaagacgccgagggaacgactgtatacgagctcaatccaaccctgagagacatcatcgagacgaatggttttaagatcaacgaaaagaaagtccgcctgcgcgacgctactgctcggcaagaggtgaccgggctcatagtaaataaacgcgtgaacgtgaagcggcgggcagttcgcgagattagggcaatgcttcacgcatggagaacatttggcttgcccgccgccgctactatgggaaaggacaaatacgggcttaaaggcaactttgaagcagtcctccgggggaagatcgagttcgttggtcacattcgaggacggcctgaccccctttttagaaagctggccgaccagtttaattccctgcccgtggctgggcgaatcagaacggtgctgacacctgaagagattgcacgtaatgcgacctggataatcgagtcggatggtgacgtgcaagggacagccttctttgtggacggggtaggcttggtcagttgcagtcactgtgttgggcccaatgcctatatcttgcatcccacagaccctacaaagaagcaccgcgttaaaatcattaaggaggatagccaccgggatattgcgatcctggagtgccctaatggtttcagcgtaccaggcttccagctgcatgctgcctctatagtcaaagatggcaccgagattgtgctcctgggttatcccaatcatagggctggaagcaccatacgcgtggaggccggaaaattgctgaggaggatagtcagttctgccgttgagcactacgaaattaccccaaagattatcgggggaaactccggcgggccaattgttaatagcgattacgaagtggtgggcatcgctgtgaggggcctttcaggcaaggccaagttctctgatgtggaattcatcggcatcaactcctcagaactgaaactcgtcttatcaggaaagtga

SEQ ID NO: 7780 - RNA, 1554 nt, synthetic construct
  source 1..1554: mol_type = other RNA
atgccactcaataagatccacaatctgacaggcctggcctacttattggggtgcagagctcaacagttaggatattatatctacaagcgccccttgatcacacaatatcgtacattcgaaatccccaaacggcgggggggtacgagaaccatagcagccccgagtacaaatcttaaaattatacagcgcaacctggctaaggagctagatgcactgttcacctttaagtcctgtgtcaacggctttgtgaccgatcgtgacatcaagaggaatgctacaactcacgtgggagaacgcttcgtcctgaatattgacctcgaaaacttttttgggtcgatcaactatggcagggttttcggtttgctgtcaaagcccccacactccttaaatcgcactgttgccgccgccatcgcaaaagcctgcacactgaacgatgccctgccacagggagctccaacgtcacctgtgattagcaacctaatttgcgccaaaatggatagcgaactgctcaggtttgccgctgccaataggtgcaagtacactcgatatgctgacgaccttaccttttccaccaaccggacgagtatgcctttcgccacagccagcaaggccgccgacggaaagacctattgtgagatcaatgcctcacttagaaccatcattgagagtaacggctttcagataaacactaacaagctgagactgcgggataatacagctcggcaggaagttaccggactcattgtcaatgaacgggtgaatgtgaagcgacgcttcattcgtgagactagggccatgctccacgcatggcgcaagttcggactgcttgctgcggccgctgagcataaaaacaagttcggcggtggtactgcgtttgaatcgattgttcgagggaaaatagaattcatcggccagattagagggcggcctgacttggtgttcaggaggctggctgttcaattcaacgccctcaccacttctggcaaaattagaacagctctgagccctgaggaaattgtaaagcaggcaacgtgggtcatcgagcattccggtgatgggcagggcaccgctttctttatcgagaagtacggcctgatcacctgtgcgcactgcctcggatctaacccatacatttatcatcccgagaaccctgcaaagaaaatcgcagtcactgtactctctcaagataatcatagggaccttgcagcactcgagatccctgcggagctgaaaaccatctcaccgattcctttgtacaaggggcccccactaaaagacggcgcatccataaccctgtgtgggtaccccaaccacttcctggcgaaacccattagaatcgagcagggcaagctcatccgaacatttcccaaaagcgcagtgtcttacctggaggtcaccccgaaaatcataggtggaaatagtgggggcccattagtaactgaagacttttctgtggcaggggtggctgtgttgggccttagcggaagcgtgacactgtcccaggccgagtttttcgccgtcaatatagccgaattggtggcttggcttaaatga

SEQ ID NO: 7781 - RNA, 1560 nt, synthetic construct
  source 1..1560: mol_type = other RNA
atggacctatccaaagcctatgacctgacgtcgctggcgatcttgctcgactgtagcgccaaacagttgggctactacgtgtataagagggatctggctacacaatacaagcagttccagatcaagaaacggagtggcggagcaagaattattaaggcacctgccacaaatctcaaaattatccagcgctccatcgtgagggaactggaacggttagtgaggttcaaaccgtgtgtgaccggcttcgttaagggaagagatattaaaagaaacgcagtgctgcacgtggggcagcgacatgtactaaacgtcgatctgcaggacttcttcaatactatcaactatggcagagtgtatgggctgctgaccaagaaaccttacggcatagcccccaaggttgctgcagctatcgccaaagcttgcactctagacaacgcactaccgcagggagctcctactagtccaatactgagcaatttgatctgcgcaaagatggatgctgaactttcccggtatgccctcgctaacaaatgcatttacactagatacgcggatgacctgacctttagcacgaatcggcagttcatgccaatggcggctctgaaccttaattctgacggaaccccaatcaccgaattggcacgaccccttcgtgagatcatagaggccaatggattcgtaatcaatgagaggaaggtgcggttatctactcgcggacgcaggcaagtcgttacgggcctggtcgtaaacgagagagttaacgtacgtagatccgcaattcgggaagcgcgcgcattgttacacgcgtggcgaaaattcgggctcgtgaaagcctcatcagtcttcaacgagaagtttggaggggctgggagagattttgaggccgtcgtgcgaggtaagattggcttcatcggacaaatccgggggcgcccagacgagtcatttaagaaactcgccctcgagttcaataagcttactgcaaacgggaagatcaggacagcccttagtcgtagcgagatcgctgcccaggctatctgggtgatcgaacatgacggtgattcgcaaggcacagccttttttctggacggtgtgggcattgtcacctgtgctcactgcctgggcgagaacccttttatataccatccctctgaccacaccaagcgctttaagctcaaggtcagggccgaagataagcaccgcgatctcgctatactgtacgttcccgtggaactggaaaacgttgtccccctgtctgcctacaagggcgtcgccctcgcaaacggagctgacgtttcactgtggggttatccaaatcatttcgccgccacacctattaggatggaacgaggaaagctcatacggtcctttgtgaaatctgcagtctcctacttagagattagccctaaaatcattgggggtaatagcgggggacccgtgctgaatgatggctatcaggtgattgggatcgccgccgtagggttcggtggctctacaaagtttaccggtgtggagtttatggccgtgaatggcattgagctgagtgcgttgcttagcaaatga

SEQ ID NO: 7782 - RNA, 1605 nt, synthetic construct
  source 1..1605: mol_type = other RNA
atgcgcgtcaatagtaaacaggacctggcctgtgcaataggaattcccctggagctgttagagaggcgcgcttttggaataccccagcacattctatacagtcggcatgagtatcctaagagggacgggagtaccagactcatctattctccacactggcccctgcggcatattcagagccggctggccaacctgctagatgaaatctatgagccttcctcaagagttagcggcttcgtgaagggaagggggattagatataacgcgtctctccatgttggcaagcgcttgctgctgaacttcgatctgagtgatttctttcctacaatccattttgggcgcattcgcggtaggcttcgtgctcggccttatcagttaaatgccgttatcgctacaaccatcgccagattgtgtactcttgacggaaatctgcccataggcgcaccctcttcaccagtccttgctaacatcatctgctcccacttagacggtctactgacgaggctggctcgagagcacgggtgcttttactcccgctatgcagatgatattaccttctccaccaataggagatcatttcctaactctctggctacagtggaccacgagaatggtttagccgcggtaggcgccctgatctctgctgctgtgaccgaggcaggatttatcgtgaatcccaggaagacgaggatcctggacaaatcaagccggcaggaggtgagcggagtcgtgattaatcagttcttgaatgtgccacgtagctttatgcgagaaattaggggcgctctcaacgcctgggagaaacacggacacattgcgtctgagcaatacttcaaggaaaaatacaattggcgatccagccaatcatttgagaaccacctgagagggcgaatacagcacgtcattcatatccgtggcagcgacgatcttgtggtctggcgcctcgttaaccgtttcaataatcttccggatcgggcccattcttcgatctcctatgatcggccgaaggacgagcgggatagactgagcctcgctgtgtgcagggtcgaatccggtaacgacgagcttatggaatacaaccagggttcaggaataaagcttcccaacggcaacgtcttgaccaacttccataacatcgaaatctgcgggactgtcgcccctataatcgagatttacttgactgataacgcaccagttcccgtaccaatgcgggtactcaagcatgacttcgcaaaagacgttgcaatcctggagcctatcgaccctgaatggaaaatgccaatcgccgcagcctcagccgaactctcgttctccgaatgtaaggtgggtgacgacgtgaaagtgggcggcttcccgagttaccagttgggcgactcctgtcaaattgcaactggggaggtgcgcgccttttccaaaattgaaggaatcacatacttccgagtgtctgtccccattgtaaagggcaatagcggcgggccagtgtttaatattgatgggcaggtggtggggattgcgagtagaggcatagatacacacgagatcactaacgccgcctttaatggatgcctcgaactcttcagatttgaaaagttcctgcaaagctga

SEQ ID NO: 7783 - RNA, 1221 nt, synthetic construct
  source 1..1221: mol_type = other RNA
atgaagttccccccgacctcccctatcctctctaatctgattgtcatgaaaatggacgggcaattaagcaaactcgctaaagataatctctgcttctacacaaggtactgcgatgacatatacttttctaccaatcgaaagaagttcccccaaaatatagcttttttcgatcattcctctgataacagattttgccaaattggtggcgacctggagaagatcatcaaatctaacgacttcattatcaacgagaagaaggtgtatttgagtgataaatcaaacaggcagtttgtgacagggcttgtggtgaatgagaaaattaacgtaaaccgcaagtttatcaagaacatcagacctattctgaaaaaactgcagaaggatgagaacttcaagaaagagtatttcgagaagtttaacaagaacatcctgagccagctgcgagggaaaattgagtttattggcaacattaggggttacgatgatcccgtttatagaaaatatgccctggccttgtccaagttggatcctagctacatcttcaacaagagaaatctatccttcggcgatggacagcttgtcgagatttattgtgagggcattacagactacctgtttctgaaggagtacttgcgcctatttaaaaataggggaatgtttacggacttggaaatacggtttcgggaggactccaactttactggcggtgacacccagctgctggacgcatataagaagattcagcagatgaatagtagcctgaataaccatctcactatctttatcttcgacaaagacaaccaaaacatcatcaagtacttcgaaaatctggaaaacgaactcgatggcctaaaacacctgtttctgccatgtccagatggatactcaaatagcgagtactgtattgagcacctgttcaaattcgaggacatcctgaaggttatagacaacgaaaatcggcggatctacctcaagtcagaatttaacagtaaggggttccacgaagaagagaatcttatatacatgcgtatgaaccagaaaactcttgtcgcggacgacgaagtgctctgccttcgcacccagaaaaatgtggccctttcaaaagccaatttcgcagatttagctacgggaaagtatttaacactgctcgacctcagcaatttcgaaaagctcttcttggaaatcacctatctgaagaatgagttctataagtcgccacagtga

SEQ ID NO: 7784 - RNA, 1536 nt, synthetic construct
  source 1..1536: mol_type = other RNA
atgcctaaaaaggatgggggcatccgccaattgtatgttcccaaccagctgattaaaaagattcagaagcagatcttcgatgatctgcagccaatatactcgccaagagcatgtgcatttgcctatgttaagggccgaaatatcaaagagcacgccaagaaacatgtcaataagcggtggattcttcgcgtcgacctgcaagatttttttcctaacatccattttgggagggttagaggcatattcaagttactggggtgtaacgaagaaatatccacctacctggctcagctgtgctgctacgagggtaaattaccccaaggaacatctacgtcgcctctaatcagtaatattctcgcatccaaaatggataggcagttgtccgagatggctaaacagaatcagtgcttttacactcgttattgcgatgacctgtacttctcaaccaatcggaaattgttccctcagaacttagcctttttcgacaacagctctgggaacagattctgtcagcttggtgaagacctcaagaacattattgactctaacgacttcattgtcaatgagaagaaagtgtacctttccgataagagtaatagacaattcgtgaccggactcatcgtaaatgagaagctcaacatcaataggaaatttgtgcgttctctaaggcccgacttgaagaagctaaaggacaacccgaactacaagaatgaatacttcgagaagtacaacaaaaacctgctggccaaaatacggggcaagatcgaatttatcggctacatccgcggatatgaagatactttataccgaaagtatgccctggagctgagcaaactggattccagctacattttcaacaagaggaatcttagcttcggggatggaaatttagtggagatctactgtgaaggcgtaacagactatcttctactcaaggagttccttaagtttttcaagagtaatgggatgttcacagacttggagattaaattccgggaggattctaatttcactggaggtgactctcagctgctggatgcctacaaaaagatccagcaaatgaatagcaacctcaatagtcacctgacaattttcatctttgacaaggacaatcagatcatcgtgaagtactttgaagctctgaagaatgagctgaaaggcctgaaatatctctttcttccctgtccaataggctatgaaaagaaagagtattgcatcgaacatctctttaagttcgacgatatattgaaggtggtggacgaagaaaaccgccggatatatctcaaggacgagttcaatgcaaaaggatttcacaacaatggtgagtgcatttatatgagaatcaaccagaaaacccttattgcggatgacgaggtcctctcactgagcaatcagaacaacattgcgctgtcaaaatccaaattcgctgaactggccacgggcaaatatttgaaggagctcgatctgagcaactttgagaaactctttatcgaaattaccaacctgaagaacgagttttacactctgtcacactga

SEQ ID NO: 7785 - RNA, 1590 nt, synthetic construct
  source 1..1590: mol_type = other RNA
atgaaacggattaagaatctcacagccttcgagagacaagcactcacagaaaaagacatatgttcttacctgggcgtttacgattctgaagtgaataagatcattcggctgcctactaagtacaaatacaaagtgttcaccatccctaagaagaacggcgcccaacgaaccattcaggcccccacgtaccgcctgaaagagatccagaagcgcatcagtatcctgctgtgcgacttgtatccccccaagaagtctgcgtccgcttttattaagaaacggggcatttgctacaacgccaacttccacataaacaacaacctcattctgaatatcgacctggagaacttttttcccagcattcattttggacgcatattcggtttgctgaagtccacgccttataacctcagctttatcgtatccaagatcatagctaatctctgttgtgtagacgggagactgccacagggagcgcccagttcaccggttattgctaatatgatttgcggtaaactcgacgcccagctgtacaaaatcgcaagagagaatcagtgcctttacacaagatactgcgacgacatcactttcagtaccaagcagaactcttttcgaggaattgccacgatacacgatgatgaattcgcgttggtccaactgtccgataagctggaagatatcatcgaagacaatggcttctatgtgaacaaggataaggtgcatttcgcctccaagaagagcaggcaatcgatcactggcatcgtggtgaatgaaaaaatgaacgtccgccgtacatatgtcaggaatctgcgtagcgctatttacaaaatggagaaagatatcgacgcagccgaatccgagtatatcgcaaagtacaagaagagtatgaattatgcttcctcatcttcgatttttgaccatatctcagggaaactgtcttatctcaagatgattaagggggacaaagataaaacctacaagttgcttaaacacaggttcgatctactactgggcaaacagagcttcttttttagcactcaaagggaacagctcaccgccgcgatatgggccattgaggacaaaaacaccatagagactggtactggctttatgttaaagggcgtcggcatcataacatgcgcacatgtcattcgagataacccttgtgctattttagacaccaggccaggcgctccccttcgcaagatcgacatggaaattattaagagagacgaggcactggatatagccattctgaggccactaggagtggacatcagaaagtattatgctctggagaaatcagacgccgagttccacaatacaccagagcagttgatcttggccggatatccggggtatcggttaggacacacccttagcatcaaagagacatactgtatttctcaccgggtggagcacgccatccagctgatcgaactctccgatcagatccataaggggaattcaggtggccctgttctggatagcgagcttaaagtggtggggatagcagcaaaaggaggggaaccagggcagcaggatctcgctatccacattggtatgcttagcagtttagttatccggggatga

SEQ ID NO: 7786 - RNA, 1674 nt, synthetic construct
  source 1..1674: mol_type = other RNA
atgagcttgaaaccatttgcgaatctgcggcagatcgccttcgccttgcgaaggaattatcgaaaacgtttcgtgtacattgcgtacggactggcgccgggcgctagatacaaggagttcaccatccctaaaaagagcgggggaacaagacggatctgtgctcctcgtatcgcactgctgggacttcagagggacatcttaaggctcctggagtcagattatcgcccgcgggcacacgtccacggttttgtcggggggcaccaacgctctatcgtctcaaatgccagacagcatgtgggaaagaggtgggtgctgaacatcgatctggaagactactttgagacaattcattttggacgcatacgcggccgattaatggctcccccatacgactaccctgaagagatagcccaatttatcgctcacatagcctgtttccagactgaaaaagaagtggagggctctctgaggactacccatgtgcttatgccgggcgcagccctaagccccattttggccaacatcgtgagtgacaagctcgacgccgaattagccagattttgccgccagttgggatgcacgtacactaggtatgctgacgacattaccatctctagtaaccgaagaacatttcccgctccaatcggccggttcgctaaccctgacagtcacgacgattttatcctcagcgacactttccagcagatgatcgaagataatggcttccgtataaaccatgcgaagacgcgactcctgggagccgcctttcagcaggaggttacaggcctagtggtcaacgagaaagtgaacgtgaagcggaagtttgtacgcgacgtgcgggccatgttgcacgattgggagtttaacggttatgctgcagcttccgccagacactttaacgataaaagaccagataggggcaggctccccgagcaagaggctactaacttcgagtgggtgcttcgcggtaagattgagttcataaggcaagtgaaagggtccactgaccaggtatttcgcggcctggctgcaagattcaatgccctcagttcaggcgggcagttcagtattcccttagttgaagatagcgaggtgctcaacgcagccgtgtggtatctggaaaatgacacagacgggggttccgttggtacatgcttcgcagtagccgagaatttgttcgcgacctgtgcccattgcctgggaccaaatcttaggatttttccccggcaatctcccgccttcgccatggaggccgatgaggtcgcgcgtgatgaacacaatgatctggctctgattagactgaggaccccaatgccagccttcaatcctgccgccactctgcagatggcttccactgcagaggccggtgcacttggcattcggtcagctgttcaggcagctgggtacccttccaatctcgacagcacctctctgaccatcagagatacagaagtcacagggtttagccggcagaccttcgacggcacccctgctacgtcggataacgtaatcgcacttctgtcagggacatatgaaggaatgtccggtggccccgtcctattttctgggaaggtggtcggagttattgttcgaggccccaacgacgatgaccggaccattcctttcctcgcagtgcgctccgaattcgtcgatgcactgctcgcaaccctttga

SEQ ID NO: 7787 - RNA, 1605 nt, synthetic construct
  source 1..1605: mol_type = other RNA
atgacttatatcgcttacggattagccgtgggggcgcgttataaggagtttaatatccccaagaagaacggggggactcgcaggatttgtgctccacgaatcgccctattggaactgcagcgagacatcctgcgactgctggagggtgattacaagccgagagctcccgtgcatggttttgtggggggacacaagcggtccattgtcagcaatgctcagcagcacgtggggaaacgctgggttcttaacattgatctggaggactactttgagtccattcattttggaagggtccggggcagactcatggccccaccatatgactattctgaagaaatcgcccagtttgttgcccacatcggctgctttcagacggaaaaggaggtggacgggaacgtccggaccacacacgtgctaatgcccgggggagctctctcacctcttctggccaacatcgtatctgataaacttgatgcagaactgtccaggttctgtagacagctgggttgtacatacacgcgctatgcagacgatattagtatcagtagtaacagaaggacgtttcccgcatccattggccggtttgccaatcctgacagccaaaaggagttcgtgctctctgatacattccaacaaatgattgaggacaatgggtttagaataaaccactccaagactcggctcctcggccatgcgtttcagcaggaggtcactggtctggtggttaacgaaagcgtgaatgtgaagcgcaagttcgtcagagacgtccgagctatgctgcatgactggaaactaaacgggtgcgaggtggccagcgcaagacacttcaataagaaaaggcctgatagggggagactccccgagcaggaagctaccaatttcgaatgggtggtccggggcaaaatagaattcatacgtcaggtcaaaggatctaccgatcaagtcttcagaggactcgccgcgcgcttcaacgagttgtgtttaggccgcaggttctcaatccctcttgtggaggacactgaagttctggatgcgaccgtgtggtacttggaaaacgacacagatgccggttctgttggcacctgcttcgcaatttctgagaacttgtttgtcacctgcgcccattgtctgggaccaaatctgcgagtgttcccccggaaaaatcccgaattccagatggaggccgaagaggtagctagagatgatcatcacgacctggccttgattcggattagggaacctttaccagcttacaatccagcaaccgttctgcgtatcgcgtcaaccgccgatgccagcgagcttggaatccgctcagcagtgcaaatagccggctacccctccaatctcgataataactcgctgacaatccgggcaaccgaggtaacaggcttcagcaggcagacctttgactcaactcctaccatgagtgacaacgtcgtggagctgttgagcggcacatttgagggcatgagcggcggacctgtgctgttcagtggtaaagtggtaggagttatcgtgcgcggcccaaacaaacacgaccgtactgagccgtgcctggctgtaaggtccgaattcgttgacgctcttctcgcaacactttga

SEQ ID NO: 7788 - RNA, 1686 nt, synthetic construct
  source 1..1686: mol_type = other RNA
atgagtctgaggaggtttgctaatcttcgccaggttgcctttcacttgcaccgggactacaggagaagaatgttccatattgcatatggcctgcctgctggcgcacgatatcgggagtttaccattcccaagcggtcaggtggtacacggcgcatctgtgcccccagaaaagcgctcctcaacctacagcgggatatgctgcggctgattgaaccagattaccagcctagggcccacgtccatgggtttgtgagtgggcgccagcgctctatcgtgagtaacgccaggcagcacgtggggaagagatgggtgctcaacattgatctggaagacttcttcgaaacaatccatttcggcagggtgcgcggaagactagtggcaccgccttacaactatcccgaggagatcgcacagttcgtggcccacattgcctgctttgagactgagaaagaggtgaatggaaccaggcgcaccacttccgtgttaatgcccgggggtgcgctgtccccattattggctaacgtcgtcaccgataaactcgacgccgagttagcccgattctgcaggcagctcgggtgcacttacacgagatatgctgatgacgttaccataagctccaatcgacgcacatttccggcccctataggccgctttgcagacccagagtcttttctcgagtttactctgagcgacagctttcaacaaattgtagaggacaatggcttccgtatcaatcacgataaaaccaggctcttgggccaagctttccaacaggatgtgacgggcctggtggtaaacgagaaggtcaatgttaagagaaaattcgtgagggaagtccgagcgatgttgcatgactgggagtttaatgggcttgcccaagcatcagcccgccacttcgacgagaaacggccaaacaggggtagactccccgaacaggaggcatctaatttcgagtgggtggtgagaggcaagatcgaatttatccgtcaggtcaaggggagtactgatcaggtttttcgtgccttagccgctcggtataatgaccaatgctccggccaggaattccacatccctctggtggaagatcaggacgtcctgaacgctgccgtctgttacttggaaaatgatgcagacggtggagcagtaggcacctgtttcgccatagaggatgatctgtacgtgacctgcgcccactgtctgggaccgaatctgcgagtgtatccacggcagaaccccgccttcccacttgaggccgatgtggttgcgcaggatgaccataacgaccttgccctgatcaggattagaactcccctcccagcttttcgccctgctgctttcctccagcttgctgaggcaaccgaagctgccagtgtagacatcagatccgctgtgcagaccgctggctacccatccaatctgcattctgcatcgctgacaatgaacagcacagaagttacgggcttttcccgacagagcttcgatggaactccccctacatctgacaacgtcatctcacttctaagcggaaccttcgaaggtatgtctggcggacctgtgttgcatgaggggaaggtcgtgggagtcatagttcgtggacccaacgaagacgaccggacaattccttttctggcaactcgggtatcattcctggaaacactgagagccggggttagcagcgcgtcatga

SEQ ID NO: 7789 - RNA, 1674 nt, synthetic construct
  source 1..1674: mol_type = other RNA
atgtctctgaagaagttcaagaacctgagacaggtggctaatgccctagggcgggactacaggaaacaggttttgaacattgcatacggcttgccccctaaggagagacacactgagtttgcgatacctaaaaaaggggggggtactcggaggatttgcgctccacgcgctgccttgctgggcttacagcatgattgcctggaccttctgcagatggattaccgacccaaagctcaggtccacggatttgtgtccggcagaggcagatctatagtaagcaacgcacggcagcacgtcggcaaacgctgggtcctgaacattgatctggaggactatttcgagagcatccacttcggacgcgtaaggggaaggctgctggcctctccgtataattacagttctgaaatcgcacagttcgtggcccatattgcatgttttcagacaacaaaggagttcgacggggtccatcgtttcaatagtgtcctcatgccaggcggcgccttatctccactcctcgccaatatcgttagtgacaggctggatgcggaaatcggtcggctgtgtcgtcggttgggctgcacgtacaccagatacgcagacgacatcagcatctcgacggaccgacgaactttccccgcacccattgggaggtgttccgatcccgagaggctgcgggactttactctgtcggacggctttcaagagatcatcgagaataacggatttcgcgtgaacaattcaaagacgagaatgctcggacgggagttccgtcaagaggtgaccggcctggttgtgaatgacaaagtgaatgttaagcgcactttcgttcgtgaagttagggccatgctgcacgattgggaatttaacggctatgatgttgctgccgatagacattttaacgaaaagcgccccgatcgcggcagattaccagcttatgaggctaccaacttcgagtgggtggtgagagggaagatagagtttattcgccaggtgaagggggctgcagaccaagtcttccgagcgttggcagccaggttcaaccagctcacaagcgggcaggcttttgtcatccccctcgtggaggatagagaagtgctggacgccgcggtgtggtatttggaaaatgatgtggacgccggatcagtcggaacctgcttcgcagtaggtgaaaacctgtttgtgacatgtgcccactgccttggccctggattacgggtattctcccgcagatctcccaatttcagtctaaatgccatagaaatcgccagggatgagaaaaacgatctagcgctcattagggtggaatcactgccaagcggccttaagccagaagccatcctgcggctggccacacttgctgagtgcggtaatgtgccaactggtgccgctgtgcaagccgcaggttatccttgtaatttgcatccggactccctgacagtgacccctgctcaggttgccgggtttagccgacagacctttgatggttcacagcacaccgaagataactgcattggcctcctttccggaacatacgccggaatgagcggagggcctattcttcacgaggggaaagtcgtgggagtcatcgtccgaggccctaacgactccgaccggaccctacaatgtctcgcagtacggtccatgtacctcgaacgccttctccaggggctgtga

SEQ ID NO: 7790 - RNA, 1665 nt, synthetic construct
  source 1..1665: mol_type = other RNA
atgacgctgaaatcagtgcctgatctgaggtttctggctgctgctctggggagaaacctgaaaagaaggctgacctacattgcctacaaacttccttcaagtagcaagtttagggaattcactatccctaaacgctcgggagggactcggaacatccaggcccctaaggtcgccctgctgaacctccaaaagagcattaagcccctcattgaaaaggattacagaccaagggtgaatgtgcacggattcgtcgccggccagggacgatccatcgtatcaaatgccgaaaagcacgtgctgaagaagtgggtgttgaacatcgacctcgaaaactattttggtagcattcatttcggacgcatcgctgggcggctccagagcaagccatataactatgctccggaaatcgcccggttcgtcgcacatatagcttgctatcccacacagactgtcatagcaggccagatccaggacagttctgtgctcatgaccggtggggcaattagcccattgcttgccaatattgtgaccgataagttagattccgaaatagcacgtttctgcagtcagctcggttgtacctatacccgctacgcggacgacattaccatctcctctaaccggaataagtttcctggaaaaatagcgcgatttgaggatccagatgaccagaagtccgtggtcctgtccgaggagttcctagacttgatcgagggcaacggcttcgctgttaaccatgccaaaacacggctgctgtcccggatattctctcaagaggtaactgggttgattgtgaataagaaagtgaacgtgccccgcactttcatcagacaagtgcgtagtatgctccacgactgggaagctaacggatacgccgcggcacaagagaatcacttcaccaaatacagacccaaccgcggcaggttacctgcatatgaagccaaggattttcagtgggtggtgagagggaaaatcgagtttatcaagcaggtcaagggggcaaccgatcaagtttttcagacactggccaggaagtacaatagtctgacctctggaaagaagattgccatcccgatcgtcgagacgaatcgaatcatcgaagaggccgtttggtacctgcacacagagaaagacattatctccacggggacttgttttgccgtggagggcggggctttcatcacgtgcgctcattgtataggtcccaatatgactgtgtttcctaaagccgcgcccaagttccctgtggctacagcagccttgaacgtcgacggcgttaatgatctggcactactagatttaaccgctttacttccagcgcacgccccgaagggccttctgaaactcgccaacgtagccgaggtaagcgccctgcaggtaggcgacaaagtgcagattgcaggcttcccaggcaaccttaatcctgacgctgtgacaattgcagaggccacaattacacgattttcaaaaacaaccttggatggctctattcccgcatctaataacgttatggtgcttgacggaggaaccttcagcgggatgagcggcggaccagtcctctttaaaggtaaagtagttggcgtcgttgttcgcggtcccaatgataatgaccccaatgagaagtgcgaagctgtgttctcaactctggtcctcccaatgttttga

SEQ ID NO: 7791 - RNA, 1665 nt, synthetic construct
  source 1..1665: mol_type = other RNA
atgaccctgaagagcatcccagacctgcgtttcctagctgcggccctcggtcggaaccttaagcgacgggtgacctatatcgcctacaagcttcctccatcttctaaattccgagtctttaccatcccaaagaggtcagggggcactaggacgatccaggctcccaggatcgctctactgtcattgcagagatcagtcaggcttctcttggaacgcgactattcccctcgggttaatgtgcatggcttcgtacccggccacggaaggtcaatcgtcagcaatgccgagaaacatgtactgaaaaaatgggtactgaacattgacctggagaattatttcggaagcatccacttcggtagaatagccggaagattgcaatccaaaccttatggctatactccagagatcgcaaaatttgtggcgcacatcgcatgctaccccacccaggcccttatagacggaaaaatacaggactccagtgtgctgatgactggtggtgccctgtcccctctcttggcaaacattgtgagtgataagctggatagcgagattgccaggttctgcagccaactgggctgtacctacacacggtatgcagacgacatcaccatttcctcaaaccggaataaatttccaggcaagatagcacgacttgaggatcccgaagaccaccgctccgtggttctctctgaagcttttctggatctgatcgaagggaacgggtttgccgtgaaccatgccaaaaccagacttctccctcggtctttcggtcaggaggtgacggggttggtggtcaataaaaaggtaaatgtccctagatctttcatcagacaaatacgcgcaatgctccatgattgggaaacaaacggctacgcggctgctcagattcgccacttcagtaagtttaggccgaatcgcggacgcctcgatgcccatgaggctaaacactttcaatgggtcgtgagggggaagattgaatttgttcgaaacgtgaaggggagcactgatcagacctttcagacattagcccggaagtacaattccctgacaagtgggggaaagattacgattcctattgtggagacaaacagaattattgaggaagccgtgtggtacctggtgaatgagaataaggtcgttaccaccggcacttgcttcgcgatagagggcagtaagtacattacctgtgctcactgtattggacccaacatgactgtaacacccaagagcgccccaaagttccccgtctctgtgaaagctctcaagcaggatcgtgtgaacgacttggcgacgctggatttatcggctctactgcctgcccacactccaaagggtatgctgaaacttgcaagcatcgccgaggttggggctctcaaagtcggcgacaaagtgcagattgccggatttcctggcaacttaaatgaagaggccgttactatctctgaagcaaccatcacaagattttccaaaacaacactcgacgggtcgatcccagcaagcaacaatgtgatggtcctggacggcgggacattctccggaatgtcaggcggacccgtgttattcaagggtaaggtcgttggggtggtggtacgtggcccgaacgatgatgaccccaatgaaaagtgcgaggcagttttcagtactttgatcctgccgctgatctga

SEQ ID NO: 7792 - RNA, 1677 nt, synthetic construct
  source 1..1677: mol_type = other RNA
atgcctgccccaactccgttgctgaacagtatcttcctcccacgtcaattagccagcgtcattggcgtgggattccggaggttcgcatatatcgtgtacgtcattcagggttccctaaagtatcgcaactttaagctgcccaaacgcaggggcggcgaacgacttatcgaggcacccaggtggccactgctgagaatccagaaggagttaagaccactcgtggacgagctgtacagaccccggggggtggtacacggcttcctgaaggataggtcggtgttaacaaatgcgcgggtgcacctgaaagctagatgggtcctctccctggatctgcaggatttttttcatgcggtaacatttggtagaatcaaaggcagacttgaagccaacccctttaatctcacccctccgattgcccacgcaatagcaaatgctgcttgcgtcagcggcaggctccctcaaggaggagcccttagtccagtgctcagcaacatggtcgcagatagattggacggtgagctgtccaggctgtgtcggaagttccggtgtcgttatacccgttacgcagatgacataacaatttccaccggcgcagctcgattcccccatgctcttgctcacttggacgacggtgagaagaggaccctgattattggggaagccttaagagcacttattgagtctaacgactttaaactgaacgaatcaaaaagccgcctgtctggacgaggtgaccgacaggaagttaccggactcattgtaaacgagaagctaaatgtgcctcggactttcgtgcgccagatccgggctatgatgcacgcctgggagaagtttggccgcgtagccgctgaagcggaacatctcaccaaatggcgcaagtcagacggacgattgcgcaagcatgaccgcgacaattttgaacacatcctccgtggaaagttggagttcctcaaatgtgtgcagggcgagaatgagcctgtctgcaggaaactgctgctaagatttaatgccctccccgaccgctccaccacttcattccggctgctgccagcctctgccatcgaacttctccgtgaatctacctactgcctggatataacaaagtatgtcgggccaagctctgagggctcagcccatgttcgggagtacttcacaggaacggctttttttctcaaaggggtcgggctggttacttgcgaacattgcacaggggacgagatgcagatataccatcctgatcggaaacacctaaaataccgagtgcacccccttaaggtggatgccctggcggacgttgccatcctggaggttcttgatacgatgctgcctagcccaagggtggaattggaggcagccgtttccgccgtagcgatcggcgatgaagtacgcgtcgctgggttccccgcaaagttccctgagggcagtatcagcattgccagaactgaggtgatcgcaacttatgataggtccagacaccccgtgatatggaaaggggacgctacagttcggtatttaatcgagaagggtgttccggatggagtgagtggagggcctgtcttggacgccaggggcatggtgattgggctgggcgtgaagggtccctctgaggatgaccctttggtgccgtgtgaagtggtgccaatctcagctgtccaaaggctgctgagaacgagttga

SEQ ID NO: 7793 - RNA, 1740 nt, synthetic construct
  source 1..1740: mol_type = other RNA
atgaaaaataaaacaactctccctacacccacaaaggagctgttacaggcttcctccaataaagatctggcaaggttgttgggcttccgtacgtctagcctttgttacatactttacaagctcccaagcaggccttacaagaaattcgggatccctaagaaaagcaaaggagtgcgcataatttgcgcgccacgtaaacctataactacactccaggagaaagtgtaccacctcttgctgccgctatatcggcccaagaagtcagcttccgccttcattaaaaatcgatctattgtcttcggcgccgataagcactccagaaagaggcacctcgtgacctttgacctgaaagatttctttgatagtatccactttggccgcgtccaaggcctgctcatggccacaccctttaacatccacccagacgtcgctcagagtctggctaacatcatctgttatgaggacaagcttccacagggagggatcacctctccgcttatttcaaacatgatctgttggaagctggacacacagcttacagaactcgccgtaaatactggatgcacctatactcggtatgcagacgacatttccatctctacgtggaagaaagaactgccaccagagatcggtaccctgagcaaatatgatatcaccttgtccgaggaagtccagaaaatcgttaatgacaacgggttcgaggttaatccatcaaaaacacgctacacccatcctagcacccgaatggaagtaaccggactaactgtgaacaggcgaccaaatatccagcgcaagaagatcagaaacttacgcgcccttttacatgattgggacataaacggttacgtggaggcagagcagagatacagggacaagtcctcgaatcctcctcgggaggaggccaccctggaggaaattgtttgcggcaagctggcttttttaaaaatggtgaggggggaaaacgaccccgtatacagaaagctcaaacgcaaacatctcatactgtctacagggtctattcccactggcctactggatgccgtccccacccttaacgctgatagtaattacctatttggcgagggacagaccgactggaagcatctgtatgcggcctttcgttactttagaaatcaaggtctgtacaatgggctgaatcttgtgattagtccccccccagctgtgtgggaaggaggtttttcgaacttgaagatgatggtggagcgatataagctgctccacaacacgaactcaaaattgttcttcctctttgacacagacgagcaacaagccgtgaagtacgcccggggcaggaaggataattctaacctgtaccatcaccaggggtcaaacgtgtataccctgttgctgtcccacacgcctaatctctgcatcgagcatctgtatcctgaagaggaactgaagagagccaacagcgcaggacggagactgtatctctccaatgagttcactgagcagggcgtcctgaaagataattcaagcatcacttactgtagtgaaaagaagcccttcgataagcggtgggttcacaaaaagcatatcctggacgctgatgtgataaaaaccattaacggcaagaaaaagaacattgcatgcagcaagaaggactttagtagccaggttttggcccggccggatactgaactggtctttacattcgatgaattcaagcccattttcgacgcaattgaaaaagctttagcagcgtataaagcctga

SEQ ID NO: 7794 - RNA, 1614 nt, synthetic construct
  source 1..1614: mol_type = other RNA
atgctgatcacactgtctgctcttaccccgccaaattttctcgacctcaagagcttcagcgatctcgccttgttttttggcattccctcaaacaagttaggttatttgctgtatgctctgcaagacagtgataagtacaagtcttttaatgtcccaaagaaaaccggcggcactaggcagatctcagagccacatcccctactcaagaagatccagcgtaaactggcagactccctcctcgaactgtacaagcctaagcagtcagtgcacggctatctgaaggacaaaagcatagtatctaacgctaagatgcaccttcggaaaagatatcttctgaatttcgaccttgcggacttctttacgagcattaacttcgggcgggtgcgaggcttgttcctgaatcacccattcaattttccacaggaggtcgcaactgctttagcccgcatttccactaaagaaaactccttgcctcagggagcgccttcgagtcccgttatctccaacttcatgtgttgggggctggacaattacctccgcaagttctgctaccagctgggctgtacttacacccgctacgcagatgatattagcatatccaccaatagagagaacttccccacagaaatcgctaacgtgaaacacgacccatactctgccgtcatcagcgagattcttactacaaaaatcgagcagaatggcttcacgattaataatgctaagacccggtttagcacacctaggcaatcccaagtggtgactggcctgaaggtcaacgagtttgcaaacgtttcgagaaaatatgtgaggaatctccgggctatgctgcacgcctgggaaaaattcggactagacaaggccgagtctgagtttagagaaaagtacgtctcaaagcatcgagccccctttcttcctcccgtcagtttcaaacaagtactgcatgggaagctgacctttctcagatccgtgaggggccccaatgacgatatctaccagaaactgttgggacgctattctctggtggcagacctgaggaggttaaccaaatttggttttcctaagcagattaaccgtgcactttggatcttggaaagcgatctgtttgaagatgattactaccaaggaaccggtttctgcctagatgggattggcatagtcacatgtgcgcacgtgttaaagcccggcaccaaagcacggcgcatatacaaccatctggagtcactcaatattgaaattgtggagagaaacgacgccctggactatgccataataaaagttatcggaggggtggaggaggtgagtctaatcgccgatctggacttcaatcatcagctgggggggcaggttcgtacgatcggtttccctgctcacgatggcacagcctccgtggcgtacgaggacggagttattgtacagtctcggtataacgcagccggacagaagtggttccgagtcaacaccaacatcgtagccggcagcagtggagggcctgtgctcaatagtgaaatgaaagtgatcgggattgttgcctatggagccacaaacttgtcagggggtggcgatccaatcaattccggatatattccgatccagtgcttaaacggtccggcttga

SEQ ID NO: 7795 - RNA, 1515 nt, synthetic construct
  source 1..1515: mol_type = other RNA
atgagaatcattacttctctgtggcagctggaagaggagtggggctatgaagctggaaccttagccttcgttgcttatagaaccaatatcgactcgaggtacacgacttacaatatcagaaagcgcacccagggctaccgtcagatcgacgaaccagacgaactccttaagggtgtccagaggaaaattaaagagttcctcgaggacaaatacgtgccgaccacttcagcatacgcctacgtgtccaaccgatcccctgtgaagaatgcagctctgcacacgcggaaaaagtggatagtcaacatcgacatcaaagactttttcccatctatccactttggccgaatttgcggtgttttgcaatcaaagccctttcaccttgaagcatctactgccaaggtactagccacaatttgcaccaggaatcacgctttgccacagggagccccttcctctccgatcctcagcaacatcatttcctacagtctcgatatagcgcttatccaatttgcccggtcacatggcttttactacactagatatgccgacgatattaccttcagtacatggcagagcaagtttcccaatcagcttctcacagtggatcatgagggaacccgtgtggcagattccttagagcaaataattagcgggaatggttttactgtgaacggcctgaaaacccgctgtctggagaggcgacaacgccagagcgttacaggtctgacggtaaacaagttcgtgaacgtccgccggaagtatatacgacaggtgcgggggatgatacatgcgtggcagaagtatggggaggaatctgctcagaaaacctttgaggaaaaacacctgaacaagcattatgttcccagcgggagaattcccaagttcaggtgggtcctcctggggcggttgcagtacatcggccatgtgaggggatggcaggaccctgtctatcgtaagtactttagacaacttagcgaactctggccagacctgtcgaagagaatgagggatcggttcgatatattggcccagaacttccttgagttgagtaatatgacagatcaccgggctaaggggtatgcactggagaaattcatttacgagctgtgtgacgacggaacagtcggagtgtccggccaattccgacgccagaacaacattgagcagattgatggtgctatctccttcaattctaatgccgtgctcatcgaatgcaaattctactctgagaggattggcgctcttctgatcgatcccttttccatgaagttagctcgctcaggggccggaacacaaggcctactgatcagcatgagcgggtatacctcagaggcactcgaaactattaaactgaaccctggccagaatctgatgctgttaactgatgccgatctgcaggtgtggttggaccgccggctcacaacctatgaggtaatcgccgcaaagctaaaagcgctgcaggttctgagagaacctgcgttgagtctggccgaaagtgtcgagatcgaggaatga

SEQ ID NO: 7796 - RNA, 1641 nt, synthetic construct
  source 1..1641: mol_type = other RNA
atgccatctgacacctcaacgccaacacagcgtaaagcaagggaacctggtccacccgccatcacaattaacgggcgagcgctgcagacacctttcgatgtggcccaatactttaaagtggcccacagccacatgatgtgggtactgttcaaggcccccgccgcgagcagatatcgaaccttcgagattccaaaacggacaggcgggatgcgattaatcagcgctcccaatgggttggtgcgcgacttacagaccaagctggcaccagctctcgctgcagcttatgaggcccacccgtcggcccacggattcttgaaagctaagtccgtcgtgactaacgcacatgagcacattggccagcggctggtcgtcaacattgatcttgaagatttcttccctacgattaactttggaagaatacgtggcctgttcatgtctcggcccttttacatgggagctggtgctgcctccgtcatggcccagatcgttacgcacagaaacggcctaccacagggcgcaccaacttcccccgccctaagtaattttatagccgctaccttggacagaaggctaacaagattagccaaggaaaaccgtctgcgctacacacgctacgccgatgacattacattttcaactaatcagcccacatttcctccttctatcgtgatgaccgatgtggctactggacgggtggtccccgcggaaactctggagagagcaatcgctgcggctgggtttgccattaataggaaaaaggtcaggctccagactaggcatcaacgccagaccgtgaccgggctggttgtcaattctagtactaacgtgcatcgcgcacggatacggaaaatcagagctatgattcacgcctgggagaagtttggtctggacgcggcagcatctgagcatttcgccgtacacaggggtagcagtggcaagatgcctgaccatccagcagcagccttccgaaatatcgtttatggccaactgtcatttgtaaaaatggtgcgcggcaaagccgaccccgtttttctcaagctctgcgctaagttgattgatttggacccgaaccccagtaagttcatccgccaaatggtgttcggcgcagatgactatgatgtcttcatctcgcacgctagcgaggacaaggaaaccattgcaaggcccatcttcgaagcctgtgctaggcggggcgtgaaggccttccttgatgaggcccatataggttggggagaagattttaccaagaagatcaatactgcccttgggtccgctcggaccgtcctgtgtgttatcagccaggtgtccgtgacgaaagagtggccgctcgcagaggtcaatacagccctttctatggacgtgatcggacagaaacgggtggtcccactgatcgtgggcagccctgacctgtccaagctgcctctcatcagaggacgcgaccagcttgtttggaggggagatgcggagattgttgccgccgaactggttaaggtggtaagaccgccaaaacccgaggtaaccaaaggcggtgccgcagtgcctgtgatagctcctaactcacccgctgaagccaaacgagcagcccaagctaaaggggcgaaaaaggggggaggcttttttgggctcttccagaagaagtga

SEQ ID NO: 7797 - RNA, 1638 nt, synthetic construct
  source 1..1638: mol_type = other RNA
atgccttctgaacccgggtcggaaaaacctgtcagagatcctggccccccagccattctttggcgcggaaaaccgctcgaaactccatttgatgtggccggatacttcggggttgcacataatcatctaatgtgggccctgtacaaagctcctccccagaccagataccggaccttcgagatcccgaagagaaccggtggcatgcggttgatctccgcacccaatgggctggtaagagatctccagaccaaactggcaccagtgctggcagcagcttatgatgcccaccccgccgcacatggctttctgagtggcaagtcagttgtctccaacgcccgagagcatgccgaccaaaggctggtgttgaatatcgacctggaggatttttttccaaccatcaattttggcagggttcgagggctgttcatggcacgccccttcttcatgggtgccggagccgctgctgttatggcgcaaattgttacccaccgcaacggattgccccagggagctcccaccagtccagtattgtccaactttatcgcggcaacgctggacagaagacttactcggcttgcaaaggaaaacaggctgcgatatacacgctatgccgacgacatcacgttctccaccaaccagccgacatttccgccttctatagtgattacagaccaggccagcggaaagatagtccctgcagaaacattagagcgggccattgccgccgctggtttcgcaatcaataggaagaaggtgcgcctccagaccagacatcaacggcagagtgtgacagggcttgtggtcaacacagctcctaacgtccaccgtgctcgcgtgaggaaagtcagagctatgattcacgcgtgggaaaagtttgggttacagtctgcggcgtacgagcactttaggaaataccgtggggcctctggcgctatgccagacgaccctagcactgccttcaggaacatagtctacggccagctcagcttcgtaaaaatggtgaggggccgtgacgacaaggtgttcctgaagctctgtgctaaactcatcgatttagacccaaatccctcaaaattcatcaagcaaatggtgttcggcgctgatgattttgatgtgttcatttcccacgcatcagaagacaaagagacaatcgcccggccaatctatgaggcttgcgcccgcttgggcgttaaggccttcttggatgaggcccacatagggtggggagaggacttcaccaagaaaattaatactgccctgggcgctgcccggacagtactttgcgtgattagtcagactgctgtgactaaggagtggcccctggcagaaataaatactgcgctctcaatggatgtaattggacagaagaaggtggtgcctctaatcgtgggtcagccagacctaagcaagctgcctctgctgaaggcccgagatcagatggtgtggaggggtgacgccgaaatggtcgcacgggaggtggccaaaatcgccaaaccacctaagccagatgttgtcaagggaggcgctagcctccccgtcattgcacccaacagcacgatcgaggctaaacgagcggcccaagaggctggggggaaaaagaaaggcggaggtctgtttggatggtttggcaagaagtga

SEQ ID NO: 7798 - RNA, 1716 nt, synthetic construct
  source 1..1716: mol_type = other RNA
atgccaccctccacctccgatgccccacctgaacccccacaagctggcgctccagttccaccgcctcctttgggagccctcgccattgacggagcgcctctgaggaacgcttacgacgtagcaagatattttggcgtcgcccacggcacaatggtctgggttctgtacaccgctcctgagaaccagcgttaccgtacgtttgagatacccaaacggagcggcgggatgagaaggattgacgcccctactggtctagtacgccaaatgcagaagaagctggcacccatcctggcaggcgcatatgaggcccatcccagcgcccacggcttcattaaagaacgcggggtgctttcaaatgctaaagggcatgccgggcagaggctcgtgctgaacatcgacttggaggactttttcccttccatcaattttggaaggattcggggcctgttcatggctgctccctttctttgtggccctggggccgcaacagttctcgcacagatctgcactctacggaatggacttccgcaaggggctccaaccagccccgcattgagcaactttatagctgccagtctggataggcggctcacgcgcctcgcaaaggatcacaacctgaggtattctaggtacgcggatgacatcactttctcaactaatcagggagttttcccccctgcggtcgccatgaaagtgcagaccgagggtgcctctcttggggttcgacccggtgaggcactggatagagccatagctgccgccggcttcgccattaatctgcggaaggtgcgtcttcaatctagatccgtgcggcagaacgtcaccggcttaacagtcaacgtggccgcgaatgtggagagatccaggattcgcaaggtgcgcgcgatgcttcatgcatgggaaaaatttggtctggacgccgcggggagtgaacactttctgaaacatcgtggagccaagccaaaaaagggccgagggcctgtaactccaggagcagcgttccgaaacgttgtctatggacagctggcctacatcaaaatggtacggggcccagccgatccggtgtttctaaagctttgcggccgcgtcctggacctggatcccaatcccagcaaattcattaagcagatggtgttcggggccgagaatttcgaggtgttcatcagccacgctagtgaggataaggaactgattgcgcggccaatctatgaggcctgtgagaggctcggcctcaagacctttttagacgaaccccacatcggttggggagaaaacttcaccaagaagataaacacagcattggggtccgcacgcacagtgctcgcaatcgtgtcaagtaactcagtagctaaagactggccagtgttagaaatcaacaccgccctggccatggaagtgaatggtcagaaaagagtcgtccctctcattgtgggtaagccggacttagcaaagttcccattgctgaaaggcaagaatcatgttgtgtgggcctctgatcccgacaaggtggccttgcgactcttggatgcagcaagaccgccaccgaaacctcgcgctgctcgaccagcttcgaggacagctgtgcccgccactggagcataccagcctgtccccgctggtcccaatgctctgccaccactgtttgccccttacccccctcgggctcctaaacccaagagatctttcctggagtggatctttggcagaagaggatga

SEQ ID NO: 7799 - RNA, 1683 nt, synthetic construct
  source 1..1683: mol_type = other RNA
atgcagcccccccctaccgatggagaagcctcgaagcctgcagctcctgctccctcacctctgagcattgacggggtacccctccgctctgcagaagaggtagcgaggtttctgtctgtgccctatggcaggatgatctatactctttacaagagccccgacaaagcgaggtacaggggatttgagatacccaaacgcagtgggggcatgagactcatccagtctcccaatggactgttgcgtgagatgcaggagaaactggggcccgtgctccaagctgcttatgaggctcatcctgccgctcacggattcatcaagacacggagtgtggtgagcaacgccagactgcacgttgcccagcgcctggttcttaacatcgatctagaagatttcttcccaaacgtgaacttcggccgggtgcgaggcatctttatggccccaccctttagttgtgcaccagccgctgcgtctgtgctagcccaaatttgcacacacaggaatggtctgccccaaggagcccccacatcaccggctctcagcaacttggcctctgctactctggataggagattgacacggttagcaaaggaaaatgggctgaggtactctcgctatgccgatgacataacattttctagcaaccattcccagtttcccccggccgtggcgattttcacggaggatggtaaaaaaggcctcgccgttagaccaggcgaagcactcgagcgtgctattgccgccgccggattttcaataaatctccggaaggtgcgcttgcagccacggcacgtgaggcaagcagtcaccggactgaccgtcaacgccgcgcctaatgtcgaacgaaagcgcatccggcgcgtacgggccatgcttcatgcgtgggccaaatttggcgccgaagccgctggtgcggagcacttattaaagtatcggggggcccattccccaggagagcagtcagcacgggcttttcggaacgccctttacggggagctcgcctacattaagatggtacgcggtcaggaagaccgaatctttctcaatttgtgcgcgaaggtgcttgagctggatcctaatccgtccaggttcattagacagatggtgttcggggctgacgactacgatgtgttcattagccatgcatccgaggacaaagatgaaattgctcggcccatcttcgaagcatgtgggagagcaggcctgaaggcatttctggacgaggcacacatcggatgggggcagtccttcacccagaagataaattccgcccttggtgcggccagaacggttctggtgatcgtgagctcaactagcgtgtcgaaagactggccagtcctggaggttaacaccgccctacagttcgaggctgcagggcagaaaaaggtcgtgcccgtcatcgtcggcaagcctgacttatccaggctgccactgctgagtggcaaggacgggatggtttggagtggcgatgctgatgctgttgctaccaggctgcaggccgccgtcaaaggtgacgcaccacgtcgtccagaacgcggtgcagcaaaaccaccggccagagccgctcctcctcaaccaccaccacgagcagctggacgaccgggaagaactgctgtacctgtcactgcccctcgaggccctagaaggggcttctggtcctggttgttcggcgcacgccctagatga

SEQ ID NO: 7800 - RNA, 1692 nt, synthetic construct
  source 1..1692: mol_type = other RNA
atgccagatcctagtacgcctagcgatcgcaccagagcccctgcctttggggaactccgtttggaaaccgtgtctgacatcgctcggttgctgcgtacacatccaggccagctgagttggactctctataaagccccagagactgcacggtatagggcattcgagatcccaaagcgctcgggcgggatgagacagattcatgcacctattgcccacgtccgggactggcagacacgccttgctcccatcctgcaggcagcctacgaggcccacccaagtgcacatgggttcctgcgtgagaggggcataatgactaatgcccgaacccacgtcggccagaggctggttctgaacatcgacctggaggactttttcccctccgtgaattttggaagggtacgggggctctttatgcggagccccttcaattgtggccctgcagcggccacggttcttgctcagatttgcacgcataggaacggattaccacagggagccccgacctccccagcattgtcgaatttcgcggcagctgccctggataggagactaacccgcttagctagagacaacaacctccggtactcccggtacgccgacgatattaccttctccacaaatcagccccagtttcctccagccgtcgcggaaatgcgagccggtgaaggggacgccctgaaggtgcgagctggcgaagcacttgagagagccgtcgctgctgccggtttcagcattaaccacaaaaaggtccgcctccaaagaaggtcacagagacaatccgtcactggagtggtcgtcaacgcccgcactaacctgacaagacagtgcgtacgccgggtacgggccatgcttcatgcctggaaaaagtatggactggaggcggccggcgccgaacactttgatcgctggcgcggggcacaggccaataaaagagctactacagtgggccgggccttccgtcacatcgtgtatggagagctctcttttctgaagatggtgcgaggtgcagacgatcccgtgttcctcaaactgtgcgcacaactgatagaactggaccccaatccttctaagtttgtgagacagatggccttcggagccgacgactacgacgttttcatcagtcacgcttccgaggacaaagatgcggtggcgaggcccattttcgaggcttgttctaggttaggcgtgaaggcatttctagatgaggcacatatcgggtggggccaaagctttaccacaaagatcaacaccgccttgggagctagcaggactgtcctggccatagtctcaagccactcagtgacaaaagactggccggttttggaggttaacaccgctttagctctggaggcgaatgggtttaaaaaagtggtgcctcttttcgtgggcgcacccgatctctcaaagctccccctgctgcaggcaaaggacgccatggtgtggaagggtgatcccgatatggttgcaaagagagtgcaagctgcgttgaagggggaagctcctaggcggcctgctgaagtagctccccgaccacgatggatgggtggccgttctgccacagctctcccaatagtgggcgtagctccgagaggagttgccgtgcgcgttgatccccctccaattcttcctccgcccaggcggaccctatgggaatggatctttgggaggcgaggtccgccaagctctcgctga

SEQ ID NO: 7801 - RNA, 1671 nt, synthetic construct
  source 1..1671: mol_type = other RNA
atgcccagttcatcccaggcggagactgcagaaaccgctctgcttcacaacgggaggccgatactgactgcctacgatgccgccaagttttttggagccccacttgggaaactggccggggtcctctatcgtgcgccagaggaggaaaggtacaagtcctttgaaatcccaaagcgcaccggcggtatgaggccaatcttggccccgatcggcttaactcgcgagctccaggagaaattggcaccagttctgcttgagcgttatagtgcgcatccagccgcacaagggttcctgaaagaacgcagcatactgaccaacgctcgagtgcatgccggtcagagactcgtgttgaacattgatctggaggacttcttcccctccattaacttcggccgggtgagaggcctgttcatggccgaacctttcaagctcggccccgctgctgctgccttattcgcacagctgtgtacataccggaatggtctgcctcaaggcgcacccacaagcccagccctgtccaactttattgccgcagacctcgatagacgcttggcacggttggctcgagagtctaatgtccgatacacgcgctacgcagacgatatcacattcagtagcaatcagccgacacttccccagacactcatcgtcaccgtcgccggcgaaggaagagcctctgtgcaggtagctgaacccttagagagagcgatcacagcttcaggattcgctattaaccacaaaaaagtcaggttacagacgcgacaccagcgccagtctgtcactggtctgcatgttaatgccaagcccaatgtgtcacgtgctcggatcagaaggatgagagcgatgctgcacgcctgggagcgctttggactggatgcggccgcctacgagcactttctcaagcacagaggcatgctgaaacctcctcgggacccatcgcgcgcatatcggaacgtggtctatggtcagctgtctttcattaagatggtgcggggaggggatgaccccgtgtttctagggctggcagcaaaactgattaaactggacccgaaccctagtcgattcattagacaaatggcttttggcggtgacgacttcgacgtgtttatatcgcacgcgtccgaggataaggatgaggtcgctcgacctatctttgaagcttgcgcccggctgggcgtgaaagcttttctcgacgaagctcatataggctggggacaatcttttacccagaaaattaacaccgcccttggctccgccaggactgtgttggccatcgttagccaaaccagcgtgaccaaggagtggcccgtaattgaggtgaatacggccctctcactggaagcaagcggacagaagaaggttgtgcctctcatcgtgggaaagcccgacatgtctcgcctgccgctaatccatgggaaagacgcaatggcatggaatggcgatgccgctaatgttgcaaggaggctcaaagcggctgttgatggggctgctcctaggaggccagccgcacaacctgcaaccactgccgtacccgtaactacagataagcctcttgccctaagagcacggagccaggcccctcttgccatccaggaacgtggaccatggcggcctccacccaagccaaagagaggattgttcgactggctaggggggcggaagaggccctaa

SEQ ID NO: 7802 - RNA, 1464 nt, synthetic construct
  source 1..1464: mol_type = other RNA
atgctgttacacgagggtaagcctatcctcactgcctacgacgccgccaagtacttcggggtgagtgtaggtaagctcgcacgtgccctttacaggagtgcagacgaggagcgctatgtacgttttgagatcgccaagaggagcgggggcatgaggcctattagcgcccctgttggattgactcgcgagttgcaaaccagactggcccccgttatgcaagcccggtattctgcgcacccagctgcacaggggtttatcaaggagcggtcaatcctcaccaatgcgagagtgcacgtcggccaaaggctggtgctgaacgtggacttggaggacttctttccatccgtcaacttcggacgggtgcgcggactctttatggccgagccctttaaactaggcccagccgcggcatctgtcttcgcccaattgtgtacctataaaaatggcttgccccagggcgcacccacatctcctgctctgtctaattttattgccgctgatcttgatcgccggcttgctcgtctcgccagagagtccaacgtgcggtatactaggtacgcggacgatataacctttagtagcaatcagcagtccctcccgcagacgctaatcgttcatgcgcagggaggcgatggccatggtgttgctgtggcagaaacactggagagagcaataacggccagcggcttcaatatcaaccacaaaaaagtgcgactacagacacgccatcagagacagtcagtgacagggctgcaggtcaattcacgggctaacgtctcgagggagcggataaggcgcgtgcgtggaatgctgcatgcctgggaaaagtttgggctgccagctgcagccagggaccatttcctcaagcaccgaggcatgttgcggccgcctaaagatcccccgagggcgtttcgcaatgtagtctacggacaactggccttcatcaagatggtccgaggagccgacgatcctgtgttcctgaacctggcagccaaacttatcaagattgatccaaacccaagcagattcgtgagacagatggcattcgggggggatgactttgatattttcattagccacgcctctgaagacaaagatgctatcgcacgccccattttcgaagcatgcgctaagttaggcatgaaggcttttctggacgaagctcacattgggtggggccaatcattcacccagaaaatcaacaccgctctgggttccgccagaactgtgctggccatagtgtctcaggtgtccgttaccaaagaatggccagtaactgaagttaatacagccctcagcctcgaagtcagtggccagaagaaggtggtgcccctgcttgtgggacgacctgatctgtccagactgcctcttgtccaggggaaagactgcatggcatggaacggtgacgccgcagctgtagctcggaggttaaaggccgcggttgagggagctgctccccgataa

SEQ ID NO: 7803 - RNA, 1671 nt, synthetic construct
  source 1..1671: mol_type = other RNA
atgcctttaacatccatagaagatgctgaaggacttcggctgccggacggtcggcttgtgttgtcagcccgggacgcagcgatctatttcggagtgagtttcggcaagctgacccacgcgctgtatagagcagacgacgagcagcgctacagagcctttgagatccccaagcgcacgggcggaatgaggcagatctatgccccccacggcatcattagagagtgccaggagaagctggccccagtgctgcaggaattctacgccgcccatccagccgcacacggattcatcaaagagaggtcgatcctgtccaacgcaaaactgcacactgggcagcgttacgtgttgaacgtagaccttgaggacttctttccttcaatcaactttggcagagtgagaggcctgttcatggccgcccccttcaagttgggacctgctgctgccagcgtgtttgctcaactgtgtacacacaggaacgggttgccacagggtgctccaacaagcccccccttgtcgaactttatttctgcgcaactggaccgcgcactgtcacgacttgcccgcgaaaatggggtgaggtactctcggtatgctgatgacataaccttcagcaccaatcaaggggccttcccacctgctattgccgtcacctctaggggggaagacggaggagaaggcgtgcgaacaggcgaggcactcgaacgcgccgtgatagcctccggcttcgccatcaaccataggaaggtccgcctacagaagagagatcagaggcaaagcgtcaccggcctaaatgtcaatgagaaagctaatgtggcccgcaaaagaatcagaaggatcagagcaatgctgcatgcctggcagaaacatggcctcgaagcagccgctgctgagcactacttgcggcataggggcatgctccagttgccccagaatttcgatcgggcatacaggaatgtagtttatggccagctcgcttttgttaaaatggtacggggggccgacgacccggtattcctcaacttatgcgctaaagtgctggaaatagatccaaatcccagccgttttattcgacagatggtgttcggtgcggatgattacgatgtatttatctctcacgcgtccgaggataagcacgagattgcacgaccgattttcgaggcatgtgcaaagctcggactgaaggccttcctcgacgaggcccatattgggtggggacagagctttacccagaaaattaacactgctctcgggtctgccagaacagttctcgccgtggtcagtagcacatctgtcagtaaagagtggcctattgtcgaagtgaacactgctttagcgctggaagtttcagggcaaaagaaggtggtccccttaattgtgggcaagcccgatctgtccaaactacctctgatccggggcaaggatgctatggtctggaacggggactccgctgctgttgccaagcggctcaaggccgctgtgagcggtgatgctccccgaagaccagtgatcaccccctcacgtacggcactgcctcccgttagtgcagcacctgcctccgcgactgcaccacttcgccaagcacctgttggaactggtccttgggcccctccaccaccgaggaaacggaagcttagtttttttgagctgctgtttggtcgacgtaaacgctga

SEQ ID NO: 7804 - RNA, 1770 nt, synthetic construct
  source 1..1770: mol_type = other RNA
atgcatgccgacagacggcccgatgatgcacctccccaagctcctgctattctggtttctggcagggcccctcagtcagccagtgacgtggctgctctgtttgacgtgtctgcctcctggctcacctatgtgttgtaccgcgccgacgagtctcaaaggtaccgggcattcgaaatccccaagagatccggcggcgtaagggagattaatgctccaattggagtggtccgggattgtcaggaaaaactcgcccctctgctcctagcggcctacagagcccatcccggagcccatggctttatcccagagcggtcgatcctgaccaatgccaaagcccacgccggccagcgtcttgtgtttaacgtcgacctcaaggatttctttcccactgtcaatttcggccgggtgcgagggctcttcatggcatccccctttttcatgggtcccgcggccgccacaattatggcgcaggtttgcacccacaagaatggtttgccacagggtgccccgacttcccccgttctgagcaactttgtagccacagcactggaccgcaggttgacgagactggctcgcgagaatggcgtgcgatactcccgctatgccgacgacatcacttttagcacgaaccagaccggattcccagctgccattgtcgctttcgagcaagacggggaaaaacggagagcagtggtcggggatgctctggccaaggccattgccgatagtgggttcgcagttaacttcggtaaagttagattgcagactcggcacgagcgacaaagcgtgacagggctcgtggtcaatgcgatgcccaacatagagcgggccagagtgaggcgaataagggccatgttgcatgcatggagcaagttcggactggaagccgccggcgaggagcactttcgcagatggcgacgcgcgaagcctaaggtaaaagatgggactgctgggactgctttccgcaacgtggtgtatggagagcttgcgttcgtgaagatgatccggggcagggaagatcctgtgttcctcaagctttgtgctcaggtgctagcgctggatccaaaccccagcaaatttgtgagggaaatggcatttggtgcagcggactatgatgtcttcatctcacacgcttcggaggacaaggacaccatcgcccgcccaatctttgaagcttgcgagaaattagggttgaaggcttttttagatgaggcacacatcgcttggggggcctccttcactgaaaagataaatgtggcactcgggtctgcccgtaccgtcttaacaattgtcagccctgcatctgtcgccaaggattggccggtgctcgaagtaaatacagctctggctctagaggtttcaggcgagaaaaccgtagtccccctgatagtgggaaagccagatctgagcaaacttccgctgattaaaaccaaagaccagctggtctggaccggcgacgcgatgttcgtggcaaaaaacctgaaggcggccgtagaaggcagagttggtgttaagcagagacggacacctgacggaggactggcccctgcaccagcagcaacaggagctccaggccctgctgttgctgcaagggccgagagttctcgtggagccgctcagggatggaccccaggttggcagtcaacggcacccaagccgtttgaaatcaggcgcaagtccaaaagtgggggccgttggttcgtgacagcactttgggctgcacttgctgccgccttagccgcagccgcttttctgtttggcttcggctga

SEQ ID NO: 7805 - RNA, 1536 nt, synthetic construct
  source 1..1536: mol_type = other RNA
atgagcgagaagttctccgcacaggagttggatcagctcctgaatctgaaactggaaaccgctaacgacgtgtctaagtttctgaagatttctaaaccgcagctgctctttgcactttaccgagccagcgacgagcagaaatacgactcttgggagattccaaagagatcaggaggcatgcgcagaattgactctccgcgccgagtgattcgggacggtcaaaaagctctgctaccatatttagaggccagacagaatgcccatccagccagccatggctttttgtccgatagggggattgttactaatgctgatgcacataagggacagagaatcgtactaaacatcgatctcgctaactttttccccagcgttaatttcggccgcgtacgcggcctgttgatgaagcctccttttgagatgggggaggctgcagcaaccatctgcgcacagctgtgtacatttcgcaacggcctgccccagggagcttgtacatctcctatcctctcaaacttcattgcaacctcactggatcggcggcttctcagattagctcgcgcgacaaggatgcggtatagtcgatacgccgacgatattacttttagtacaaatgccgaggccttccccgaacaaatcgtcaaggtctttagtgccgccccgctcactgacgaagctctggaggcagccatggaaggccctgcttctaaggcgccaaaacccgcagctccagcccctaaaatcggacccgctctggaaagggccctcacccaatgcggcttcaaagtgaatcctgctaaggtccgggtgcagcgtcgggatgaaaggcagacggttactgggctgaccgtgaatcagtttcccaacgtggaaagaaggcggatacgcagaatccgggccatgatacacgcctgggaaaagtttggtttgcagaaggctgggcacgagcacttccaccgatatgcacccaggcaaacctcgcctggcttcgatgtggcgcgggcttttcgcaacgccgtgtatgggcaactcgccttcgtcaagatggtgagaggagctgaagatcccgtattcctaaagctttgttccaaactgaccacgctggacccaaacccaagcaagttcatcagacgaatggttttcggagccgatgactacgatgtgttcatatcccacgcagccgaagacaaagacgcggtcgcgaggccagtctttgaggcctgcgagaggatgggtctgaaagcattcttggatgaggcacacattggctggggtgagaattacactacaaagatcaacgcagccatggggtccgcgaggtgcgttctgttaattatcagcagtcattcagccagcaaaccatggcctctggccgaaatcaacacagcgttatccttggaagtcatcggcgagaagatggccgctccccttgtggtggggaagcctgatctttccaagattccgctcatcaaaggaaaagactacatagagtggagtgacaatcccgacctggtggcccgtcgtcttaaagacctctga

SEQ ID NO: 7806 - RNA, 1677 nt, synthetic construct
  source 1..1677: mol_type = other RNA
atgcctgaaaacccagcctctaccgccggaccacctacacctcccacacctcctgctttacctcagcatctgcggttgagggggcgaccgctccaaacgtcacaggatgtggccgactatctggggatacggcaccggcttatgatagatactctgtataaccagcccccaaatgcacggtacagacactttgaaatcccaaagcgcacaggcgggatgaggcctattcacgcccccgtgggccacactagggctatgcaggacaggctgctaaccgattttaaggcactttaccggccccatcccaatgctcacggtttcatcgaaaagaggtccgtgacatcgaacgctacctgtcatacaggacagcgctgggttctcaacatcgatctcgagggctttttcccatccataaacttcggtagggtgcgcggcctgttcatgaggccaccatttgagatgggtcaagcggcagccaccgtttgcgcccaaattgtaacatttcggaatggacttccccagggggctccgacatcacccgtcttgtccaacttcattgcggctcagctggacagaaccctgtcccgtctagcacgccagaacagactcgtgtactctcgttatgccgacgatatcacttttagtaccaacctcactcagtttcccgcgtctgtggtagtgcgggagatggtggtgggcggaggctacaaagtccgagcaggagacgccctcgaattggccatccagaaatccggattcgagattaatgagaaaaaagtcagactgcaggcccactattttcaccaggatgtgaccggtctgtgcgttaatgagcgcgtcaatgtggctcgcgaaagagtgcgaaagttacgcgctatgctccacgcttggcggaagttcggactagagagggctggccaggagcacttcgcaaaacataggggaagtaggagattaaagccacctagccagcctggggccgcatttagaaatgtcgtgtacgggaatctctcgttcgtcaagatggtacggggggctgatgatccggtgtttctcaaactgtgcgcacaagtactggcccttgaccccaatccatcaaagttcttacgccagatggtatatggcgccgacgactacgatgtgttcattagtcatgcaagcgaagacaaggaagctattgcacggcccctttttgaagcatgtaatcgtctgggtctgaaggccttcctggacgaggctcatattgggttcgggcaatctttcgccgccaaaatcaacaccgcgctgggcgcttcaagaacgattttggccgtggtcacccctcactctacaactaaggactggcccctgcaggaaatcaacacggccttggccctggagatctctggcgagaaaaaagttgttccagtgatggtgggctcccccgatcttacccatttgcctctgcttcgaactaagagatggattagttgggagggaaacgcggattccgttatacgacagatgaagcagcaggttggcccactgcgcgaggcgaaaaaagcaggtagcgtccccggcatcgcaggtaagaaggctgcccgtccggtccctcaagccaaaccgatgagcggggcccagagccaaactaccccaagaagcgacggatggatcagcaggctctttggcaagaagtga

SEQ ID NO: 7807 - RNA, 1686 nt, synthetic construct
  source 1..1686: mol_type = other RNA
atgctctctagcgacaccagcaaccccgcaccagaaaccccgaaagagactctgcaggaacccccactggagccccatccatttgcctggggcgccctgcaaacagtggcggatgtagcagagttcctcggagcgcgcaggagcgatctagcctattggctgtatacagcctcccctgacaaaagatacaccgagttcgagattcccaaacggacaggcggaatgaggctgatctctgcaccaaccgaccagattaagacatggcagaatagggttgctgagaagctcgcacagtcttaccgcccacatccctccgcccatggcttccttgaaaagcgaagtgtgctgaccaacgctagggatcatacaggtgtgcgatttgtccttaatgtcgatctgaaagacttcttcccctcgattaacttcgggcgcgttagaggattgttcatcaaacctccttttgcaatggctccgcccgcagcgactgtgcttgctcagctctgcaccttcagaaacgggctgcctcaaggagcccccacatctcccatcctgtccaatttcgttgcatccgagttagatcgtcgccttactcgcctcgcgaaatccaatggagtggcctattcgagatatgctgacgacatctcatttagctgtaacagagccgaatttcctcctgacctggcccattacgaagtggatgcaggcgggctgaagacactcagacttggggcggctttagcaaaggaaatttctgctgctggttttgccccgaatctagggaagctccggctgcagacccgtgccatgaggcaagccgtgaccggactgacggttaacgccaaggctaatgtccagcggaggcggattcggagagtaagggccatgctgcacgcgtgggagaagtttggcttacaggccgccggccaggagcacttctctaggtaccgacccagcgccgccgctttgagagatccaggcccacgctttcggcacggcgtgtacggtcagctgtcatttatcaagatggttaggggcgtagatgatcctttgtttctgcgcttatgcgctagagtattggacctcgaccccaacccatcacggttcctgaaaaagatggtcttcggggatgagctatacgacgtgtttatcagccacgcatcagaggacaaagacgccatcgcaaggcctatcgctcaggccttggcccggcaagggttgaaggctttcttggatgaagcgcacatagggtggggagagaatttcactaagaagattaacaccgccctgggcgccagcagatatgttctggctatagtttccagtcactccgtcactaaggactggccaatcttggagctcaacgcggctctcgccatggaagcaaacggcctgaagactgtgatacctgtggtcgtgggtaaacccgaccttggcaagttaccgcttctgcaggcaaaggattggtacgtgtggaaagacgatgtcgaagctctggcactccgggtgcgtcaggtggtgaaaggtgagctacgcggagccgctcgtcgccaagctgtggaagcccgagggagttcagctagtgccgtccctacggaagtcgcccaggagggtactggcccaccagtagcaagtagcgacattaataaaaagcctggattttttgcacggctgttccgaaaacagtga

SEQ ID NO: 7808 - RNA, 1509 nt, synthetic construct
  source 1..1509: mol_type = other RNA
atgtttcgggccatcgtctctgtccgcgatgtcgctgacctgctcgaattagactggagccagctgtactacataacctcaagggccgccgaccgctactcctatcgaacctttgccattccaaaaaagggggggggcgagagggtcatacaaacgccccatcccaccgtgcgaatacttcagcacaagctactggaagtgttgtccctagtataccagccccacccagcagcccatggattcgttcacgagaggagtattaagacaaacgctacaccacacgtgaaccgccgctgggttttaaattacgatctccaggatttcttcccgtcaatcacatttcctagagttcggggcatttttatcaagagatttaggctccctcctggcccggccactgtattggctagactttgttgcaatactggtgatactcctgaccatctgccacaaggcgccccaactagccccatcatttccaatatgatctgtcactctttggaccaccagtttgtccagcttgcaaagcggaatggggtgttctatacgcgctatgcggatgacctgacctttagcacaaaccggaccgcctttcctctgggcatcgccgagacatctggggcccagcttatcggcgtcgggaatgatgtcaaggagatcataaaacacaaccatttcgacctgaaccatcgcaaggcccgaatttcagggagagcgagtaggcaagacgtgaccggtctgactgtgaataaacgcatcaacgtgaggcggcgattaccccgggagatccgcagtatgctccacaaatggaaagcccacggctatgaagcagctgaggtagaattccataccaagtttgatgtatacggtcgcggagccaattatagaaacgtggtgtctggaaagctcgctttcttgcggaacgttcgtggaattgatgacagagtgttcaggaggttatacggctgggccaaggaactcgataacgatagtttctctgagctaccccccctggcaacaaacgcccccagcttggcagaggcagtacgcgactttcccaccattaccgcttccgataataaacagacacgacggggctatctgaagagaatgttcgcgtccgctcggggcacactgtgggttgtggatccaaatctgaaggctgacctcctgactgatctggttgcgtccatcgaacctggaagagtctcggacatcagactgcttagccgggacgagagactgtcaagccgtcagaaagtgaaatacactacaagcaggcagagcctgctcgctaaaggggtgaacctcgaatggcgagtgctgccaccgccacagcgttatttccatgacaggtggctggctgacgactccgattgcgtgtcaattggaggtcctttttctagtatttacgatccgaggcctcccttgggtcaaaatcttctggcacgtagaccagagcagttcgacacgtggtggaaccgggcaacccctctcactaccggatga

SEQ ID NO: 7809 - RNA, 1782 nt, synthetic construct
  source 1..1782: mol_type = other RNA
atggcgtcaaaccatcctgaggtgcccagcgatccaagacagctgagggcctccttcgttgcgcttaagactccacaggaggtggcaaagttaattggcatttcctacgggcagctctgttcgataatctacgctaagcccggcaaattcccctacgaaacattctttattcccaagaaaaacggcaccctgcggaccatttctaagccgcatccagccgtgcgatctctgcagaataaactgctcccctttcttacttccgcatatcgacctaaaccaagtgcacatggctttgtcgtccaaagatccatcgtaagtaatgccaggccacacgtaggaaaacgcttcatcttaaacatagacctcgaggactttttcccttcaatccatttcgggcgcgtgaggggaatgctcatggcagtgccttatcagttgccatcatcagttgccagcgtcctggctcggatatgttcgaatgaaggagtcctccctcagggagctccaaccagccccatcatatctaacatgatttgcgctcggatggatgctgatttgcagaggcttgcaggaaaacatcggtgcacttacagccgctatgcagatgatctgaccttcagcacgacaagtcgccgttttcctgagcaacttgccgtgcccagacacgggctggtgggtgaaaatctgcagataggcgagccactcattgccacaatcacagctaacggctttcggattaacactgcgaaacagcgattacaacctaggcaccatcaccaggaggtcacggggatcacagtcaatcgcttcctgaaccctagaaagaagctcgtccgtcaggcccgagccatgatttttgcctggaagaagtttggacttcaggccgccgcggccgaatttcgggagaagtacgatcccaaaccacgccgcgcctctaaaccgcagccaagcttcattcgtgtggtattgggtaaggtggagcacatccgaaatgtgggaggcgaggggcacccaggctataggaaactgctagctgctcttcaccaggcagacccgcaccacttcgagaagcccgccgaagccagaacctggaaccccagacccgcagacaccagttcctgggggtatctggccaagagatttcggaattctgtgttccacctggaggtgactaacaaagaaggggacctacagaatgggacgagcttcctctgggacgcaggctatctcgccacagcccaccataacttgatcggccccgttagcgtgatgatcaatggcatttcctcacctgttggggccggtgatcaactacaccatcccaaggctaatgagggcgtagatgctgccctgctgaaagtggcgcatacagcgactgcaggtaagctggctttcaagactcgggaatccgcaatcgaaatcggagagtccgtggcagccctgggctttcctaccgttcctatgtacgactctgccttgatcgtgagaaccggaatagtcgagggcaccgctccccagtacagcaaccaaatcgacggtattcaagtgtctatcaagttaacaggagggttcagcggcggcccggtgattgattccagtggtaggctggttggggtcgtgatggaagctaccttcgagaaaactgctgctggagtcccggggggtgaatttcaacacattctgcctgcaaggtacctcacagagatcagtaaggactctgccgaaacgtcacctcagttgccactgcagctgaaagtagttgattcaaagcaggacaccgactga

SEQ ID NO: 7810 - RNA, 1419 nt, synthetic construct
  source 1..1419: mol_type = other RNA
atgctcacagagatgtacgtgccaaaagctgctgcccatggtttcgtcctaactaggagcattgcatctaacgcccggagacatgttcggcgcgagttgcttctgaatgtcgacgtggaaaacttctttggatcaatccactttggccgcgtgcgcggcatgttcggcaaacctccattcagtttcccaggcgttgtagcggcaaccttggcgcagttgtgcacagacaccggaactttaccacagggcgcgcccaccagccctatgatttctaacttcatttgtcggcgatttgacaatgatttacttcgactggccgggaaacaccggtgtgtatataccagatttgccgatgacatctcagtctctacacaagaattggccttccacgagtcaatagtgaaatcattcgactcctatggagcagacgtaacacttggggccgaacttgtcgcactctttgggaagcataagttcacggtgaacgccaagaaaacccgggtgcagtctcggcatcgcagacaggaggtgacagggctgatcgttaaccggcgactgaacgttcccaggatctacaccagaaggctcagaagtattatccacagttggcgtaaattcgggaagaccggggctgaaaccgtttttaagacactggatgcagggaggaagacccgctcaggagcttccccggatatccgatcccaccttaggggaaagatagagttcctgcgcatggtccgcggaggcggagacttgatctataccaagtacgcactggccgcctctaagctggtgggatacgatagacctggcagaattgagggggctgctgccgccatatttgagttttatagggaagctctctgggtcgtcgtgggcagagatgccctcggctcgctcatttcccagggtacagcgttttttctggacggcgtgggtttcgtgagcgcactgcatgtcctttaccctgctgactccagcattacaaagtggactctgattcgtgggtgcgcaccttacgatgaattcgcagtggttggctgtacacggcacccagcactggacctaacgatcctccagactgacgcaaggacgcatgccctgctgcgtggagatgagggccaaactctgcccggacaggccgtcgtagtgctgggtttcccaaattggcacactagcgccgataaacccctgagggccgatgccctgatcgtgcagcaaaagaccatcagtggttgcaaactagctagcgtgaactatccgcttttatccggggcctctggtggtcccgtcttgaatgccgaaggctgggtggtgggcgtgactgtgcacaatgctacttcccctgttctccccaatagttttctcgcgatagagcattttgctagcatcgtagggagccccttccacgctctgtga

SEQ ID NO: 7811 - RNA, 1674 nt, synthetic construct
  source 1..1674: mol_type = other RNA
atggccaagagagatcaggtgaacgacgtggagccgttaggtacggacgcccacctgcgtgaagcctttccccgtcttatgactcgatgggacgttgctcgcctgttgagggtagatagtaaggatctccactattggtgttaccggaacggcgctcggtaccgagagttccaactccccaagaagtctgggggctatcggacgatttctgccccagaaggagggatcaggctggttcagcggaaattgtgccagattctcaatgctatttatgtgccgagacactctgttcatggcttcgtgccgataaaagggcgcgggatacttacaaatgctgagccccatgtcaaacagcgttgggttctgaacgtggatctgagcgacttcttcgactccattcactttggacgggttagaggcgtgttcgaaaggtttggcgctggtcctgacgccgcggatctgatggccagaatctgttgttttagaggccgcttaccacagggcgtgcccacaagccctgtcgtgaccaatctcgtgtgtcgcagcctagatcgcgctctgcaggccttcgcaaagacccataggtgcgcagtaacacgatacgcggatgatataaccctatcaactggaagagcagggtttgatgacgcggtggtgtctgtcaagcatgacgagggcaggcgggtggctgagattggacacgggcttcgctttcttatcgagagccacaacttctcagttaatgagagcaaagtgaggctctcgggaaccttggatcgccaagaggtgaccggtcttattgtgaatcggaagaaaaacgtcccaagggaatacgtgcggaacgttcgggcaatgattcacgcagtagaaaggtacggtgttggcgaggctgaaagagtattccatgaccggttctcccgatctagacgaccagaccttcctgccgccgactttcttagggcactgcgtggccggctggaatttatcaggatggtcaagggggatcatgacgctacatttgtatcactgtggaatcgcgccgcacggttccaccagtggctgactcccagaatcgtggacttgtcccatgtagagcaggccctctggatcgtagagtccgaggtggccactcagggagtgtccatcagacgtcacggaaccgcattcgtcctgaaggacgtgggattggtcacagctggtcattgcgtcggggaaagaatgcgcatctggcacccaacacgacctgcagagaggttccctgcccgaataagagcgctgtgcacggccagtgacctgtgcgtgctggaacctcctcctcgcgatcgactgccagctctggacagaggtgatgcaggcactgtcgccgaaggagtcgaaatcggcactgcaggatttccagacgaacctgttaaagtggcccaattggagggacgggtcagtatgatcagactgcggtttgggcaccgcaacctattccccagctttgagacaaggaaggggatgtcaggggccccattactcgatgccaggctccgtgtggttggcgtggtcctgtatggccccgacaggagcccctctggtgaggaagatcgcgtgcccagttcggctgtcgcgatcgatctgattgacgagctcccaaaattcaccggctcctcccccgccttactcacctga

SEQ ID NO: 7812 - RNA, 1467 nt, synthetic construct
  source 1..1467: mol_type = other RNA
atggtcgatagacctgttaaatctctgctctccgtgaggacgatcaccaatctagccgatctgctcgatgtgactccgaatcagctcaagtatcttatgcgagggttgcgctcagaggagcgatacttgcggtttcacattccaaaaagaaacggaggcctgcgggtaatctattctccacgacgtgagctgaaagccattcaggaaagattttctcgcttgcttgtgggcatttacaacccaccaggaccggctcatgggtttaccgccgcacggtctatactgacaaacgcaatcccacatgttcggtgtaggtgcgtccttaacgtcgatttggaggacttcttccccagtataaatttcggccggatccgtggcctgttcaaatcattaggtgtgcccgaaagcggcgccaccgtgatggctcagttatgttgccacgatggcatcctgccccaaggagcgcccactagccctgtgctcagcaatatggtgtgcctgagcctggacaggaaactggtaaagctggccgcagtgcaccggtgtcgttacacaagatacgctgacgacataacattctcccataagcaccaaattctgccctccgagcttgcttatgtcgacgacaagggagagcctgtagtcgggcatgagctctatagggcgatcaaggagagtggatttgaagtcaatgtgaagaaagtccggttatttgacaacaggcatcgccaggaggtgactggactgactgtgaatgagaaacctaacgtgccaagaagattgattagacagatccgcgctatgatccacgcctggcggaaacacggtgaagctgctgcagaggaggaacacttccaatgttactataggagggtggggcggcgatctcccacgaatagttttagagacgtcctggtgggtaaaatgcacttcgtgcgcatgatcaagggggccgatgataggacttaccgtaacctccagaggcagctggcccatgtttatcctgagtacctagcggttatgcagaaagagaatctcaccctgaagaaacggcatctgttcatctgccacgcctccgaggacaaggaatcgtttgtccgccctctcgttgatcagctgcttctcagaggggtttcagtgtggtatgatgagtatgaacttacagtgggcgacaaccttcgcgagaagatcgacgaaggcctcaagagctccctgtacgctgcagccgtgctaagcacatcatttttcggcgacaaaaagacctggaccaccagggaaattggtggagtcactgccctggaagatgcagacttaagacctcgaatgttgcccatatggtacaacctgcgccagagtgaggtagcaaactacgctccaaccctggcggggattgttgccttgtccagcccccgccaaacaattgaagaaattgccgatgaactcgcaaagaaggtactaaagaagtga

SEQ ID NO: 7813 - RNA, 1419 nt, synthetic construct
  source 1..1419: mol_type = other RNA
atggccagcctgcttgacgtgagctcaagacagctgaactatctgctatatgtacggggcgagtccgagcgctatatcgctttttctatacctaagcgtcgaggggggattcggcagattctcgctccccatgatgatctgcgccatgtccaacacagactggccgaggttctcaatagcctttacgcacccccggacgtcgctcatgggtttgtggcgggccgctctatattgtcgaatgccgatgctcacgtgcgcaggcggcatgtgttgaacgtggatctggaaggattcttccccagtattaacttcggccgggttagaggcatgctcctgtcccctccctacagtctgactgcccaggctgctaccgtgtttgcacagatctgctgtcacaataatgaactgccacagggagctccaaccagccctgtggtcagcaacatgatttgccgacggttagatcgacagctatcgagactggctggcaaccacggatgtggatatactaggtacgtagatgacctgaccttttcccggagaacgggggccttccctcctcaactggcgaggtggggggaatctcgacgctgtatagtttctgacgagttgcgctgcatgattgaagagaatggattctcaatcaaccccagaaaaacctggctgttcagtagatgccacagacaggaggtgacaggcctgaccgtcaacacaaagaggaacgtcccgcggaaatacgttagacagattcgcgccatgatccacgcgtggtcaagatacggcatagaaagagccggccaggtgcacgcagccgaattttaccgacggcaaggtcgccaaggcgatgtccccccattcgcactcatcgtgcggggaaaactggaatttttgaggtccgttaagggcacaacagacccagtgtacaagaatctccagagccaactcgtccgactggacccagcctatttgcaggtgatgcttcgggagaatgccatgcttaatcgtagggatgtatttattagtcatgccagcgaagacaaagacgtcatcgcgaggcctcttgcagaagagctaatcaggctcgggctgaccgtatggttcgacgagtatgagatctcaataggtgattcccttaggcagaagatcgatgacgggctgagccagtctgccttcggtgtggttgtgctctcacacagttttttcgccaaaaggtggacaaggcgtgagttagacggattaactgcccaagaggacgctacgaaccgcaatcgcatcctcccagtctggcatgagattacccacgccgaagtgtctaagcattcccccacattggccggtgttcgggcagcaaggacttccgatcagactgtgcagcagatcgctcacgagattgcagaagtgatccgtaacgcatcctga

SEQ ID NO: 7814 - RNA, 1716 nt, synthetic construct
  source 1..1716: mol_type = other RNA
atggccgacctccgcttgacgagccccccttacgttctggttgctgcatttcgcagtctaacctcagtcggcgatctcgccactctcctgcaggtgcgcccggatcaactccgacactatacatatgggagggggtatagataccgcgccttcacaattaagaagaggaggggaggggtcaggaccctcaaagaaccacactccgggttaaaaatcgtgcagcaaaagttagcacaagttctgacaaccctgtacgaggcgccagactgcgtgcacgggtttgtggcaggtcgcagcatcgccacaaatgcccacttgcatatagggagtgaatgggtgttcaatgtagacctgaaagatttcttcccgagtataaacttcggccgggtgcgaggactgttcatcaagaggtacggactgcctgcgaacgtggccacggtgatagcccgcatttgtacccacaagaatgagcttccgcagggggctccatcctcgccaatcgtatctaacatggtggcggagcgactggaccgcgatctgcagagactggcacggaggtaccggtccgcctatacccgctatgcagacgacctgactttctccagaaacgatcggtttcctgacgcaattggttattgggaccctatagccctcccagtacggcaaagccgggtgggacacttactggaagccgccgtcatgaaaaatggttttgagattaaccctgcaaaggtacaccttcgcctaaaggacgagaggcaggtcgtaacaggactagtggtgaatcgtaaagtcaacgtccgcaagctttttgtgaggcggattcgtgcaatgctgcacgcctgggaaacccatggcgagaaagaggctgaacaggaatactttaacagatacgacacgaaggacagagctccccatgctatcttttccttcaggcgggtcgtgaaagggcacatcgatttcctgggcatgatccgtggcacagatcatagttggtaccgacgattcgttatgcagtacgcccacctggtgccaggttatgttgctcgtccagaacattgccggaggcctaatcatctcaggacctggaaggatgctatctgggtcctcgagactgaagagtcccagggcacagccttcgagctcactggctacggcctggttaccgctgcgcatgtggttagggatacgactttgcccggacatcctccatactctaatcctcacgtctttagcccccggaatgaggcacttaaacatccggtgcgaattgccgcctatgacgccgacctggacttggcaatcctcgaatttgatgcccccacacgttgtgccttgagaactagaatggctcccgcggctgtggctggagatcctattagagctgccggatttcctagctatgcgcccgggtcacagttgtgggaagagtccggctggattaaccatgttcggagacacatcaccgcacccagatatgtcgtgacaaccccaatcatcgccggggcctctggctctcccgtaatggaccttgagggacgggtcattggcgtggctaccaccggcgtgctgtcgttctcagctgctgcagctagatcaactggtgccgccggactgcccgattacggtgtggtgccaatagcgttacttgcaagagtctctgttgccgctactcccgcaagctttagcgcccctgatgcacacggctctccctga

SEQ ID NO: 7815 - RNA, 1494 nt, synthetic construct
  source 1..1494: mol_type = other RNA
atggccgccactgaagtcgtctccgccctaggcggagtgaggacacgcagtgacgtggccaacctgctcgcaaccagtgacgcccagcttcgttacctgctgtatgggagacatgaggatagccgctactgtaccttcagagtacctaaaagaaaacgaggctttaggacaatcgaggcgccaagggaggaccttaaactcctccaacggcgtctggtcgtgattctttcggctatctaccaaccccgcgctggggttcacggcttcactgtgggacggtccatagtgaccaatgcaaggcagcactgtgggcggagatacgtcctcaatgttgatctgaaggacttcttcacaagtatcaacttcggtcgcgtgtttggattgttccgcgccccacccatctctgcgagctacgagacagctactgtgctagcccaactgtgctgtcaccggaacgtgttaccccaaggcgcccccacctcaccgatcgtttctaacatgatttgcgctcgcttggaccggcaattgagcaagctggcacagcggaattggtgtaggttcacgcgttatgctgatgacattactttttcaaagcagcgaggggagttccctgaggaaataggttacctcgaccgagaagatgtagctcagcctggcagtgaactgcggagaatcatagaggcaaatggattcgctatcaacccatccaaagtcagcctgcgaaccaaaaagcgctctcagtctgtgaccgggttaactgtaaacgagaaatgcaacgtgcaccgcaactttgtaagacaggtgagggccatgattcattcatggcagaagtttgggttcgacgcggcccataatgaacatacgtcgcgttattacagaaggcttgggaaactgggtaaccctccacggctcgatcagatcattaggggaaagctcgccttcgtgcggatggtcagaggcggcttggaccccgtatataagaatctgcagcttcagttgtgccgagtggatccctcctatttggacgtgatgaggaaagaaaatgatcggatgaagagaagagacgtttttctgtctcacgcttccgaggacaaagagactctggtgcgacctctggcagattctttaatcgcagccggcatatcagtgtggtatgacgaatacgagattcagctgggcgacagcctgcgcgaaaagattgatgaggggctggcaaagtcaaggtttggcgttgtggtcctgagcagacacttttttagtaagaggtggccacggagggaacttgacggtctgacagctcgcgaggatgccagccatggaaatatgatcctgccggtgtggcacggattgtccaaggccgatgtcgcaggatatagccctaccctcgcgggtttaaaggcccttctaaccgatgggaagccactagctgaggttgccgtcgaactggttgcacagctccgtggcagactcaaaaaaacaggcggatggtcctga

SEQ ID NO: 7816 - RNA, 1479 nt, synthetic construct
  source 1..1479: mol_type = other RNA
atgcggatctggacggtgtccttcgagcccaccgtgttccaagaggtgactagtatcgtggacgtcgcaaacctcctcgggacctctgtaaagcagctaatttacctgctgtatgtgcgatgggaaacagaaagatacacaagctttgcgattgcaaagcggaccggggggactaggacaatttcagcccctaaacccgagctgaaacgaattcaaagacgccttgctgactttctgcaggacaacttgaccccaaaaacctgcgcacacggatttgctaggggccgaaatatagccagcaacgccgaggaacatgtgcaccatcgtatcgtccttaacatcgacctatccgattttttcccgacgatcaacttcgggcgtgtacgaggggtctttatggcccagcccttcggcgcatcccctaaagtcgccaccctcttggcgcagatctgctgccacgaaggtagcttaccacaaggagcacccacttctccagtcgtgagcaacatgatctgttttagaatggacgcccaactcatgaggctggccaaggagcacggttgcttctatacacgatatgctgatgatatcagttttagcaaaagaaagggagagtttccagcggagctggcaaccgtgggcgacaatggcaaggcagttgtgggaaaaagcttgcgcgacattatcgagcataacggcttcagggttcaccccctgaaagtgcaccttcatcacaatactaccaggcagatggtcacggggcttaccgttaacaatcgggtcaatgtgccgcgcgccttcatcagaaacatccgggccatgattcatgactggcgcgtgaatggctacgaggccgctgaaacacggcaccatgccaattactattctcaccctcaccgctccgttaaaccccctctgcgcaagattattgagggaaagctgtctttcctcaagatgatttccggagtcgatgacccagtgaggcagaatctgcagcggcagttcgttaacgtatgtgaagaatacaaagcggtgatggaggacgagggtataatgcatgattttttcatatgtcacgccagtgaagacaaggacgaccttgttagacctctcgctgaagccctgcgcagctggggagtaagtgtctggtatgacgagtacatgctcactataggcgatgatctgagagaaatgattgatgcaggcttggccaattcgaggtacgggatcgtggtactgtcccctaggttcttcggcgtgaagaagacttggcccaaacgggaggtgggtgccctgttcgcaatggaagacgctgatggcaagtctagggtcttaccaatctggcatgaagttactcagcctgatgtggccaagcggtcaccaacattagctcgtatcttggcttggcactcagctgatttttcacccgaggagctggctgctaagtttagagattttatagtgacacggagacgctga

SEQ ID NO: 7817 - RNA, 1677 nt, synthetic construct
  source 1..1677: mol_type = other RNA
atgttcggaataccagccggtctgcacgagtgttttacagtgagtgacctgtaccaattcctcggtgtcgatcccgagactacagggggctttctctacggggacgccaccaaatacagagtttttagcgttcctaaaaagtcagggggggagagagagatagtggctcccacaaaaaggctcaaatacctgcagaacaaagtgaaagccgagcttgagagttactatagtccaaggaagtgtgtacacggcttcgtgtccggacgctctgtaataagcaacgcccagtcacatgttcggaaggaatatgtgctcaacattgatctcgaagattttttcggaagtatcaacttcggccgtgtgtccaagctgtttcagaggcctccattgaacctccctcatggcgtggcatccgtccttgctcacatttgctgccaccggggagttttgccacaaggcgcacctacatcccccattatttccaacatgattgctttcaagctggatcgacagctgagggagctggcttataagtgtagttgcacttacacacgatatgcagatgacatcagcttttccttcaccaatagaaagaagtctttacccaaggccatcgccttttttgattcgaatgacgaactggtgctgggcaaagaactgaaggacattatcgaagacaactggttcaaaatcaatgataagaagacccgtattcagcatcgcacgcagcgtcagtctgtcacgaatataaccgttaatgagaaagttaacgtgaatcggaaattcattagacagacctcctctatgctgaatgcattgttcaagtatggagctgtggaagccgagcgcgaatatttcgaaaagtaccataagggctatattgccaacagacagcgggctaaaatgagcgagcaaccaggaaaattattcacccagaaaattaggggccgactcaatttcataagaagcgtacgcggatcaagttgcaacgtttggaggtcattgatgtaccggtatactgtggctatcggtaatccgaacgaaatctacaaccgctcttggtgggagatcgccgcagagtcaacctatatcttatatgacctctcagcggaaggcaatgggcagggaagcggattcctgcttgatggcatcgggctggtgactaatgaacacgtcattgccggcgtcgaacagaacaacatagtggataccctgtccatcgagtggctgcccaacaccaaaaaggagtttatcgggctaaacgtggcctggaagaatgcggaaaaggacctagcagttattacgagcgactttgtattcaatgatactgtcccgctgacactagagcgaaatcccaattactcggtggggacagagatctttgctatcggttaccctgcttacgagacacggggggccaacaaggcaaccatccttcaggccaaaatcaccggcgaggtggttcgcgaaggacaagacagggtcgtgattgaccagcccattatccacggccattctggtggggtcgtattgaatacagacgggagagtcataggtgtcgtggccaacggcaacgctgagggtgaagtgaggactactccttctgcgtttatcccaatcagcgtcctgcttgaagagcacgatcggcaaactaaggcgagctccgtggaggcatga

SEQ ID NO: 7818 - RNA, 1677 nt, synthetic construct
  source 1..1677: mol_type = other RNA
atgttcggaacccccaacggcctgcatgaatgcatgacagtcagcgacttgtatcgcttcttggggtatgacgaaaagaacacgggcggatttctgtatgggtcagcgattaaataccgagcattctctgtggccaagaaagggggaggcgagcgaaaaatctactccccaattaaaaagctcaagaacttgcaacacattgtgaagagtgagctggaaagctactatgttcctcgccaatgtgtccatggattcgtgagtggtaagaacattatttcaaatgcccagccccacgttagaaaggagtatgtactgaatattgatctcgaggatttcttcgggtctataaatttcggccgtgtgcgcaaactcttccagtcatcccccctcagccttcccccgtctgttgcctcagtgctggcccatatctgctgttaccgcggagcactgccacaaggtgctcccacctcgccaattgtatcgaacatgattgcttttagactggacaggcagctacgggagttagcatataagaattcctgcagctacaccaggtacgccgatgacatctcctttagttttactaaccgcaagaaatctctccctaaagcgatcgcgttttttaacggagaggacgaactggtcttagggaaggatctgaaagacatcatcgaaaacaactggtttaaggtcaacgataaaaaaacacggatacagcacaggacccagaggcagtcagtgaccaacatcaccgtgaatgaaaaggtgaatgtcaacaggaagttcattcggcagacgtcttcaatgctgcatgctatcattaagtacggcgccgtgaaggcagagcaggagtattttgagaagtaccacaaaggctatatcgccaacaaacaccaggctaaaatgcgtgaagaaccgggcaaactgttcgttcagaaggtccgtggtcggctcaattacattggaagcgttagaggcaattcctgtgatgtctggaggaaattgatgtataagtacaccttggcaattgggagccctaacgaagcttacaacagaagttggtgggagatcgccgaagagagcacttacatactctacgaccttagtgaagtgggcaagggacaggggtccggctttctgcttgagggtattggcctgattactaatgagcatgtagtgacaggtgtagaacaaagcaatatcgtggattcccttgtgattgagtggctgcccaatcaaagcaaacagttcatcgacttaaatgtcgcctggaaagacgtggacaaagatctggcagtcatcacatctgattccatttttaatgacactgaacctctcaaggttgaacccaatccaaattattcacggggcaccgaggtatacgccataggatatccagcctacgagagtagaggtgataagtctgccacaacactaaaggcaaagatcactggggctacaaaacgggagggccaggacagaatcgtgatagacaagcctatcatacacggccactccggtggagccgtttttaatctggacgggcgcgtgatagggatcgtggccaacgggaacgctgagggcgctatcaaggctacgccatccgcgttcatccctatcagcaccctacttgatgagcacgatatccgaatgaaggcacagtctactcagacctga

SEQ ID NO: 7819 - RNA, 1692 nt, synthetic construct
  source 1..1692: mol_type = other RNA
atgttcggcgtccccaccaagttacacgaatgtcttaccgtaacagacctgtatcagttcttgggcgttgatgaggacaaaactgtgggtctgctttatggcgataatatccgttacaggtcttttcaaatcccaaagaagggcggtggggaaaggacaatttttgcacctgtgaagtctctcaagaacatccagaaaaaggtccaggcggaattggaaacgtattacaagccacggaaaagtgtgcacggcttcgtcgcaggacgatcagttctgactaatgcgaagccccacgtacgaaaggagttcgtcctgaacatcgacttaaacgactttttcggctcaatcaatttcggtcgagtgtctagattattccagagcccaccactcagtctgaatcagaatgtcgcttctgttctggcccagatttgctgttatgaaggcgtcctccctcagggagctccaacgtcccctgtgatctccaacatgatatcctttagactggatcggcaactgagaaaccttgcacatagacattcttgcacctacacaagatacgcagacgatatcagctttagcttcacaaataaaaagcgcagcctccccaaagagattgcattttttgatagcaatgacgagcttgcgctcgggcatggtctgacatcaatcatagagtccaactggtttgagatcaatgacaaaaaaaccaggattcagcatagaacccaacggcaaagtgtgacgaatgtaactgtcaacgagaaagtgaacgtgaaccgcaaattcatcaggcaaacatctagcatgctgaacgctttgctaaaatttggggccattgaggccgagcgggaatattttgagaagtaccatcgcggctacatcgctaatcggcaacacattaagattgccaagagccccggaaagatctttctccagaaagtgcggggacgtctgaactacattaggtccgtccgagggaagacctgttccgtgtggcgcaagctaatgtttgactataccgtggccattgggaagcccgacgaaacttacaaaaaatgcttctgggagattgcagccgagtccacttacatagtttatgacataacagccgaaggagacggacaggggagtgggttcttactcgagggggtgggcctggtaactaacgagcacgtgatcgaaggcgtgaccaatgagaatatagtagacgcactggttttgaggtggctgccgaatgaatctaaggaattcataggcctggaacttgcctggaagaataaggccaaagatcttgctgtcataacctcggatttcattttcaaagataacaatcctctcgagatcgagccggagccggattattcagagggagccaccgtgttcgctatcggataccccagcttcgagtcagaacatggaaacagagctacaatcctgaaagcaaagattaaacgccagatgactcgtgaaagtcagcccaggattctaattgatgagccaatcattcacggtcactcgggcggggttgtgctcaacgaacacggtagggtcgtgggggtggttgccaacggcaatgccaaaggagccttgcgcctggcccctgatgcgtttatccctatccaggtgctgatcgaagagcacgctaaccggcagtccgctaagaaggctgccgttttgcaggcagtgaactga

SEQ ID NO: 7820 - RNA, 1674 nt, synthetic construct
  source 1..1674: mol_type = other RNA
atgttcgtcacccctactggcctgcatgagtgcaaaactgtctcagatctctacagattcctcggttgtgatccagcgaccttcggcaattacatttacggaaatggcatcaagtacaaagagttcaccattcctaagaagaacggggattcacggaccatcctggccccagttaagaagttgaaattcctgcagcagaagattaaagctgagttagaatcctattacactccgagacagtgtacacatgggttcattccaaagcgatccatcatcagcaacgccaaatcccacgtccgaaaagaattcgtccttaacattgacctcgaggggtttttcagctctattaactttggtagggtgagtaagctcttccagagcccacccatgaacctgccacccaacgttgcaagcgtcttagctcacatctgctgttacaaaggctgcctgcctcaaggtgcccccacatctccagtgattagtaacatgatcgcttatcgtctggacaggcagcttcgcgaactcgcatataagaactcctgttcttacagccgctacgccgacgacattacgttcagcttcacaaataagaagaagagtttgcccaaatctattgtgttttttaacggggaagatgaattgactttgggaaacgacttgactaccgtgatagaggggaattggtttaaggttaatgagcagaagactcggatccaacataggacccagcgccagtccgtgacctccataacggttaatgagaaggtgaacgtgaacagaaaatacatcagacagacaagcgccatgctgaatgcactgcttaaatacggtgccgaagaagctgagagagagcactttgaaaagtatcacaagggatatatagccaataggcagtatagtaagataactgagaggccgggcctgctgttcacgcagaaggtgcgcggaaggctcaacttcatattaagcgtccgtggacagtcttgcgagacatggcgaaaactgatgtataagtacaccctagccatcggcgagcccaaagagcaatataataagtcttggtgggaaatcgcagctgagtccacatacgtgctatatgacatatcacaggatggcgacgggcaaggttcagggtttctgctcgagggcattggcctcatcacaaatgagcacgtaattgagggggttgaacagcaaaacatcatcgatacccttaacattgaatggctttcgaacccatctaaaacgtttctggccctggagcttgcgtggaaagataagcaaaaggacctggcagtaattaccagcagtctggcgtttaatgacgtcgaacctttgaaggtggagcctaatcctgacttttccgtcgggacagagattgtagccatcggctatcccgcatacgaggcgagaggcctgaacgaagccaccatcctcaaagctaaaatcacaggtacccagaaacgggagaatcagcctcgcatcgtgatcgacaagccgattgtgcatggccattcgggaggagtggtactaaataaagatggccgggtgatcggggttgtggcaaatggaaatgctgaaggatcagtccgggccactcccagtgcttttatccctattactgtgctgatcgatgaacacgaacaccagaaaataaagaaaacagagccctga

SEQ ID NO: 7821 - RNA, 1698 nt, synthetic construct
  source 1..1698: mol_type = other RNA
atgattaaacccccacccatcttttttagctgggatattctgaacatgttttgctccgttaccaagttgcacgaatgtaagaacgtcgagcaactgtattactttcttggatgtgaggctgcggagatatctaagttcctgtactcaggcgtgatcaaatacagatcctttagcattctgaagaagaatgggaatctccggaatattcgtgctcctgtgaaatacctgaaggagatacagtacaagatcaaagacgaacttgagaaatactacacgccaaaatcttgcgcccatgggttcattactgggaggaatatcatcactaatgcaaggcctcacgtgcgcaaagaatttattctgaacgtggatctgaagaacttttttgactcaatcaacttcggcagagtaagtagactcttccaaagtcagcccctgaacttgcctgagaatgttgcgcacgtgctggcccacatttgttgttacaataaagctttacctcagggtgcacccacctccccaatcatttccaacatgattagctacagacttgacagacagttgaaagaattagctaggaataatgcctgcacttatacccgttacgccgatgatatcacattcagctttactaagacaaagaagtatctaccgaagtctatcgtttctttaagcaaggataacaacattatcctcggacatgagtttaagaaagtcattgaggacaactggttcgagataaatgaagagaaaataaggctgcaacacaagacgcaacggcagagcgtgacaaatataaccgttaacacgaagatcaacattagtcgcaagttcaagaaacagactagtgctatggtcaacgcattattcaaatacggagccgctgaggccgagagagagtacttctcaaaatatcacaagggctatatcgccgagcggcagtataataaaatcaaggagaaacccggcctcctgttcacccaaaaggtgaggggccggctcaattatataaggttggtatgcggtaagaataatgaatcctggcgtaaactgatgtataagtacacacttgctattggccagcctaacgaggaatataatcgaactctttgggatatagcaggggactcgacttttatcctgtgggcaaattcatcacaggggtctggtttcttcctcgaaaacataggtctagtcacaaacgaacacgtaattaaaggcattgaggactccaatatcaacaacgacttgataatcctgtggctgcctaacgaacgaaaggagtacatcgaactgcatttggcctggaaagacgacaataccgaccttgcagtcataaccagcaacatcagttttctcgatatcaagccgctccaggtggaacccgttccaatctacgatatcgggaccgaggtttatgctgtgggatatccaaactatgatgcccgcgggtccattggcaaaccgaccatcatcacagcgaagatcacaagcatcatcacccgggaacgccagaaacggattgtcatcgaccagcccatcgtgcacggacattctggaggcgtggtgctaaacgccgatggacgagtcattgggattgtagccaacggtaatgcagagggcgaactccgcgtggtgccaaacgccttcattcctattgagacactgctgaatgaacataagtcgcgcaccaagctgtga

SEQ ID NO: 7822 - RNA, 1608 nt, synthetic construct
  source 1..1608: mol_type = other RNA
atgctgtcttatctgtacagcaaggatatcaagtatcgcaatttcgaaatagacaaaaagaacggcaagaagagaaaaatcgtcgctcctgtgaagaaattgaagttcctccagtacaaggttaaggctgccctcgagccatattacaaacccaagaaatgcaaccacggatttgttaaagaccgggacattgtcaccaatgcacaggcacatctgcgcaaagagttcgtgctcaatatcgatctggtggactacttcggaaacatcacattcggtagggttaaacgcctgttcgagtcaaatcccttaaacctgagtcactctgtggcaacagtcttggcacaaatctgctgccataacggctgtctccctcaaggcgccccatcttcccccatcgtgagcaatatggttacgtttaagttggacaatcaactccgagctttagcgattaagtcatcttgttcctatagcaggtatgcagatgacatcactttttcctttactaacagagaaaggagcctgccaaaaatgatcgccttttacaagaacgagaaactacagctggggagtagtctggaaaaggtgattgaagagaatggattcagtattaacgacgacaaaaccaggatgcagcatcggacccagagacagtcggtaaccaacataactgtgaacgagaagattaacgtgaatcgtagatttatacggtccacttctgcaatgatcaacgcccttattaaatatgggccagccgccgctgaaaaggagcacttcgaaaaatacctaaaggggtatatcccagcccgccaccatatgaaaatggctaaatatcccggaaagatgtttatccagaaagttagaggtcgactgaactttatacgaatggtgcgtggaaacacatgtgatgtttggcgtaagatgatgtacctttacaccgtcgctataggtgctcctaatgaagattacaatatgtcatggcttgaactggccgcggagtccacactcgtgattcacacctacactgattccaatatggcacaggggtcaggatttatagtggaggatattggcattattaccaacgagcacgtcgtcagaggcataacaagcaagaatatcaaggatggactggagatgcataggtggaataatgaaacagccaagttttcctttgtagaattgatcgggatggatgaggatatagatcttgccatcttcgaaccatccattcacttagccaccttcacaccgctgaagatcgagaacaatcctgactactcgaacggtaccatcgtgcatactatcggatatcctaactaccagagcggtgaggagcctacgtacatcacagccaagatcatcggcaaaaccaaaaggatgcttcaaccccggattaagattgacgaaaacatccggcacggcaattctgggggcgtggtaatgaataccgatggcaaggtgattggggtcgtctcaaatgggaacgccatcggcgctacgtctcagaatgacagcagtttcattccgattcagactctcctggaatatcacgagaaactgcggaacttggtagcgcgccccttccttgacgaggtggacagcctctga

SEQ ID NO: 7823 - RNA, 1698 nt, synthetic construct
  source 1..1698: mol_type = other RNA
atgcggcaaaaccctcccgccttccttcgcgaactgaggtatcttatggactctcagactgtgctacccccacgggctaaactggccaattgctcaactctggatcagctggcctctctgctgaatacagaggtagataaactgctaaagctgatatatccccataacaggcagtacattagtttttcaattcccaagaaagacgggtcccggaggttaataagcacgccaaaaccgacactgaaaaactaccagatgatcattgcaagcgagcttcaccatcattacatcccgagagcatccgctcatgcctttatcgagcaaaaatctgtgctcaccaatgcttcccctcatgtgaataaaaggtacgtcttgaatttggatctggaggacttcttcggaacaattacttttggccgcgtcaagcgtcttcttcagagccctccactgtctttaacccacaatgttgctactgtggttgcacacatttgttgctacaagggcagactgccacaaggagccccgtcttcaccaatcattagtaacatgatcgcattcaagctggacaatcagctgctgaagctcgccaagcagtaccgattcacttacacccggtatgcggatgatatcacgctcagtttcaaccagaagcggaagacaagcctgcctaccgatatagtgaagtttgatgaagactcgctggccctcggtcggttactgctgcgtacgatcgagtctaacggattttcagtcaatgacgacaaaaccaggctagccactaaaaacgaccgccaggccgttacaaatttgaccgtcaaccaatttgtaaatgtcaacagattgttccttcgacagacctctgctatgatcaatgctctcaatgtgtatggagcccaggatgcagaaatcgagtacctaaagaagtaccacaaaggctatctttcaccccgaaagcagttaaagcacaagaatgagcccggcaaattctttaagcagatggtgcgtggcagactcaactttatccgcatggtcaaggggaaggatagcctggtctggcgaaagctcatgtaccgctacacagtcgcgattggtgagccaaatgcgaggtatgcgttgtctcccgcagaactcgccaaaagatccctctttgtaattcacaacctgacagatgattccgagggggtggggaccggtttcaagctgaacacatttggcatggttactaaccaacacgtgattgcttatctcgacaattcgaacctggccgacttctgtgtgattgagtggattgaaaaaatggaccagcaatttcccagtgtacagctcatcttgagtgatgaaaagtccgatattgctatagtggaaggggcatccatgaatatcgtgcctgccttggacgctagcacatccccagattatacccctggcaccacgtgcacactgcttggattccctaactataaaaccgaagacagcccaaccgttatagaatgtagaatcgtgcgcgagatcgaggtcgataacgaacccagaatcgttgtggacgagaaagttacacacggaatgagcggtgggcctgtgatcgacagtgacggcttggtgatcggcattatttcaaacggtagcaaatacaattccactgacgacagggtgaacgcattcatacctatcaagaccttactgctcactaaaaactga

SEQ ID NO: 7824 - RNA, 1722 nt, synthetic construct
  source 1..1722: mol_type = other RNA
atgttcaccctggaggatcacatcaatccaaccagacttgagcactgttcagacctccatattcttagccgtctgttaggggtgaggagggattacctgcttaaactgctttattcggagaataggttgtactatcacttcgacatctcaaagaaaaatggtgataaacgcactattcacgctccgatcgagccactgaagaacctacaaaggaaaataaaggtggagctcgagaagtactatatcccccgaggttctactcacggattcgttaagaagcggaacattataaccaacgcaaccccacacttgcggaagcgccatgtctttaacattgatctcgcggacttcttcgggaccattacgttcggacgcgtgcagcgcgtgttgcaaagttctcccttcaacatgccttataacgttgctacagtggtggcccagatctgttgccatgaaggcgctctgccccaaggcgcacctactagcccaatagtatcaaacataatcgcgtttaagctggacaatcagctgcttaagctagcccagaagtacaggtgtacatacactaggtacgccgacgatatctctttttcgtttagacaacagcgtaacaagctgcctgaggccattgtttccttcaatggcgacaaagttataccgggggctaaactcactgacgtcatctccaagaacggcttcaaaattaattccagtaagacccgcttgcagtccaagcagaacagacaggccgtcactaatatcactgtcaatgagaaacttaacgtgaatcggcggtttctgaggagaaccagcagcatgctcaacgccgccttgcggtatggatttcctaaggcggaaagcgtacacttcgagcattttcactccgactacatccctccccgccacagcaaaaaaatgcatgaagaacccggcttactgttccggcaaaaattaagggggagactgaactttatccgcgaggtgagagggaaatcctgccccgtgtggcgtaagctgatgtacatgtatacagttgcaactgaagagccaaatgaggattacaatcttagcatagatgctatcacggcccgaagtacggtggtcatatgggacctcagtaattcatgcggcgaaacattcagtggctcaggtttcatgttgaaaggggctggtctagtgacgaaccagcatgttgtaaagggaattatcagcggcagagaggcaacagaactgcagatcgactggctcgaaaagaaatgcctgaattttctcgacgcccgaatcgtgattgcagatggatgtgccgacgtagccctgatcacaagttctatcgccgatcggcacatggagcccctcgatattgaaccctatccagattactccgtgggcagggctgtcaagctgattggataccctgattatcgggaaggcgacaccttttctgtaaccgataccgtgattgttcgagagtacgggcaggctgacagccgcagaatcgaagtcagagagcagattttccatgggatgtcaggaggagtggtcctgaatgaagacgggcgggtcatcggcatagtgtctaacggtattaaatatggcacaacatcccagctgccaagcagttttatccctatctcaacactgacagcaaaggtgaccaactttcgaaaggtgaaaattgagcagttactctccattttcgcatcctctatcaattctacctga

SEQ ID NO: 7825 - RNA, 1662 nt, synthetic construct
  source 1..1662: mol_type = other RNA
atgttcgatatcatcgaccccaagacactgaacgaatgcttcacagtagagctcctcgctaaattcttgaatactgactacccgaatctgagtaaactgatttatggcaagaagtcaccttaccgaactttttatatcccaaaaaagagcggggggactcgtgaaattaaggctccaatcaaaaccctgaagctcatccagcaaaagctgaaagtggaattcgaagattatagctcaccccgcgtggcttctcacggatttgtgaaaggcagatccatcctgacaaacgcaaaactgcatataaaccggaattatgtgctgaacgtggatctcgaaagcttcttcaacagtattaattttggccggatcaagaagttgtttgagtctacccccttcaagtttacttcccctgtggccaccgtgttagcccaaatctgctgtcatgagaattcccttccacagggggcacccacttctcctattctgagtaatatgatcgcgttcaagctggacggagagctgatgcgcctggctaagaagatcaacttcaggtatactagatatgtcgacgacctaactataagctgccagtccttagcccagcttgagaaacataagatcatttacaggtcgaaggaagcgaaatacgaggctggctttacgctatcacgactgattgaaaagaacggtttcaagatcaacaacgagaagactagattacagcagaggaccgagcatcagggcgtcacaggattgaccgtcaacgtgaagctgaatgtaagtagaacatttatacggcagacctcctcgatgattaatgcactcattattcacggagctgagaaaagcgaacacgagcacttcaccaaatacttcgatggctatgtacccaatcgccaacagcagagaattagcaagaagcctggtgatctttttataaaaaaggtgaaggggagggtaaactatattaaaatgatccggggagccgcatgcccagtttatcgcaaactggcctaccagcttacgtgtggcctcgggtgtcccaatgaagattataataaggattggctcgattggatctctgacagcgttttagtgctggacaataatctcgacatcctgcagggcacagccttttacgcagacggattgggtatcgtcaccaatcaacacaacctcgagtccatcaccgaagataacattgccgggaatattaccttggtggagccactcaactattcaaagaaataccagctgctaggcttgaacaagacatccgaaaaatacgacattgcgctgatcgacttcggagtgcacgccaaatcaaagagggctcttgagatcgcagattctccgctgtacaaaacagggacaacagtttacgctatagggtaccccaatcactctgagggcactaaacctacgatacttgaatgtaagatcgttaacaaaaccaagtggcagggtgagtgccgttacaaaatagaccaaaatatccaccatggatttagcggcggcccggtcatagacaccgatggcaaggttattggtatcgtgagcaacgggaacgccgtgggagcaagtaaatccaccgaggacatgtttattccagtcgaaacggtcatgaagtttgccaacgacgccaaacctgaggattgttga

SEQ ID NO: 7826 - RNA, 1647 nt, synthetic construct
  source 1..1647: mol_type = other RNA
atgtttggtattaccgagcccaagactcttaatgagtgctttaccgtggaatccctggccaagttcctgggcactgactattcaagtctggcaaagctcttgtactctaagagatccaactatcgaactttctacattcctaaaaagaccggcgggactagggaaattaaagcacccaccaaacgtctgcgcttcatccagcagaagctcaaggtgattttcgaagaatattccagtcctagggctgcgtcgcacggctttgtcaagaagcgcagcatagtgacaaacgcacagcaccatgtaggccgcgccttcgtgctgaacgtagacctggaggatttctttggctccatcaactttggccggatcaaacgactgttcgagagccagccctttaatctggcccaccccattgccacagtgttggctcagatttgctgtcatgagggttgtctcccacagggggcgcctacaagccctctcctgtctaacatgatagcctttaaacttgatggggctctgatgaagatggctaaaggcgtgaattttcggtacactagatatgtagacgatcttacaatttcatgccagtctctgacccaactcataaagcataagattgtgcagtgtgataaggacgggaagtattctgttggcttcatcctcaaccagttgatcgaacagaatggattcaagactaagagcgacaaaacaagattacaaaagcgaggagaacatcaaggtgttacagggctgactgttaacgagaaaattaatgtctcgaggaccttcatccggcagacctctagtatgattcacgccctgatcaagttcggagcagagaaggctgaaaaggagcactttaccaaatactttgatgggtacatcccaatcaggcagcaacagaggttgtcaaagttcccaggggatttattcattaagaaactgaaaggacgggtcaattacatcaaaatgataagagggagtgcttgcccggtgtaccgtaaactcgcgtaccagctcacgattgggctgggctgtccaaacgaagactataataaggactggctgaactggatcagtgagagcgtcctcgtcttggacaataaccttgatagcctgcaaggaacagcttttttcgctaaagacattggattcgtgacgaaccagcacaacttgaagagcatcaccaaggataactttagtggtaagatcaagttaactgagcccctgaattatagcaaaagctatccccttatctcctttctaaaatcatccgaggagctggatattgccctcatagactttaatatccatgagaaatccaagcggcccttagagatcgccgaatccttcgtgtgcagagcaggccagacggtttacgccatcggataccctaaccacgcagagggctcacctccgacaatccttgaatgtaaaataatcgaccgcgccaaatgggataaccaacttcgcattaaaattgaccagaatatccatcacggcttctcaggaggagcagtgatagacacggatggtaaactggtgggtatagtttctaatggcaatgccgtcggggccccacactctaccgataatatgttcatcccaatcgaaacactactaacctttgcgtccgaggactga

SEQ ID NO: 7827 - RNA, 1638 nt, synthetic construct
  source 1..1638: mol_type = other RNA
atgctgttcgggaccacacccaaggatctcaagagttgcaacacagtagaaggtctggctcatctcctgggcacagactataattccttgggaaagctactctatgggaaaaagactttgtaccgcgcttttgacatagtaaagaagtccggaggcgtgcgtgaaattacaacgcccatcccatcgctgaaagtgcttcagcgcaaacttaaagatctgatcgaaccctttacaagccaccgagaggccgcgcacggattcatcagaaaacgaggggtgctgacgaacgctaccaggcacgtcggcaagaagcacgtgctaaatactgatctggaagacttttttgggactatcaactttgggcgcgtgaaacgactgttcgagtctagtcccttcgaattaagcagccaggtggcaactgtgctcgctcagatcgtctgctacaagaacagactgccacagggggcacccacctcaccaatcatctctaacatgatcgctttcaaactggatggtaacctcactagccttgctaggaaggccaaaagtacctacaccaggtacgcagacgatctgaccttctcctgtcattcatccatgctgttggagaaaaacggcataatcaaattcgacaaagataataaggccattgctggcaaggagctggtggccattataaaatcgaatggcttcgagatcaaccatcaaaagaccaggctgcagtcacgcggatctcatcaaggggtcacaggaataaccgttaatgagaagccaaatgtttctaggactttcattcggaaaacttccagcattctgtacgcaattaatcgctggggcgctgagcaggcagaagaggagcactttgccaagtaccgccgtggatattctccccctcgggcccaattgaggcggaagaagaagccgggcgacctcattctgaagatggttaagggacaggttaactacaacagaatgatccgtggtgagtcttgtccagtctatagaaagctagcgtaccagcttacaatcgcccttggttgtccgaacgaagacttgaataaagattggcggagctggattgctgagagtacattcattgtggacaatgtggaggatatttgccagggttcttgcgtgttaattaaggatatcggctttgtctccaaccaacacgtgctgaacagcatcaccaaatccaattttaccgccaacgtaacgatctgcgatccctatgactactcacggaaatatcctcttataagcctcctgaaaatgtccatagagaaggatatcgccttaatcgacgcaggggtacacgcgctcagcctgagaggcctcgaagtcgccgaatcacctaattacaagatcggcaccaaagtgatcgcgattggcttccctaatcacactgaaggtacgcctcctacaatactcgattgtaaaataatcggcagaactaagtggcatcatgaacctcggatcaaggttgacagtaatatccaccatgggttttcaggaggggccgtcgtggacttagacggcaaagtgattggaattgttgccaatggaaccgcagtcggtgctccgaaggccgcagacaacttgtttattccaattgagacagtggcccagtatgcctga

SEQ ID NO: 7828 - RNA, 1650 nt, synthetic construct
  source 1..1650: mol_type = other RNA
atgatagacttcttcccaaaaaagttgtctgactgtgctaatgtggagatgctggcctaccttttagatacaaactatgaagcacttgggtccttcctatattcaaaacgcaagttgtaccgttcgtttgagattccaaagaagagtgggggcatgcgcgaaattaccactcctatcaaacccctcaaagagatacagcggaaactgaaaccgctgatcgaaccgtatacctcccacagagaggcagcccatggcttcattgagggaaagagcatcgtgagcaacgcctcccgccatgttcgaaaaaattttgtgttcaacctggatctgctggattttttcggctcaataaatttcggcagagtgaagagactcttcgaatctgcccccttcaacctccctgcaaaggtcgctactgtagtagcacagattgtgtgcttcgataatcagcttccccagggggccccaacttccccattgatcagtaacctgatagcctttaagctggacggcaacctgaccgctctggccagaagggcgggtgtgaattatagtcgctacgctgacgacctgaccttttcatcaaacagcttaaatctgctgaagaatcacgggatcctgacgatagatgagagcgcccaagtaaaagtgggaaaggaccttaaaaacatcatcaaggcaaacgggttcgatatcaatgtgaacaaaacccgtttgcaaggcagaggtcagcatcagggggtcaccggaatcactgtcaatcggaaggtcaacgtcactaggtctttcgtaaggaaaacagccagcatcctgtacagtatctgcaagtggggttctgctaacgctgaacgggagcacctgaagaagtatcgcacaaagtcgttgtctccccgggcccggcaaaggacctttctaaacgagggcgacttaatcctgaagattgtcaaaggaagggtcaattatattaggatggtcaaaggagaagcaagtccggtctaccgacgactagcttacagattgacagtggcgcttggctgtcctaatgaggattataataaggactgggaaaccttgctggccgaatccgtgtacgttctccataactattacgactccacccagggttcctgtgtgctgatcgagaatctcggctttgtgactaacaagcacgtgctcaagtgcgtgacgacttcaaattttgaggggcatgttgttattacggggccatttgattacgccaaggacctccctctcataagctttctcggggcgagcgacaccaatgacgttgccctaatctgcccctccgtgcaccaacactctcagcccagcctcaaaattgctagtagccctgattaccgtaaaggcacaaaggtggtggcgatcggattcccaaatcacacagagggcacacctcccgaaatcctgtactgtaccatccagggaaagacaaagtttcagaaaaacgatcggtatctgctctcatgcaacattcaccatggcttctctgggggtgcagtgcttaatcttgatggagacgtcatcggcattgttagcaacggaaacgaagtgggtgcccgcaaatccgttggaaacatgtttattcctattcaggatgtagctgaggcattatctcacatttccaaatga

SEQ ID NO: 7829 - RNA, 1806 nt, synthetic construct
  source 1..1806: mol_type = other RNA
atggctgccttcgaatttaatttccccacaactatttgtgtcgggcatttttctaccgctgttttacactcgaagtttgcagataagttcgtagcgcagctggcgatcgaaaagacttggccgccactctttcacatacggattttcatgcctagcttcagtttaaaagagtgcaatgatgtgtggaagctctgcgatctcctgggtgtaaatttcgagaacctgagcaaaaaggtgtatccttctaacaatagactttatcggtgcttctttatcccaaagaagagcggcggccttagagagatttattgccctattaagtctctgaaaaacctccagaaaaagatcaagatcgagctggagaaggaaatcaaatatcgttctccagcccatggcttcataaagggtaagtctattatcacgaatgccgagcaacatatcggaaaaaccatagtcttaaacctggatctcgaagatttcttcaagaacattcacttcggccgcatcaaaaaactctttgaaagttccccactaaatctaaaacactccgtgtccacttttctggcccacatttgctgccgtgggggggtgttgatagccggttcaccaacatcacccatcatctccaatatgatctgttacaaacttgatggacagctgcagagactcgcaaaaaagaatcactgtacttacaccaggtatgccgacgacataacattctcatttacatgttcagagcgaaaactgccccgaggtatagtgcatattgacgagagcagccttctggggtttaagctgggagacgagttatccgaaatcatcagttccaataacttcacccttaacgagagcaaaatcaggttgtctaggaagagccagaggcaggaggttaccggacttatcgttaattctaaagtgaacgtcaagagggactttatccgcagaacaagctccatgatccatgctctcaagattcatggtgccgaagacgctgagaaggaacactacctgaagtacaagaaaacatacatccccgagagacaaaataaacggcagaaagacaagccgggggacttgtacaccaaagtgatcaaaggaaggctcaactacctgcgcatggtccgaggcgaagactgtaacctatggcggaaactgatgtacgatttcacagttgccatgaaaaacccagacgagtcatataagcgcacttggctggatgacgcagcagaatccaccgtgatatttaatacctatgacggctgtggaagtgggttcttgattaaccacgacatcaagaagtatccaaacggccttattataacaaattaccatgttatccccgagattaacagtgataacatctccaacattgaagtgcacacctggatgaatccttcaaagggctttttgctcctgaaatttgtggcatctagcaaggacctggatattgctatactgaccgccgatatcccgtttcctgtgtcgaaatttctggtcgtcaacagttgccccaattacagacctggcataaaaattcacacgattggctatcccgattactccagtggtgaggaccctactttcatctcaaccaagattaagggaaaaacgacttatcatggccagttgcggtaccaaatcatcgatgaaattaaacacgggaacagcggggggcccgtctttgatagcgaccgcaaggtaatcggaattgtgtctaatggaaacgagaagggcgctcctaagaataataagagctccttcatccccattgaaactttgctggacttcattaactgccagaagtga

SEQ ID NO: 7830 - RNA, 1647 nt, synthetic construct
  source 1..1647: mol_type = other RNA
atgcaagtgcccctacccaacaaccttaaggactgttcttgtgttgaaggacttgcccagtatttaggctttactaactacgatgacctgaaaacactgatctacccctccgtcgatcacctctataaaggattctcaatcccaaagaagaacggcgagttccggctgattgatgcgcccaagaaggagttgaagaaaatacaaagattcctcgcaaatgaattggcccaagtgtacaccccgcgcaacgctacccatggattcgttaaagaaaggagtatcgtaacaaatgcctccaaacatgtcgacaagaaatacgtgctgaacctcgacctagaggacttctttggttccatccacttcggccgagtgcgcaatctttttcagagccacccattgaaccttcaccacagcgtggctactgtgctgagccacctctgctgtcacaacggcaagctgccacagggcgcccctacttcccctataatttctaatatgattgcctatcgcctcgataagcagctccagacgttagcgtctaaaaatcgatgtacttacaccaggtacgctgacgatataacctttagcttcactcagaccagagggcggttgcctaaacccatcgcagtcctgaccagggatttacaactcagcctcggaaacgagttgaaggagcttatcacggaaaatggcttcgtcatcaattcagacaaaacaaggatcgcagcccgaagcaatcgtcaggaagtgacaggggtgatcgttaatgagaggatgaacgtgagtcgcaaatatataaagcaaactcgctccatgctgtacgcttggaagaaatttggcctggaggacactgaggaaacgtatctgcgccagttccatggcaagaccgtttttgagaagcaccagagaaggatcgacgaaaagaagggtcagtttttcaagaaaatcgtgaaagggagaattaatttcatcaagatggtgcgtggtgcagatgacttaatttacagaaaggtggcctatgagttctcggtgctcatcggaaagcctaaacccgagctggtgcagacacctctggacaaagcctgcgattctatttttgtggtcgagaatctgctagatgactctcagggcacagctttcctcctaaaagggattggaatcgtcacaaatgagcacgttgttagaggaattgatgaagatctctcagaactgctggagttgtttagacatcacgaacaagaaaccaagcggccagtcaagttccagaaatcttgccggagccgtgacctggccattctgaagccaactacctcatttaacgggataaaaaggctgcaggtcggtgacgattcccagatcggcataggaagtgtggtaaccgtattgggctttccccagtactcaccaggggagacgccttatatcaacacagggaaaattattcagtcgaaggtcctttttggcgaacgggtgtggctgctggatattcctgtcattcatggtaacagtggggggccagtgttgaacgaccggcaggaggtaataggcgtagcagcgatcggttcccccacccatgacctgagtacaaagcttcatggattcatcccgattagcaccctgctggcttacgttgaagagtgcaattga

SEQ ID NO: 7831 - RNA, 1716 nt, synthetic construct
  source 1..1716: mol_type = other RNA
atggtagatattgccaaaatcgcagccatcgccgcctcatcctcatttacttcggtgcccgtaccagtgcagctgaaggattgtacttgcgtggaaggcttagctaagtacctgggcttcaaagattatgacgaactgaagggcattgtatatccctccacttcacaccattataagtctttccgaattcccaagaagaatggcgactttagaaccatcgaggcccctaggaaacaactcaaaaagctgcttaagcgtatctccacctctctggaagaggtttatagcccacggaacgctacccatggatttgtgaagggacgcagtattgtcactaatgcgagcaagcacgcagacaagaaatacgtcctcaatttagatctgaacgacttctttggtaccattcatttcggacgtctgaggaatctcttccaatcccacccacttaatctaagtcattctgtggccacagtgctgtcgcacatctgttgccacaacggtaagcttcctcagggtagcccggcgagtccgattatatcaaatatgattgcttaccgccttgataaacagcttcagacgctagctagcaaaaatcgctctacttttacaaggtacgcggacgatcttacattcagttttacccaaacaagaggaaggctgcccaagcagatcgtttctttgtccagagatctccagctgaaactggggcacgagttaaccgacatagtgaatgaaaatgggtttagcattaacagcagcaaaaccagaatatccgcaagatctcatcgccaggacgtgacggggatcatagtcaacgagcggatgaacgtcacaaggaaatacatcaagcagaccaaatcaatgatatacgcatggaagaagttcggaatcgagaatgctgaagatgagtacttgaagaactatcacgggaaaaagatcttcgaaaaacaccagaggagaatcaacgagaaaaagggacagttcttccggaaaatcgtgaagggcagggtcaatttcattaaaatggtacgcggatcagatgacctaatctaccggaagctggcctatgacttttccgctctcattggaaagccaaaacccgacctgatacgaactcctttggacaaggcctgtgactctattttcatcattgagaacatgctggaccagagccagggcaccggctttctgttgaagggaatcgggatcgtcactaacgagcatgtggtgagtgacattgacgaagatctcagcgacctcttggagctctttcgacaccatgaacaggatatcaaaagacctgtgaagttccagaagtcttgcaaatcccgcgatttggccatactgaaacctaccacttcctataatgggatcaagcggctcccagtgggtgatgatagccagctgggcgtcggttccaaagtcaccgtgctgggctttcctcaatactctcccggcgagacgccatatatcaacacaggcaagattatacagtcaaaactgttgtacaacgagaagatttggctgctggatatcccagtgatccacggcaacagcgggggtcctgttttaaatgagcggcaagaagttgttggggttgctgcaattgggagccccaaacacgacaatagtacaaagcttcatggctttattcccatcagtacactcatcaattacgcccaagaaaacaacaagtccaacaacaataacaactga

SEQ ID NO: 7832 - RNA, 1680 nt, synthetic construct
  source 1..1680: mol_type = other RNA
atgaccagcgcaatatccattttttctcttatctcccctatcaccacacccacgacactgaatcagtgcgtttgtgtcgaacggctggccagattcctcggtttcgctagttacagcgagcttcaaaatctcttctacccgtcaacttcgatccattaccgggggtttcatatccccaaaaaaaacggggaatacagactaatagaggcacctaagaagaaactgaaagagatacagaagctgatttctaaggaactctctgcgctgtatagcccaaggaaaagcacgcatggctttgtaccagagagaagtattgtatccaacgcttcttgtcacgtcgataagaagtatgtgctgaacctggacctcttagatttctttgggagcatacacttcggtagagtgcgcaatctctttcaatcccacccggtcaatcttccacttcctgtggccacagtgctggcgcacttatgttgccacaacggcaagcttccccagggtgcccctacaagcccaatcattagtaacatgattgcttatcgccttgacaagcaattacagactcttgccgcaaataatcgctgcagttacacacggtatgcagatgacatcactttctctttcacccaaacgcggggccgtttacccaaccagatagtgaccgtgactagggagctgcagctctatctgggtacagagctcaagaacgtgatttctgaaaatggtttcaccatcaactcccagaagacgagaatcgccagcaggtcccagaaacaagctgtgacaggaattatcgttaacgagcgcatgaacgtgagtcgaaaatttatccggcagacccgctccatgctgtatgcctggaaaaggttcgggctggaacaggctgaatctgaatacctgcagtcgtaccacgggaaaaccgtattcgaaaagcaccagcgccgtattaacgagaaggccggccagttttttagaaaaatcgtgaagggacgtatcaacttcataaagatggtcaggggcgccgacgatctgatttatcgaaagatcgcatatgattactccgtacggattggaaaaccaaaacatgacctcattaagacaccactggataaggcctgtgagagtatcttcatcattgagtcagagttggactacgcgcaggggactgcttttctcctcaaagacattggactgatcaccaacgagcatgttgttgacggaatcgatgaggagctgtcagagctattgaacgtgtacaggtatttcgaacaagataagaagcgactcgtgaattttgaaaagtcctgcaaatctagggatttagccatcttgaagcctaccactgactttaatggcattaagagactgaaggtcggagacgatagtatgctgaatattggctcaaaagtgaccgtcctaggctttccccagtacagccccggggagactccttacattaacaccgggaagataatacagtcaaagatgttgtatggagaaaaattgtggctgctagacatcccagttatccacggcaattcagggggccccgtgctgaatgacaaatatgaggtcattggaatcgcagctatcggcagccccaaacatgataattcaactaaattgcacggcttcatccctatttccacattgctggcctacgctaaagaaaagagctga

SEQ ID NO: 7833 - RNA, 1668 nt, synthetic construct
  source 1..1668: mol_type = other RNA
atgcttaatttttccacgagcttgatcatcaagactcctacatgtctcaaagagtgcaagtgtgtggagggattagccagatttctaggcttcacatcatactctcagctcgatgaactcgtgtacccgtccatcaaccacttgtactatagcttcaagatacccaaaaagaatggtcataagaggattatcaaggcccctcgtaaatctctcaagtcaatccaagaactgattaacatcgaactgggtaactacttcagccctcgcaacagtacgcatggattcatcaagaaccggtcaattgtgagtaatgctgccaaacacgtggacaagaagtacgtgctgaatctcgatctagaaaatttcttcgattcgatccactttggcagagttagaaatctgttctgttcatatccactggtcctgtctaaaccagtcgcaacggtcttgtcccacctttgctgttaccagggaaagcttcctcagggggcccccacatctccaattatatcgaatatgattgcctataggcttgataaggagattcaatatctcgcgtccaacaatcgatgtacatacacccgttacgccgatgacctgacgtttagctttacccagaagcggcggaaactgccccggagtatagtgaaggtttcaagtgacctggacattaccataggccacgaccttaaggagatcatttccaaaaatggctttacaatcaacgattctaagaccaggatcagctctaaatgccaaaggcaggaagtgactggcattacagtcaacgagcgcatgaatgttccgcgcagctttatcaaacaaacacggagtatgttgtatgcttggaaaacttttggactcgagaacgcagagttccactacctggataagtaccataaaaagaccctgttcgaaaagcacaagcgcaaaattgacaaaaaggagggcgtgtttttccagaagattgtaaaggggcgaataaacttcattaaaatggtaaggggaagcgaagacatcatctatagaaagatagcgtacgattattccgtgctgactggtaaaccaaattccgatctgatcaagactcccctggataaagtctgcgactccattttcatcatcgagaatatgttagacaccgcccaagggaccgcttttctgctgaaagacatcggtatgataactaacgagcacgtggtagacggcattgatgaggacaaccctgaactactcgagttctttcgacattttgaacagaccaacaaaaaaaacgtgacctttaagaaatcctgcaaaagcagggatttggcaatcctgaagccaacaaaggatttcaatggcatcaaacgcttagacgtcggggacgattcatcacttgatatagggagcgaggtcaccgttctgggattcccgcagtattctcccgacgaaacaccctatattaacactggcaagattatccagtctaaaatcctctacgaccagaagatttggctgttagacattccaatcatacatggtaatagtgggggccccgtgctggataaagaccagaaggttattgggatcgctagtagaggaagcgcaaaacatgaccagagcaccaagttgcacgggtttatccctatttccactctccttaagtacttcaaagagaagtattga

SEQ ID NO: 7834 - RNA, 1698 nt, synthetic construct
  source 1..1698: mol_type = other RNA
atgacccttcccaacactatactgctctccctgaagaccgcaaagttacagctgaatccaacaaagcccacttgtattacgggttgtcattctaccgatagcctggccttgttcctgggttttcagaattacaacgagctacaaaagttgatctatccatccgtgaaaaatctctacagggcgttttacattgataagaagaatggggataagagactgatttccgctccaaagaagaaactgaagtccatccagcggattatttcgcaaagtctctcaaatgtctactctcccagaaaaagcgcccacggctttatccaggggaagagcatactgacaaacgcctccatgcatgttgacaagaaatttgtcctgaatatcgacctgctgggcttcttcgattgcctccacttcggccgcgtgagaaacctgtttcagagttatcctcttaatcttaccccctccgtggcgactgttttagctcacatctgttgcctgaatgggaaacttccacagggcgctccaacctctcccataatcagcaacatgattgcatacaaactggacaaggacttgcatcaactggcacttgcaaatcggtccacatatacacgatacgtggacgacattactttcagttttacacaatctcgacgccgtttgccacgcgacatcgtgacagtactgaagggcaacaatttgaaattaggggagaagataacttctatcatcgaaaagaacggatttaagatcaataccgataaaactcgctgtttctctcaaaactttaggcaggtggtaacgggccttgttgtgaatgaaagagctaatgtgagtaggaactttatccgtcagactagatccatgatctacgcttggaagaagttcggcttagtaaatgccgccctggagtatctctcaaaatatcacgacaagtcaattctggagaaacacgaattcttcatcaagaagaacaaggacaagggtgtttttttcagcaagatagtgctcgggaggatctactttataggcatggtacgggggaaaagtgaccgattgttcagggaaattctttactcgtacactgagtgcattggaaaacctaaccgggccctgattaacacccccctcgataagatcggtgaaagcattttcatcattgataacctcctcgacgatagtcagggcaccggtttcttgctggatggcgttggactgatcaccaaccagcatgtcgtggatgggatagagaaagagaacagcgagctcctcgaaatttatcgctattacgagcaggacaaaaagcggaaatccaatttcgaaaaagcctgccgtgccagagatctagccatcttgaaacctacaacagaatttaatgggatcaagaggttaaaagtcggagacgatagcatcctaaaaataggatcaaaagtgacggtgatgggtttcccgcagtattcacctggagagacaccgtacatcaactccggcaagattgtgcagagcaaaaaactgttcgagaataatgtctggcttgtggatattcccgtcattcacggaaacagcggcggacctgttctgaacgacaaactcgaagtgattggaatcgcttcaatagggtctgcacggcacgaccagtcaaccaagctacatggctttatccctatttctaccctgatcaactatgtcaacgagtga

SEQ ID NO: 7835 - RNA, 1701 nt, synthetic construct
  source 1..1701: mol_type = other RNA
atgatatatataaactacttcgtctcacagctgtccactcagcttccaaaaattacgttgcgaccttgggtccgaagtctgaagcactgtacatcagtggacgacttggcgcactttctcggatttaattcatacggcgaactcaactccctggtgtacccacataccaagaacctctacaaatctttctccataagcaaaaagtctggaggggagagaaatattaaggcaccaaagtccaagttaaaatctatccagaggtggattggccaggacctggagaattattataggcccagatccgctagtcacgggttcattaatggaaagagcatcatcaccaatgccaaaggccatgtggataaacgctttgtgctaaacattgatttggaggacttttttaccactatccactttgggcgggtaaagtcgttgtttcaggctcatcccctgaaccttagccactcagtggcaaccgtgcttgcccacatctgctgcaatgagggcgtgcttccccaaggagcccctacttctccaatcatatctaacatgatcgcctataagttagacaaggagctgacaaacctggccataaaaaatcggtgtacctatacgcgctatgtagacgatatcacattcagcttcactcagaaactgggtcggctgcctagaagtatcatcaaggttacgaagcagaacaaacaaatcttggggaacgatctcctgggcgtcatttccaccaacggctttcggatcaacagtaagaaaacaaggttgctctcccgggatcaaaggcaggaggtgaccggtcttactgtcaacgataaacttaacattcccaggaccttcattagagaaacgagatctatgctatacgcttggaaaaagcacggcctcattgaagcggaggaagagtacattaagaagtaccacaagaagaccttaacatataatcagcagcggatgctcaaacataacaaaggtaacttctttcgtaagatcgtccatggaaaagtcaattacataaagatggtacgcggagaagatgatcctatttaccgtaaaatagcttatcagtacctcagtcgaatcggtaagcccgataaagacctgcttaaaactccacacgacctgatagcagactcaacctttataattgagtgctacctggatcaagggcaaggcacaggattcctgctggaaaatatcgggctcgttacaaatgagcacgtaattgaaggaatcgatgccagcgacgccgacctgctggagatttaccgttactatgagatggacaataagcgcaaggtgagcttcggtaaatcggataagtcactagacttagggatcttgaagccgaccactgatttcaacggaattaagagactgaaaattggcgatgatagcaccctatccgtgggccaaaaagtgacagttatcgggttccctcagtattcccccaatgacaccccttatatcaataccggcaagatcatccagagtaaagtcctgtttggccagcagatctggctgctggacattcccgtgatccacggtaactctggcgggccagttgtgaatgaaaataacgaagttattggcgtggcaacaaggggggctgaaaagcatgaccagagcacaaagttccatggattcatcccgattagccgcctcgttgagtaccatactacagacacttga

SEQ ID NO: 7836 - RNA, 1656 nt, synthetic construct
  source 1..1656: mol_type = other RNA
atgtttgatccatttaaggtcgctcctcctaaattaaaactgcatcagtgtgtcgatgtgcacgaactgagtgctatcctgggaactaattacaaccagctgtcaaagctgatctatcctaccactcagaattcttactactgcttcagcattgacaaaatgaacggaaataaacgcgtcataaatgcaccgaaaaataaactgaagtccatacagcgaaggctcgcatacctgctcaacgagtattatcccgtgagagacgtagcacacggatttatcaagaacaagtcaatcgtcagtaacgccgaacagcacgtgctaaaaaactgcgtattcaacattgacttagagaacttctttggacaaatccattttggacgtattcggaacctgttgttctctcccccttttaacttctcgacctccgtttcgacagttatctctcacatctgttgttctgacgggttcctaccacagggcgcgcccactagcccaattatttctaaccttatctgctacaagctggataacgagctgcgcaggctagctgtgtatcataaatgtacgtatacaaggtacgtggatgatatcacattttcatttacgtgcaaggcaaaccggatccccagtcagatcgtggtgtcctccggtaataccgtgactcccggcaatgagatcaatgcaatcattacacgcaatggattctccatcaatgacaagaagactcgcctccaacaaaagaatgagcgtcaaatcgttacaggtatcgtggtgaataaaagaaccaatgtgcagaggtcttttgttaggaaaaccaacagcatgctctatgcctgggagaagtttggggccattctggccgaaaaggactactttgacaagtacaacagcaagatcaagacaattaagttgaaggacttcatagataaccccggtgagttattcaaatccattgtgaagggcagaatcaactacattaaaatggtgcgaggcaaagacgatgtaatataccgcaagtttgctcaccggatctcatgcttgttcggtaaatttgacaacagataccttaagactccgtacgacttcgccattgagagcacgttcgtcctcgaaaatcggtgcgacgacagccaggggaccgcctttttgctcgaaaggattggccttgttacaaatcatcacgtcgtcgaggacatctgtgacattaccgatgagtttatagaccttttcctgtggaacgaaattgggaacatccggaaaacaaagttcattatgtccaataagctgttcgatatagcggtcttcgagagaactagcgatttcgacaatattaccccactcaaaattggcgatgattcaggcatcaaaaacggtaccgtaataactgtgattggatttccccagtatagtcctggggagtccgcttatgtgaataccggtaaagtgatccagagtaagaccatgtatgggaataagttttggctgatagacatcccggtgatacatggcaactccgggggaccagttctgaacgataagttcgaagtcatcggcattgccagcatcgggacggccaagaatgatagcagttcaaaacttcacggcttcataccaatttctacattgctccgatataccggcgaagataaaccttga

SEQ ID NO: 7837 - RNA, 1650 nt, synthetic construct
  source 1..1650: mol_type = other RNA
atgtttaacccctctaacatcttacctccaaaaatcaaactcaacaagtgcggggacgtgcacattttagcggctctatttaacctgacctatgaggagctgtcaaagttgatttacccgactcccaatagaagctactatcaattcgccattgacaaaaaaaacggctcaaagcgcgttatatcagcccctaagaaaaagctgaagatcgttcagaagaagatcgcagatgaactacttaccctctaccctattagggacgttagtcatggtttcatcaaaggtaaaagtattgtgagcaacgcagagaaacacgtgctgaaatcctgcgtgctgaatattgacttggaagatttcttcggatcaattcattttggaagagtcagaaacctcctcacatccccttcctttaacataccattgcccgtggccaccgtgatttccaacatatgctgttataatgggtccatcccccaaggcgcaccaactagtccgataatcagcaacctgatatgttacaagttggacaacgaacttcgccaactcgcgggcaaatacaattgcacttatacccggtacgtagacgatataaccttcagctttacttacaaagctaaacggataccccatcagctggtaacgagtgatgctaacatcattaatattggcgtcgagctggaggaaatcatcacgaggaacggattttctataaacaagaataagacccgtctgcaatctaagaacgagcgccagactgtgaccggtattgtcgtcaataagaaaaccaatctgcagaggaaattcatccggcagacatcaagcatgttatacgcctgggagaaacacggcgtcgtcgcagccgagaatgaacatttcgtgaagtacaatgagaaaaagaagctcatcaaacttcgggatttcgtagacaagccaggagaattgttcaaaagaattgtcaagggaaggattaattacatcaagatggttcgaggcgaagatgatataatctatcgcaaattcgcccaccggatctcatgtctgtttgggaacgtcaataataggtatctgaagacaccttcggactttgccatcgatagtatcttcatacttgagaacgaagtggatatctctcagggcaccgccttcctgctagaagacgtgggcattgtgacaaattatcacgtagtgccaagcatcgatgagtacaatgacatcgacctgagcctctttagatacaatgagctcgacaacaaacgtaaggtgaagtttattatgagcaacaagctgtacgacttggcaatttttgacacaaatgggaacttcgatgatatcaaaaagttcagcataggcgatgactcgaacctgaaagttggatctgagatctccgttatcggatttccgcagtataccacgggggaatatccatatatcaatacaggcaagattgtgcagtctaaggctcttttcaacaataagatttggctggtggatatccccattattcacggaaacagcggtggtcctgtcttcaatgagaagtttgagatcatcggggtggcttccaacgggactgaacgaaatgaccagtcttccaagcttcatgggtttattcccatctccacactcattaaattcatctctagtaagtga

SEQ ID NO: 7838 - RNA, 1797 nt, synthetic construct
  source 1..1797: mol_type = other RNA
atggatattgacgagattttcaaggatctgtttggaccagggtttaagtctttagacggtttttgccagctcctgaaagttgatcaggacaagctgctgaatttcctttacaaacggaaaggtagccactatgtcagcttttctatcttgaagaagaacaagacccacagaacaatcaaagccccaaaacgggtgatgaagaaaatccagcatgccctactacctcatctggagaagtattacagccctaagccgtcatcccacggattcgtgaaagggcgaaacgtaaagactaatgcccagattcatagtaggaaacgttacgtgttcaatatcgacctgaaggacttctttgagagcattcattttgggcgcgttcgcaatctgtttatggcccaccctttctctgctcctcataatgtagcaactgtgatggcacagatatgttgctccgatgggaaacttgctcagggggcaccaaccagcccactcatctcgaatatgatctgtcggaaactggattcccagctgcaggccctggccaagtccggaaaatgtcactttacccggtatgccgacgatataaccttctcattcacctctacagccaagtacctccccaaagacattgtggaagtctctgaagacggaagggcaattcctggccgtgagctagaagagatcatcaaatccaatggtttcatcatcaatagtgaaaagaccagactgcagcataggacgcaaagacagatggtgactggcctcgtggtgaacgagatgcccaatgtgaccagggagtttattcgcctcacaagtagcatgattaacgcgttaaaaagatatgggcctgaactggctgaggcaaaatacctcgaaattctgaagggagaaaaccaacgcctgcagcctcgacagatcctgaggacaaaggactcagcaggcgatttttttataaaagtcgtgaaaggccgtctcaattatattcaaatggttagaggacgaggggataatatctataggagactcgcatacgagttcactgtggctataggcaaggaaaaccccgagttcaagaagagtccagaggaaattcttggtaactccatattcgttgtcaacaacatcatagaggagtgccaaggcactgctttcctgctggagggtgttggcatcgtcacgaatgaacatgtggtcaccggtgtcagcaagaccatcgctcgccactcaatctcattctcacgggcgggggatacacgggaatactccgctgagctgattctctcagacaagaaagctgacctagcgattttccaccccaacgaagaatttcgcaacatccccgctctgcggaagagtgacaagactatagtacgacccacagatccggtgctgagcatcggattccccaaacaccgagacgggacaacgcattacatcgccaagggccacaccacacaaaggagacggcaggtagacttggatctttggttagtggattttactttgatggagggcaattccggaggcccaatatttaacgactctatggaggtgatcggtgttaccgccaggggagccaagaacaatattgatgccgccctgtatggctttattccattggatagccttaactcttttacttcccgcgccgacttccttctgttgaaaaggttgtacgactatctcggcaacggctcgttgtctcttttacccggaatcctcggcaaagggattttcagcagtgcttaccagacaaaactgcacaaggagagattacagaaggcaaaggcggcctga

SEQ ID NO: 7839 - RNA, 1797 nt, synthetic construct
  source 1..1797: mol_type = other RNA
atggacattgatagcatctttaaggatctgttcggtcccggctttcaatctctggatgggttctgtcggctgcttgaagttgatcagaacaaattgctgaactttctgtacaaccgcaaggggagccactatgtgtccttctcaattctcaagaagaacaaaacgcatcggtccatcaaggccccaaagcgcgtaatgaaaaaaattcagcacgcactccttccccaccttgagaagttctacagtcctaagagctcaagtcatgggtttgtgaaaggcaggaatgtaaaaactaacgcacagattcactctagaaaaaggtacgtctttaacattgacctgaaggacttcttcgaatccatccactttggccgggtcaggaacctgttcatggcacaccctttcaacgcgcctcataacgtcgccactgtaatcgcccagatctgttgctcgtacggaaaactggctcaaggagcccccacttccccgttgatatctaatatgatctgccgaaagttagacagtcaactacaggcactggcgaagacctctaaatgccatttcaccaggtatgctgatgatattaccttttcctttactagcaccgagaaacaccttccaaaagacatcgttgaagtcagcgaggatggacgggccatcccaggaagagagctggaggaaattatccgagccgctggtttcgccatcaattcagagaagacacgcctccaacacaggacgcagaggcagatggtgacagggctggtggtgaatgagatgcctaacgtcactcgtgagttcatcagactcacatctagtatgataaatgctctgaagagctatggtccggagttagcagaggcgaaatacttggaaatcctgaaggcaaagaatcacacccttcaacccaggcagctactgagaacgaacgacgggaatggagatttttttattaaggtggtgaagggccgtctcaattatattcagatgattagaggacggggcgacaagatataccgccgcctggcttacgaattcaccgtggccctcggcaaagaaaatccagagttcaaaaagtccccagaggaaatcctggggaacagcatcttcgtggttaacaatattatctcagagtcgcagggtgccgctttcttgcttgaaggcgtcggcatcgttaccaacgagcatgtggtgtccggagtatcaaagaccatagcccggcattcaattagctttcaccgtgctggtgatacaaaggagtacagcgcagagttgattctctcagacaagaaagccgacctcgccgtgtttagacccaatgaggaatttagaaacattcccgttctgaagaaatctgacaagaccattgtgcgggctatggatgcggtcctatccatcggtttcccaaaatatcgcgatggcactgcccattacatagccagaggccataccacacagcggcgacgccaggtggatttggacctctggctggtggactttatgctgttagaagggaactccggggggcccatgttcaatgattccatggaagttattggcgtgacagcaaggggagctaagaataatatcgacgcagccctttacggctttatacctttagagagtttgaacagcttcacatctaggagtgactttatcctactcaaccgacttcacgactatatagggaatggaagcctgagtctgctgcctcagacactgggcaaaggagtcctgtctatcacctatcaggctatgctccgaaaacagcacctcttgccgttaactgaaaattga

SEQ ID NO: 7840 - RNA, 1797 nt, synthetic construct
  source 1..1797: mol_type = other RNA
atgaacatcgaggagatcttcaagaacctttttatcccaggattcagctcgctcgacaacctctgccgtcttcttaaggtcgaacaggataagctgctagcattcctgtataagaagaaatccagccactacgtgagcttcttcatccctaaaaagaacggcacccggcgcacaattaaggcccccaagagagtgatgaaaagactccagcgtgaattactggtgcacctcgagaagttctatagccctaaatcatcctctcacggattcgtcaaaggcagatcaatcaagacaaatgcccaggtccacgccggcaaaaggtacgtgttcaacatagacctcaaagacttttttgagaatgtgcactttgggcgagttcgcaaccttttcatggccgaaccattcaaggctccgcataatgtggccacggtaatggcgcagatctgttgcagcgaaggccgtttagcccagggagctcccacgtcaccattgatcagtaacatgatttgtagaaagctggatgcccagttgcaggccctcgcgaagtctggaaagtgccatttcacaagatacgcggacgatatttctttctcctttacttcaaccctgaggcacctccctaaagacatcgttgagatatctgaggaccggagggcaattcccggccgcatgctggaggaaattatcaaagccaatgggtttacgatcaactccgagaagacacggctgcaacatagatctcagcgccagatggtgactggcctggtggtcaacgaagttcccaatgtgactagggattttgtgagattgactagctccatgatcaatgcccttaaacgatacggggctgagctggctgaggctaagtacctggaaattctgaagggtgacagccagccactgcaggttagacaaaacgtaagggttcgggagaatgcaggagatttcttcattaaggtggtgaagggccgcttgaattatattcagatggtgagaggtcgatctgacagggtctaccggcgccttgcctatgattttaccgtggccattggccgagagaaccctgagttcaagaaaagcccagaggaaatcctggggaattcgatctttgttgtgaagaatataaccgatgactcccaaggaaccgctttcttgctggatggggtaggtatagtgactaatgagcatgtcgtgagtggagtctccaaaacaatggctccacacatgatctcctttcagagggtaggggagaacaaggagtacgctgctgaactgattctaagtgacaaaaaggctgacttagcaatttttcagccgaatggagaatttcgcaacatccctccactacgcaaagcaaatcgtactaccattaggcctatggagtcagttttgagtattggcttccccaaatatcgggatgggagcgcccattacatagcaagaggtcatacaacacaacggcggcgccaagtcgacctcgacctttggttggtggattttaccctgattgaagggaatagtgggggtcccttctttaacgattccatggaagtcatcggggtagcagccaggggcgcctctaacaacatcgagtctgccctgtatggttttatccccctggaatcactaaaccggtttatagcgaggaaagatttcgtcttcctcaagaaaatccacgagctgtccggcagtaaactcttaggccccctgaccatgcggagcggcaatggagtgttttcagaagtttatctcgcaggtaagtacggaggctgtcgactgaagcctgcaaaaatatga

SEQ ID NO: 7841 - RNA, 1791 nt, synthetic construct
  source 1..1791: mol_type = other RNA
atgaacatcgaggagatctttaagaatttattccgacctggcttttccgacttggacaatctttgcaggctactgaaagtcgatcagaaaaagctcttgtctttcctgtacaagaaaaacagttcacactacgtttcctttagcattccaaaaaggaacggaacccctagagccatagtcgctcccaaacgtgtgctcaaaagactgcagcgggagctgctggaacacctcgaaaaattttatacccctaaatcttcgactcatggttttgtcgagggacgtagcatcaaaacaaatgcacaaatacatagcggaaagaaatacgttttcaacatcgacctgaaagacttctttgggtcgattcacttcgggagggtgcgcaatcttttcatggctcaaccgtttaacgcacccagaaatgtggccaccgtaattgcacacatctgctgttccgatggtcggctggcacaagggtcccccacaagtcctctgatcagcaatatgatatgtagaaagctggacgcccagttgcaggctctcgctaagactggcaagtgccatttcaccagatacgctgacgacattacttttagttttaccacgcccctgaagtatctcccaaaggatattatcgaggtatccgaggataggagggctatccccggccgagagctggaagagattataaaggcaaacgggtttatgatcaatcctgaaaagaccaggcttcagcacagatcccagcggcagatggtgacaggactcattgtgaatgagcggccaaacgtgacccgggagtttgttagactaaccagctctatgatcaacgccctaaaaaggcacggttgcgaactggctgaggcaaagtatctggagctgctgaaaggagaaagccacccccttcagccaagacagataatcagaactaaagacaatgcgggcgacttcttcattaaagtggtgaaggggcggctgaattatatccagatgattcgcggccgtggagacaaggtttatcgacggctggcatatgattttactgtagccattggtaaggccaacccagagttcaagaagacacctgaggagattttagggaacagcatcttcgtcgttaataacatgacggatgactctcaggggacagctttcctgttagacggtgtcggcattgtcaccaacgaacacgtcgtccggggcgtgtctaagagtatggccccacacatgatctcatttcaaagggccaatgaagagaaggaatacactgccgagttaatactttccgataagaaggccgacttggcaatcttccatccgagtgccgaatttcgctccattcctagcctgcgcaaagctgaacgctcaattatccgcccgatggaatctgtactctcaattgggttcccacggcatcgagatggggccgcacattacatagcccggggccatactacacagcgaaggagacaggtggacttggatctgtggctggtggatttcaccttgtttgaaggaaactcaggcggccctttcttcaacgattcaatggaagtgatcggcgttgcggcgaggggagccaagaataatatcgagagcgccctttttggtttcattcccctagagtctcttaacaccttcatcgctcgaaaggatttcgtgttctacaaaaaactgcatgacttactcggcgggtgtctcttgaaggccctccccaagcgcagtggcgatggagtgtttacagagatccaccaccaacgcacggaacgtgtgacagcgcgcctccaggagtga

SEQ ID NO: 7842 - RNA, 1785 nt, synthetic construct
  source 1..1785: mol_type = other RNA
atgaacatagacaagatcttacaggatctcttcatgcccggctttgggtcacttgagggcttttgtcaactgctcgaggtcgaccagaagaagctgttgaatttcctgtataaacgaaggacaaaccattatgtgagctttagtatctccaagaagaacgggacccacaggtctattaaagccccgaagcggaccctcaaatttctacagagaaaactccttgcccatatagagaaattctatagccccaagccttcaagccacggctttgtgccagggaggtccattaagaccaacgcccaaacccactcagggaaaaggtacgtgttcaacatcgacttaaaagagtttttcgacagcatccacttcggcagagtgcggaatctgtttatggcccaaccctttaatgctccccacaacgtggctaccgttatggctcacatctgctgtagcgacggtaggcttgcccagggagctcccaccagtcctctcatcagcaatatgatttgtcggaagctggacactcagttgcagacccttgcaaaaagtggcaaatgccatatcacacgctatgcagatgacatcaccttcagttttacatcgactctgcgccacctgcctaaaaacattgtcgaagtgtctgaagatggccggccaatccctgggcgagaactggagaatatcatcgaagcaaacggtttcgtcataaattctgagaagacgagactgcagcattgctctcaaaggcagatggtcacaggactggtggtgaatgagacgccaaacgttccccgcgactttgtgcgcctgacttcctccatgattaatgcaatgcgacggtacggaccacagctggctgaggcccgttatctcgagatactcaagtctgaaagccaggtcatacccacccggcaaacgaacagagcacgtgataacgcgggggacttcttcataaaagtggtaaagggccgcctgaattacattcagatgatcagaggtagaagtgacaatgtctaccgcaagttagcctacgcattcactgtcgccttgggtaaagagaatctggaatttaagaaatccccagaagagattctgggcaattcgatcttcgtagtcaacaacatcctggatgattctcaagggaccgcctttctcctggacggagtggggattgttacaaacgagcacgtagtctccggaatcacaaagaccacagccccccacgtgatttccttcaagagagctgacgatcctaaagaatacacagcggagctaattctcagtgacaaaatcgccgacctagccgttttctatccaaacgcagagtttaagaatattcctgggctgaggaaggcggataaggaaactattcgagctatggaccctattctctccataggcttccctaagcatcgggagggcgcggctcattatatcactaggggcaacactactcagttgaggtaccaggtggatttgccactttggttggttgatgtacccttgatcgagggtaattccgggggaccgatcttcaacgatagcatggaagtgataggagtggccagccgaggaagctctaataatattcaggctgcactgtacggctttattccattagaatgccttaaccgctttgcaaagagaaaagatttcgccttctaccgtaagcttcacgaaattctggctggtggcaaattagtgcgggccgcctctgttagaggaggcggagtgctgtcaacacgcctccagatcctgctgatctcacatctaaactcaccgtga

SEQ ID NO: 7843 - RNA, 1755 nt, synthetic construct
  source 1..1755: mol_type = other RNA
atgactctggactttcttagcaaggatctcgcctttagcaagttccagtcattatctagcttttgtaagttgctgcaggtcgaccaggacaagctcttgaaattcttgtacaagaaaagcagctcccactacgtgtcatttacaatctcaaaaaaggacggctcactgcgaagcatcaaagcccccaagaaggtaacgaagatgcttcagcatcgcctactgtcgcacctggaggagttttacactccaaaaagtagcagtcatggattcatcaaaggtagatccatcaaaacaaacgggcaaatgcacgtcgggaagaactatgtgttcaacattgacctcaagaacttttttgagtccatacacttcgggagagtgaggaacctgtttatggcggccccgttcaatgcggcctataacgttgcaacagtgatggcccagatttgttgctgcgagaataagttagcacagggtgcccccacaagccccctgatctctaatatgatttgtcggcggctcgatgcacagcttcagaccctggctaaggcccaaaagtgccacatgacacgctacgcggacgatatatccttttcatttacctcccggctcaggcatttacccaaagaaattgtagagatatcagaggatggcagggtcatcccaggccaagccctggagactctaattaagacgaacggctttgctatcaattctgacaaaacccggctgcagcacagatcccaacggcagatggtgactgggcttgtcgtcaataagttgcctaatgttcctcgcgagttcgtgcggcttacctccagtatgatcaacgctatgaagaggtatggaccagcccaagccgaagcccgttacctggagattctggcccagacaaagcaaattgtgccggaaagacagctggctcgcgtgaagtctaacgcgggggatttttttatcaaagttgtgaaaggccgactgaactatatacagatgatcaggggacgcagtgataatgtctaccgtaagctcgcttacgactttacagtggcactgggcaaagaaaacattgaattcaagaagacacctgaggagattctgggaaactccatctttgttgttaccaatatccttgatgactctcaagggaccgccttcctcttggaaggcgtcggcttggtcaccaatcagcacgtggtgtcgggagctacccatgctctcgccagccacgtaataagtttcaagagggctggcgacgagaggtcttacactgctgaattgatcttcagcgatctcaagtctgatctggcagtgttctatccggggcctgaatttaagaatatcccacatctgcagaaagcagacaaacatattattcgtgcaatggatccagtgctgagtatcggcttccctaaataccgcgatggctcagcacattatatcaccaaaggcagcacgacccagctgcgacgacaggtggatatcgacctgtggctcgtggacatgcctctcatcgagggaaactctggtggacccatattcaacgacagcatggaagttattggaatagcctctagaggttccgtaaataatctgcaggctgccttatatgggttcattcccatcgactccctcaccagattcattagtagacctgccttcggacttgctaggagagtccacgatctgcttgcaggtgacaaattcaaaccactgtccaagactgggcacactcggctactattaaaatgcgcaccctga

SEQ ID NO: 7844 - RNA, 1767 nt, synthetic construct
  source 1..1767: mol_type = other RNA
atgaatctggacgatcttctcaaagcaatgttcgcaccttccttagggagcctgccctctttttgtaatctgttgggagtcgagcaggacaaacttctgagtttcctctacaagcggacgagctcacactatatatctttccacatccccaagaagaatggtgcaacccgcgtcattaaagcaccaaagaaggccctgaaagagctgcagaagcggctggcttcccacctcgataaatttcattcaccaaagccttcatctcatggcttcatcaaagggagatccattaaaagcaatgccctgccacacataaataagaccttcgttttcaacgtggacctcaaggacttttttgagactattcattttggtagagtgaagaacctctttatgtccgaacctttttcagcaccccataacgttgctactgtcatggcgcatatctgttgtcacgatggcaaattagtacagggagcgccaacgagtcccctgattagcaatatgatatgccgcaaactcgactctcagctgcagtctctggctaaggcccaaaaatgccacgtgacacggtacgcggacgacatcacattcagtttcacaagcagcatcaagcacctgcccacagacatagtggaggttacccaagatgggatggctattcccggacgggagttggagcaaattgtaagggtgaacggatttacgatcaatgcagaaaaaacacggctccagcataggtcccaacgacagatggtcaccggcctggtggtaaataaattccccaatgtgccacgggccttcataagaaagacttcgtccatgattaatgctttgcgtagatatggaccggtactagccgaagagaagtacctccagatcttgaagggcgataagcaagccctacccgctcgacagcaccgacggatcaaggacaacgccggagactttttcatcaaagttatcaagggcaggctcaattacatccagatggtgaggggacgcagcgacagtacctatagaagactagcctacgattttaccgtcgccattgggaaggagaaccctgaattccgaaagtcacccgaggagattctgggcaactcgatctttatcgtctccaacctgaccgacgattcacagggcactgcgttcttgcttggcggagtgggtctggtgactaaccagcacgtgatttctggcgtgtccaagacaatggctccacacatgatttcattcacacgcgttggcgacgataccgagttcagtgccgacctaattatcagtgacgccaaagaggatcttgcagtgttttacccaaacgaacaattcgataggatccctatgcttaaaaaggcaagcaaagaatctatacgccctatggagcctattcttagcatcgggttccctcgtcatagagatggtgctgcccactatattaccaagggaacaaccacccagctgcgcaggcaggtcgatttggacttgtggctggtggatgtgcccttaatcgaaggcaattccggcggccctatatttaacgatagcatggaagttattggtgtggcggctcgtggggccactcagaacaacatcaatgccgcactctacgggttcatcccaatcgccagtctgaacagatttgtcgctaaaccggaatttaagctggccaacagccttcatatgtctctgcgcggtaaaccgtgcaggccattatgtgaagctactgggaaatatatcaggaagatgactatttgctcctttgggtga

SEQ ID NO: 7845 - RNA, 1764 nt, synthetic construct
  source 1..1764: mol_type = other RNA
atgatcatcgacgatatcctcaaggctctgttcacccccggtctggggaacctgtccggcttttgcgatctgttgggcgtggagcaggaaaaactcctggattttctgtacaaacggaagagttcccactatgctgccttccatattcctaaaaaaaacggggccacccgcgtggtgaaagctccaaagaaagctatgaaggagctgcagaagagcctcgcattgcacctcaacaaattctactaccccaagccgtcatctcacggcttcgtgaagggccggagcatcaagtctaatgcactgccccacgtaaataaaaacctggtgttcaatatcgacctcaaggacttttttgaaaccattcatttcggccgtgtgaaaaacctgttcatgtcggccccgttcaatgcacctcataacgtggccaccgttattgctcacatttgttgtcatgacgggaagctggttcaaggagcacctacatctcccctcatctctaacatgatttgctggaagcttgactcacagctacaggccctggcgaagagtaaaaaatgccacgttacaaggtttgtggacgatatcacattctccttcacaagcagtttaaaacatctccctgccggagtggtggaggtcactcaagacggtatggctattcccggaagagagctcgaacagatcgtgaaggccaatggctttcttattaatgccgaaaaaactcggttacaacacagaagccagcggcagatggtgaccggattggtcgtgaataagtttcccaatgtaccacgcgaattcattagaaagactagcagcatgattaacgctctgcgtcgatacgggccagaactagccgaggaaaaatatctgcagattctcgccggcaacaagcaagtcgttcctgcacggcagcatcgcaggatcaaagataacgccggtgacttctttatcaaggtccttaaggggaggttaaactatatacagatgatcaggggaaggagcgacaatatgtacaggcgtctcgcatacgatttcacggtcgcgatagggaaggagaatctagagttcagaaagtctcccgaggagatattagggaatagcatattcgtggtgaaaaacctgacggatgactcccagggaacagcctttttgcttgacggcgtcggcctcataactaaccagcatgtcatttccggtgtttcaaaaacactggcgccacacatgatctcatttttgcgcgcgggagatgaggccgagttttcagcagaacttatcttaagcgatgttaaggaagatcttgcaattttttacccaggcgagaaatttgaccagatcccccggttgcgaaaggccaataaagaggctatccgccctatggagcctatactttccattgggttcccaaagcacagggatggagccgctcactatatcactaagggcaataccactcagctccggcgacaggttgacctggacctgtggctggtggatgtacctttgatcgaagggaacagtgggggacccatctttaatgatagtatggaggtgattggagtagccgcccgaggcgctgctcaatcgaatattaacaccgcactgtatggtttcataccgatcgcgtctctgaacagattcgtcgccagatccgaattcaaatttacctcctctctgtacgcagtcctagacggcaaggccttcaggccactgtgcgaggtagctggtaagtatgcacgcagaggctgttttttcatcttttga

SEQ ID NO: 7846 - RNA, 1767 nt, synthetic construct
  source 1..1767: mol_type = other RNA
atgatcctatacaattttctggctgccatctacgcccccggcttatccagcctgccagcgttttgcaaactcttgggggtggatcagaataaactgctgcattttctttacaagaggaaacaatcgaactacgtgtccttccacattcccaagaaaagtggcgccactagagtgatcaacgcacctaagaaaaccctgaaagtcctgcagcggtcactcgccgagcacctagagaagttctactatccaaagagctcctcacacggcttcgtgagggcccgttctattaaaaccaacgctcaaccacacgtggacaagaactatgtcttcaacatcgatttaaaggactttttcgacaccattcattttggacgggtccggaatttgttcatgtccgagccattcaacgctcctcacaatgtcgcaacagtgatggctcacatatgttgtcacgacggcagactcgcacagggtgccccaacctctcctctgatcagcaacatgatctgccggaagttggactctcagctccaagcactggccaagtccaagaagtgccacgtgacccgctacgcagatgacataactttctcttttactagtagcttgaggcacctgccccccgacgttgtggaggtgacaggagatggggtggtcattccggggcgcgaactggaacatatcataaaggccaacggctttctcataaactctgagaaaacaaggcttcagcatcgttcacagaggcagatggttactgggctagtcgtgaacgagttcccgaatctgccacgagcctttctgagaaagacctcctctatgatcaacgcacttagaagatatggaccggtgctggcggaaagcaaatacctcgaaatcctgaacggggacaagcagtccatccctgcacgacagcacattcgcgtgaaagataatgccggagattttttcatcaaggtcgttaaagggcgcctcaattacattcagatgatcaggggacgtggagataatgtatatcggaaactggcatatgacttcacagttgctattggcaaggaaaatagggagtttcgcaagagccccgaggagattcttggcaactccatatttgtagtgaagaatattagcgatgacagccaaggcacggctttcttgctggacggagtcggtctggtaacgaatcagcatgtggttagtggcattagtcgcctcacagctcctcatatgattagttttatcagggctgggttagatgaagctgaaatctctgcggaacttatcctgtcagatgagaaagccgatcttgcaatcttctatcctggacccgagttcgacaaagtgcccaggctcaaaaagagcaagaaggaactgatccggccaatggaccccgtactctcgatcgggtttcctaagtaccgagacggggccgcccattacattacaagaggtaataccactcagctgcgccggcaggtggatttggacctatggttgattgatgtgccccttatcgagggcaactcaggtggtcctgttttcaatgattctctggaagtgattggtgtcgccgctagaggagccgcgcagaataatatacaagccgctatgtatgggttcatccctatttccagcctgaacaaatttgttcagcagagtgagtttaaggttacccggtcaatactcgacatcctgggcggcaagttatttcaacccttagccaacgcaaagggcaaattcgtaagacgaaaaatactcattccattctga

SEQ ID NO: 7847 - RNA, 1818 nt, synthetic construct
  source 1..1818: mol_type = other RNA
atgagctctgtgccttttagttttgctgacatcttcaagcctggcttgtcggggctgccaaatctggcaaggctgctcgggactaatcaaaacgccctgctagagctgctctatccaaacaacgtgcgcaactacaagaacttccagatcaaaaaaaagaacgggaactctcggtccatccatgcgcctaagaaggtgctgaaggctttacagagaaatatggcagactacttgacgacactgcacactcccaaaccctcttcacacggcttcctcatcgagagaagcattaagtcaaattctatccctcatgcaggaaaggagtatgtctttaacatcgacttagaggatttcttcgaaagcatccacttcggtagagtgaaaaatctcttcatgagtcggccttttaatgctccacacaatgtggctgttgttttagcccagctgtgttgttatgatggcaagcttgcgatgggggcacccacttctccgataataagcaacatgatatgccgcaaactggatagccagctgcagctgctggccgctggtaaaaattgttactatacacgatacgctgatgacatcactttctcctttacaagctccaaaaagctgttgccctccgatattgtccagattaccgagggaggtgttggagtgcctggaggggcattacttagtattatagagaggaacggcttccgggtaaatccgaccaaaaccaggctgaggcatcgttcccaaaggcaaattgtgaccggccttacagttaataaatttcccaacgtctcaagatcattcatcaggaggaccgcctccatgattcacgcgctcaaaaaatttggagccgtcgatgctgaacaaagatacttggaaattctctcacgccaggaaatcgatctggccccccgtcaggcaaaacgcacaacggactccaaaggagacttctttcccaaagtgatcaacgggcggcttaacttcatacagatggtgcgagggaagaatgacagcatctatcggaagctagcctacgccttttctgtcgctgtcaatgaggaggacaaggacctgctgaaaagcgcgcaggagattttaggggaatccgtgttctcagtgcttaatctggccgacgccaactccgaaggatcggcctttctgctcagcggcgtaggcattgtgactaatcagcacgtgattgacggtattgatttcgatagtccattggaactactggagttcagcaccaccgagaatccaagtagaaagctaaacccccagctgatctataagtcaaaggtcccggatatagccattttctaccctggcgaggaatttgaccgtatccgacctctcgtgatttcgaagcagaagcatatcaggcctctggaccccatattggctgtaggcttccccgggggctttgatagttgccctagcccatatatcaatggaggtaaggtcgttcagggaagacatatttacgaacaacagcactggctcgtagatatcccactgcttcaaggaaactctggcgggcccatatttgatacttccatggaggtgattggcgtcgcctctcggggtagtaaaaagaacaacctggagtctatccttcacgcctttatcccaattgacacagtggtaaaagctatccggaaaccggaattcttgtaccgccagagatatattgagctccgccttaaccgaaagacgggcaaggttgtgtacacccgctgcgtttttgcagaagactgcatctttaagtcagcaatcgagctctattggccactcagtaagtccttctcttacagctga

SEQ ID NO: 7848 - RNA, 1854 nt, synthetic construct
  source 1..1854: mol_type = other RNA
atggacaatcggaacatcctggaaaagaccttcgaagggcttttcagcacagcaccattcaccccagggttccataacctcgatgggttggctctattgctggacacagacctgaccaggctgttatatattctgtacaaaagtgatagccctaagtacaaccactttaagatccaaaaacgcaatggcaattcccgaagcattcacgcacctatcccagaaattaagaagctgcagaagaagctggccacactgttgcaggcactgcatgttccgaaactgagctcccacggcttcttggccgacagaagtgtcaagacgaatgccctcccccatacaaagaagaagtttgtgttcaacatcgacctgaaagatttctttgaaaccgttcatttcggcagagttaagaatctgtttatgtcccgtgctgtgggagcaccgcacaacgtcgcaacggttatggctcatttatgttgttttaatggacgtctcgcccaaggcgccccaactagccctataattagcaacatgatctgcttaaagcttgatgcccagttacaggccttggctcacaaggaaaagtgccactacacccgatacgcggatgatattactttcagctttacctgttccaaaaacaaactgccaaaagacatcttggtgtatagtgaactcgacgcaatatcagctgggaaagggctggaaatcattattgaggcgaatgggttcaaaatcaatcccgataaaacccgggtgagacacaagtcccaaagacagttggtgaccggactgaccgtgaatgactttccaaacgtgtcacgcgagtatatcaggcgtaccagcgccatgataaatgcccttagaaagtatggcgaagtgctagcggagaggaagtacgttgagattaataagatcaacgccgtccctctagcagctcgccagctgaaacggctcgaacggaaagagggcgacttctttatcaaggtagtcaagggacgcctgaattacatccaaatgatacggggtcggggcgacccgatctatcggaaactcgcatactatttcagtgtcgctgtgaagaaggagaacaaagagtttcttaagaccgctgaggagctcctgggtgaagccctcttcatagtgaagaatagtctcgacgaggatagtcagggaactgcgtttctgcttgacggtgtgggaatcgtgactaaccatcacgtaatcgacggcgtcgatcttatcacagccccccattgcatcgagttcataactacagagaaaattcctcgcgtgctttcagctgagctgatttttacttcgaaatccatggatctggcagttttccacccatcttcagattttgaaaccctgaggccactccagatgtctcgacgcaaaaggcttaaagccctcgaccccattctggccatgggcttcccttctcacatcaggggtgccacgccctacatcaacacaggaaagattgtccagtctagagaggcctatcggtcaactttttggttagtcgacatccctctgctgagaggaaattccggaggccccgtgtttaacagctctatggaggtgataggtgtagcaactatgggttctaaaaaccacgacaggacaacaattatgcacggctttttgcctaacgatggcatttctacgatcctgaaaaaccccgatttcctctatcgacgcgagatactgaaaaccaagaagacaggcattagatcaatctcgaccaggctaaaaggggtacagactttggctttctacgaacataagcatgtggggccttacccccttattcacgcctcctggccctttctctccggagctggggggtga

SEQ ID NO: 7849 - RNA, 1758 nt, synthetic construct
  source 1..1758: mol_type = other RNA
atgacgacaatcccgaactttgctttttccttgattaaggttaagcccggctttggcagcattgaatcgctggcccttctgctgggcaccactcaggacgccctacttgggctcctgtatccgcagaccaaaatcaactacgtcaccttcactattcctaagaagaacggggatattcgaacgattcatgcacccaaaaatcacttaaagcactttcagagactccttgctaaatacctgctcaccacacacaacgcgaaatcgtgtacacacggttttgtggagaataagagcataaagacgaacgctcaaccccatattggcaaagagtacgtgttcaacattgacttaaaggatttcttccaaacgatccattacggacgggtgaaaagacttttcatggcgtacccttttaacgccccagagaacgtggccacagtaatcgctcagctatgttgtttcaatggtcatctggcccagggagctcctacttctcccattatttccaacatgatcgccctcaaattggacggccagatcttgagtgtcgcttccaagaaccagtgccactacacacgttatgtcgacgatctgactttctctttcacctgcaagaagcaccgactgccaaaggacatagtcaaaattagtaacgaagatgaagctacaccaggcgatacactcactaatatcattctgaagaatggctttacggtcaaccctgaaaagacccgcttgaagcacagatctcaacggcaagtggccgccggtgtcaccgtaaacgaatttaccaacctccctcggagctacatcagactgaccggatctctcatatatgcactggagaaatttggacccatcaatgccgagatcaagtatgtggaggggttaaatgagatccatcagctcactccgtaccagctagacaaaataaagcggtcaaacggggagtttttcaagacagtcgtaaaaggaaggctagacttcctcaaaatgataaggggcaaatcagatagtatataccggaagctggcgtatcgattttccaaagcaatcggaaaggaagataagaacttgatgaaatccgcacaggatatcctgggggagtccgtgtttgtggtggaggaaatgatgtcagaaagccaggggacagctttccttctggatggcgtcggcgttgttacaaacttccacgtggttggtggaattactcaagagctcgcacccgattgtgtgagcttcatcactaatgaggccacctccaggactctgtcagcacagctcatcttctcatgcaaagaaagagatctggccgttttctatcctgaccatagttttgacacaatcaggcctctcaaaacccgtaagaaaaatggtctgacccgcgtgttggaccccatcctgtctatgggatacccaaatcatagcgcaggaacccccccctattttaacaccgggaagatcgtgcagcagcgcaacgtgctgggtaggaattactggttggttgacatcccattactgaagggcaattctggcggaccaattttcaatagttccatggaagtaattgggatcgctacaattggcactaccagaaatgacttggcctctatactgcacgggtttcttccagtggagaagcttaaagagattatcaagctgcctgagttcatatatcgcaaacgctacctggccctgaaaaataatcagccaaatttaagctgcctgcttcctaagagcaggccctattattactga

SEQ ID NO: 7850 - RNA, 1833 nt, synthetic construct
  source 1..1833: mol_type = other RNA
atgacattaccattaggcgagaacttcttttcaacagcgcagactattgccaatgaactgggtatgtcttacaagcagctctcttcctttatttatcccactaccaataaatcgtaccgaacgttcacaattaagaagaaaggggggggcgaacggaccatcagtgtcccaaagaagaaccttaaaaagatccaacgcatgatcgttgacaagatcatgaagtactataaccccaagctcagctgccacggctttactgaatcccgttcaattgtgaccaatgcctatcgtcacgtcggaaagcagtttgtttttaacgtcgaccttaaggattttttcggcaccattcacttcgggcgggtgcgcaacttgtttatctccaaaccattcctgtattcccattcagctgccaccgtgctggctcagatttgttgtaaggatggagtgttaccccagggagcaccgacttcacctatcatctctaacctgatatgctggaaactcgacgcccaactccagaccctggctgcaaagaataattgtcactatacccgatacgccgatgatatcacgttctcttttagctgcaataagaagtatatcccaaaatctatcctggacttcgacaacgatggggtagtggttgttggcagttctctggaaaggatcatcaaagaaaacggcttcaatattaactacgagaaagtgaggttgaagggcagatctcaacgccaggaggtgacgggaatcactgtaaatgagtttactaacgtggagcggaagttcattaggaagacccgctccatgattcatgcttggcgtaagtttggatcaattaaagcccaggagcattacatctccaattatctggaaaaggatattcttcctagacaagctaaaagcattgccaaaaacgacggggaattctttatcgatgtggtgaaggggcgggtgaattacatacagatggtgaggggcagggcagatcccatctacagaaagctggcttaccagatgacactggctatggggaagcctaatcacctatttttgcggaaagcagaggaggtcataagtgacagcgttttcatcgtggagaataatctcctgtgcgagcaggggagtgcctttctgcttgatgacattggcatcgtaactaaccaacatgttgtggagggaattgatcacgagaaccacgagcttgtcgacttctaccgagaagacgacgtaaagaacaaaatgaatagcagctttgtctattcctctgcaagcaaagatatagcgatatttctcgcaacagccaactttaataatattcctccgctgccaatcggcaacgacaaaaatcttagagtgggagactcaatcattgtcgtgggctatccagattacagcgaaggggaaacggcgtacatcaacagagggaagatagtgcagtcgatactccggttcggaaaacgcttttggctcatcgacatccccgtcatacacggtaacagtggtggtcctgtcttgaatgagaaactagaggtggtgggcattgccaccctcggaagtgccatcaatgatggtaagaacaaattcaatggtttcgttcctatttccacattgactggcatcctgaacaccccccagtacaacaaaatttacaggtattccctactgcatagcaaaaagcccaaggtcgagattgaaaaagacttgttctatgttgatggactgacatattgtaagaagtgtttcctggacaagaagcaggccatcacagtgtacaaaaccaaaagcaacgtattcttcaactgcaaaatatgcggcaagacatacagaaaatga

SEQ ID NO: 7851 - RNA, 1674 nt, synthetic construct
  source 1..1674: mol_type = other RNA
atgattgatttctctgacactattctgcccagccaggaggctattgccaagaaattcggctacacatatgatcagctgtcatctctgatctaccccaaggtgaataaatcataccattccttcacgatctctaaaaagaatggagaactgcgcgaaattaatgcgccaaaaatcctacttttgaaagtgcagcagactctggccgaggagctgagctcctgttacacgcctaagaatgctacccacggatttattaaggagaggtctatcgtgaccaacgccaaaaagcatatcggtaagcgcaacgtgtttaacatcgatctgaaggacttctacgggtccattcactttgggcgcgttaggaacttgctaatgtctaaaccctttatgtatagccaaagtgaagctactattctcgcacagatttgttgttataacggagccctcccccagggagctccaacatcgccaataataagcaacctcatttgctggaaaatggatgcactgcttcagaacctggcaagcgagaatagatgcacttacaccaggtatgccgacgacataacctttagcttcaacgtgaagaagtctaaactgccgtcatctatagtccggtttgacttaaaaaaagaccgagcgattgtggggtatgaactctccaagataatcgaagagagtgggtttgtcattaatgaggagaaggtcagactcgcaggaaaaaaccagagacaagaggtaacaggcatcactgttaataagaagccaaatgtgtccagaaagtttatccgacagacagcctccatgctgtatgcgtggaaaaaattcggagcagaacaagccgagcacgattacctggacaagtaccgggttaaaaaacttactaattggcaaagcgagaaattcaaaggcgcgaagggggagtttttcattaaagtcgtgaagggtcgtgtgaattacatccagatggtcaggggccgcgacgataagatttaccggaagttagctttcaaattgaccgatgccctcggaaagcccaacatccacttcacgaaatcacgggaagagcttgcaacctacgtgatcgagtggatggaagcccagggcaccggtttcctgctggatggcgtaggcattgtaactaacgagcacgtgatcagcggtatcactagtgataattacgccatgtgtaacgtctatcgttgctatgaggaagataagaaacagaagtgcccgttgatcttcgcagacaaagctatagacctggccgtgctggaccccacctcctaccttagtgacgtgaagccttataagatcggggaggacaaatatttagaaattggcgacacagtcaaggttatcggttttcctaaattcggtcctggctcaacccccaacatatccgagggcatcatcacaagcaagaagaagatccacgggatcgatgcttttatcgtgaacacacctataaccgatggagccagtgggggaccggtactagacaacaataatgaagttattggcgtggctttctggggcccagaacataatgatgggtcaaaccctatcaatggcttcattcctatttccacattgaagaacgctctcgaacagcatagtctcaccaattcgtttggagccaaaaagccagttaagcagcaaaaggagaagtga

SEQ ID NO: 7852 - RNA, 1632 nt, synthetic construct
  source 1..1632: mol_type = other RNA
atggacaacattgattttaaagattgcagaaccgtcaaagacctgagtcatttccttggcatgaactacaagaaactgtcttcgctgatctacccaaatacaaatcgactctacgtgacctttattatccctaaaaaaagcggagaggaccggacgattgacgcccccaagcctattcttaaagctatccaacgtaaactgtccattgagttcaacaagatatataaccccagaaagaatacccacggcttcatttgtggaaaaagcatagtcaccaatgccaatcagcacatcaacaagcgctacatattcaatatcgactttaaggacttcttccattccattcattttgggaggataagaaacctctttatgagcgacctgtttgcgtttacttatgaggtggctacggtcttggcacacatctgttgtcacaacaaccggctgccacaaggtgcacccactagccccgttctcaccaatatcatctcttttaagctggataacgacctcttcaaacttagtttcgacaacaaatgttctgtgacaaggtatgcggacgatgtgagcttctcattcagctgcaataagaggaattttcccaaggatatcctttactttaacaaggctaaagagatcgttccgggcataaaactaagggaagtgatcgaaaaaaacgggtttgagattaacaacaacaaagttcgcttgcagaataagacacaacggcagcaggttacaggcattacagtgaaccagaaactgaacattcaccggagttacataattaaaactaggtctatgctgcacgcctgggacaagtatgggttggagcaggccgccaaggaatatctatccaagtacatcgaaaaagactacagcaataatgataagaaccgaatcaattccaacgagagtctctttttcaagcaagttatttcaggcagaattaattacatcggtatggtgcgcgggattaacgatgagatttaccggaagattcgctataagtattcatgcctgattggggtgcctgatgaaaacctgaagaagtccttagatgatattctttcggagtcagtcttcatattagagaacaacataggaatcgctcagggaactgcctttttagtggagcagctaggcctggtcacggcctatcatgtgatagaggacatcaatgaggaaaatagctgcctgatcgatttttttcgatgcaatgaagtggataagaagagaaaagctacactcttcaagacctctcagaagaatgacatcgccatcttcactcttaacaataacttccaagacatcacaccgctgaaactgggggacgcatcaaagctcaaacgtggagtagaaatcaagctcttcggatttcctggctacaataccggggatgaatgccattgtgacaacgggaaaatcacccagaagaaaaagttgtatggtttcgatgtctggctcgtcgatatcccaattacccacggtatcagtggaggcccagtgttgaacgcaaataatgaggtaattggcatcgcaatagtaggctccgaaaagaatgataaatctactatctcccagggtttcattcctatcactaaggccctggctatgctgcaggaccagtga

SEQ ID NO: 7853 - RNA, 1626 nt, synthetic construct
  source 1..1626: mol_type = other RNA
atggagcagacaatcaacaagaatttcaactctctagatacccttgtatctctctttggcatcaattattccaacttggctaaactgatttacccaacgacaaataacctgtatcattccttctcaatcccaaagaaatccggggaacttcgggagattaatgcccccaaccgaatattgaaggaaatccagtataagctcctcaatgaactgcaatcatactatagcaaaaggaactgtactcacggattcataaatgaacgtaatgtcgtcacaaatgctcggccccacgtgaagaagaacattatcttgaaccttgacttgaaagagttttttcagagcatacacttcggacgggtcagaaacctgtttatgagcaatcctttcaacttcaataagaacgtagccacagtgcttgcacagatttgctgtcataaaggccacttacctcagggcgcgccaacgtcacccctgatcacaaatctaatttgctataagttggacaaggagctgagcaagctcgcattcaacaataattgcaccgtgaccagatatgtggacgacattaccttttcctttaactgctctcacgataaaatcccgagagatatccttgatggcatttctggcgaatcaattagcattagtaaaaagctggtgaacatcatcaataagaacggattcgagatcaattacaaaaaagtgaggctgagttcgtccaatcagagacaacaagttactggtattgtaacgaacgtcaaggtcaacctcccacgaaagtacatcaaaaaaactcaaagcatgctgtacgcctggaaaaacttttccctgcccaacgcagagcaggcccatataaacaattacctggagaagccttacaagtaccagcgctttattcgctacaacaaagacaagagttacttcaacctcatgattaaaggccgcattaattatataggcatggtgaggggccaatccgactgtatctatcggaagttactgtaccagtacaccgaactcatcgggaaccctaataaggagctcctgaagtcggtggatgattgtctggctgacagcgtttttatcactgagtatcctattgagagtaaacaggggaccgctttcttcctgaaggatattgggctcgtgacagccgcccatgttgttgagggaattcacgaaactaattcttgcttcctggactttttcaggcactatgaagttaaaatcaagcgtaaagctaccctgttcaaaaaatctgaagagaaggatattgccatattttacgtgggcgatgactttaagaaccttccctcattgaaagtgggggacgactctaaattagccatcggggaccagatcaagctgatcggattcccggattataactaccacgactcctacttatccaatctgggaaagatcatccagaaaaagactatgtacaacctggatgtatggatcgtggacctacctattaactttggggtgagcggaggtcccgtcttcaataacaagaatgaggtgataggtgtcgcgctccagggtagtaagaaacatgatcagtcaacctatagtcattattttgttccaatcagcaaggtgatagaaatggcacagaattga

SEQ ID NO: 7854 - RNA, 1617 nt, synthetic construct
  source 1..1617: mol_type = other RNA
atgaatttcctgcaactgcagaccacacaggatttggccaatttctttgaaatagacctaaagcatctgatgtacctcgtgcatgttatgcctgggcacattaaatacaagtccttcaagatcatcactaagaagaaagagcgtttgatttcatccccatttttcaggctcaaaaaaattcagtaccgcctgaaagaagagttcgaaaagatctataagccccggaagagcgtctatggatttatcaaggataagagcatcaaggaaaacgcaataaaccatctgaacaagcgttacattttcaacatcgatctgcaagacttctttgggtctatcacagccataagaatcaaatatctcctgcaatcttacccttttaattttcccagcatagtggcagagataatcagtaagcttatctgctaccagggggtactgccacaaggctcaccctgctccccaattatttccaatatgattgctcaccgaatggacggtgaactgagcttccttgctaagaagaataacgccacttataccaggtacgtagatgatattacgttctctttcactaagcggtttaaagccctgccgaaagatatcctgacatttgagaacggagatttaaatgtgggcgccaaactggaccagatcatcaacagcaacggcttcatcgtgaaccagaaaaaagtcagactcggtaaaagaagtactcgaatggaagtgaccggcattaccgtgaatgagaagctgaatgttccaaggaagtatatacgcaagatacggactctgttacacctggtggaaaaatacggcgaacaggaggccgataggattttttcgacatataagcggactcgcgtgagtaaatatccgcctagaatcgagaaagcaatttttggtatgcttacctacttagctcaaattgtgggatacaacaacatggtgtactataatcttgcgaagaagtataacagtctcgagtttaaatctaagctgctcatcattaagcctgtcgacttgcagattatcgacgcactatgggtcatcctgcttcctacgtgtgaagagggaaccgctttttctatatccaacaacctcgtagttacagccgctcacgttgttatcaacgaagatacaaaccagccattcgaggaaatccagatctacaagtctttcgcccaggaccagatctaccacctagaggtattgaagtataatattgacgcggatgtggcaatttgcaagatcatggagaattacaaagacgactccttctttgagttggggggaaacatcgagaataaactcaaactcctgggcttcccacagtttcagcccaaccagcataagcctcatagcgctgactgtgacttaatgttcaaaaccacaatcaaggagtacaagtatttctccataaatacgcccattattggggggaatagcggtgggcccgtcatcgactcatgcaaacgcgtggtcggcgtggcctcaaaaggctattttggacaaggcattattgaccagggcagtctggttaataaatcaatccacgtcaccatcatgggacacaacttgtgtagcgatatacagaatgtgaaggatcttattgactga

SEQ ID NO: 7855 - RNA, 1695 nt, synthetic construct
  source 1..1695: mol_type = other RNA
atgaacggagggttctttctcaaattttctcccaccctgtccccttctacgacaccaattgagcttgccgaattgctgggcaccgactacgcaaaaatcaagaggctgtactatcacggcgacatgcagcggcattacctggctttcgacattcccaaaaagtccggcggtaaacgtagaattctggcaccaagcgataagttgaagacccttcaggggcggctcgctagcctactgaagaagatatataagccccgagatcctgttatggctttccgcgacgggtcatccattgtgacaaatgctcatgcccactgcagaaagaaatatgtcttcaacatcgacttggagaattttttcgggaccataacttttgcacgggtgcgagggatgttaattagtaaaccgtattcgctgacagctgaaacagcaactgttattgcccatttggcgactattaatggtgctctgcctcagggcgctccctcttcacctatcctgagtaatatgatctgtgccagtctggatagagatctgtatagtctggccaagtcatacagggccgtatatacgagatatgcggacgacatcactctgtcgttttactgtctggccgaatttttacccaccgagattgtagagtactctctctccaacggtaagcctaatcactatttcagcaaggtcgggaacgagttggggagtctcgtgcgtagacacggcttcatcatcaacgagcaaaaagtgcgcttgcaggggccaggtgagagaaggaccgtgactggcctcgtcacaaaccagaagccaaatgtgccgcgcccttatatcaggaagactgccgcattaatccacagcttcgagaagctcggagagcaagctgcgaacatactttacaaacagaaaaacccgaatagctccggaatccttgagtcccacctgcagggcaggctgcttttcatcaagcaggtggccggactggaatctgtcgtttacagacgtcttgcccaacgctataatatgctgcctcttaaatcaaaggtccccaatacaccaattgctaccacggaagatagcgacaacttcaaagtcggtgagtttattaaaaacaagtgctgggtgacagaaatttccgagaacgtcgaggatgaactagttcatatccaaggaaccgccttcatgattcagggctccctactcgtgacatgtgaacataacctgagctaccagacgaagcagaaacggcacgagtatggtgagtgcctcgtgtatcgcgtgggggagggccaagcagtgtacgaagcgaaagtgatcatacgggacaaagatctcgacatagccgtgttacggatatcagatgcaccagcaggcttagagcactttaccctcgaagagacaagggaaccaaacatcggagacagggtcgcaattctgggcttccctaatcacaagaccgggccatacgtcggcatcctgaagtgccgcgtgactaataagtaccccctacataacgtgcagcattctgaagttgataaaactttgtacgccggaaattctggtggccccgtaatcaacagcagctaccacgtagttggaatcgctgccaaaggagccgagggcaatcccaacgggaagaattcatttatccgagtgaccgaactcgttaaatacctggagaagagtggatttgaaatgtga

SEQ ID NO: 7856 - RNA, 1692 nt, synthetic construct
  source 1..1692: mol_type = other RNA
atgaacggcggcttctttctcaactttctgtcccttagccccagtacatcacctgcggagctggcgcaacttctgggcaccgactacggcaaaataaagcgtctctactatcgcggagacaggcagcgacactacctggccttcgacattcctaaaaaaaatggagggaaacggcgaatcctggccccgtctgacaaattgaaaactctacagagtcgattggccagtctcctcaaaaaaatctacaaacccagagagcctgtcaaagcattcttagatggcggatccattgtctccaatgcctaccctcattgtaggaagccctatgtgtttaacattgatctcgaaaacttcttcggaaccattaccttcgccaggataagggggatgcttataagcaagccctactcactgacacccgagacggctactgtgatcgctcatttagctaccattaatgggatcctcccacagggggctccctcttccccaattctgagcaatatgctgtgcgcaagtttggacagggacctctacagccttgccaagcggaaccgcgcagtgtacaccagatatgctgacgacattacactcagtttctactgtccagcggaatttctgcctccgggagtggtggagtattcaatctctaatggcaagcctaaccattattactcgcggacaggtcaggaactccagagcttggtgagacagcacgggttcacaatcaactttgataaggtacgactccagggacccggtgagcgtagaaccgtgaccggcttggtgaccaaccagaagcctaacgtaccaagaccctacattcgcaagacagccgcactgatccattccctggaaaaaaacggcgtggaagctgccaatgcgatctataaacaaaagaacccaaatagctccggagtactcgagagccacctgcagggtcgcctactttttataaagcaggtggtgggtgagtcttccgtcgtttatagacgcctagcccaaagatacaacatgctgcccattcggagcaaggtccccaacgcacctatcgcaactaccgaagactcagataattttaaggtcggggagttcattaagactaaatgctgggtcacagaaatctcggaaaggattgaggataacctggttcagattcaggggaccgcctttatgatccagggcgggctgatcgttacgtgcgaacataatctgagctaccagactaaggagcgtcggcacgagtatgatgaatgcctggtgtaccgggtaggagaggatgagggagtctacgaggcccaggttatcatccggaataagtatttagatctggctgtgctgaagatcaaaaatgcacctgacgatttagagcacttcacactggaggtcactaaggaaccaaatattggagatagggttgccgtgctgggtttcccaaaccacaagacgggctttcacgtggggatcttgaagtgtcgcatcaccaataaatatccgcttcacgacgtgcaacactctgaagttgacaagactttgtatgctggtaattcaggcggcgccgttatcaattcttcttaccatgtggtaggagtcgccgctaaaggggcagagggcaatccaaacgggaagaacactttcataagggtgtccgaactaataggctatcttcaaaagtcaggttttgatatgtga

SEQ ID NO: 7857 - RNA, 1695 nt, synthetic construct
  source 1..1695: mol_type = other RNA
atgaacggcggcttcttcctgtccctcttccagctgagttcttccacaacgccaggcgaactcgctcaactgctcggcacagactacggcaagatcaaaagactttactataccggtgatatgcaccggcattacctggcctttgatatacccaaaaagagcggcggtaagcgccgcattcttgctccgagcgaaaaattgaagacactccaggcccgactggccaccctgctaaacaagatttatactccccgtgagcccgtgaaagcttttagagaggggtcgagcatcgtagcaaacgcctacccgcattgcagaaagaagtatgtgttcaatattgacctggaaaatttctttggaaccataacgttcaggaggattagagggatgctgataagcgagccttactcactgtctgcggagactgctagcgttatcgcccacttggcaactgtgaacggcattctgcctcagggggcaccatcctccccgatattaagcaatatgctttgtgccagcctggatagagacttgtattccttggccaaacgcaatagggctgtttatacccgttacgccgacgatattactttcagtttttacagtccagcagagtttcttccccaaaacgttgtggagtattctctcagtaatggaaagcctaatcactactactccaaggtgggacaggagttagaaaccatcgtgcgccagcatgggtttacaattaatctgaccaaggtacgactacagggaccttcagagcggcgtatcgtcacaggccttgtcactaaccaaaaacctaatgtgcccagaacctacgttcgcaaaacggctgccctaatccactcaatagagaagaatggtgaggaagccgcgaacgctatttacaaaaaaaaaaaccccaactcctctggaatcttagagtctcacctgcaggggcgactcctgtacattaagcaggtggttggcgaggatagcgaagtctatcgcaggctggcccaaaggtacaatatgcttcccatcaagtccaaagtgcctaatacacctatcactaccactgaggacagtgacaacttcaaagtgggtgaattcataaagtcaaagtgttgggtcaccgaggttagtgaaaacattaatggaaagttggaacagattcagggaaccgcgtttatgatccaagggggcttgctcgtgacatgtgagcacaacctcacctatagggacaaggataacaagcggcatgagtttaatcagtgttgcgtctatagggtgggggagggagaaggtctttatgaagccaacgtgatcatccggtgcgagaagctggatctcgctgtcctatctattaaagaagctccaacaggcctggagcatttcaccttagaagtcacacgagagcctaacatcggtgaaagagtagccgttctgggatttccaaatcacaaaactggtagccacgtgggcatcctgaaatgccgggtcacaaacaaatatcccttgtatgaaatccagcactcggaggtggacaagactctctacgcagggaactccggggggccagtgatcaattcatcataccatgtcgtgggggtagcagcaaagggagcggagggcaacccaaatggaaaaaacacgttcatccggatttctgaactgatcaaatacctgcagaagaagggctttgagatgtga

SEQ ID NO: 7858 - RNA, 1695 nt, synthetic construct
  source 1..1695: mol_type = other RNA
atgaatggtgggttctttctgaacttcgtggccctgaacccaagcaccactccgatcgagttggcggaacaccttggaaccgattacgggaaaatcaaacacctatactaccggggagggatgctcagacactacctggaatttgaaatccccaaaaagaacggcgagaaacggaagatcctggctccctctgacaaattaaaaactctccagtctcggcttgcgggccttttgaagaaaatctataacccacgcgagccagtgaaggcttttagagaagggagctccattgtagccaatgcatggccccattgtcgtaagaagttcgtattcaacattgatctggagaactttttcgggactattaccttctcacggattcgcggcatgctgatcgcaaaaccctacagcctaacccctgagacagctacggtgattgcccatctgacgacagtgaacgggattctgcctcagggagcccccagctcccctatcctgtcaaatatgctgtgcgcttcaatggatagggtgctgtactccttagcgaagcataatagagccgtctacactcggtatgccgacgacattacattttctttctattgtcccatcgagtttatccctagcagtatggttgagtctagcgtcagtaatgaccgaccaaatcattattactctaaggtgggctacgaacttcagtcagttatagaccagcacggatttacaatcaacacccgcaaggtgaggttacaggggcccggtgaaagaagaactgttactggattggtcacgaatcaaaagcctaatgtgccccggccttatatccgcaagaccgctgcactgattcattccatcgagaagcacggtgagcaggcagccaacgcaatttacaaagagaagaatcccaacacaagcggagttctcgagtctcacctccagggcaggctgctctttattaagcaggtcgtcggtgaaagttctgtcgtttacagaaggcttgcccaacgctacaacatgttgccaaccaagtccaaggtcccaaacaccccgcaagccaccgacgaagatagtgacaattttaaagtgggcgagttcataaaagacaagtgctggattacagaagtcgagcagaaattggacaatgacctggtacaaatccagggatccgcttttatgatccagggcggcttgctcattacttgcgaacacaatctttcgcacaagatcggagataaatggttcgaatttaacgagtgtttagtgtatcgtgtaggggagggcgagtccatgtatgaagctaaggtgatcatacgagataagaaactggatctcgccgtcctcaagatccaggagcctcctctggggctaaaacatttcaccctcgaagtgtcaaaagagccgaatataggcgagagggttgcagtgctgggcttcccaaatcataaaagcggtagccatcacgtaggtatacttaagtgccgactgacaaacaagtatccactgcacgatgttcaacacagtgaagtggataagaatttgtattctggcaattccggcgggcccgtgattaactcgtcatatcacgtggtgggagtggctgcaaagggtgccgaaggcaaccctcatggaaaaaacacattcatcagggtcagtgagctgattaaatacctggagaagtccggggtgatactctga

SEQ ID NO: 7859 - RNA, 1692 nt, synthetic construct
  source 1..1692: mol_type = other RNA
atgaacggcggttttttccttaatttcgtggccctaaatcccaatacatcgcctgatgaactggcggccttactgggtaccgactacggcaagattaagcacttttactataggggcgagatgcagagacattacttggcttttgatatccctaagaaaaacggagcaaaacggcgaatcttggctcccactgacaagctgaaaacgatacaggctcgtatcgcaaatctgctgtccaaactctatactccacgagaacccgttaaagccttcctggaaggcactagcatagtggctaacgcccgcccacattgtcgcaagaagtacgtgttcaatgtcgacctggagaacttttttggcaccatcacctttgcccgcgtacgagggatgctgattgccaagccatacagcctctcccctgagacagctaccgtgatcgcacatcttactactgtgaactcaatcctccctcaaggggccccctcctctccaatcttgagcaatatgctatgcgcatcccttgatagggatctgtactctctggccaagagacaccgctcagtgtataccaggtacgccgacgacatcacgttctctttctattgtccgatcgatttcgtaccagcagagctggttgattggagtgagagtaatggccgcgctaatcactatttttcccaagtcggatacgaactgggcagtgccatcgaaaggcatggcttcaaggttaaccagtcgaaggttcgcctgcagggacctcacgaacgacgcattgtaacaggcctcgtgacgaaccagaagccaaatgtgccgcggacctacattaggaagacagccgccttgatacattctattgagaaatacggcgttgaggccgccaacattgttttcagagaaaagaaccctaacagcaccgctaccgtggagtcccacctccagggacggttactctatatcaaacaggtggtgtcagaggacagcgaagtatatcggagattggcgcaaagatataacatgcttcccattaaaagcaaggtccccaatgctccacaggcgaccagagaggattctgataactttagagtggggaaatttgtcagggacaagtgctggatcactaatatagaagagtacaggaacggtaaattggtgatgatccaaggatctgcatttctgatgaaaggaggccttttagtcacatgtgaacacgtgctcagcgctatcgtcgatgactcaagggaagagtttaacgagtgcctcgtgtcccgtattggagatgatgaatccatttatgaggctaaggtgataattagaaacaaagagcttgacattgctgtactaaagattaaggacgcccccgcagacctcgagacattcacactggaggaagtgaaagagcccaatattggagatcgggtcgcggttctgggcttcccgaattttaaagaaggttctaaagacgttggcattctgaagtgccgtataaccaataagtaccctctcttcggggtgtcccacagcgaagtggacaaaactctgtatagtgggaacagtggaggtcccgtcatcaattcaagctatcacgtcgtcgggatcgcagcaaagggtgcagccgggaaccctcaggggaaaaatagtttcatccgggtgtctgagttacggaagtacctggagaagtcaggggccatctga

SEQ ID NO: 7860 - RNA, 1692 nt, synthetic construct
  source 1..1692: mol_type = other RNA
atgaatggaggtttctttcttaactttacgaccctcaacccctataccgcgccagaggacttagcaaccttgctgggcaccgactatgggaagattaaacatttctactatcggggcgagatgaaacgccactatctggccttcgagatctccaagaagagcggcggaaagcgtaagattctggctcctacagacaaactgaagactattcagggcagaatcgctggtctgctatcaaagttgtataaacccagagccccagttaaagctttcctggtgggccagagcatcgtagcaaacgcacgcccacattgtcgtaaaaaatacgtgttcaacatcgatttggagaatttctttggcaccattacctttcggcgtgtgaggggcatgctgatggccaagccttactcactgtcccctgaaaccgcttcggtgatcgcgcacttgactacggtggatgggctcttaccgcagggagctccatcttctccagtgatttcaaacatgatttgcgctagcctggaccgggagctttacagtctggccaagaggcatcgcgccgtgtacacacgctatgctgacgatatgacattcagtttctatacacctatccaatatgttcccagagagctcgtcgagtggtgtgagttggatggccgacccaaccattactcctctaaagtcggccacgagctagcagccgtaatagctactcagggtttcaagatcaatgaagataaggtgcgcctccaggggggtagggaaaggcagctggtgactggcctggtcacgaatcagaaacccaacgtaccgcgcccctacattagaaaaacagctgcccttgtgcacagcgtggaaaagtttggactggaagtgtcaacctctatatttaaggagaagaatccaaactctaccgcaaacatcgagacacacttgcagggacggctgctctatattaaacaggtcgtgggggaggaaagcaaggtctaccgacggctcgcacaacggtacaacatgctccctattaaatccaaggtgcccaacactccgatcgccacacccgaggattccgataatttcaagatcgggaagtttatcaaagacaaatgctgggttatcgagataaacgaggagataaatggaaagttagttagcagtcaagggtccgcgttcttgatcggaggtaggcttctggtaacctgcgagcatgtcctggccgaaaattttatcgatggtgagaggattgaggtcaacgaatgcctgatcagacgaatgggggacgaaaatatttacgaagccaaggtcataatccgatctaaggacctagatatcgcagtgctcaaaattgtggatccacctgcgggactggaggtgtttagtctcgaagacattaaggagcctaatatcggcgacagagtggcagtgcttggatttcctaattttaaagaagggagcaacgacgttggggttcttaaatgtaggcttacaaacaaatacccactgtcaggagtaatgcacagcgaagttgataagactctgtacagtggcaatagcggcggccccgtcataaatacttcctaccacgtggttgggattgctgcccaaggtgccgccgggaatcctgaaggaaaaaactcgttcatcagagtctccgaattaaagcggtatctcgacaagtctggcgccatatga

SEQ ID NO: 7861 - RNA, 1680 nt, synthetic construct
  source 1..1680: mol_type = other RNA
atggaagctttcttaaacctcattggccttactcctcacaccaccccccaggagctagcccagctgttgggaacagactactctaagattaagcggttatactataggtcacccatcacccgacactatcacgaatttaacatcccaaagaagaacggtgacaaaagaaagatactggcaccaagcgagaagctgaaaacccttcaactgcggattagtgcgctgctgaacaagctgtatgatccacgcgcaccggctaaagcctttatccaggggaggagcatcgtcgataacgccgcaccgcactgtcgtaaatcctttgtgttcaatattgacctcaacaactttttccccagtatcaccttcgggagggttagaggcctacttatggcaaaaccttacagtctgtcctccgagacagctactgtgattgctcacctgtctactgtgaatggaagcttaccccaggggtcaccatgctcaccggttatcagcaatatgatttgtgccgggctggatagggaattgtattcattggcgagggaacatcgcgccttttacacacggtatgctgatgatatcacgttttccttttactgtcctcttggctttatctctcgaaagattgttattccctccctcagtaaccagcacacgaaccattatgattcaaaggtcggcgagctacttaatgagatcatcatctcccacggattcacaattaatcaggggaaagtccgattgcagggatccaacgagagacaggtggtaaccggactcaccacaaatcaaaaaccaaatgtgcctcggacatttatccgcaagaccgccgccttaatccactctattgaaaagacgggccttgagcaagcaaatctcatattccgtgagaagaatccaaacagcaagggaacattggactcacatatccgcgggagactgctgtacattaagcaggtggtgagtgaggaaagcgtggtctacagaagactggcccatagatacaacatgctgcccatttcggcaaaagttcccaatcccgccatttctgccatcgaaaataacgagaacttcaagatcggagagttcataaaaaacaaatgctggatcgtgaatctgtgtgaagacattgatggcgatgtggttgtcctccagggtactgcatttacaataaagaatcgcctgctggtaacctgcgcgcacgtactgcagtattccggtaaggacttcgacgattgcgaaatcttcagggtgcatgaagctcaaaagactctaaaggccaaagtcataatccgtgacaaccaatctgacatcgctatcctgaagatcctcgagcctcctagcaatttggagccattcacccttgaggaggagaaagagcccaatattggcgaaagggtcgctatcctcggctttcctaacttcaaagaaggggccacaagcgtgggcatactccgctcccggattactaataagtatcctctgtttgcaccacccgtgatgcatagcgaggtggacaaaactctctacgccggtaattccggcggtccagttataaacagttcttaccatgtagtgggaatcgcttcaaaaggtgccgcgggctctcctactgggcagaacagcttcatacggatttcggagctgattaaaatattggaacgatacgaaaccaactga

SEQ ID NO: 7862 - RNA, 1680 nt, synthetic construct
  source 1..1680: mol_type = other RNA
atggacggagggacattcttgcttggcactctgggtcctacaactacccctgatgaactggcgcggatgctaggaacctcctactcaaagatcaagcatttctactacagtagggacatgggatctaattataggcagtttacgattccgaagaagaacggggaaaaacgcgtgattctggcacctgaaaattggctaaaaacactccagctacgactcgcgaaacggctccaattgctctacaagcccagaaaaggggtaaccggattcgtgaaaaattcaggaatcgctgataacgccaatctgcataaaagatcgcgatacctgttcaacattgatctgaaggactttttcccctcgataaaattccacagaatacgtggcctcctcattgcaaagccatactcacttatgccagagacggccagcgtgatcgctcatctgtgtacatttcggggttccctgccacaaggggccccaactagtccaattttatccaatatgttctgcgcatcactagacagggaactgtataccttggcggtccgacacaacgccacgtatagcaggtatgcagacgatattagcttttctttctattgcccactgcggagtctgccccctgaaatcgtcgtcacaagcgagagacagggcgagttaaatcactataaagccaccataggcgataagctgcgtgaggctatactgaggtttggctttgaagaaaacgaacgaaaggtgcggcttttgagccgaactgagaagcagctcgtcaccgggctggtgtcaaactgtaaggcaaacattgaccggaggtacgtacgctctaccgcggctatgattcactccctggagaaagacggtgagacagtggcaaatgagaggcgcaaggccaaacacccggacagcactactcccgtggctgcacacgtgcagggtaggttgcttttcatgcaccagattttgggtaaaaattctccagtttacgcccggctggccaatagatttaatgtgctgccactcaagtttaaagtgccccctcctagtctgagtaccagcgaacgcgaggcatctatagccgtaaacagattcgttagagctaagtgttgggttgtcgaagtagctattgacgtgcccggcgattgcatcatttcccaggggtccggcttcatgatcgagggtggactgctggtaacctgcgcacacgtgctggaggagaagggagtcttggtggacgagtgcgagatctatcacgtggatgatgatgcccagcgctataacgctacagtcctccatcgtgaccggaacgccgacatcgccctgctcaagatcgaagactgttccgagaatgagtactttcatcttgaaagcgatgaggagcctaatatcggggacagggtggttatccttggctttcctaacgttaagaacggcgccaaggttggcgtgctccaagcccaggtcagtaataaataccccctctacgatccggaaatcatgcattcagaagtggataagttactgtatcccggcaatagcggcgggcccgttatcaacgctagacaacgcgtggtggggatcgcagccaaaggagctgccggatctgctgagggccagaactcttttatccgcgtctccgagttattcaaggtccttaaagcggccgacgggttaaactga

SEQ ID NO: 7863 - RNA, 1680 nt, synthetic construct
  source 1..1680: mol_type = other RNA
atggacggtggtattttgatcaacgactgcctgaatcctagcacaaccccggaggacctagctttcatgctcggaacttcttacaacaagatcaagcgcttttactacgatagggacatgtccgcaaactaccggcatttcactattccaaaaaagaatggcgaacccagacacattctcgcccccgaaaattggttaaagacgctgcagataaggctggctaggcggctcaccctcctttatacacctcgcaaaggggttaccggcttcataaaagagagtgggatagtcgtgaacgccgataagcacaaacggtcttcgtacgtgtttaacgtggatctgcaagatttcttcccctcaattaattttcatcgcctgcgcggtatgttaatcgctaagccatattcactgctgccccagaccgctagtgtgatcgcgcacctgtgcacatacagagggtccctgccacagggggctccaacttctcccgtgctttcaaacatgttctgtgccagcatggatcgcaaactatatgagttggcgatccggcacaaagctacttattctagatacgcggacgacatcacctttagcttttactgtcccctgaggtatgtgtcaagtgcaatcgtgaaggcctctggcagacagggcgagctgagccactacaaggcaacgcttggcgacgagctcaagtccattatcaataacttcggatttgtagagaacgagaggaaggttcgactgctgagccggacagagcagcagttggttaccgggttgctcgctaacgccaaggccaatattgatagaagatacatccgtaagaccgccgctatgattcactccctcgagcgagacggcgagacagtcgcgaatgagaggaggaaggagcagaacgctgatagcagtacacctcttgcagcgcacgtgcagggcagactgctctttttacatcaagtccttggcaagacctcacctgtctatgctcgtcttgccaaccgattcaacgtgctgcctctgaaattcaaagtaccgccaccacagttaacgacttccgaacgcgaggcaattatcgcagtctccaagtttgtccgggccaaatgttgggttgtgcaggtcgccatcgacgtcaacgacgactgcataattgcccaggggtcgggattcatgattgaaagtggaatcctggtgacctgcgcccacgttctggaagaaaagggggttactgttgacgagtgcgaaatctatcaggtggatgatgacggccagaaactgacagcagaagtcatataccgaaatagagccattgacattgctattctgaaagtgcatgattgtggtactcaggagtttttccatctggaaaccgatgaggaacccaatataggcgatcaagtggtgatcttgggatttcccaatgtcaaggatggcgcccgggtgggagttatccaagcccgtatcagcaataaatacccattgtataaacctgaggtgatgcattccgaagtagacaagatgctatatccgggaaactccgggggacctgtgataaattctcgccaacgagtggtaggaattgcagccaaaggggccgcaggctctagcgaaggtcagaatagcttcatcagggtatcagaacttatcaaaatcctccctgcactcaaggagcggttgtga

SEQ ID NO: 7864 - RNA, 1677 nt, synthetic construct
  source 1..1677: mol_type = other RNA
atggggggggtattcttgctttctgatcgtctgggacctacaaccactgccaacgaactcgctgtgatgctaggtactagctacgctaagatcaagtacttttactattctcgtcccataggcgactgttataagcagtttagcatcccaaaaaaaagcggaggcaagaggctgatcctggccccagatgataaactcaagacactccaaacaaggctcgcaatacggcttgcagagatctataccccccggaagggagtcaccggttttatcccaggttccaacatcaccaaaaacgccaagctgcactccaggtctaagtacgtgttcaatattgacttggagaacttcttcccttcaataaagttctacaggattcgtggtctactgactgcacagccttatagtttgatgcctgagacagccacagtaatcgcccacctgtgcaccctcaatggcgctctcccacaaggggccccaacctctcccatcctctcaaacatgttctgcgcatccatggaccgcatgctttattcactggcagtgaagtttaaggcaacatatagcaggtatgccgacgatatctcctttagctttaagtgcccgctgcgcttcattcctgaggacatagtcaaggtgttttccagacagggcgagttgagtaactataaggcagagttggggagtgtgctgtcagtgattattgctgactttgggttcagcgagaacaaaaagaagactcggctgctgtcgcgatctgagaaacaaattgtcaccggcttggttgtgaacactaaggctaatgtggacagacggtacgtgcggaagaccgccgcgatgattcatagtcttgaacaggtcggggaggaagtgtccaatgagcgcagagccgaaaaaaccccgggaagcacgactcctcttgccgctcatgtccagggccggttactgttcatacatcaagtgttaggcaaaacctccccagtttacgctagactcagtaaccgcttcaacgtcctgccattaaaatacaaggttcctagctccatggtgcttactagcgaaagagaagcctctattgctgtaaataagttcgtgcgatcaaaatgttgggttgtcgaggttgcaatcgatatcccaggggattgcattatctcccaaggcagcggcttcatgattagcaaaaacatgttggtgacatgtgcgcatgtgctggaagagaagggagtgagggtgaatgagtgtgaaatataccaggttgataacgatgcggtccgccaccaggccgaggtactgtttcaggacttcaatacggacatcgcagtcctgaagctgctggactttcaggttgacgagttcttccacctggaggaaggtgaagaacccagtatcggtgatccggtcgtggtactaggatttcccaatgtgaaaaatggggctaaagtcggcgttatgagagcgcaggtgacgaacaaataccccctctcaaaaccccccgtaatgcactccgaggtggataaaatgctttaccctggcaattcggggggacctgtcatcaacgcacgacagcacgttgtgggcattgccgccaaaggagccgctggatcagccgaaggacagaattcttttattcgcgtgagtgaactgtctaagctcttagccgctaataaacccgcgtga

SEQ ID NO: 7865 - RNA, 1686 nt, synthetic construct
  source 1..1686: mol_type = other RNA
atgaacgggggtttcttcttaagctccgatcatctgggacctacaactacccccgatcagctagctactatgctggggaccgactacgcaaagctgaagtacttctattacagaagcggcatgcagcagcactacagagagttcaagattcccaaaaaaagcgggggtgtacgcactattttagccccaggggataagcttaaaacactgcagctgcggttggccaagaggctgacccggatgtaccgaccgcggaagagtgtaaaggcttttgtcgagggcacctctataactcataatgcagccgctcattgtggcaagaaattcgtgttcaatatagacctcaaggacttctttaccagcatcacgttcgcccgggtacgaggtctgcttatcgctaaaccctattccctgatgcccgaaacggccaccgttatcgctcaccttacaactgtgggaggcgtgctaccgcaaggagcccctagcagtcctgttctctccaatatgctgtgtgcgtccctggatagggacctttattcactcgcggtcaagaatcatgccgcttatacaaggtacgccgacgatatatccttttccttttactgccagatctcatacctgccatcagaactggttgtgacaactggttctagtgacaacagtaaccactataatagcttggcaggagaagaactcagccggttgatttctcgccatggatttcgcgtcaacgagaaaaaagttcggctgcaagcttatacagagaggcaggtggtgacaggcttgatcgtgaataggaagccaaacgtggaccgccgctacataagaaagaccagcgccctcatccacgctctcgagaagctgggggcagaagaggccaacgccgtacgaaaagtcaagcagccggactctacaacccccctggaggcccatatccaaggacgtctactgttcattaagcaggtggtgggactcgaaagtgaggtgtataagaggcttgctgatagatttaatatgttgcccatccagtacaaagtgcctaaaccagtctcggagaagttggaaaaggacctgaactttcgaatagggaaatatgtcctggacagatgctgggttgtggatgtgtgtatcgatgtccctggcggatgcgtcgtatcccagggttccgccttcatgatgaaaggccaactccttattacctgtgcgcacgtcctagcagagaagaaaattactgtcaatgagtgcgaagtgttcagggtagattcgccagatgagaggtacgaagcgaaagtgatctacagaaatgaccacgtcgatattgcaatcttaaagattcaggacggcctcgaaaattatgaaagcttcaacttggaggaggcagaagagcccaatatcggcgaccgtgtggtggttctgggctttccaaactttaaagaggggagtacgtctgttggggttattcgcaccaagatctcaaacaaatatccactggacaaacctggcgtgatgcactcagaggtggataagctcctgtaccctgggaactctggaggccccgtgcttgactcagccaatcacgtggtcgggatcgcagctagaggagccgcaggtaacgctgagggccagaactcttttattcgggtgtccgaattactcaagattctgaaagcccgtcaagttgtgtga

SEQ ID NO: 7866 - RNA, 1698 nt, synthetic construct
  source 1..1698: mol_type = other RNA
atggacggtgatatcagttctcctaagccaaccctggatagttccacgactcctgaacttcttgcaaccatcctgggaacttcatacggcaagattaagtacttttactatgggcgctcaggatcaagaaccgcgtccttctacacccgattcgaaattaacaaaaaaaacgggggggtccgggagatttatgcccccaacaaacaactcaaagtgttgcagggcagaattgcctcattgctctctaatctgtacaagcccaaaaagtatgtcaccgcatttgttaagggaacaagcctctacgataacgcaatcaatcacacaagaaagtcgttcgtattcaacattgacttgaaggacttcttccctactataacttttgcccgcgtccgcggccttcttatttctaagccttacagtctggacccatctactgcctctgttatcgcacatttgactactgtcaatggtcatttaccccagggagcaccaagttcaccagtgatctcaaatatgatttgtgcctccttagatcgccagctaaatagcctggcaaagcagcatcgggcgcagtatacaaggtacgccgatgacattacattttccttttattgtcccctcaaatatctccccctggaaattgtcaatacccaagccaaccccgagaagataaaccactacaacgctaggactggctcgaaactgcgtgaaataatctccaccaacgggtttattgtgaatccgggcaaggtgcggctgcaattcaaacacgagcggcaggtggtcaccggtctgacagtgaacaaaaaggttaacgtagatcgaagatatatccgtaaaacatctgcgatgattcatagcatagagagtttgggtatcgagggcgccaaatttttgaacatcgctctgaatccctccaaggagaatcctgatgaagccgccttcgagctggaaccacatatacaggggcggctcctgtttattaagcaaatcaagggcgagtcatgtcccgtgtacaggaatatggctatcaagtttaactccctgtctgaagagtacaaggtgccactcagcagccacgaaagcaaagacaatatctccattaatgcaaacgtcgtcgacaagtgctggatacttgagattgaagaaaccattagccaggggtctggatttatcgtcgaagggggactactggtgacatgcgcccacgttgtagctagtaaggacgatgctgataagcctgtggagtcctgcaccgtgttccgagtgagcaataaatctgaccagtataaggctatcgttgtgcattacgacaaacacagagacattgcactcctgaaaatcgaccatgatacacacaagttcccgttcttcaggatcgaggagaaaataccagtaaagcagaatgataaggtgtccgtgtatggattccccgattataaaccggcttccacgtacgtcgggtgtgtctgggccagggtagtgaacggttttatcgctagcgccgtgacatactatgaagtggacaaagtgctttactcgggcaacagcggcggacctgtgctcaacagcaatctgcacatcgttggcatcgctgccaaaggcgcggttgacggtcacgagctaaacgcctttttatgcaagagcgagctggagaaagttatcacgacctatagtgctctgcacaatgacgcatga

SEQ ID NO: 7867 - RNA, 1743 nt, synthetic construct
  source 1..1743: mol_type = other RNA
atggacgaaggttctctgccggaggaatctttaaaactgacatcagagagttcggtagacgacctggccgcaattctcggcacaacctatccaaagattaagtacttctactactcatcatcggtggcaggccactatagcaagttctccattgccaaaaagggaggggggaagcgtgagatccttgcccccgataaccatctgaaagtgctccaaaaacggctggcccaccagctgagcttcctgtacaagccaaacccacgagctaccgcctttctcagtaactcctccatagttcgaaacgcgtcatttcatacgcgcaagcggttcgtgttcaatatagatttgaaggacttctttccttccatcaccttcgctagagttagggccatgctgatgtccaaaccctactctctgacgcctcaaacagccactgttatcgcgcatctagccactgttaaggggaagttaccgcagggtagcccatgttcccccgtcataagtaacatgatctgtagtagcttagacatgcaacttagaactctcgcaaagaggcacaaggcaagctacaccaggtatgccgatgacattaccttcagtttctacgtgcccatgcagtatttgcccgaggatatcgtggtattggggggcgatgacggcgagaaaacccatcacgccgtgtcggtgggaactgcactgtctgaaatcatcaccaaaaaaggctttgtgatccaccctgggaaggtgaggctgcaacgccgcgatgagaagcaggtggtcacaggactcgttgtgaatcagatggccaacgtcgataggcggtacattagaaagaccagcgccatgatccacagcctctcaactttggggctggagactgccaacttaatccacaagtctaagagccctgacctgacctctaaactgagcgcgcatgtgtttggccgtctcctatttatccaccaggtgaaaggagtggattcaccagtgtatcggagactgggcatgcgatttaaccagcttgagtcccagtacaaagtacctctggccaagctgctggaatcttattctgatgctggaatgaaacacaatcagcttaacattcgccgctgctgggtgttggaaaatgaaaagtggggcacacaggctacaggatttatgcttgagaataatctcatgatcacctgcgctcatgcattcaattatgtgctcaaccccgaaattgactcagacgtggagtgttgtatagaacacgattgcaaagaggtttggttcgatgactgcacagcttatagagtaaatgaccgaagcatcaaatacacggtcaaggtgctttttctggataaacatcgggacttggctgtggtcagtttcagtgaaactaatgaaaagttcgagtactttaggctggagtacgacctgcaggcagaaattggggataaagtatccattctcgggtttccgaacttcaaagttggcagtacagacgtctttcgtttttgggctgctgtcagcggaaggtacgttagatccacaatagaatgcggctctattgacaaggtcgtctattccggcaattcaggcggacccttgatcaatagcaaccagcatgtcgtcggggttattcggcgcggtgctgcaggtgatccagagggtactaacgagttcgtatgtgcctccgaggtggcgaatgtgctaacgcaatatctttctaccctagttgtcgcacctgagagagtgtga

SEQ ID NO: 7868 - RNA, 1731 nt, synthetic construct
  source 1..1731: mol_type = other RNA
atggacgaaggatcctccgtggatgagtctctcagattaacatctgagtctgacgtggatgacctcgctaacattttgggcactacttatcccaagattaagtacttctactattcccgcagagtagcctcccattactcaactttcagcatccctaaaaagagcggcggcaaacgacagatccttgctccagataaccatctcaaagtcctacagaaacgtctggctcggcaactgtcatttctttacaagccaaatccacgggcgactgcgttcctgagcaactccagtattgtgagaaatgccagctttcataccaggaagaagttcgtttttaatattgacctcaaggacttctttccctcaattaccttcgcgagagtcagggctatgctgatttcaaaaccctacagtttgacccccgagactgccacagtgattgcgcatctcgcaaccgtcgacggaaagcttccccaggggtcaccatgttcgccagtgatttcaaatatgatctgcgccagcctggatacacagctgcgcacgcttgctaaaaagcataaggcaagttatacaaggtacgcagatgatataacgttttcattttacgtgcccatgttatacctgccggaggatatcgtcgtgctggatgataatgagggcggcaaaacgcaccacgtggtgtccgtgggacctgttctgtccgaaatcatctccaagaaagggttcaagatcaattccaagaaagtacgcctgcaacggcgggacgaaaagcaggtagtgaccggattggttgttaatcagaaggtgaacgtggacaggaggtacataaggaagacatcagcaatgatccacagtctgttcaccatcggggttgataaggcaaacattattcacaaggctaagagccctgaatctagcagtgagctgtccgcccacgtctttgggcggctgttgttcatccaccaagtcaagggggtggactctcccgtctatcggcgcttagcaatgcggttcaaccagcttgagactccttataaagcaccgctagccaagttcgttgaagtacacgaagacgccggcatgaagcataaccagctcaacattcgcagatgttgggttatcgaaaacgaacagtggggtacccaggccaccggctttatgcttgaaaataacctcatgatcacctgcgcccacgccttcaattacaaactaagcgacaaaattgacagcgacatcgagtatgctatcgaaaacaattgtgacgaggtgctgtttaaagattgcgtggtgtatagagtcaacgaacgagccaaaaagtattcggccaaagccatctttttggataaacaccgcgacctggctatagtcagtatagatcagacagatgagcgtttcgagttttttaggttggaagagaacctggaggtggagataggtgataaggtgtctgtcctcggtttccctaacttcaaaattggcagcaccgacgtgtgccgattttgggcagccgtctccgggaagtacatccgaagtacaatcgagtgcgggtctattgacaaggtcgtttattctgggaactctggcggaccactgataaatagcaatcaacatgtagttggagtgatccgtagaggagctgctggtgaccctgaaggcactaatgagttcgtatgtacatcggaggtgtttaaagtgctcaaagagtaccagagcaccctggtggtcggttga

SEQ ID NO: 7869 - RNA, 1731 nt, synthetic construct
  source 1..1731: mol_type = other RNA
atggatgaagggtcctccgtagatgaaagtctaaggctcacatctgagtccgacgttgacgatcttgcgaacatcctgggaacgacataccccaagataaaatatttctactactcgcgtagagtggcatctcattatagcacatttagcatcccaaaaaagaatggcggcaagcgccaaatttcggccccagacaatcacctgaaagttcttcaaaagcgcctggcacggcagctttccttcttatataagccaaaccctcgcgccaccgctttcctcagcaacagttccatcgtgaggaatgcaacattccacacccggaaaaagtttgttttcaacatcgacctcaaagatttctttcccagcatcaccttcgcccgtgttcgcgcgatgctgatttccaagccatattcgttgacaccagagactgccactgtgatcgcccatctggctaccgtcgacggcaaattgccccagggaagtccttgctcacccgtgattagcaacatgatctgtgcctctttggatactcaattgagaacgctcgcaaagaagcacaaggcttcatacaccaggtacgccgatgacataacctttagtttctacgtgccaatgttgtatctcccggaagatatagtcgtgctcgacgataaagagggcgggaagactcatcatgtggtgtccgtcggcaccgtgttaagtgagatcatcagcaagaaggggtttaaaatcaatagcaaaaaggtccggctacagaggcgagacgagaagcaggtggtcacaggactggtggtgaatcagaaggttaatgtcgacagacgatacatcagaaagacatccgctatgattcattctctgtttatcattggcgtggataaggctaatatcattcacaaagctaagtcacctgagtcttccagcgagctgtctgcccatgtatttggacggctgctgtttattcaccaggtgaagggggtcgactctcccgtgtatagacggctggccatgcggtttaaccagctagagacgccttataaagccccgctggctaaattcgtggaagttcacgaagatgctggcatgaagcacaatcagctcaacatccgaaggtgctgggtcatagagaatgagcagtggggtacacaggcaaccggtttcatgctggagaacaaccttatgatcacctgtgcacacgcgtttaactataagctgtctgaaaagattgacagtgatatcgagtacgctatagaaaacaattgcgatgaggtcctgttcaaggactgcgttgtgcaccgagtgaacgagagagctaagaaatactcagccaaagccatcttcttggacaagcaccgggatctcgccattgtcagcattgatcaaactgacgaaaggtttgaattctttcgccttgaggaaaatctcgaggttgagattggcgacaaagtaagtgtgctgggtttccccaattttaaaattgggagcaccgacgtttgtcgtttttgggcagcggtgtcaggcaaatacattaggtctactatcgagtgcgggagcatagataaagtcgtatattccggaaactcaggaggacctcttgttaatagcaaccagcatgtcgtgggcgtaattcgcagaggggccgcaggtgaccctgaaggaaccaacgagttcgtgtgtacttcagaagtgttcaaagtgctgaaagaataccagtccactttagtcgtaggttga

SEQ ID NO: 7870 - RNA, 1596 nt, synthetic construct
  source 1..1596: mol_type = other RNA
atgagcgcctattataggtctttctccatccctaaaaaatccggaggggtaagaaccatctttgccccatccaatagattgaaagtgcttcaagcccgcctgaaagtgcagctatccaacctttatttgccatcaccttgcgctaaagcctttctcaaggatacctctatagtgtcaaatgcgaatgcacacattcggaagaaattcgtttttaacctggatctcaaggactttttcccaaccatctcgttcgcacgagtcagagggctgcttatctctaagccttactgcctgaaaccagaaaccgcctccgtgattgcgcatttggccactattaacggcaatctgcctcaaggggccccatgttcccccgtcatcagcaacatgatgtgtagttctttagacagggaactgcgcgcgttagctatcaagcaccgagccaattacacacggtatgctgatgacatcacattctcattctatacgcccatggaatacttgcctgctgacattgtgatcgttaacgccggtaccctgaccagccatcacctggcaacagtcggacccgagctcctgaaaattatatccggtaaaggattccaggtgaattttagtaaggtcaggctccagcgccaggacgaaaagcaagtggttacaggactgctagtgaataagaaagtcaacgtggaacgaaggtacatacgcaaggtcgccgctcagatccacagcatgatgtgcattggtttggatgcagcgaacgctattcataaggccaacgatccggacgctaatactacactggaggggcacgtgttcggaaaactgctttttattaaacaggttaagggcgttgactcatccgtgtaccgtaggctagcaatgaagttcaatcagctcgacgccccctacaaggtcccccttgcgaagctcgaggaattttcgggcgacgccggcctgaagcacaatcagctgaatataagaaagtgctgggtactggagaacgaagactggggcactcaggcaacaggtttcatgctcgagaataacatcatggtaacttgcgcccacgccttcaactacaagttaaacgaggataatgactctgatgcagactacatgttcgagcacaacgtgactgaggtgtggttcgaggaatgtgtggcctatcgggctaacgaacgcagtaaaaagtacgctgccaaagtcctgtacatggaccggcatagagatgtggctatcataagcatcgttgatgctgatcggagatttgaattctttcgtcttgaggagaacattcaggtggaggtaggcgatcgtgtcagcgtctttgggtttcccaatcaaaagccaggctcaaccgacgtgtgtcggttttgggcagatgttaacgataggtatgtgcgctctatgatccagtgcgcaagtattgacaaggtgatgtatgctggcaacagcggaggcccggtactgaacttgaatcagcatgtggttggcattgtgaggagaggggcagccggagatcctctcgggacgaatgagttcgtatgtagtagcgagatctttaaagtgctcgaagacatgaacaaggttgtctga

SEQ ID NO: 7871 - RNA, 1668 nt, synthetic construct
  source 1..1668: mol_type = other RNA
atgagtaaactggactctgctattgatgttgacggcctggcttctctgctgggtacaagttacaccaagttacgccacttctactacaagccagatacaagcgcatattactccacgttcgagatcgacaaaaagtcgggcggcaaacgaacaatcatgtccccggaaaaaagactgaagaccctccagtcaagactgaaagtgctgttggagggaatctatgtcgcaaagaagcaggtgaatgcatttgtgaaggaccggagcattgtcaccaacgcccgagcgcacactaggaagaagttcgtttttaatatcgatctcgagaacttcttcccttccataacctttgcaagaattcgggggatgctaatggctaaaccttactctctgcagtcaggggtggcgacggtcatagcacacctggctaccgttcgtggatttttgccccagggcagtccctgctctcccattttgtcaaacatgatctgctcgtccctcgatagacagctactgacactggccaagaagcacaggggggaatactcacgctacgctgatgatatgaccttctccttttacgacgatctccagtttgtgagtgaagagattgtgaggtgtttaaagggcgacggacttagcaatcattaccactgcagagtgggcttttatctcgagtcagtaatcctcaagtccggcttcaaaatcaacgagagtaaggtccgattacagggccgttatgagcggcaaatcgtgactggtcttgtggtgaacaagaaggtaaacattgagcgccagtatatccgtaagacatccgccatgatacatagcatgtcttccgacgggctggacttcgccagagagaagtttaaatctaaggcgaaggagtcaagtgtaatgctggatgcccacctccagggccgcttgctgtttattaagcaggtcgtttcggttgactcacctgtgtataaacgattggccaaaaaattcaacctgctcgggcttaaatataaagtgccactcgggaaatccaagaatatcaggggagccgaaagcagaaggtattctaaatggtacgacgatcggtgctgggtgattgaaagcgagctgactactgccgacgtttacgactgcgcccaagggaccggcttcgttatcaaggacggatacgtcatcacatgtgctcatgtggttaagttcaacggagtcattgctaatgaaatccagctctttcgcgtaagctcccgcggagacgtgtgcaaggctagcgtcgtgatgtgtgatgaagatcgggaccttgccatcctgaggatactagatcctgccttacaagatcttccctactttgacctgagcgatactagtgcagatattggcgatggagtcgacgttctaggtttcccaaatgataaactgggtgccacgcatgtcgggcggcagaaagtaagcgtgcggaacaaattttctatatccgcagtaaccttctgtcaaattgataaagaactctatgccggcaatagcggaggtccagcacttaacgaagacggcgacttggtgggtgtcgtgactgcggggaatgatggagacggctataatgaccatagcaggttcgtgtgtatttctgagctgaagaaagtgctgcacttgcttatcggggtgaaggacgcttga

SEQ ID NO: 7872 - RNA, 1677 nt, synthetic construct
  source 1..1677: mol_type = other RNA
atgaagctggactctaccctctctgtggacggcctagcaagcctcctcggaacctcctacatcaagatcaagcacttttattacaagcccaatacctccgcctattattctactttcgaaatcgacaagaagtcagggggtaaacgcaaaattatgagtcctgaagaaagactgaaaactttgcagagacgattaaaactgctgctagagggagtgtatgtttccaaaaagcaggtcaacgctttcgtaaaagaccgatcaatagttactaatgcaaagtcacatacccggaagaaatttgtgcttaacatcgacctggaggatttcttcaccacgatcacctttgctagggtccgcggcctcctcattgccaagccctacgctttgcagccttccgtggctacggtgatcgcccacctggctactgtccacgggttcctgccccaggggtcaccatgcagtcccatcctctccaatatggtgtgttcctccatggacagacaactcttgagtttggcaaaagcacacagggcagagtattctcgttatgcggacgacatatcttttagtttttacgacaacctgcagttcatcagcgaggacatagtggagacagtaaagtctgatggactgcataatcactaccagtgtcagactggtcaggcccttgagagtatcatcctgaggagcggcttcaagatcaacgagagtaaggtcagattacaggggcgctatgaacgccaggtggtcacgggtcttgtcgtgaacaagaaggtgaacgtggatcgccaatacatccgcaaaacaagcgccatgatccattctatttctaccgatggtctagcattagcgcgggagaagtttaagtcaaaggtcaaagacagcagcgtgatgctggatgcccacctgcaaggcagactgctttttatcaaacaggtcgtaaccgtggatagcgtggtttataagcgtcttgccaagaaattcaatttgctcgaaattgactacaaggttccgctgggcaaatccaagagcgttcgtggactggaatcgcgacggtactctaagtggtacgatgaacggtgctgggtgatagaaagcgagctgtcaacagccgaggagttcgattgtagccaaggaacaggctttgccataaagggaggctacattatcacatgcgcacatgtggtgaaattgaagggtggcatcgccaacgatatcagtctctgcagggtgtcaaaaaggggagaagtttacaaggctagcgttattgtgtgcgatgacaatcgggaccttgctgtcctgaaaattgtagagccagcacttgccattctgccttactttgacatgtctgagacaattgcggatattggtgacggggttgacatactgggctttcctaacgataaactgggggccacacacgtgggccggcagaaagtgtcagtcagaaacaaatttgccatttccgccgtgactttctgtcaaatcgacaaggaactctatagtgggaattccggagggccagccctgaatgatgatggagacttaattggggtcgtaacctcgggaaacgatggcggcggcttcaacgatcatagcaggttcgtctgtatttccgaactaaaaaaagtactccaggatctggtggttgctgctaatgagcaggctttggcgtga

SEQ ID NO: 7873 - RNA, 1725 nt, synthetic construct
  source 1..1725: mol_type = other RNA
atgagcaaactcaaactgtgcaaatccgtcgacgagcttgctgccctgctgggtactacatacggaaagattcgctacttttactacctgcatcctacatctgagtcttactcgacattcgagattaagaaaaagagtggtggcgtgagggagatttcagcaccctccgacaagttaaaaactttacaggggagactcaaggtctttctgtccgaaatctatgagcccaagaaatacgtaactggattcgtaaacggcaagtctatcgtggcgaatgccaagcctcacacccgtaagaaattcgtctttaacctggacttgcaaaatttcttcccgagcattacctttgcacgcgtccggggcctgctcatctctaaaccttacagtttgaacagctccgtcgccaccgtaatcgctcacctggttacagtgaatgggaagctgccacaaggagggccctgtagcccggtgatatccaatatgatatgtagttcactcgaccggaaactgaaaacgttggctgtcaaaaatagggccgagtatacccgttacgcagacgacattacattcagtttttacgatgacttggagtatgtggcaagcgacatcgtacagattctgaagggcgacgagttgccaaatcactattttgccaggtgtgggcgcagcctggaacggttgattatcgatgcaggtttcaaggtgaactacttgaaagttcgccttcagggccgatatgaacggcaggtagtgactggccttgttgttaacaagaagcccaatgtgaaccggcagtatgtcagaaaaaccggggcaatgatccactcaatagaaaccaagggtctagaagaagccagaaggatccacagtgagaaaataattaagcaggagaagaaatccggaagcggcaaggaagaggagatcaaggttccacctgttgaggctcatatccaggggcgactcctgtttctgaaacaggtggtgggactcgagagccaagtctaccgccgactggctctcagattcaacttactgagactgaagtacagggtcccactgggagtgtcaaaaaacaagttttccgaagatttccggaaattcactaagtggtatgactcaaaatgctgggtggtagaagttgaaggcgagattagaggcgagtttgagtgcgggcagggctcagggttcatgattagtgatcaagtgctcgttacgtgtagccatgttctggacctcaagggagtgaagctagatgaagccaccgtgtatcaggcgtcgtccaggtctaggtcttacaaggccaacctcctatatcgggatgatcatcgcgatatagccttactgaaaatctcagtggacaaatccgaatttgattacttcgaccttgaaacatccgttcttgctgatgtgggggatgaagtaagcatcctcggttttccccaggataagctaggcgcccaatctgcgggaaaccagaccgctttcgtgagaaataaattccctatcagcggtgtgggctttgtcgaggtggataaggagctgtatgctggcaactctggcggacccgtgcttaatcaggacagccgtgtggtcggaatcgtgggggtcgggaatgacggtgaatattgcgatcactctcgatttatttgcgtgtcggaacttctgaaggtcctggagaggttcaaggcagcctccgtggacaagagtaaattagagccagcctga

SEQ ID NO: 7874 - RNA, 1701 nt, synthetic construct
  source 1..1701: mol_type = other RNA
atgactaagcttaattcaacgactgatgtggacggatttgctgccctgctggggacatcttaccagaacatacggtactactattatagcaaacccatgagcctctattataattcctttgagatcccgaaaaagaatggtggcgtacgggtgatcatggcgcctagtgagcagctgaaaactcttcaggacaggcttaaagtgctgctcgacgagctgtacacaccgaaatcgtcagccacagcgttcataaagggcagatctatcgtggataatgccaagcagcacaccaggaagaagtatgtgtttaacatcgacctgagtgatttctttacaagcatcaccttccctcgggtgaggggccttttgatggcaaaaccctactcactacaatctggggtggctacagtggtggcccatttgtgcactgtctctggcgtactccctcagggatccccttgctctccagtaattagcaacatgatctgttccactatggaccgacagcttaaggggctggcgatacgcaatcgggcacggtacagcagatatgccgacgatattaccttttctttctacgacgacatcaaatacatctccggtgaactggttgcctgtttaaagggtgacgatctgccaaatcactacttctcacgctgcggaaaagtcctcaatagcattattgaatcctgcggatttaaggttaattccagtaaggtgcgattacagagccggtatgaaaggcaggtggtcaccggcttggttgttaacaagaaagctaacgtcgagcgtgcttatattcgtcaaacctctgcaatgatccattctatcgagaaaaatggcctcgctttcgcaagacagagattttcagagaaaaatccccccgaccctaagtccggcaccaagctagtgctggatgcccatctccacggccgcctgttattcatcaaacaggtcgtgtctattgagagcgaagtgtataggaggctggccatgcgtttcaacttcctggatctgaactataagctgccactgggcgtgtcgaaaaatcatcgcgggatagaatttagaaagtccacgccctggtatgacaagaggtgttggatcgtggatacggagttcgacctagtatttggtcagggcagcgctttttttgttaacgacgagttcctgattacatgttcccatgtcagtgaatttgatggatgcttcgtagacgtcgccgaagtttacagagctgggtcacggggggataaatatagcgcaaaagtggtttaccgagatgtcgccagagatatcgccatactgatcattgacaccgatcgaccattagcgttcgagactttcgacgttgccaccaagatggccgacgtgggcgacgtcttgtccgttgtaggattccctaaagataagctcggggcacaacacgctgggaggcagagtgtcgaggtgcgcaacaagtttgcaagtagcggcgtgaaatactttgaggtggataaggaattgtacgcaggaaacagtggtggtcccgtcctcgatgccgacaacaacgttgtgggaattgtggcaaaaggaaacgatggcgactactgtgaccacagccgcttcatttgcatttccgaactggcctcagtcctccaagggtacgaaaagcaaaagcacgtggctccagtcgtggagttggaacttgagaaggcttga

SEQ ID NO: 7875 - RNA, 1677 nt, synthetic construct
  source 1..1677: mol_type = other RNA
atgagcaaactcaacagctccattgatgttgacgaactcgcaggactgcttggcacttcatacggtaagatccgttactattactactccaagcccatccctgactactacaagacgttcgaaatttccaaaaaaagcggaggagttcgggttatttccgcacctcatgaccagcttaaggtcctgcaggagaggttgaagatcctgcttgatgagctgtacacccccaagtcaagtgccatggcattcataaaggggcggtccatagtagagaatgctaaacaacacacaagaaagaagtttgtcttcaacctggatttgtccgacttctttagcagcataacatttccccgggtgcgcggcctattgatggccaaaccatattccctgcaatcaggcgttgccactgtcatcgcccacctttgtaccctcaatgggatcttaccacagggcagtccatgctcccccgtgttaagtaatatgatctgttctggtttggaccgccaactgaagagcttcgccatcaaacacagggcgaggtattctcgttacgctgacgacattactttctctttctacgacgatttgaactatatcagtcctgatatggttagtgtgctgatgggagatggcgtgtccaaccattactatgtgaaatgcggcaggccactggtgaccattatcgagtcgtgtggcttcggcattaatctgagcaaagtgcggctgcaggggagatacgagcgccagatcgtgacagggctagttgttaacaagaaggtaaatgtcgaacgcagctatattcgaaagacatcagccatgatccacgccattgagacgaagggactaggttttgcccgcgagagattcgccgcatcaaatcccccggttgatccggatactggggtgcaggtagttctggacgcccatctgcatgggcggctcctctttattaagcaggtggtcggtgtcgaaagcgaagtgtatcgcagattggccatgcgattcaacttcctcgatctgaattttaaactgccccttggagtgagtaaaaaccggcgaggtgtcgaatttaggagaagcactccatggtatgataaaaggtgctggatagtagagacagagctggacttagagtttgggcaaggctctgcattttttgtcgcagacaatgtgcttgtgacctgctcgcacgtctccgagtttaccggaagattcacatccgagtctgaggtctatagagctaatgctagagggaaaaaatataacgctggcgtggtctaccgcgataaagctcgggatatttctatcctcaaactcaacgacgaatctctggtgttcgaaaagtttgaaatctctacccgactggctgacgtaggcgatgtactatcagtgctgggtttccctaacgacaagcttggggcacagcatgctggccgtcagaccgttgtggtgaggaacaagttctcgatgagcggcgtacagtactttgaagtggataaggagttatatgcggggaactctggaggccctgtgctcgacgaggacaacaatctggtcggagtcgtcgccaagggtaatgatggacactactgtgaccacagtaggttcatatgcgtgtcagagctcttggtggtgctcgaagactacaaaaaggcgatcctgcaggtgagcgtgtga

SEQ ID NO: 7876 - RNA, 1665 nt, synthetic construct
  source 1..1665: mol_type = other RNA
atgacaatcccccgtctcaaggcctgtaccaatgttgacgatctggcttccatccttaatacgtcctacaagaagatcgcatatttctattacgaggtggactactctaagaagaggtactatgagaactttgagattcctaaaaagaacgggaacaagcgcacaattagcgctccactcgcacagttaaaaaaccttcagaagaagatcgcagtgctgctgggtgaactgtatatcccaaatccaaatgcccacggcttcatagcggaaaagtcaatcataacgaatgccaaaattcatacccgcaagaaatacgtctttaacgtcgatctgaacgacttttttaacaccattactttcccgagagtgttcgggctgctcactagccagccttatctaattaacgagaaagtggccagtgtgatagctcatttatgcacactcgacggatgtctcccacaaggagctcccacctctcccgtgatttccaatatgatctgccagaaactggatcgacaactcagtcgactggcattcacacacagagctgtctatagccggtatgccgatgatctgtctttctccttttatgctccagaattgcacgtgtctggggagattgttgtgtttgagcagggggcaggcaactattacgccaaggcaggggagcagcttaataggattgttaacatcaaccgcttcagcatcaatcccggcaaaactcgattgcaggataggttcgaacggcagaccgtcacaggcttggtcgtgaataaaaagatcaacgtacccagacaatttgtgcgcaagacgtgtgccatgatccacagcatagaatcgtttggattaaagactgcacaggaaagattcctgatcgagaacccaaattcgaagtcatcaatcgacaacgtgatttttggcaggattctgtacatgaagagcgtcgtggggtattcctccgtggtgtacaagcgcgtagcgctgcggttcaaccagttggacctggagcgtaaagtgcctctctccagttcaaaggacggtaagttttccgccaaatacctgaattgggttaatcggcggtgttgggtaattgataaccatgaaaccatagagcagggtagcggctttatgatggccgggaatcttctgataacatgtgcgcatgtggttggtaatgccaaagaaattgaggtgtacagaacctgcgataccgagaagtacaaggccactgtatgctacgtgagcccggacaaggccgttgacgtggctatcgctttgatccaaaatccccccacaaggtttgaagaattccatcacaaagaagagactcctaatatagaggttggcgacctgctgaccgtcctgggattccctaaatataaagacgacgcaaaaaacgtctggatcaataaggccagcattgtcaaccagattaagagttcttcttcactcattggctaccttgataaggagctatacggcggaaacagtgggggccctgtgttaaacgaggatggatctctcgtgggaattgtcatcaaaggtaataaagatgccgaaggaatcgatgatatctatgttgaccactccgccttcttgcacctaagttacgtcctggcgtgcgtaaaatcacttaaagagaaatacgctgctgacgacatctga

SEQ ID NO: 7877 - RNA, 1650 nt, synthetic construct
  source 1..1650: mol_type = other RNA
atgtcaaagctgcaggagtgcctgaacacccaggatcttgccgatgccttaggaacaaactataagaagatcgcgtacttctactacgacgttgattatagcaagaagagttattacgagaacttcgagattcctaaaaagaatggcggctcacgggtcataaaagcccctgtggcaagactgaaaaacctgcagaagaagctgtcatttctcctggacgagatgtttgttcctcattcttgtgctcacggcttcgtgaaagaaaaatctatcgtaacaaacgcgaaaaaccatagcagaaaaaagtacgtcttcaacatcgacttgaataacttcttcaccacaatcacatttcctcgcttgtatggactcctgatctctaaaccctattcccttaacaacgatgtcgcttccgttatagcccacctctgtactgtcgatggatgtttaccacagggcgcccccacttcacccatcctgtctaatatgatttgtcgctctctggataggcagttgagacgcctcgcccgcttgcacagagccgattacagccggtatgcagatgacattactttcagcttttacgcgccagagtccttcgtgaatgaatctatcgttgtgttcaaagacggatctggaaattactttagcagtgcaggtaacacgctgaagaagataatcgacaagaacaagttcagcattaacgagtccaagacccgactgcaggaccgttttgagaggcagcttgtaaccggacttgtggtcaataagaagcttaacgtgccgcgagcatttattaggaaaacctgcgctattatacacagcatcgaaaatttcggtatcgcttcggctcaagcccggtacatcaaagagaacccgtgcagcatggcacgagtggagaatgttatctttggtcgcattctccacatcaagaacgttgtggggtttgattccgtggtctataagaggatcgcactgcgttttaaccagctaaacatcaacagaaaagctcccttatcgaatggcaagaatggggtggtgtccgctaagttttgcaattgggcaaacaggcggtgctgggttattgaaaacaatgatgaaatctcccaagggagcggcttcatgataagtgagaatctgttgattacatgcgcccacgtgatcggctccgccaaagtggtcgaggtcttccgggcaggtgaaaacattaaatatgaggcagtcgtctgttacactagtagtgacccccatattgacgttgctattttgaaaatcaaggacgcccctgcaccatttgaggaattccattacaaagacgaggccgaagctctcaatagtggggagacactcacgattctggggtttcccaagtacaagcacgacgccaaaaatgtatggatcaacaaagctctcctaataaatcaagtgaaaaccgcctcttcatcctacgggtacattgacaaagaactttatgcgggtaattccggcgggccagtactgtcagaaaatggcgctctcgtgggactggtaattaagggcaataatgacgccgccgaagtggatgacatatatgtggatcatagcgccttcctgagtttctcagatgtgctaacttgtgtgaaggcgctgaaggctaagtataccatgtga

SEQ ID NO: 7878 - RNA, 1653 nt, synthetic construct
  source 1..1653: mol_type = other RNA
atgaacactcccatccttcagcagtgccggagtgtagaccacctgagcgctgccttaggaactaactacaagaagatctcatacttctactacgatctggactctaccaagatctcatattatgaacccttcctcatccctaaaaaaagcggcggaacgcgtcaaatcctggcccccaagcctcaacttaaaaatctgcagaagaaactgcaggacctgctggaggacctgtttaaaccccatgcgtgcgctcacgggttcatttcggagcgcagtatctgtaccaatgctaccccgcatacgagaaaaaagtacgtgtttaacattgaccttcaggatttcttcagctcgataactttcgcacgcatcttcggtttgttgattagcaagccttattccatagaaaaatctgtggcctcagtggttgcgcacctctgcaccgtcaatggacacttgccacagggagctcctacaagcccgattatttccaacatgatttgtcggacattagatcggcaattgacacttctggccgtggccaatcgagcagcttactcacgctacgctgatgacatcactttctccttttacagcccacaggaacatacttcaagcgaactcgtcaaattcgagaaaaactcaggcaactatttcgcactacccggggaaattctgtcccagataatttccaggaacaagttcaagattaaccccaagaagacccggttacaggatagatttgaaaggcagattgtgaccggtctggtggtaaataagaaaatcaacgtgaggcgggagtttgtgcgcactacttgcgcaatgatgcactccatcgagtcctttggcttggccagttctcaggcacgatatgaaattgagaatccggggagccagagtaaggttgagaacgtgattctgggaaagatcctccacataaagaacgttgcttcttttgcctcccccgtctataaaaggctggccaggagatttaaccgactggaactaagtctcaaggcaccattgtcttccacgaatgaggacaactttgatgccaaatattgtaactgggtcaatagacgctgctgggtcatcgacaataacgacaccattagtcagggcaccggcttcatgatccaagaaaatttcctcatcacctgtgcccacgtcgctgatggcgcgaaggaactcgaggtgtaccgtgcctgtgacgagacaaaatacacagcctgggtgctcggtacctatcctcaggtagatgtcgccatcctgaaaattcagaattctccagggatatttgaggaatttcattccagagagacaccaaggaaacttaatatcggcgacaatctgcatgttctcggattccctaagttcaaatctaatacaaagaccgtgtggatcaataaggctaagttgattggccatacaatcgtccacaacagtaatgttaattacatcgataaggagctgtatggcgggaacagcggaggtccagtgttagatgaggacggcgcgctaatcgggattgtaataaaagggaacaacgatactgacaaggtgtcagatatatatgtggaccatagcgcatttctggactttcaacacgttctggattgcctcaaacttctgaaggagaagtactctaccacatga

SEQ ID NO: 7879 - RNA, 1764 nt, synthetic construct
  source 1..1764: mol_type = other RNA
atgccgatcacatctgcacagatcgctgccagtggaacccccctacggctcaaatgtaagctggtgatgaggaaagtcaagccaaaacggaggccaatgttggataccaaaaccacaccccacgaactggcagtgctgctcggtaccacctactccaagttgtgctacactctctataagaaacatactgacaacctgtacaaggactttactatcccaaagaagaacggcggggtacgaaaaattagttcccctaagcctattctgaagaatctgcagagcaagcttaagctgttactggatgacatctaccgccctcaccccagcgcatctgctttcatagctaacaggggacttatctacaatacaaccccgcacattaaaaaagcactcatcttcaacatcgacctaaagagcttctacggttctatccatttcggccgggtgaagggcatgctcatcagtaagccatattgcctccgtgaggacaccgctcaactcatcgcccacatttgctgctattacaagactattccccagggagcgcccacatccactaccatctctaatatgatctgtagacgccttgatcgcgagttaagcttccttgcgaaaaagaaccatgcatactacaccaggtatgccgacgatctgactttcagtttccacaaaatcaaaccaaatgagatctgtgccttcgaggataacatttggaagccttcggataggctgataaacgtgatttcaaacaacacctttaagatcaacaacacaaaaacaagaggggaaacaagccgatgcagacaagtggtgacgggtctgaaagtgaataccaaggtgaatgttgacagaaggtatatccggacgacaaaggctatgatccatagtctgtcccttgatatcgagtccgcgaacgagtacttttcaagcatacggaaaggagagaatgaagccactttggagacggtcgttgccggccgcatcaactttataggcatggttaaagggactgagtgctccatttatcagacgttggcacataaattcaacaacctgaatatcgacttgaaggtacctactcgcagtaatattgataccacgagccaaaatgacaatcagctcaagaccctagaataccgaaagcaggaaaagctcaagaagtgtatttgggtggtgtcctttgacggtatagaaggcatagaactcgatgagcaactgacccagggcacagcttttatgattaagggacagaagttgcttacatgtaatcacacctttgagaaagccgggaatccatcttattgtttaattcacaggatcgatgactccagcattaagtattatgcccgcctggtcaaagttgacaaacatagagatgttgctctcctggaaattgactcgaaagataaagtgttctttgaccacctggagatttacttcaatgacgatatgcactcaggctataaagtcaacctagccggctttcccgagtacagatcagggcatagagacgtaacagtgcttcctagcacaataatacggcatgaagtggtcagtctggtaaagcactactcagtgaacagcgaactgctgggggggttctcaggcggtcccgttttgaacttatataatcaggtcgtgggcatggtcactaagggacgttacatttcccacgacaaagatgccggacagtccactctggaagggagcaattcttttatctctgccgtcgagtttgagaaattcctgggatcatctaactga

SEQ ID NO: 7880 - RNA, 1641 nt, synthetic construct
  source 1..1641: mol_type = other RNA
atgctggacagcaataccacacccagacgcctagctgcactgctcggaacaacttaccctaacctttgtctcacagtatacaaagtacggccaaataacctttacacgacctttaaaattgccaagaagtctggcggagttcgcactatcgctgcccccgataaaagactcatctatttgcaggacaagctgaaaagtctcctcgaggaattgtattcaccacatcccgccgcgactgcattcatcaaagacagggggatcatttataacgcgtccccgcacgttgggaaagcccttgtttttaacatcgatctggccgatttttacggccacatcaatttcggacgtgttaggggactgctgtcagcacctccctacaatctgcgccctgacactagccagctgatcgccactatttgttgcctcaatggtagcattccgcaaggtgccccaacctcaccagtcctatctaatatgatttcacgtcagctggatagacggttatcccttctagcaaaaaagaaccatgcattctacacaagatacgccgatgacatcacttttagctttagaaacaacaacttcgaaggtgtttgcttttcggtcaatggcgttttccagccatcctccgagctcataaagctggtcgaaaagtcaggcttctaccttaacaagcaaaagacccgtggggaggtgtctcgatctagacaggtggtaacgggactcaaggtgaataagaagataaacgtcgatcggcgatatgtccgcacgaccaaggcaatgatacatgctttgagcggcgacattgatacagcgaacgtggtgttttggcagaaattccccgaaaaagagcccaaacgccttgaaaatgtggtggccggaaggattaatttcatcggcatgatcaagggagtgaattcgagggtgtatcaaatgctggctaaaaagttcaaccgattgcctttaaagcaaaaactgtctacccggacgagcaagctggtggacaccgaccaaaagtatagagatatggcaaagcagagggagctgcagaagtgtgtgtggattttagacttcgaaggggcccctaacgtgaccgacgaagctgaattcatccagggtaccgcttttatggtaaaggggcagcaggtcctgacctgttcccacactttcaacaaagctgatgatgcagagtactgctatatcagtaggatccatgagcgaggggtgaagtatctgatgaaagttgctaaacgctgcaaacaccgggatatagccgagttggagtttgtcaatgagcctaacgagatattccagtccttggacatttaccataaggaagaaatgttcccaggttaccaggttagcctggtgggctttccggactatatgtccggccacacaaccgtgagcgtcatcaatacttctatcactagccacgtgaatatcagtacagtggacaattatgaggtcgacgccgaaattggggctggctactccggtggccccgtaattaacgatttccaccaggtgattggcatgatagtcagtggacggacaacatcagtggactttgagacacaggagagtgcactgaccgggaggaacgccttcatttctgcccaccattttctccaattttga

SEQ ID NO: 7881 - RNA, 1635 nt, synthetic construct
  source 1..1635: mol_type = other RNA
atgataagcagcaaaaccactccaagagcccttgcgcattccctgggcaccacactgcccaaactgaattacaccgtctacaagctgggcgtcagcaggttctacaatgagtttgaaattgagaaaagcgacggcggaaagagaaccataaatgcacctgaggggcgcttaaagatcatccaggataggctcaaggttctgttggacgagctgtattcgccacaccctagcgcttctgcttacatcaaagagcgaggtatcgtctacaatgcaaagaaacacgtcaaaaggaaggtggtggctaacatagatctgaagaactttttcggaactattcattttgggagggtgcggggtgtacttattgccaagccctattgtttgagggctgacaccgcgactctaatcgctcacatttgctgcctggacggggtcctcccccaaggaagtccagcctctccggtgatatccaacatgatatcaagacgtatggatcgggaactctctcttatggccaagaaaaacagggcccactattcacgttacgccgatgatattacgttctcctttaagagcaagaaagacacagagttgttcgatttcaaaaatcggagtgttgggtcaaaaatcgtacggtgcatagaggagaatggcttctcgcttaacgaacggaagactcgaatccaattctcctctgagcgccagacagtgacagggcttaaggtgaataagaagattaacattgaccgccgctatattcgcgagacaaaggccatggtccactctctctcctttggctctctggaggcaaataagaagttcatcgacaaatacggcagggatgatgcacagttggaagatgtggtatttggacgcgtggcctacatcggcatgattaaaggccgtgattcttccgtgtaccaggggctggctagaaaatttaacaacttagattgggacaggaagttgagcattaatcctggcaagatcctcaaggatttggaatggtccggcttcgccttcaaggccgaaggctatagagctcgattcgagcaatgtgtctgggttgtttcctttgacggggtgaaaggactgggtctggatgaaatgctggtatccggctcagcatttagcctgaaaggtggccgcgttcttacggcatttcacgtgtttgtgaaggcaggcatgccggactattgttatctctaccgaatcaataagcccggaaaaaagtacaaagctaagatcaaaagcgtgtatgaagacagagacgtcctcgagctaaaattcgatgaagaggtggagaatattcggtatctggacgttgccccaaacaaattcccaggtaccggttacgaactggcagttctggggttccctcagctacatcccgggcaccagtcactcactatcctgccttgcaaggtcgtcaacacatatatcggaagtacctttagatattgtgaagtggacgcccagattagtggagggaacagcggaggtccagtggtgaacgcctacatgcaggtagtgggaatggcgttaagaggggtggacgttgcttcacatgaggaccgggtggaactcgaaggaagtaacgcctttatcagtgcggagcatttcccttctccctga

SEQ ID NO: 7882 - RNA, 1635 nt, synthetic construct
  source 1..1635: mol_type = other RNA
atgatacagcctactacctctccgtccgatttggcatcgctgctggggacaacacatagcaaacttaactacacactttattccttccccttggaatacagttatacaaagttcaccatcgagaagaaaaacggctccagccgacaaattcgggccccaaatcccaaacttaagatcattcagaagagactgaaaaaccatctggagaagttatatcgccctcattctgctgcgaccgccttcgttgctggtaggggcatcgtggataacgcaaagcggcatataaagagggagtgcgttttcaatctggacctcgattcattttttgactacatccacttcggcagggtaaagggcctgctggttgcccccccctataacctgcgcgatgacactgccaaactgatcgcccacatatgttgtctgaatggacggctaccacaaggggcccctacgtccccacttattagcaatatggtggccagatctctggaccataagctcagtcgattggccaaaaaatataaggcgagatattcacggtacgctgacgacatcactttctcgtttcaaaagaaaaccgacggaataattttccacgtggatgagggagttgtcaagccctcagtggaattggtcgacattatcgagaatgccggattcctgatcaatatccgcaagacgcgagtacagtactacgaccagaggcaggtcgtgactggactcaaagtgaatagcgtcgtgaatgtggatagaagatacattaggactacccgtgcaatgcttttctcccttagtcagggggtggagagcgcaaacatgaaattttttgaaaaggtaggcggcgaccccgaaaggcgcttggaaaatgtggtgcacggtcgcattgcattcatcggtatggtgaaggggagaggcggcagcgtctatcagacactgagtcagaaattcaatgacctcggactggacattcagtctccaattggacccgcagaaatcaaagacgaactggagcagaagctccacttttattcatacaaaaaccgggctcgtctacagcgctgcgtgtgggtggtcgatttcggtggggttcctgggttagatatggatcaagagctcgtgcagggaaccgcttttatgattggcggccagcggatcctgacttccgcgcatacatttgcaaaggccggcaacccggttcaatgtaaattatacctcgttaacgagccaggaaagaagtacagcgctgaggtcgtcaacataaacaacaattccgatattgctgagttgaagctcattaacgtggatggttcatttccggtcctcaaggtggctcctaacctgaaaacgaacaccggttataaggtatctatagcaggctttcctcagctacagccaggacaccagagcgtagccattactccttgcacagtgatcaataccttaaatatcagcagtcaccgttacatcgaagtagacacacctatccaaggggggtcttctgggagtcccgtgctgaacgtctacatgcaggtggtgggtatggccgccatgggcgtttccgtcaccaaagatggcgaagacgtgcagctggaggggaccaatgcgtttgtctcagctgttcacttcccatga

SEQ ID NO: 7883 - RNA, 1758 nt, synthetic construct
  source 1..1758: mol_type = other RNA
atgaataacaagccctcgctgagcctgttcgacgacccccaggtagcttccttcttggctgccaacactaaaatggagctggcggccgccataaatgagccatatcggaggttcacttatttattgttcgccatcgatcctgaccgccaatacaagtcctttgatattgccaaaggaaacgggaaaagcaggattattgacgcccctgtgaccgccctaaagaatatccagaagaagatctgtgctattctgagtaaaatctacgtgccaccttatccagctaatgcctttattttcggccggagtatagtgaccaacgccatcccccacgtgaaggctaagtcagtactcaagctcgacctccaggactattttcccagtattcactttggacgggtgagagggttattcatggcacctccgttcagcttcaatcaggatgtggcaacaaccttagcaagggcttgctgcaagggtggctgtttgcctcagggggcacccacatctccaattctctctaacatgatctcacttaagatggatgcccaacttaacaggatcgcgaaaagcaaccgatgtaattactcccgctacgctgacgacatcacattcagttctacaaaggacatttttccactcgtcgtcaccaacgcaaagggtttgtatgaaccagcccaggaaatcacagactgtatactgcggaatggctttgctgtcaacacctacaaaactaaattcatggtaggcagagactcaaaattcgttgcgggtataaaggtcaattcaaagattaacaccagcaggaagcatgtgcgagctgtccgggccatgctgcatgctctagagaaatttggacccgaagcctctgtcgccgaacatctgcggcggtggagacgtagacacactatctctagccccactaacttcctgcagatactgaagggcaaaatcagttttattcgtatggtcaaagggggcggagatctgtccgtcgtgcgtcttgaaaaccgcctcgacgagtggatgtccttatactccggagcccaggtggatgtccgcagggtagaaacgctgatcgcacaggatgatacgtatcacgctgtggtttacacagaaggcaagacggatgcactccatttgagatatgcactcaagcgccttcagaaacttagcttgtacaacaacatgaagctgatcttctatgatttccctccggataccacatcaggcgaaaccgagcttaaaaaaatcctgggcaccgctaaagttgccaataataccggcaagctgaagattgttatctttgacagagacgtgaccggagacgtgggcgattctaggcgcccaaaatattggggttctaatgtatggtccttcaaactgccgtgccccggtcctaggactctgtacgagaatgttatcagtattgagcattactaccctgacaagatcctgtttaaacaggacaacgaagggcggagactattttttgtggatgagtttgatgccaatactctcgcacacaagagcattgcgggggttatatgccgaaaggatgtgattggtaaaaagcgacccggagtggtgatctgtgagggagtgagagatcaacaggggaaatcactgacactgagcaaatccgacttctcgaagaatatagcacgagggcaatttttcgtttctgacactgagatgctcgagttcaagccagtgttttccgcgattgagcgcctgatcaagaaaaaccactactgctga

SEQ ID NO: 7884 - RNA, 1062 nt, synthetic construct
  source 1..1062: mol_type = other RNA
atgaaggacagctctaaactggtgttgaccgatactcctgagtcactgcgtgaaaagttctattctcttaagcaagccagtgatatcgccgacctgttgggcgtctcatacccgaggcttgtatatcacatctacgtagtggatcccaaccaaagatacaccactttcgaaattgcaaaaaaaagtgggggagtccgacagatctccacgccaatcactgccttaaagatcattcagagaaagctcaaccaggtgttacaggcagtctacgagattaagcctagcgttcatggcttcgtgatggggaagaacatagtgacaaatgctcaggcacacgccaagaagcgctacgtgtttaatatcgatctgaaggacttcttcccatcgatcaacttcggcagggtgaggggcatgttcatggcaactccgtatggcttgcaccctgaggtcgccaccgttctagcacaaatctgttgccacaataaccagctaccccagggggctccaacatctcccataatcacaaacatgatttgcgctaaaatggacagccaacttcagagactggccaaagagtgtaaggccacttacaccagatatgctgacgatattaccttttcaacaaccctcccaaagtttcctagggacctggcttacattgttaacgacgagaacgaggaaaaactgaatgtcggtgacaccctcatccagattatctctgaaaacgggtttgaggtgaatgagtccaaagtgcggctccagataaaaggtaatcaccaagaagtaaccggactgacgacaaatatattccccaacattgatcgcaattatattcggcaagttcgggccatgttgcatgcctgggcgaaatttggtctggaagacgctgaaaaagagtatcagcgcaagcatgaattccgatcccgctttaatcagaaagagcagcattcctttaagcagattatcctcggaaaaattgagtttatcggaatggtgaagggcaagaacgatacaatctacaagaagtacatgcagcagtataaaatactggcgagcctgtga

SEQ ID NO: 7885 - RNA, 1017 nt, synthetic construct
  source 1..1017: mol_type = other RNA
atgcgcgaaaagttttattcactcaaacaggcaagtgacattgctgacctgctcggcgtgagctaccctagactcgtgtatcacatctatgtggtggatcccaatcagcggtacactacatttgagatagctaaaaagtctgggggtgtacgtcagatcagcacccctattaccgccctgaaaatcattcagcgaaagctgaatcaagtcctccaagctgtttatgagatcaaaccgtccgtgcacggctttgtgatgggtaagaatattgtgactaacgcgcaggcccacgcaaagaaacggtatgtcttcaacattgatcttaaagacttcttcccttccatcaatttcggaagggtgcggggaatgttcatggccacaccttacggcctgcaccccgaagttgcgacagtcttggcccagatctgctgccacaacaatcagttaccacagggagcccccacctccccaatcataaccaacatgatctgtgcaaagatggattcacaactgcaaagattggctaaggaatgtaaagcaacgtacaccaggtatgccgacgacattactttctcgacaaccctgcccaaatttccacgcgatcttgcctacattgttaatgacgagaacgaggaaaaacttaatgtcggagatacgctaattcagatcattagcgagaacggttttgaggtaaacgaaagtaaggttcgactgcaaatcaaggggaaccatcaggaggtcacagggctgactaccaatatttttcccaatatcgacaggaactatatacggcaggtgagagccatgctccatgcttgggcaaagtttggcctggaagacgccgagaaagagtaccagcgcaagcatgaattcaggtctagattcaaccagaaggagcagcatagctttaagcaaatcatcctagggaaaatagaattcattggcatggtgaagggcaagaacgatactatctacaaaaagtacatgcagcagtacaagatattagcttctttgtga

SEQ ID NO: 7886 - RNA, 1206 nt, synthetic construct
  source 1..1206: mol_type = other RNA
atgatttccgttgtagaccctgcgactgtgtacttcaccgtgtcctttaacccagacgtgcatcccgacaattgcttcatactgagtagaatctccgagaacattccagcatcggacatctttttgctgagcacgacggataaagtcccaaaaaagtcacatttattccttcagcgctctcccgaactgctccgagaaaaattctactctctgaaacagcccgtagagatagctgatctgctagagattagctacagccggttaatctatcacatctacttggtgaccccggaagagagatacaagtcctttggaattcctaaaaaaagcggaggcatacgtcaaattacaacaccgataactgctttgaaaatcatccaatcaaagctgaaccaggtgctccaggccgtctacgatattaagcctagcgtgcacggtttcgtcatggggaagaatattgtgactaatgcccaggctcacgtcaagaaaagatatgtcctcaatatcgatcttaaggacttttttccatctatcaacttcggacgagttcgcgggatgtttatggccacaccctatgggcttcatcctgaagttgccacagtgctggcccagatatgctgtcacaataaccaccttccccaaggtgcccctacctcacccattatcagtaacatgatttgtggtaagatggatagccagctgcagcgtctggctaaagactgcaaagcaacttataccaggtacgcagacgacattactttcagtacaactctgagtcaatttcctagagacttagcttatatcacgaatgatgaagatggcgagaagctcgtgatcggcaattcactgctgaacattatcaacaccaacggcttcgaaataaatcagtctaaagtgcggctccagacccgcggaaatcaccaggaggtgacagggctgaccaccaacgttttcccaaatgtagataggacatacgttcggcaggtcagggctatgctccatgcctgggccaagtttggcctggaggcagcggagaaagagtacctttccaagtacgaattcaagaataggctcccacagaaggcaaagcccacttttaaacaagtgttgcggggaaaaattgagttcatcggggtcgtgaagggcaaggacgataccatctataacaagtttatcacccagtataacatcctaaagaagtggtga

SEQ ID NO: 7887 - RNA, 1134 nt, synthetic construct
  source 1..1134: mol_type = other RNA
atgcagaaaaatagcaagcttttccttacagaaacgcctgaggccttaaaggagaagttttattctctgaagaagcctaccgacattgccgacttgctggaggtgtgctactccaacctaatctatcacatatacgtagtcaaacccgaaaaacggtacaagatctttgatattcccaaaaagagcggtggcattagacagatcagtacccctattaccgccctgaaaataattcagcggaaactgaaccaggtcctacaggctgtttatgaaacaaaacccagtgtgcatgggtttgtttcctcccgcaatgtggttaccaacgcacagaatcatgttaaaaagaggtacgtgttgaacatcgacttaaaggacttcttcccatcagtgaattttggtcgggtcaggggcatgtttatggcaacaccatacggcctgcacccggatgtcgccactgtgctggctcaaatttgttgttataaccatgaattgccacagggagctcctactagcccaatcatcactaacatgatttgcgccaaaatggacggccaactgcaacgactggccaaagagtgcaaggctacatacactaggtatgctgatgatattaccttctctacctcccttagcaagctgtcgaaggatctcgcatatattgtcaacgaggaggaccaggagaagctgataatcggagacaccctcttcaagattataaaacagaacgggttcgagctcaatgacaataaagtgagactgcagactagaggaaatcaccaagaagtgacaggcctcacaacgaacgtattccccaatgtagacaggaattatgtgcgtcagatccgcgccatgctgcacgcctggtcaaagtttgggttagaggcggcagcgaaagagtacagtatcaagtatgagagcaaatcacgactcatcaataacgaaaagttggaattcaagcccgtcatccgcgagaagattgaatttctcggcatcgtggagggaaagaaagatcagctcaaattcaagaaggtgatcagagggaagatcgaatttctgggtatggttaaaggaaaaaacgatccggtgtaccagaagtacttcaacatataccagcaacttatcaagtctgtctga

SEQ ID NO: 7888 - RNA, 993 nt, synthetic construct
  source 1..993: mol_type = other RNA
atggatatcgcagatctgcttgaagtgtcctattcgcggctggtttaccacatctacctggtcgaaccagacaagcgctacaagaccttcgaaatctctaagaagtccggcggcattaggcagatttccacgcctattactgcgttgaagataattcagaagaaattgaaccaggtgctccagacggtctacgaaataaagcccagtgtgcacggtttcgtgacagggaagaacattgtcaccaatgcccaagcccacactaagaagaggtatgtgctgaatttagacctgaccgacttcttccctagtatcaattttggtagagtacgcggaatgttcatggccacaccatatggtctgcacccggatgtggccactgtgctggcccaaatctgctgccataacaatcaactgccacagggagctcccacgtctcctattgtaaccaacatgatctgtgcgaaaatggatagccaactacagaggcttgctaaagagtacaaggcaacctatactcgctacgctgacgatatcacattctcaaccaccctgcctaaatttcccgaggagctagcctacattgttgctgaagaagacgtggacactgtgtttataggcaacagattactgtctatcatcaacgacaacgggttcgaggttaataatcataaaaaccgactccaggtgaaaggaaatcaccaggaggtaacaggactcactacaaacttgttcccaaacgttgaccggaaatatgttcgtcaagtcagggctatgctccatgcctgggcaaaatttggccttgaagcagtcgagaaagattaccaggataagtatgagagtaagtcccggctctcaacaaagggcgagcccaattttcgacaggtcttgagaggcaaaatagagtttatcgggatggtgaaagggatcgatgacagcatttaccagaaatacctgaagcagtatcagctgctcagcacccttgtgattagctga

SEQ ID NO: 7889 - RNA, 993 nt, synthetic construct
  source 1..993: mol_type = other RNA
atggatatcgccgaccttttggaagtgagttatcctaggctagtgtaccacatttatctggtagaaccagacaaaagatacaaaaccttcgagatccctaagaagagcggaggcattagacagatcagcacccccataaccgccctgaaaattatccaaaagaagttgaaccaggttctgcagactgtctatgaaattaaaccgtctgtccacggctttgtcatggggaaaaatatcgtgaccaatgcacaagcccatacaaagaagcggtacgtgctgaatctggatctgaccgattttttcccatccatcaacttcggacgagtaagaggtatgtttatggctaccccctatggtttgcaccccgatgtcgccactgtgctggcacaaatctgttgccataacaaccagcttccccaaggcgcccccacatcaccgattgttaccaatatgatatgcgcgaaaatggacagccagcttcagcgattagctaaggagtataaggccacatacacacggtatgcggacgatattactttttctacaactctgccaaagtttcctgaggagctcgcttacattatagctgaagaggatgtggaaaaaatcttcattgggaacaggctcctgtccatcattaacgagaatggatttgaagtcaatcaggaaaaagttaggctgcagtcacgtgacgaccatcaggccgtgacagggctgaccactaatcaatttcctaacattgaccgcaagtatgtgagacatatacgggcaatgctccacgcctggtctaagttcggcctcgaggctgcagaggaacagtacctcacgaaatacgagaataagtccaaactaccaatcaaagacaaccctacgttccaccaggtgttacgcggcaagatagagttcatctcgatggtgaaggggaaggacgatccaatctaccgcaagtacatcaaacagtacaagaaccttgttagtttcagcaggatctga

SEQ ID NO: 7890 - RNA, 1089 nt, synthetic construct
  source 1..1089: mol_type = other RNA
atgcagaaggattcgcacctgatactcactgattcccccgagacactgcgtgagaggttctactcactgaccaagcccatcgatatcgcccacctattgggaattagctacagacgactcgtctatcacatctacctggtagaacctgaaaaacgctataagactttcgacatccctaaaaagtctggcgggatacgacagatatcaacaccaattaccgctctgaagctcattcagcgcaagctgaaccaagtgctgcaggcagtatatcagaccaaaccaagtgtgcatggctttgtgtccgggaagaacatcgtatccaacgcccaggctcacgcaaaaaagcgctatgtcctgaatctggacataaaggacttctttccttctgtgaattttggacgggttcgtgggatgtttatggccaaaccctacaatttacatcccgacgtcgcgacagtcctggcccaaatttgttgccataacaatcaactgccccaaggagccccaactagtcctatcattaccaatatgatctgtgcgaagatggatagtcagttgcagcgcttagctaaagactgcaaggcaacatacacccggtacgccgatgatatgactttctccacaaccctcccgaaattcccagaggaactggcttacatagtggcagaagaggaatgcaaaaaaattgtgatcggtaacagactaacggctgtgattaacgaaaatgggttcgaggttaatcagcagaaaaaccggctgcaagtgaagggtaaccaccaggaagttacgggattaactacaaacctctttcctaatgtggacaggaagtatgtcagacaagttagggcaatgctttatgcctgggctaagtttggccttgaggccgccgagaacgagtatttcgagaaatacttgtttaagagcaggttgccgattaagaaagatcttaagttccagcagatcctcagaggcaaaatcgaattcatcggcattgtgaagggcaagaatgactttatctaccagaaatatagcaaccagtacaagatccttaccaagctctctatcagcaataaaattcgggaggactga

SEQ ID NO: 7891 - RNA, 1089 nt, synthetic construct
  source 1..1089: mol_type = other RNA
atgcagaaggggtccaattttatccttaagtacaagcccgaatttctggccgaaaagttctatgccttgaagaatcctatggatatagctgacttgctcggcatcagttacggccgactggtctaccatatatacgtgattgagtccgagaacaggtacaagattttcgacattccgaaaaaaagcgggggaattaggcaaatcagcacgcctatcacagcactgaagattattcagcagaagctcaaccaggttctgaaaaccgtatataaaccgaaagcttccgtgcacgggttcgtcagtgacaagaacatcgtgacaaatgcacaagcccacactaaaaagaggtatgtactaaacatcgacttgaaggacttttttccctcaatgaattttggtcgcgttcgtggaatgttcatggctacaccatacaacctacctcccgatgttgcaaccgtgttggcccagatatgttgtcataataaccagcttccccagggggcaccaacttcgcctataatcaccaatatgatttgcgctaagatggattctcggttacagcgcctcgccaaggactgcaaagcaacttatacccgatacgcagatgatattaccttctctacaacactgccacaattccctaacgatctggcctataccggcacggaagaggataccgagaagatcttaatcggaaatagactgcttgccatcatccacgaaaacggttttgaagtcaacgaacaaaaaattcggctgcaagtcaaaggcaaccatcaggaggtcacaggcctgactactaatatctttcccaatgttgaccggaaatatgtgcgccagattagagcgatgctttacgcttgggccaaatttgggctggaggcggccgaaaatgagtatttcgagaagtatgtgtctaagtccagactgagcattaagccaaaactcgagttccagcaggtgctcagaggaaaaatcgagttcatcggtatggtgaaaggcaaagaggactcaatataccagaagtacatgaatcagtacaagattctggctaggctcagcatcgtgaacaagaacagtgaagactga

SEQ ID NO: 7892 - RNA, 993 nt, synthetic construct
  source 1..993: mol_type = other RNA
atggatatcgccgaccttctggaaatctcatatagccgtttaatctatcacacctacattgtctatcctgagcgcaggtacaaaacttttgagattcccaaaaagagtgggggcatcagacagataagtacccccatcaccgccctgaaaattttacagcgaaaactgaatcaggtgctgaaggctgtgtacgaacctaaagcatccgtacacggtttcgtcaccgggaaaaatatagtcactaatgctcaagcccatgtgaagaagaggtacgtgctcaatatcgacctaaaggactttttccacagcatcaactttggtagggttagaggcatgtttatggctaccccctatggattgcatccgaacgtcgcaacagtactagctcagatctgctgctacaagaaccagctcccacaaggagctcctacgtcgccaattatcacaaacatgatttgtgccaagatggatggccagctgcagcggcttgcaaagacatacaagctcacgtatactcggtatgccgatgacatcacattctcaaccaccctgccccacttccctcgcgaactcgcctacatcctgactgaagaggataatgagaagatcgttataggcgacaacttgctgcgtattattcacgaaaacggcttcgaagtgaacgagcagaagattcggcttcaggtgaaaggcaaccatcaggaggtgacgggattgacaactaatgtgtttcccaacgtcgatagaaaattcgtgcgccaggttagggcaatgctgtacgcatgggccaagtttggtatagaatccgcggagtccgagtatctgactaaaaatcggtacgagtctattttcccagggaaagaaaagcctacatttcaacaagccctgagagggaagattgagttcatcgcgaccgtgaagggaaaaaatgacccgatttaccgaaagtatctcagcatctacaaacagttgataaagccagagtctgtttga

SEQ ID NO: 7893 - RNA, 1080 nt, synthetic construct
  source 1..1080: mol_type = other RNA
atgcagcaggattcccaactgcttttgaaattaacctcagagacattacgagaaaaattttacgatctgagaagggtgctcgatatcgccgagctcctcgaagtgtcatatgatcacttggtccatcacatctatctgatagaatccgaacatcgttataccaccttcgagattcccaagaaatctgggggcattcggcagataagcactccaattacggccatcaaaattatccagaagaagctaaaccaagtactgcaggccgtttatcaaaccaagccgtcggtgcacggatttgtgaatggtaagaatatcgtgacaaacgcacagtcccactgtaaaaagtgctatgtgttcaacattgaccttaaggactttttccctagtatcaactttggcagagttcgcggaatgctcatggccaccccctacaacctgcctccggacgtcgctacggtgttggctcagatctgttgctataataatcaactgcctcagggggctcccaccagtcccataattacgaatatgatctgcgcaaaaatggactctcagctgcaacgcctggccaaagattgtaaagctacctacactcggtatgcagacgacattaccttcagcacaactctcccaaagttccctaacaaactggcctatgtcctgactggtgaggatacagaaaaggtgttcatcgggaataggctacttgcaatcatccacgaaaatggtttcgaggtgaacgagcaaaagataaggcttcaggtaaaaggaaatcatcaggaggtgactggcctgacaactaacctctttccaaatgttgatcgaaaatacgtgcggcaggtcagagccatgctctacgcgtgggcgaagtttggcttggaagccgctgagaatgagtactttgacaagtacgttagcaactcaagactgccaattaaacagaagttaaagttcaagcaggtactgcgcggcaaaattgagttcatcgggatggtcaagggaaaagaagacagcatctaccagaagtacataaaccagtacaaaattctgaggaacaagaagtccacaaactcttactga

SEQ ID NO: 7894 - RNA, 1122 nt, synthetic construct
  source 1..1122: mol_type = other RNA
atgacaatcaactttccccagggacagttaattagcccaccgtgggacaagaagtcactcttgctgctcaatcgaagtccagaagagctaaaaaatgatttctaccagctgaagactcctctagacgtggcaaaacttctgaacattccccataagcgtctagtgtaccatctttacttggtggactcccagaggagatacaaaacgttcacaatacccaagaagtccggaggccagcggcaaatctcgactcccatcactgctctgaaaattattcagcagaagcttaatcaagtgcttcaggcagtctaccaagtgaagccttctgtccatgggtttgtgcaggataaaaacattgtcacaaatgcgaaagcccacgctaagaagaggtatgttctgaatctggatctggagaatttctttcctagcgtaaatttcggaagggtgcggggaatgtttatggcgataccctatcatttaccaccagacgtcgctacgatcctggcccaaatttgctgtcagaacaatgagctgcctcaaggggcaccaacatctcccatagttacaaacatgatatgcggaaaaatggatagccaactccagcgcctggccaaggactgtaaagctacctatacccgctacgctgatgacatcaccttttcaaccaccttaaagaatttttccactgacctggcatacgtggttaacgaaggtgaagcagagaaagtagtcctcggcgatctgctgagtggcatcatcagagagaacggtttcaacgtaaatgagaaaaaaaccagactgcagaccaagggtaaccaccaggaagtgactggcctcaccacaaaccagtttccgaatgtggaccgacgctatgtgcggcaggtcagggccatgctccacgcttgggccaaatttggcctcgaagccgcccaaaaggaattcgaggaaaaatataaccacaaggccagattctctgggaaacagattcctcacttccaggatgttttgaagggcaaggtggagttcattgggatggttaaggggaaggatgacttgatctatcagaagtacatcaacgagtataagcagttgcttaatctgaacttccctaaaaacatctga

SEQ ID NO: 7895 - RNA, 1110 nt, synthetic construct
  source 1..1110: mol_type = other RNA
atgacaatcaacctgccacagtggcaattaattttcccacatcttcacaaccagaatcctctgttattgcaagacagtcccgaagaactgtccaaaaagttctacgagctcaagacacccctggacgtcgcgaagttactgaatattcctcacaagaggctcgtttatcacttgtatctggtcgacagccagaaaagatataagacctttaccatcccaaaaaagtctggaggcgaacgccagatcagtactccaattaccgctctgaagatcattcagcaaaagcttaatcaggtgctgcaggccgtgtaccaggtaaaaccctcggtccacggcttcgtgcaagacaagaatatagttacaaacgcaaaagctcatgtgaagaaacgctatgtgttgaacctcgatctagagaattttttcccctccgtcaacttcggacgggtgagggggatgtttatggccataccctaccaccttccacctgatgtagccaccgtgcttgcgcagatctgttgccataacaatcagctccctcagggcgcaccgacatctcccatggtgactaatatgatttgtgccaaaatggatagtcagctgcagaggctggccaaagactgcaaggccacctacacgagatacgctgatgacataactttctccacgactctgaaagactttccgcctcatttggcttacattgtagactacggtaacaatgaaaaagtgatgctaggcgagagcttgctcaacatcatccgagagaatggattcagcgtgaatgagaagaaaacaagactgcaaactaaggggaaccaccaggaggtgaccggcctgacaaccaaccaatttcctaacgttgaccggcgctatgttaggcagatacgagccatgctccatgcctgggcaaaattcgggcttgagtcagctcagaaggaattcgaggaaaaatatcaccactccgcacgttttagcggaaaagagatcccacggtttcaagatgtcctgaaggggaagattgaatttatcggtatggtcaaaggtaaggatgattcaatctatcagaagtacatctctcagtactatcagctcctgaagatttacttctga

SEQ ID NO: 7896 - RNA, 1125 nt, synthetic construct
  source 1..1125: mol_type = other RNA
atggtgatcaatctgcctcaggggcagctgatcgagaaaaagcgctctaagcgggagcaaaaatcttcacttctgctcctgaagaagtcgccagaagaactgcggactaagttttttgaactaaattccccccgggatgtcgccaagcttctcggcatcagctacggtcgattagtgtatcacatttacatcgtgtccgaagccaataggtacaagacttttgaaattcccaaacgttcaggcggagtacggcagatctctacccccagaaccgctctgaagatcattcaatggaagctgaaccaggtgctgcaagctgtttataagccaaagccgtccgcacacggtttcgtgcctaacaaaaatatagtgacgaacgcccaagcgcactctaaaaagaggtacgttctcaatttggatcttaaggacttcttcccaagcgtgaactttgggcgagtcaggggcatgtttatgggcacaccatacagtttgaatgccaacgtggctactgtcctcgctcaaatatgttgccataataatcagcttccgcagggcgcgcctacatcccctattattaccaatatgatctgcgccaaaatggattcccagttacagcaccttgcgaaaagttgtaaagccacctataccaggtatgcagacgacataacttttagcactaccctaaagcagttcccagagagcttggccagagtgatcacagaggaaggagaggagcgcgttattctgggcgaacctctcctgggtataattgcagagaacgggtttgaggtaaacgagcagaagatccgcttacaaaccaaaggaaaccatcaggaggtcacagggctgacgacaaaccagttccccaatgtagaccgccgcttcgttaggcagatcagagctatgctgcatgcatggcagaaattcggattggaagctgcagaggccgaacaccgagagagatacagaaacaaagccaacttccccggcaagagtgaatcaaacttcaaggaggtgctccgggggaagattgagttcattggtatggtcaaaggacgtaataacgaaatctatcagaaatacctccagtggtatgtgaagctgctgaaatttgggagcaattga

SEQ ID NO: 7897 - RNA, 1104 nt, synthetic construct
  source 1..1104: mol_type = other RNA
atggtgatcaatttccccaaagggcaactgattcctgaaaactccaacataaagtctaagtcatatgcccacctactgttgaaagataaccctgagacgttgagggaaaagttcttctcgctctcaactgctcgcgatttggccaagctccttaacgttgagtatcggcgcctcgtctaccacatttacatagtgccgccttccaagcggtacaaaacctttgagttgcccaaaaattccggcggaaccagacagatatccactccccagacagctttaaagattatccagtggaaactgaatcaggtcctgcagacaatatatgaacctaagccttctgtacatgggtttgtaagtggtaagtccattgtgacaaatgcccaagcacacgccaagaaacggtatatcttaaacctggacctgaaagacttctttccctcaatcaacttcgggcgagtgaggggcatgtttatcgctgcgccttacggcctgactccggaggtggctaccgtgctggcccagatctgctgtcataacaatcagctgccacaaggagcccccacaagtccaataattaccaacatgatttgcgccaaaatggactctcagctgcagcaactggccaaggcatgtaaggcaacttacacaagatacggggacgatattacatttagcactaccctcaaagaatttccagagagcctcgctaaggtcgtcacggaagaggggaaggaaaaagtggctctcggagagccccttttaggcatcatcgcagagaatggtttccaggttaatgaaaacaagatccatctgcaggcaaagggcaatcaccaggaggtgaccggccttaccgccaataagttcccaaatgttaacaggaagtttgtcagacaggtgcgcgctatgcttcacgcatgggcgaaattcggtctggaagccgcggagaaggagttccaagaaaaatacgcttcaaaaagccgactcccaagcaaatctaccgccagtttcaaagaagttctacgtggaaagatcgagtttattggaatggtgaaaggcaaggaggataaaatctatagcaagttcatcgacaagtttaacatttga

SEQ ID NO: 7898 - RNA, 1131 nt, synthetic construct
  source 1..1131: mol_type = other RNA
atgctgaatagcgctgttcaggaaaaaatcaacattcaccctctggaccaccaggcacagataaaggaaagattcacactcccaggaagcccggaggaactgaggcaaaaatttctcgctctccagacccctgacgatttagccagtctgttaaatctgacttacccccgcctcgcgcatcatatctacagagtaccttctgataagaaatataagaccttcactctgccaaagaaaatggggggggagagaaccatctcgactcccataagcgcactaaagatcattcaatggaagcttaaccagatcttgacagcagtttacgaggtgaaaccatccgctcatggctttgtgccaggcaaaaatatagtgaccaacgccaaagcgcacgcaggtaaacggtttgttctaaatctcgacctcgccgattttttcgggagtgttaatttcgggcgggtgcggggtttattcatggccaccccctataacctgcctgcgaaggtcgccacagtgttggctcaaatttgctgtcacgaagacaaactcccccaaggggcacctacctcccccatcattacaaatatgctgtgcgccaagatggattcccagctgcaaaggctggctaaagaatgtcgagcaacttacacccgttatgccgacgacattactttttctacgacgctgaaagagttcccagaagccctagcgtacgccatcgaaaccgaggatggagacaagcttcttctgggagatcgattactgggcatcataactgagaacggcttcaaaatcaacgagaagaaagtgaggttgcaggtgcgcggcaatcatcaggaggtaacgggacttacaaccaacgaattcccgaatgtcaaacgcacatatgtcagacagatcagggccatgttgcacgcttgggctaaattcggcctggaggctgcagagaaagaatactatcagaagtatgaggagaaggtcaagttttcactcaaaaaaaaggcctcattttctcaggtggtgaagggcaagattgagtttctgggaatgattaagggtaaggacgatgacctgtaccagaagatgctgaagagctacttgaagcttaagaagtccgcccccgtcacaaactga

SEQ ID NO: 7899 - RNA, 1125 nt, synthetic construct
  source 1..1125: mol_type = other RNA
atgctatccagtgtcatagagaataaggtgatagtccatcctctcgatcgccaagctcaggccaaagaacgctttgttttacccggttcccagactgaacttaggcagaagtttctcaaattgcaaacacctgacgacgtcgcacgtctcctgaatctggactaccggaggctggctcatcacatctatcatgtgccaaccgagcagaaatataaaactttcacactgccgaaaaagacgggaggcgagagaaccatctctacacccgtgagcgccctcaaaatcattcagtggaagttaaaccagctgttaacggcagtatacgaagtgaagccaagtgcgcacggcttcgtgcaggggaagaatatcgttacaaatgctaaggtgcacgcaggaaagagattcgtcctgaaccttgacctggcagattttttcggatcagtcaattttggccgagtccgaggactgttcatggctacaccatacaacctccctgctaaggtggctaccgtactagctcagatttgctgtcatgaggacaaacttccccagggtgcccctacctccccaatcattactaatatgctctgtgccaagatggactctcagttgcagcggctcgctaaggaatgcagggccacatatacgcgttacgcagatgacataactttcagcaccacattgaaggaattcccggaagccttggcctatgccgtggaaactgaggacggtgataagttgctgctcggggatcgcctgctaaacattatcgccgataatgggttcaatattaacgagaagaaagtgagactgcaagttcggggcaaccaccaagaggtgaccggcctgaccaccaacgagtttcccaatgtgaagagaacctacgtacgccaaattagggccatgctgcacgcctgggcgaagtttggcctggaggcagcagagaaggaataccacgagcggtataactttaaagcgaggttcgccctgaaagaggaggctagctttaaacaggtgctgaagggaaaaatcgaatttcttgggatggttaaagggaagaaaaatcttgcctacaacaaattcctgaagtcatattacaaccttactaacttcggcaagaaatga

SEQ ID NO: 7900 - RNA, 1020 nt, synthetic construct
  source 1..1020: mol_type = other RNA
atgcagacccctcagaacgtcgcggtactgctggatgtggaatatgacaagctcatttaccacatttactccagtaatgtggatgagcgctacaagaaattcgaggtctataaaaagtccgggggaattcggacaatcacaacacccgttactagcctgaaattcatccagtggaaactcaatcaggtgctcaacgcagtgtatcaacctaaaccagctgttcacgggttcacgttgaataagaatatcctaaccaacgcccaggcacatgtggggaagcggttcgtactgaacctggacctggaagattttttcccaagcatcaactttggcagagtgagaggactatttatggctcccccctatcagctaccggccggtgttgcaacggtgctggcccaaatttgttgttatgacaatcagcttcctcagggtgccccaacatcaccaatcgtcagtaatatgatttgcgccaagatggatacccagttgcagagactcgctaaggaatgcagagcgacctacacacggtacgctgacgacatcaccttttctactactctgcgtgagtttcctgaggacttagcatatcccgtgaaaaccgaggagggcactcagttcgtattgggagatcacctccttcagatcatagccgaaaacgggttcaaaataaacaatcagaagactcgacttcagaccaaaggttcgcatcaagaggtcaccggcctgactgtgaatcagtttcccaacgtgaaaaggacatatgttaggcagattcgcgctatgttatatgcctgggaaaaatttgggctgcaacaggcctcccaagagtactacttcttctacaaggattataaccgcctcccgctgaaattcaataataagagctcagaagacgactttgtgcaggtcattaagggaaaaatcgagtatcttggcatgatacgaggcaagcaagatagcatatacaggaagtacatctctaagtttaactacctgaagaactacaacggcaggtga

SEQ ID NO: 7901 - RNA, 1116 nt, synthetic construct
  source 1..1116: mol_type = other RNA
atggaatctaatttgcctgagcatcaagccgtgaatccagagtcaagcaaaagatcattccaacgaaaaaagggttgtctgaacttgactcaaaccccagaagagttacgagctgctttcctggccctaaaaacgccccgcgatatagctagactgctgaacgtgcgttatgacaggctcgtttatcacatttataaggttccccttgagaaccggtacacgacctttgagatccccaaaaagtccggcggtaccaggacaatctctgctcctgtcacagccttgaagcttatacagaggaagttaaatcaggtgctgcaagcggtctacgagcccaagccttcagtgcacgggttcactccaggccgcaatattgtgtccaatgcgaaaccacacgttaagcggcggtacgtgcttaatttggacctgaaggatttttttccgtcgattaatttcggcagggtgagaggaatgttcatggggatcccataccacctccctgaacctgtagccacagtgctggctcagatttgctgtcataataaccagctcccacaaggggcacccacaagccccgtaatcactaatatgctctgcgcccagatggactccagactgcagcggctggcacagaaacttaaatgcacctatactcgctatgcagatgacatcactttctctaccaatatgcctgaatttccggccgatttagcaattgaggtgaccacagacgaaggaacgaggatcaagatcggggagcccctgcgccagatcatcgaaagctccggattcctaattaacgacaaaaaagtccggctgcagaaaagaggacatcaccaggaagttactggccttaccaccaacgagtttccaaacgtcgatcgtcgatacgtccggcagataagagccatgctgcatgcctggcgcaagtacgggaaccagaacatcctcagcgtcacaagtaaaagtaaccaccccattagttacgagtcttttgataacttcaagcaggtgctcaggggccgcattgagtatgtgggcctcgtgcgtggtaaggaagaccctatatacatcaagttcctgaaccagctgaagatgtttgaagaggtattttga

SEQ ID NO: 7902 - RNA, 1116 nt, synthetic construct
  source 1..1116: mol_type = other RNA
atgcgagatcgacttaagggaacacccgaccagcttcgggaggccttcctgaagctgaggagccccagggacgttgccgagctgttagatgtgagatacgatcgcctcgtgtaccacatttatgtggtgccagaggccaagaggtacacggttttccacatacctaagaagagtgggggacaacgcgaaatactggcaccagctacccctttgaagctgatccagaagaagcttaatcaggttctgcaggccgtgtaccagccaaaaccatctgcacatggtttcctgcctgccaggaacattagaaccaacgctgaaccgcacgcaggtaaacgttatgtcctgaacattgatctcaaggacttcttccccagcattaattttggccgggtgcgcgggctgtttctttccaaaccttataacttaccggatgaggtggcgactgttctcgctcaaattgcttgctatacccatcctgaggatacatggcagcataatggcaaggtggtacggagatcataccttccccagggcgccccgacatccccaatcatcacgaatatgatctgcgctggaatggacgccgaactccagagattggcgaagcgttgtagggcgacttacacaagatatgccgacgatctcactttttcaactaccctacgaaccttccccgaggacctggcccaggtagtggatgacaccgaaggccgcaagcgcgtcttcttgtcggaaactctgaggagcataatcgagaaacacggctttgaggtcaacgacaaaaaagtccggttacaagaccgcagatttcggcaggaggtcaccggattgacagtgaatgaatttccaaacgtccgccgttcttttgttcggcaagtgagggcaatgctccacgcatgggataagtacggtctagaacaggccgaaagagagtacagagtgaaatatgaatccaaacaccggggcccctatcatgccgctcccagtttcgctcatattgtgagggggaaattggagttcatcggaatggtaaaagggaaaggggaccctgtctacctcaaatatctgggccactactactctctgatcgagcgagacaagctggcaagcaagtga

SEQ ID NO: 7903 - RNA, 2262 nt, synthetic construct
  source 1..2262: mol_type = other RNA
atgagcttgtacgacttttcaccagagcttgtcgctaaaacaatcggagtggattatcacagtctcattgagctgctcgaacaggtagatgagatttatagagacttcaagattccaaagaagagtggcggcgtgaggacaattcgaacccctcgctctactgaatacgaggatggagacatcacattactggacatccagaagaagatcagtaaggagatccttcagcccgtgtatcagccgaagccttgcgtgcatgggtttactgctaaaaaatctatagtcaccaacgctaaagctcacaccaagaagaagtacgtgctgaaccttgacattcaagactttttcacttccatcaaattcgaaagggtgagaaagatgttcatggcacagccttataatgctaacgatgaagtagccaacttgctggcacaaatttgctgctatgaagaccagcttcctcaaggggcccctacttctccgatagtgtcaaatatggtttgcgcaaaaatggatggtcaactgctggatatcgctaggcagtacaaggccacatatacaagatacgccgacgatatcacattttccaccaatctggaggagttccccgaggcgctggggtacgtcgtgaacgagggatctatccgacggttcttcgtcggccatgaactacaggaaattttcaatagcaacaactttgaggtcaacgagagaaaagtgagactgcagacgcagaattgtcgccaagaagtcaccggcttgaccgttaaccacttccccaatgtaaacaggcagtttgtacgacagattcgggccatgttatatgcatggcagaagttcgggatcaacaacgctgcctccgagtatatctctaagtacggccgctacggcgagttctacaaaatcattctgaactacaagtccggtgttgaggccaagcggttccatcatgttctgcggggaaagatagaatttctggggctcgtccgggggaagaatgatcccatttacaaaaagtatctcgcccagtacaaacgtctcttgtatgaggagatcgcacaggagcctcgattgccaagcgtgctgaagactaaaggctggcaagaaggccggctgtctcttaacaatcacgattggaatgccaatatccgtaagagaggcctacttctgcccaactacattaaaactagctacctcctcagcgttcttacctccctgtacactgggcagatagtgctgttaaatggctccgttggaataggtaaaacatcgctagttgagaagagcgctaagatcttcaatggcaatagcaagattatcccagtgcggcctgcatggaccgactccaccgatctgctcgggttttacaatcccgtgaacgactcatttcacccttcaatctttctaaccgcacttcagcaggcctcagaaaatttcgaacaaattttcctcgtgtgtctggatgaactgaatctcgccaagattgaaaattatgcggcggacctgttatcctgtctggagtatagcaaaacaggtcagggagcccagaaacttatcttgtattcgccgagcatcgaagtccaaatccgccaggaaatcaagttacttcagagccaaaagagcaaaacatttgagcagtccaacaggctggctaagctgcagaacctgcttaacacttaccccgctgagttcctcctgcccaagaatctagtgttaatcggcactctgaatagtgacgagacgacctatgatatttcaccaaaagtcattgatcgttccttcgtgataacgtatccattgccagattttgccgaggatacaaaagccaccccttctagtaatccaataactggaacgtacatacccagtctcttccaggagctcgacaacaaaattctgcaggcgcactcatcaagcgacgaatttaacgacagttggtacaccctgctcaactggaattctaggtatctctctcagtgtggtatcccactcggttaccgcgtcaagcgagactacaaagtgttttatgccgcaagccaaattatcggactgacggtggaagagtgcttgggatatttcttgtttaccaaattgatgccgcgcctgagttttttcaaagatgagtctcgcgaaaacatttgtctggagtggctggaagagatagaaaacaactactcccagtttggcacacccgacgtgatcgagaatctacggaaccaaattcaggacatcaggagaagaaatgtaaggtactgggggtga

SEQ ID NO: 7904 - RNA, 2262 nt, synthetic construct
  source 1..2262: mol_type = other RNA
atgtctttatacaatttgtctcctgaactggttgccgagcaactgggcgttaactaccatagcttgattgagctactgcagcaactagatgaaatctacagagactttgtcatcccaaagaaaagcggcggagttaggactattaaaaccccaatgagcattcgggaaattataagaggatacgaggatggatattttcctcttctcgatatccagaagaagctgagtaaggagattcttcaacccgtgtatcagcctaagccctgcgtccacggcttcacggctaagaaatccatcgtgactaacgccaaggcccatacaaagaaaaagtatgtgctgaacctcgacattcaggatttcttcagctcaattaacttcgaaagggtgaggaaaatgtttatggctcagccctataatgcaaacgatgaggtagcaaacctgctggcccagatctgttgctacgaagatttattgccccagggtgccccaacctccccaattgtcagtaacatggtttgtgctaaaatggactcacagttactgacactggctaagaagtataaagccacctatactcgctatgccgatgatattactttctctactaacctggatgaattcccagaagccctcggctccgtagcggatgaaggcggtatccgcagattcgtggtcggggaggagttgagagagatcctaaacagtaacaacttcgaggtgaatgagagaaaggtccggctgcagacccagaattcacgccaggaggtgacaggccttacagtcaataggtttccaaacgttgaccgaaaattcgtgcggcagatccggtccatgctgtacgcttggcagcgttttggaatagagcaggccgcgggcgaatacagctccaggtacgataagaagtacaagtacctcatcaatcgctctggcgaagaagcgaagagatttcaccatgtcttgcgcgggaaaatcgagttcctggggatggtgaggggaaaaaatgaccctatatacaagaagcacctggcccagtataagcggctgctctacgaggagttagcccagaagccacggctctcttcctctctcaaaaccaaagggtggcaagatcgagtatccctaaataatcaagactggaatacccacatccgggtggctggactcctgctgcccgattatataaaaaccagttacctcttggcaatcctcacctccttgtataccggccagatcatattgctgaatggatcagtgggcatcggtaagacgagcttggttgaaaagagtgcagagatcttgaacggtaattccaagattatcccagtccgacctgcttggactgactcaacggatctgttagggttctacaatccggtgaatgactcatttattcccagtagcttcctgaccgccctccaaaaggcatctgagaacttcgaacagttctttctggtgtgcctggatgaattgaacctggcacggattgagaactatgccgctgacctgctgagctgcctggaatactccaaatcagggcagcaagcccagaaacttatactgtattcaccgagcatcgaggtccaaattagacaggaaatttcactccttcagagccaaaagactaaaacgtctgaacaatcgaatcgacttgcaaaacttcagaacctcctgagcacctatccggccgagtttagcattcccaaaaacctggtgctgatggggacacttaactctgacgagacaacatacgacatcagccccaaggtaatagaccgcagttttatcataacctatccttttcccgacctagctggagacaccaatgcaacaccttccaataatcctatcacaggcacttacattccgtcgctcttcaaagagctagacaataaaatcctgcaggaacgaagtacaaatgacgagttcaacgaatcttggtacattatctcgaactggaacagcaggtacctttctcagtgtggcattcctcttggttaccgggtcaaaagagattataaggtgttttatgctgcgagtcagattgtgggtctgactgttgaagagtgcattggatacttcctctttaccaaactgatccccaggatctccttttttaaggacgattctcgtgagaatatatgtctcgagtggttagaagagatcgagaataattattcccacttcgtgacaccagacgtaatggggaaccttagaaaccagatacaggacatccgccgtaggaacgtgcgctactgggggtga

SEQ ID NO: 7905 - RNA, 2274 nt, synthetic construct
  source 1..2274: mol_type = other RNA
atgaacctaaaggatctctattgcttatcccccgagctcgtcgctgagaagttaggggttaactatcattccctgattgagctgttagaacaggtcgatgagatttacagagagttcaaaatccccaaaaagagcggtgatgttagaacgatcaggacaccaatctcgtcttctgaacgctacaagatttacgaaggagaaggctacttcccattgcttgatatccagaaaaaactcagtaaggagattctacaacccgtgtatcaacccaagccttgcgtccatggttttacagcaaagaaaagtatcgtgaccaatgccaaggcgcatacaaagaaaaagtacgtactgaatctggacatccaagatttttttgcgagcatcaatttcgaacgcgtgcgggctatgttcatggcgcaaccttataatgccaacgacaaggtggctaatctgctcgccaaaatatgttgctataaagaccagttgccacaaggcgccccgacttcccctatcgtgtccaacatggtgtgtgcaaaaatggatcggcagcttctggagctggcaaaaaagcacaaggccacctataccagatatgctgatgatgttacgtttagcacaaatcttgaagagtttccggaggctcttgggtacgtgattaatgacggatccgtccggaaatttgtcgtgggagaagagcttcgggagatcataaattctaacaacttcgaagtgaacgagaggaaggttcgtttacagacgcagaactatagacaggaggtcactggactgacagtcaatcaccgcccgaatgttaaccgaaagttcgtccgacagatccgtgcccttctccacgcatggcagaaatttggaatcgagaaggcagcggacgaatatagtagcaggtacgacaagaagtacaagtacctgaagatcaggtcttccgagaacacaaagcggttccaccacgtcgtacgaggaaagattgagttcctggggatggtgcgtgggaaaaacgatcccatctacaaaaaatacttgtctcagtacaagaggctcatctatgaagagctggcccaagaacctaagctctcttttgtactaaaaactaaagggggcaaggaacgggtgagtctgaactatcaagactggaacgccaatatccgagcccgaggactgctgctgccaaactatattaagaccagttacctcctgtcagtgttgacttccttgtatgccggccagatcatactgcttaatggctctgtgggcgtgggtaagacgagcctggtggaaaagagcgcgaccatcctgaacggcaactccaaaattattcctgttcggccggcttggattgacagcagcgatctgctggggttctacaaccctgtgaatgactcatttaatccctcatcatttctgacagcactccagcaggctcaggaaaagtttgagcagtttttcctcgtatgtctggacgaattgaacttagcccggatcgagaattacgccgctgatctgctaagttcattggagtatagtaagtccggtcaaggagctcagaaattgatcctttactcaccctctattgaggttcagataaggcaagagattaaactcctgcagtcccagaaaagcaagacttctgaacagtcaaacagactcgccaaactgcagaactttctcaatacctacccagcagagttcagcattcctaagaacctgatactagttgggaccctgaattctgatgagactacctacaacatcagtccaaaagtaatcgaccgctcatttgtgattacttatcctttacccgacttcgctgaggatactaacgctaccccaagtagcaatcccatcgcaaaaacctacatacccagcctcttcaaagaattggacaacaagatcctgcaggccgacaattcaaatgacgaattcaatgactcctggtataccatttcgaactggaattccctgtacctgtcgcagtgcggcatacctctcggttatagagtgaagagggactacaaagtgttctacgcagcctctaggataatagagctaacagcccaggagtgtatcggctatttccttttcaccaaacttttgccaaggatcagcttctttaaggacgaagagcgcgaaaatatttgcctcgagtggcttgaagaaattgagaacaactactcccactttggcacaccagatgtgattgagaatctgcgcaaccagattcatgatacaagacgcagaaatgtcagctactgggggtga

SEQ ID NO: 7906 - RNA, 1746 nt, synthetic construct
  source 1..1746: mol_type = other RNA
atgagtatcctgctggagagcgctgacactacactccgggagcggttccataatcttcgtgacttcgcagatctggccgatctcctcgagattaaaaaaagcctgctctattactacgctttcaaggctcgaggagtggatcactataaggtatttcaggttccgaaaaaaagtggcggaacacggcagatctgttcaccgtccagccctcttaagttgattcagcgaaagctaaatcaaatctttcaatccgtctacgtaccaaaagcctctgtccacggcttcgtgaaagataggtcaatagtcacaaatgccaggcggcacatcgacggtactccacggaaacgttatgtgctcaacatcgatatagccgacttttttccatcgataaccgagggcagaatcaaaggactgctcatggccacgccatacaacctcccccgggacctggcacatgttatagccgggttagtctgcttagacggtcgcctacctcagggggctcctacctcacctgtgctgtcaaacatgatctgtgctcggatggacactcagctgaggagattggcacagaaatataggtgtgtttacactagatatgcagatgatatcaccttcagtacttccctgccccgcttcccagctggattggctacaggaaacgatacaaaccgacaaatcgttgtcggggacgaattagcgtctgtgatttccggtaacgggttcgcggtaaatcaaaaaaaagttagactgcgctctaaggataataggcaggaggtgacgggcctgaccatcaaccgctttcccaatgtgaccagaagctatgtccgccagattagggccatgcttcactcttgggaaaggtatggatatgaaaacgctaaccacgagtacgcccagaaatatttcgcgggcgatgaggacaaagccccatcattgaggcaggttctctatgggaaaatggagttcctcagaatggtgcgaggcagtgacaattccatctttctatcctttcgggaaaagctgaggcgcatagaccccgagtacaagcccctggagctgacacctataaatgcctccatccctatttacgtggtcacggagggtaagaccgactggaagcatcttaaggcggctctgcacaggcttaaggagcagggcctctttattgggctcgaaattgaattctgggaatacgaagatgacgtgagtatgaacgatgcagaattgcttaagagatgcaagtacaaggacgacatcgacctgcccaaactctatatctacgtgttcgaccgtgataagcctgatatcgtgagacaagtcaccggcaccgacggcgatttcaaacagtggcgccgtagactgtactctatggcaattccggtacccgcacacagagtcgggaaccccgatctgtgtattgaactgctgtacgacgatgacagcgtgaagcagaaggatagccacggccggcgcctgttccttagctctgaatttgataagcattcctgccgccatttaaccgaggacctaaactgcactgataacaataaggtgaagcagcctctggcaattattgacaatgccgttttcgacagcaatcggaagaatgtggccttgtctaaatcggagtacgctaccaacgtgttgacaaaagtaccaggatttacaacctttgacgtggccgcctttaagctggtgttcgagactttagagcgaattatcaagtacgataatcagcattga

SEQ ID NO: 7907 - RNA, 1149 nt, synthetic construct
  source 1..1149: mol_type = other RNA
atgttccgtagccgtattaaacggagcagcacactgctgctctgcaagaattgcgacgaacttaagcaggagtttctcagcttgaaaactgcaaaagacattgcaacccttttggaagtcccctactatcagttggcctaccatctgtacaaggtggccgagaatgagaagtacagggagttctcaattccaaaaaagagcggcgattcaagaaccatcaccgcccccgccaaagcccttaagatattgcagagaaagctgagccaagttctctattcagtttatgagcctaagaaaccagtccatggatttgtgcccgctcgcagcatcttaacaaacgcaaagcagcattctcacaagagatttgtgctgaatatcgacctgaaagacttcttcgattctattcattttggccgcgttaaagggatctttataaaacctccttgtaatctccccgaggaggttgctacgatcctcgctcggatctgttgccactctggtaaacttccacagggggcgcccacatccccagtagtctcaaatatggtgtgtgcccgcctggatcgccaactgaggctgttagcggaagaatttcggtgcacttatacaaggtacgctgatgatatcacctttagtactactatgagtgatttccctaaggagattgccttcgctaatccagaaggggacaacctggagagtctactgggtgagcgcctcatcctgaccatatgggataacgacttcgagattaacgaaaacaaaattcgactgcagcacaaaggccaacaccaaagtgtgactggattgacagtgaatcagttccccaatgtgaaaagggcatacgtcaggaagatctcctctatgttacacgcatgggataagtttgggcttgcctccgtgcagcagcgatacgtcgaaaagcattataaggaatcgggaaaattcaacaaagagattccttctttccaggaggtgctgcgaggcaagatcaactttctcggcatgattaggggtaaggacgacgaaatctacagaaagtatctaacctggtatcggaacctgtccgtacgggaaataccgatcgacctctctcagctagattccaagacccaaccttcccagtcgcacccgacggacagaggatga

SEQ ID NO: 7908 - RNA, 1014 nt, synthetic construct
  source 1..1014: mol_type = other RNA
atgaaaacccctaaggatgtggcaagattgctcgaagttacttatgaccggcttgtgtaccatctgtacatctcttcagaaaatacgaaatacatcgagttcagcatccctaagaagagcggtgactctaggactataacagcaccctccacagctttgaaaatcctccagaggaagctgagtcaggtgctttatagcgtgtacaagccatccgactcagtgcacggcttcgtggccggaagatccattctgacaaacgctaaacagcatctgcgaaaacgttttgtgctcaacattgatttgaaggccttcttcgatagcatccattttgggagagtacgaggcatattcattgccccgccttataatttgcccaaagaggtggccactgtacttgctcagatttgttgtcacagcaacaagctcccacagggggccccaaccagtcctattgtttccaatatgatttgcgtccggctggatcggcaactgcgcctgttagcgaagaaatataagtgcacctacacacgctacgctgatgatattaccttctctaccactctgcccaactttccaaaggagattgcgttcgaaagtcccggtggggacgacctggagtcattgctgggtgaggagctcattctaacagtctgggacaatggctttgagatcaatgaaaacaaaatcaggctgcaacacaagaataatcaccaaggcgttaccggcttaacggtcaatcgcttcccgaacgtgaacagagattacgtccggaagatcaactcgatgctgtatatctggcaggaatttggactcgcctcagcacagaaagggtacatcgagaagtacaacgaaaagtccggaaagtttaatgaggaaatcccccttttccaggaggttctgcgtggcaaaatcaattttttagggatggtcaggggaaaggacaacgagatatatctcaaatacctagactggtattgcagtctgtctaaccaggaggaaataagcaaagaatga

SEQ ID NO: 7909 - RNA, 1086 nt, synthetic construct
  source 1..1086: mol_type = other RNA
atgttaaaggaaaactccactcttatcctctacaagaattgcaacgagttaagacaggaatttctggctctgaagagtccccgagacattgccgagctgctggaagtaaagtacgagcaactggtgtaccatctttataaggcccctggatcctccaaatacaaggagttcagtatctctaagaaaagtggtcactctagaactatttcagcccctagctccgccctcaaaattcttcagcgcaaactttcacaggttctctacagtgtctatgatccaaaatatccggtccatgggttcctgcctgagcactcaatcgtaactaatgcaaagcaacacctgcggaagaagtttgtcttaaacattgacctcaagaatttcttcgatgccatccacttcggccgagtgagaggtattttcctagctccgccttataaactccctgaggaggtagcaacagtgctggcgcaaatctgttgccattccaacaagctaccacaaggggcccccacctccccagtggtttcaaatatagtctgcacacggattgattcgcagctgcgcttgctggctaaagagctcaggtgtaattacacacgctacgccgacgacataaccctgtcaaccacccgtcccaattttccaattgagatcgcatatgaaagcagcgaagacaacaaggtcaagatagttttgggagagaggctaatcagcatcgtgcagaataatggcttcgagataaacgataggaaaatccggttgcagcatcgtagccagcaccaggaagtgacaggactgaccgtgaaccagtttcccaacgtgaaaagagattacgtccgagagattagtagcatgctgcacgtttgggacaaatttgggctggctagcgcaagccagcggtatgcggaaaagagatctcgcgaactggaaatctcccaggaggaagtgccatcgtttcaggaggtgttgaggggcaaaatcaatttccttggcatggtgcgcggaaaagagaacgagatctataggaagtatctcaactggtactacattttgtctaaccggtctgaaacgccctctggcgggtga

SEQ ID NO: 7910 - RNA, 1092 nt, synthetic construct
  source 1..1092: mol_type = other RNA
atgctaacagaaaccgaaataaattcgagccttatcttactggaggactgcgagaagctgaagaagaagtttctctcactcaaggatcccagggatgtggccgctttactggacgtcacctatgatcggctcatttatcatatttatcgcgtgcctgactccgagaaataccttgaatttaaggtgcccaaaaagagcggccagatgagaaagatcagtgccccgtcaacggcgttgaaaatcatccagagaaaactatcccaggtgctctattctgtctacgaccctaaggcccctgtgcatggctttgttccttctcggtcaatcctgaccaatgcacgcccccacctgaggaaacgctttgttctcaacattgacttgaaagactttttcgacagcatccacttcggccgagtcaggggcatttttatggccccaccatacaacttgcccgctgatgtgagtagggtgcttgcccagatctgctgtttctctcgtaagctcccccaaggtgcaccgacttcgccagtggtttccaatatgatatgtgctcggctggattctcaactgcggctgcttgcgaaggagaatcattgcacttttactcgctacgctgatgatataaccttcagtacaacgctgcctgtattcccaaaacggttggcctatatcgacagcgacgttaaagaggacgaggaaaagaccgtgctggggtcatccctggtatccattgtccgggaaaacggattcgagatcaattggaaaaaagtacgactccagcacaaaagccaccaccaggaggtgacaggaataactgtcaaccagttcccaaatgtgaagagggacttcgtccgaaagattagcatgatgttacacatctgggataagtatgggttggatagcgcaagaaagcgccatgccgaactgctgtctaaatccctggagattcccgaagaagaggtgacagattttagagagatgcttcgtgggaagattaacttcctgggaatggtccgtggtaagaacgactctatctacgttaaatacctaaattggtactgtaacctcagtgcaagagagaggagaatgtga

SEQ ID NO: 7911 - RNA, 1080 nt, synthetic construct
  source 1..1080: mol_type = other RNA
atgtctgattctaagtttaaagagaattccacccttctcctctataaaaactgcgacgaactgaaggaggaattcctgtcgctgcaaacaccccgcgatgtcgctcggctactcgaggtcagttacgatcgattagtgtaccacctctatatcgtgcctgagaatcggaaatacgccgaattcagtgtaccaaagaagtcaggcgacacgagaattatcagcgcaccggccaccgccttgaagatccttcagaggaagctgagccaggtcctatatagcgtctacgagccaaaagctgccgtgcatggcttcgttccctcccgatccatacttacaaacgccaaacaacacctgcacaagcgcttcatactgaacattgacttgaaggacttttttaacagtatccatttcggtcgtgtacgaggtatatttatggcgcctccatataaactgccagaagaagtggccactgtactcgctaagatttgttgctatagcgggaagttgccccagggcgctcctacttcccccattgtttctaacatggtgtgtccccggatggacagtcagcttaggctgctcgccaaggagtttaaatgcacttatacccgttacgcagatgatatcaccttctctactacattgccgaattttccaaaggaaatcgcgtacattaacatcgaggaggataagcctaaaatactggtcggagaaagattgatcagcgtgattcaggacaatggattcgagatcaatgagaataaagtgagactgcagtataaaaccaagcatcaggaagtcacagggttaacggttaaccaattccctaacgtgaaacgcgactacgttagaaaaatctcaagcatgctgcacgcatgggacaaatttggactcgactcagtgcagaaaaggtacatcgagaagtgttccaaggaactgggcattcctgcagaggaggtgcccccattccaggaagtgctgcggggcaagattaattttctgggaatggtgagagggaaggataacgaaatttaccgcaagtaccttaattggtatcggaggttatcaaacagggagtga

SEQ ID NO: 7912 - RNA, 1137 nt, synthetic construct
  source 1..1137: mol_type = other RNA
atgtctagttcctcttttaccgatctgaatagccagcacaacaaggggtctagcctgttcctgtatcaaaactgcgacgaattgagggagtcattcaagtccctaaagaccccccgggacattgctcggctgcttgacgtgagctataacaagctcacataccacatcagcatattaccagaaaatgaaaggtacagagacttcctaatacccaaaaagtctggacagtcacgcactatttctgccccttgtactccactgaaaatcttacagcgcaagctgtcacaggtgctgtacagcgtctatgagcccaaaagtagtgttcatggctttgttcctaatcgctctatcctgactaacgctaaaagacatgtccacaagcgatatgtgcttaacatcgatctcaaggactttttccactcgattcattttggacgcgtgcagggcatattcatgaagcctccatacaatcttccgaaagaggtagcagtggtcctcgccaagatctgctgctatagtggccgtttgccacagggagccccgaccagtcctatcgttagcaatatgatttgtgcaaggatggactccgagttgagaaaactcaccgtggagttcaaatgtacctcctacacaaggtatgccgacgatatcacatttagtaccactctgtccaagttccccgtcgaaatcgcttaccaagaaaaatccggggatgataattcacaaaagctgattctgggtgagagactttcaagtatcattcagagcaatggatttgctatcaacgagtctaagatccggttgcagcataaatctcagcaccaggaagttaccggcattacagtgaaccagttcccaaacgtcaagcgttcattcgtgagggagataagctcgatgctgcacatctgggataggtttggtctgaagagcgcagaacaacgctttcgggataaggccgccgaggacctcaaaacatccgcatacacgctcccttcctttcaggaaataccctcctttaaagaggtacttcggggcaaaattaacttcctccgaatggtgcgagggaaagacaatgcgacgtatctgacttactccaagtggttctacgagttaagcagaaaagaggcgattaagtga

SEQ ID NO: 7913 - RNA, 1131 nt, synthetic construct
  source 1..1131: mol_type = other RNA
atggaaaatttgtcgcttctgctggagaggtcttgcgaggatctgtgcgaagacttccattcactcaaaaccccgagagatgtggccgctctcctggacgtgccgtataaacgcttcgtttatcatctctataaggaggagaaccgatacacttcctttgagattccaaagaaatccggcgaccgacggacaattagtgccccggtgatcggcttaaagataatccagcgtaagctgtcacaggtgctgtattgtgtatacaaccccaagccatctgtgcacggattcgtcccagctaaatcaatactcactaatgctctgccccatgtgaagaaacggtacgttttaaacgccgatcttaaggacttctttcccagcatcaatttcggtagagtccgcggcctttttatggcggccccttacgggttgagccccgaagtggccacagtgctcgcccaaatctgttgttacgaggggaagctgccacagggagcacccacgagtcctgtcgtgagcaatatgatttgcgcgagaatggatcgccagctgcagcaccttgctaaggagtaccggagtacttacaccaggtacgctgacgacatcaccttctctacaacggttcctaaatttccaaaagctctcgcatatgtgcctgaggagggcgacgaaaaaaagcttatcctgggtgaaaagctcgccgaaattatcatctccaacgactttcgcgtcaacgagcagaaggttaggctacaagataagcggagccaccaggaagtcacaggactaaccgtaaatgaatttcctaacgtagataggagatatgtacgatcaattcgcgcgattctgcacgcatgggataagtttgggctgcaaaaagcacaggaggtctatttggagaaatacgccccaacccctcgttatccccagcaagaaaagtcctctctgaaacaggtgttgcatggaaagatcgagttcttagccatggtcagagggaaggaggaccagatataccagaagcacatcaaaaaatacttcgagctgtcccaacgggacagcattccccacaaagctatattggtgaggcaggaggcagtgcatgaacagactggcaccagcaatgatgaagtttga

SEQ ID NO: 7914 - RNA, 1002 nt, synthetic construct
  source 1..1002: mol_type = other RNA
atgaaaacacctcgggatgtggcccagttgctcgaaatcccttatcagcggctcgtgtaccacctgtatcaggtccccctggaggagagatatctaaccttcgagctcaagaaaaaaagcgggggggtacgcattgttagcgcccctgcctccgcattgaagctgatccagaaaaaacttaaccaggtcttgcagtgcgcgtaccagcccaagccctccgtgcatgggttcacatttagcaaaaatatcaccactaacgctaaggcacacaccggcaagcgttacgtgctgaacattgacctcaaggatttcttccccagcattaattttggacgtgtgagaggcatgttcatcgcgatgccgtactcattttcgccagacatcgctactatactggcccagatctgctgctacaataaccaattacctcaaggcgctccttcctctcccatagtatctaatatggtgtgtgccaagttggattctcaactgcaacaacttgccaggaagctgagatgtacttacacaaggtatgctgacgatatcacctttagtacgaccgttccaaagtttccaaaagaactggcttatctcatcgacatcaatgagcagcagaaactagttctcggagacggcctgctttcaataataaaggacaacggatttcagatcaacgaaaaaaagattcgacttcagtccaaggatgaacaccaggaagttacagggctgacggtgaatcagttcactaacgtcaatagaaactatattcgccagattagggcaatgctgcatgcatgggagaaattcggtttagagttagccgagcgggagcatcgaatcaaatactacttcaagcaaaagagcccatacaaaaatattccgagtttcaaacaggtcctccggggaaagatcgagtttgtgggcatggtccgcggtaaggaagatcagatttaccagaagtatctgaatcactatctgaggctgaacaacccagtgatttga

SEQ ID NO: 7915 - RNA, 1095 nt, synthetic construct
  source 1..1095: mol_type = other RNA
atggcaaagacacggaattcaaaatcatccatccagccgacactgaggaaagagggagacgaactccggaaggaatttttccttatgaagataccaagagatgtggcacagcttctggaaataccttaccaacgcctagtgtaccatatctatatcgttccgctcgaagaccgatacctaaccttcgacattaagaagaaaagtggcggtaaccgcaatatctgtgcccctgccaccgcgttaaagatcatacagaagaagcttaaccaggtcctgcaatttgtatataagcctaaaccctctgtccacggattcgtcttgaataaaaatatcgccacaaacgcgaaaccccatgccaagaagcggtacgtgctgaacgttgacttgaaagatttctttcccagtattaacttcgggcgcgttaggggcttgtttatggctctgccatatggcctgtcttccgaagtagcaactgtgctggcccagatctgttgctacaataatcagttgcctcaaggggccccaacatcacctattgtgtccaatatgatctgcgccaaaatggacagtcagcttcagcaacttgctaaaaaactgcgttgcacctatacgcgatatgcagatgatataaccttctccactaccctgccaaaattcccaaaggaattagcttacttcattgagattgagaaccagcaaaaactgatcttaggcgatgacctcctgagcatcattaaggagaataactttgaggtgaacgagcgcaaaattaggctgcagagcaaggattctcatcaggaggtcactggcctgacggtgaaccagtttgtgaatatcgaccggaactacataagacaggtgagagccatgctccatgcttgggaaaagttcggactcgaggacgctgaaagagagcaccaggagaaatattacagcaagtacaaatcgccctataaggtcattcccaattttaagcacattctcaggggaaagattgagtatatcgggatgatcaaaggtaaggatgaccgtatctacaaaaagtatctcaaccactacattaagctgcacaagaacagccagaataaaaagtga

SEQ ID NO: 7916 - RNA, 1149 nt, synthetic construct
  source 1..1149: mol_type = other RNA
atgagtgagaattatgagaaaaagtctcaggtgatcaaagcattgaaaccatgtcttgacaagaattgcgatgaactcatcaagaagttttactccctgaagtcaggaagggatgttgcccgacttctggaagtaccgtatggcgacttagtctactatttgtacgtgatcccctacgaacagaggtatactacattccagattcccaagaagttaggaggctatagaattatcagtacccctgccacatcgcttaagctcatacagaaaaaactgaaccaggttcttcaatgtgtgtatcaggttaaacctagcgtgcacgggttcgtcaaggataagaatatcgtgaccaatgccaaggctcacattggcaagcgctatgttctgaacttcgacctcaaggacttctttgtatccatcaacttcggaagagtccggggcatgtttatggcccttccttacgcgctaaatccggaagtggcaacggtgattgcccagatatgctgccatgacaaccagctcccacagggtgcacccactagccctattgtgtctaacatgctgtgtgctaagttagattctcagttccaaaagctggcaaaaaagtatcggttcacttacacgcggtacgccgacgatattacattttctactaccaggcccaacctgccagaagagatagcgtacattattattaccgaggagcccgagaaactggagaaggtcgtgctcgggaaagacatttatagcatcgtgaaagagaactcatttgaagtcaatcagttgaaagtgcggatacagaacgacaaacaacaccaagaggtcacaagtatcaccgttaacacattccctaacgtagatcgtaattatataaggcagatccgcgccatgatccatgcttgggagaagtttggtctggagtcaagcgaactcgagtatatcaacaaatacgaattcaaagctcgactcttttccggagatactccaaaatttaagcaagtcctgcgtgggaagatcgagttcctgggcatggtgaaagggaagaatgacaccatctacaaaaagtacctgacccagtacttggaactgaataaacgcgataagaactttttctacagactgttttcctggagagaaggtaatctatga

SEQ ID NO: 7917 - RNA, 1779 nt, synthetic construct
  source 1..1779: mol_type = other RNA
atgggaacaacagcccttagtagaaccgaagaggaacttaaagaggatttttacaagctgaagacgcgacaggatatcgctcagctcctggaaatctccgattatcagttgagataccacctgtatatatatcctagagacaaagcttacacaaagttccagataccaaagaagacaggtgattatcgcatcatttccgccccaattaccagtctgaagattattcagcgcaaagtaaaccagatcctgaaatgcatctataagtcaaagccatctacctacggatttgtcacaggcaaaagcattgtgactaacgctaaacagcacctgcgacagcggcacgtgcttaacctcgacattaaagatttcttccccagcattaatttcgggagagtgcgcgggctgctcatggcagtcccgtacagctgtacagaagaagtggctactattttggcgcagatctgttgtcacgaaaatcagcttccgcaaggggcccctacatctcccataatttccaatatgatttgcgcaaagctggattctcagctgcagcgtctagcaaaaaagtatcagtgcatctataccaggtacgcagatgacataacttttagtactagcaggactaagtttccaggtcacctcgcctggttcagtcaggaagctgatgtgctgattctcggcaacgacctcaagaacatcattgagaataacggctttatcgtgaacgattctaaactcaggctgtataaccggtacaaacatcaggaggtcaccggaattaccgttaaccagaagctcaacgtgaagcggtcatacattcgtcagatccgagcaatgctgcacgcgtgggaaaagtatggcatcgtaaatgccgaggttgagttttggaataagtttgaccggaaatctagcttcaaaaaggaccgcaagtcattcaagagtatagtcaaaagcaaaatcgagttcattggtgccgtgaaagggaaggacgatactatttacttgaacttcctaaggtggttaaaacggctggcccctgagttggtatctgacaaaaaactaaaccaatacagcgacaaactgctggagaataacttccgcttaaaagccacaatctggaccgagggaaaaaccgatatcaagcaccttaagtccgccctgaagtggttgaaatatcaaggcaaagagttcaacgttgagctagaatttaaggaagatctggacgatcagaagcagggcgacggcgaactgctcaacgtctgtcagcaattctgcaaagagaagaagattatcccaatcatcgccgtgtttgacagagatgtccctaatataattccccgcgttcatgacgatactatggggtttaaagtgtggggtaacggggtgtactcatttgctcttcctatccccttgcataggaaggaaaacaaggatatctgcattgagttttactacacggacgaagagatccaaaagttagacgaagacggacgtagaatttacttatccagcgagtttaattccaaatcgggcaggcatataacctttgatgttaataccacggacaaaaataagctgaagcccaatcaactcaagatcatcgacaatgacgtgttcgacaagaacaataaaaatatcgccctgtcaaagaacaacttcgcagattatattttcgaacaaaagtccggattcaatgactttaatttccgggcttttgaggaggtcttcatcatcatagagaagatcataaagtaccatgcggagataatcaaagagtga

SEQ ID NO: 7918 - RNA, 1776 nt, synthetic construct
  source 1..1776: mol_type = other RNA
atgggtacaattaatctatctttgactgaggaagaacttaaggaacgctttagtcaattaaagacgcgcaaggacattgccagcctgctggaaatatccgattaccagcttagataccacctctacatttaccccagagataaggcttataccacctttcagattccaaaaaagaccggggagtatagaaccatttcagtcccgcatacatcccttaaaattatccaacgtaagctgaaccaggtttttaagtgcgtttatcagccaaaacccagtacacaggggtttgtgaccggcaaaagcatcgtaacaaatgccaaacaacatttgaggcaacggtatgtgctgaacatcgacattaaggacttcttctcatctatcaacttcggacgcgtacgggggctgctgatggcatctccttacaactgtacagaggaaatcgccactgtcttagctcagatctgttgtcatgagaataagctgcctcagggcgctcccactagtcctattgtttccaatatgatctcagctaggctggatagtcaactgcagcggctggccaaaaagtaccactgtatctacaccagatatgccgacgacatcacattttcaacatcccgaccaaagtttccaggtcacctggcctggttctcggaagaggccgaaaagctcattataagcgacgacctcaaaaagacgatcgaagacaatggcttcatagtgaacgaatccaaaagtcgcctgtatagcaaacaccggcaccaggaggtgactggcataactgtgaacaagaagctcaatgtgaagcgcaaatatattagacagatcagggcaatgctacacgcctgggagaaatatgggttggacaacgcacaagccgagttttacaaccagttcgacaataaatcttcttacctcaaaaagcagaagagctttcagtacatcatcaagtcgaaaatcgaatttgtgggaacggttcgaggtaaggacgaccagatttacttaaactttctccggtggcttaagaggctggctccagaactggtcagcaacgagaaactgaatgtctataacttgcttgaaaaccagaacaaaagctccataaaagcgtctatctggactgaagggaagaccgatattaaacatctgaactccgcgctcaaatggctggaggatcagggccgtaaattcgacttcgagataaacttcaaggacgatctggaccctcagaagcaaggttctagccagctcttggagatgtgcaagcaactttgcaagaccaaacatcagcaaccgatgattgcgatcttcgatagagacgaacccaatataaccaaacaggtcaatgatgattcacttggattcaaaaactggaagaacggcatgttctcctttgctctgcccattcctcaacaccggcatggacagaacgatatttgcatcgagcattactataaagacaatgagatccagcgccaggacgtgaatggaaggaggctctttttgtcaaatgagttccacgatgaaacaggcagacacttcaaagacgatttaaattgcaccgaccgaaataagtacaagtacgatgggaaaatcattgatcaggatgtgtttaacaggaataatgagaaggtgactctgtccaagaacgattttgcagacaatatcttcaacaagaaggagaagtttgatgattttcagttcgaggcattcgaggaggtattcctcatcatagagaagatcgtgaaaagctatgccgaggaactacaggagtga

SEQ ID NO: 7919 - RNA, 1470 nt, synthetic construct
  source 1..1470: mol_type = other RNA
atgggcacaacactgctttcactttcaaaggacgagctgaaagacctgttctacaaactcaaaactagagaagacatcgcagccctgctgcagatttccgactatcaattgcgctaccacttatacatatatcctcgaaaataccctttgaagaaagcgtacaccgcctttaagatttccaagaagagcggcgggtcccgttctatcctcgcacctaatacgtcgctgaagattatccagcagaaactgaaccaggtgctcaaaagtatttatcagcccaaaccgtccacacatgggtttgttgtcgagaaaagtattgtcaccaatgccaaacagcacctgcggcagagatacgtcctgaacttggatcttaaggattttttcccgactattaacttcggccgcgttcgtggactgctcatctcacccccctacggttgtactgacgaggtggccacagtattagctcaaatttgttgctacgagaatcagctcccccagggagcgccaacctctccaatcatttcaaacatgatttgcgccaagctggatagccagctgcagagactcagtaggagataccaatgcatttatacgaggtacgctgatgacatcacctttagtaccagcaggtcccgctttcctccacatttgacctggttttcgcgagaggccgagaaagcaatactgggagacgaactgaaggcgatcatcgaggaaaacggtttcctggttaatgagtccaaggtcagactgcaaagccgctacaaacggcaggaggtgacaggaatcaccgtgaacgaaaagctgaatatcaatcgcaagtatattcgacagatacgtgccgtgttgcatgcatgggagaaatatggcttggagaatactgaagctgaattttggaggaaggataaaaagcacaggtttcaggctaacagtgactctttcaggaaaatcatccgcggacggatcgatttcatcggcacagtccgagggaaagatgatcagatatacctcaattttctggggtggctcaagaagctagcccccgatctggtgagcgattctaagctcagcttagcatcaccaaagattttgcttgagaatcagaagaagaacagacaagaagcagtgctgtggactgagggcaagaccgacatcaaacaccttaagtctgctcttcggtggctagaaaaccggaagatctcttatgagttcaagctcaactttaaggacgatctagacgaacagaagcaaggtgacgaccagctgttaaaaatgtgcgagcagttctgtaaggaggccagaagcaaacctataattgctatcttcgatcgggacaaaccagactatgtgaggaaagctcatgatgaaactcagggcttcaagatctggggttccggggtgtatagcttcgccatacccataccttgtcaccgccaagacgtacgggatatctgcattgaactttga

SEQ ID NO: 7920 - RNA, 1806 nt, synthetic construct
  source 1..1806: mol_type = other RNA
atgaatactacgtttctgaacctctctgaggaggaactccgggaggagttttgtcgactgaggactcgggaagatatcgctaaactttttcagatttcggattaccaactgagatatcacctgtatgtcaatccatctcagaaggcctacgtgatattcgagatcaaaaaaaagtcgggcgggattagatccatcagcgcccctaaaacagcactgaagattatccagcacaaaagcaatcagcttttccagagcgtgtataagcccaagccttccacacatggctttacctccaacaagtcaatcgtgacaaacgctaaacagcacctccgccagaggtatgtgctcaatttggacttgaaagactttttcccaagcatcaacttcgggcgggtgcgtgggctgttgatggcgaatccatacaattgcactgaagaggtcgcaacagtgtttgcccaaatttgctgtcacaaccagcagctcccccaaggagccccctctagtcctaccatcagtaatatgatttgtgctaagctggatacccaactacaacgtcttgcgaagaaatatcagtgcatttactctaggtacgccgatgacatcaccttctccacttcaagatcaagatttcctagtcacttagcctggttctctcgcgattctgaaaaattgaacatcggctctgaacttaaagatatcattgagggtaacggatttcagattaacgagtcaaaggtaagactgcagaaccgctacaaccaccaggaggttaccggaattacggtgaacgagaaactgaatatcaagcggaagtatatcaggcagatccgtgctgtgctgcatgcatgggaaaagtatggtcttgagaacgccgagatgattttctggcagaaatacgaaaagcatcggcatacagaatttaaccctgactcatttcgacaggtaattcgcgggaggattgagtatgttggcagcgttcggggaaaggacgaccacttgtacctgaagctgctgcgatggctctctaagctcgcaccagatctagtcaacaaaaccaagtttgacatcgccaatattaacgagagtagtgaagagcaaaaggatctgccccaagtgattatatggaccgagggcaaaacggacatcaaacacctgagatccgcgcatagatggctgcagaataataaaactacccgatacaagatagagatcaaattcaaagacgacctcgatgaccaaaagcagggttccccggaactgttaaagatgtgtgagcagttctgcaaagagaaaaggaacaaccccattatagccatatttgatagggatgaacctgatctaatccggaaagttcacaatgagactaccggctttaaatcctggaataatggggtatacagcttcgcaatcccaataccccagcacagaaaagacaatcatagcatttgcattgagttctactacaaggacgaagagatcaagcggcatgataacgacggccgaaggttattcctcagcaatgaatttaatccgatctcaggacgccacattatagaccgcgatctggtgacacaggaaaccaagaagatcaagaagaacgagatcaagattatagacagcaatgtcttcgacagcaatgacacaaatgtggctttgtcaaaggataatttcgccaactatatcttacaggagagtgctaacttcaatgatttcgacttcaacccatttcttgaaatattcgaagtcatcaaccgcatctccaagcaccatgaagagaacatcaagtccgaacacattactcattga

SEQ ID NO: 7921 - RNA, 1758 nt, synthetic construct
  source 1..1758: mol_type = other RNA
atggagtccaatgacggcattaaacagctgttgggcggactggaaagtcgacaagacgtggccaccctgctggacgtgacagaccgccagctgaggtacctactgtactcaccacgttataagaaatacgagaagttcgagatcaagaagaagatgggcggagtaaggctgatttattctccttcccatgcattgaagaacctccagagacgcctcaacgccattctgcagcaggtgtaccagccaaagccctctacttacggttttgtgaaagggaaagggatcgtgaaaaacgctgaacagcacctaaggcagaagtgtgtgctgaatctggacctcaaggacttcttctctagtatcaattttgggagggtgcaggggctgctgaaggcagctccgtataatctcctccacgaggtcgctacagtcctggctcagatatgctgccatgaattcgaggtggacgggcagctgaatagaagactcccacaaggcgcgcccacgtctcctgttatttctaatatgatttacgcgcccttagatagccagttgcaacgcttggccaaaagacacaaatgcatctacacccgatatgcagatgacattacctttagcactagcaaatcaaagttcccctcctctctcgccttttactccgtgggcgatgagaagtggttgctaggcaaggagctcctcgaggtcgttgagggtaatggatttagtgtcaacgagaaaaaaacaaggctggccaccaagtaccagcatcaggaggtgacagggatcacggtaaaccaagatctgaatgtcaaacgggattacgtgagagagatacgctctatgttatacgtgtggaggactcacggtcttgaaaaagctgaagctaccttcctcgaaaagtttgacaagaagcaccgtcttaactctattacaccctctttccggtccgtagtcaaaggcaagattgaatttctgggaagtgtgaagggaaagagcgaccccatttatctgaaatttaccgacgaactcagggtgctggctcctgaacttgtcagcatagataaattactgaactcccctattgtaagagcccaaattatgactgaaggcaaaaccgatatctatcacttgagagccgcgtttagcaatctgcaaaagaaaggcctgttcctatcactagcaatcgatttcgtagatctgccacctgaaaagcagggagattccaaccttgagaaacactgcgagagcctctgtatagttactccccagtttccagttattgccatctttgaccgcgacaacagcgctatcttaaagaaggttcatgacgacagtaaaggctttaagagctgggggaacggtgtttattccttcgcccttcctgtgccgtcccatcgccatgaggatccagaggtctgtatcgagctttattactcgaatgaagaagtgactcgattgaacttacaggatcggcggctttttctgaattcggagttcagcaaaaaatcctatcggcatagcgaaaacaagatactgtcaaccacaaagttcaacgaagtgaagaataacagccttaaaatcatcgatagtgaggtccacgatgacgcagataacaacgttgccttgtccaagaacgacttcgccaagtgtatcctcaattcaaatccgggattcgacaattttgacttcagtgaattctcagcaatcttcgaggtcatcgagaaaatacttcagcggcacaatctggattcagcagtgtga

SEQ ID NO: 7922 - RNA, 1839 nt, synthetic construct
  source 1..1839: mol_type = other RNA
atgggaaataagctggaatacaacgcaaagtacctcgcatttctttttttgctgacagatatggggactacttccctggatctgccgcaagaagagctgaagaaacacttcgagcagcttaaaacccgacaggatgtcgcgcgacttctccaagtgtcggactaccagctgcgttaccacctttatatccatcctcgcgacaaggcctataccacctttaaaattcccaagaaatcagggggacatagattaattacgacaccccagacgtctttgaagattatacagcacaaactgaaccaggtactgtcctctgtgtaccaggtgaagcctagtgtgcatgggtttgcaatccagaaaagcatcgttacaaacgcaaagatccatttgaaacagcgatacatactcaacctggaagatcaggactttttcccaagcatcaactttggtcgtgtacgtggcctattcatcgccaagccctataattgtacacaggaagtcgccaccatcctggctcaaatttgttgctacaataaccagctaccccaaggcgctccaacctctcccattatctcaaacatgatatgtgccagactggactcccagctccaaaagctggccaaaaaatataggtgcatatataccaggtacgccgacgacatcactttttctacttccaggttcaaatttcctcaccggctggcctatttttcccaggatagcgagacattcgtgctcgccgacgaattgattactgttatcaaggacaatggtttttctgttaatctatccaagctgaggctccagaataggtatcaaagacaggaggtgaccggcataatcgtcaacgaaaagttaaatgtcaagcgcaaatacattcgccaagttagagcgattttgcatgcttggaaaaaatacggattagagaatgccgaagctgagttctataaaggattcaacgagaacaacaataacatgaaatcaagggactgctttcgcaagatggtgcaaggcaaaatcaattttattggtttagtgcgcggagataccgaccacatttaccttaagttccttaagcagcttaaggttctcgtccccgacctggctgacgattccaagatcaacttcataacaagcaagttatctgagatcaaatcttcaaacaacctgcacaaggccataatttggaccgaaggcaaaactgatatcaaacatttgaaggtggcatggaagtggctaatcaacaaaaaaatagtcgactacttcgatctggattacaaggatgacctggagccagataagcaggggtcaagtcaactgtttgatgtgtgcaagcagttctgcaaggagaaacggaatattccactgattgctatcttcgacagagacgagcccaatattatcaagaagattcacgacgatagtcaggggtttaaggactgggataatggggtctatagcttcgctctccctataccaaagcaccgccaggatgtgaaggaaatttgtatcgagcactactatcaggattccgaaattaaacggaccgacaaaaaaaacaagcggctctttctgagcaatgaattccatcgggagtcgggcagacatttgagcaagcctcagctcacaacaactgacaataagttcaagagtaaccagctgaagatcatcgatggcaaagtgttcgatagcgacaataacaacgtagccctcccgaaagacgatttcgcaacgtatatctatgacaaagaggagggtttcaatgactttgatttcaccgcgtttaaagaggtgttcgagatcatcgaaaagattctgaatcggcactacagtcagtga

SEQ ID NO: 7923 - RNA, 1746 nt, synthetic construct
  source 1..1746: mol_type = other RNA
atgagcacggagctgttcgcttcgaacgaggtccttatcgctgcattcttccagctaaaaacccgccacgacattgctaaacttctggaggtgactgaactccagctgaactactatctttacattgtccctagagacaagcgatataagcggttcgagatacccaaaaaacacggaggttcacgggaaatctatgcacccgcaactgccctgaagatcattcagcagaaactcaatcaggtcctccagtctgtgtataaggtgaagccctcagcccatggatttgtccagaagaagtccatcctctccaatgccatcccacacgtgagcaagagatacgtccttaatctggacctgaaagacttctttccgagtataaacttcggaagggtacggggattatttatggcgccaccgtatctacggaataacgaggtcgctaccaccctagcccaaatttgctgctttaatggctatctgccgcagggggctcctacaagccctatcgtaagtaacatgatttgttccaagctggattcacagttgcagaagttagcaaaaaagcatcgttccacctatacaaggtacgccgatgacataaccttttccacatccaggcccaaattcccatctgggctggcttactttctggaagaaacgggcaagttggagatcggcgatgagcttaaagcgctcattttggagaatgggttcgagatcaatgagaggaagaatcggctccagccttactcaaaaagacaggaagttactgggctgactgtgaatgtctttcccaacgtgcgccgagactacgtgagagaaataagaggtatgttacatgcctggcagcggtacggctacgatgcggctgagatgacatatagggaaaaatatgctggcaagcacccagaaagcaagcgagagcagatctcttttaaacgcgtcgtgcaaggaaaactgaactttctcaaaatggtgaaaggcgagaacaaccgcgtttatgtgaatctcgccaaatggttttggcaactggccccagagttcgcccagtctgaggtgttgacccctctccaccttcccaagccaattattttcaccgagggtaaaacagactggaagcatttgaaggttgctttcactagtctgaagaaaatggggatgtttaccgaattggatgtgcaatttcatgaatttggagatgacgtgcagatgggccacggggaactgttaaagatgtgtaaggcctactgcaagagagaaaaccggcagcctaacatcttcatctttgatcgcgacgtcccagcagtggtgaacgaagttatggaaaaagacaaagactacaagaactgggacaataatgttttcagtttggccgtacccattcctgcccacagaacaaacactacagatgtttgtattgagctgtattaccaggataaggatattaagcgcaaagatggcgatgggcgtaggctgtacctgagcgatgagttcgacagcaacaataactcacacaagcaacaaaatgacgtgtacactctgtctaacaagacccgacgcctggtgggcgtaaccattgttgacagtcaggttttcaatttcataacgaaggaaagcgtcgcactttctaaagactccttcgcagagctgatcgccaacgacgatcccaatttccataacgtggactttagcgagtttggtaagatcttcgatgtgatcgtaacaatcctcagggagcaccaatga

SEQ ID NO: 7924 - RNA, 1731 nt, synthetic construct
  source 1..1731: mol_type = other RNA
atgtcgaccgaactctccgcctccaaagatgagctacgagcgactttcttccagctgcaaactcgacaggaaatcgctgaaatgctcgacattcctgagaagcaactcaactactatctgtacattttgcctgagcacagaaggtataagaggtttgagatctctaagaagcggggaggcaaccgggaaatcttcgcccctgcgacggctctcaaggtcatacagcaaaagctgaaccaggttctccagtctgtctatgaggtgaagcctagcgcacacggcttcgtaccagagaaatcaatcgtttccaatgcacagccacacgcacgtaaacggtatgtcctgaacttagaccttaaggacttttttcccagtattaatttcggacgcgtcaggggtttgttcatgggctatccctatcacagaaaccatgaggtggctacaactcttgcccagatttgctgcttcaaatcttatctgccccagggcgcgcctacgagtccaatcgtgtcaaatatgttgtgtgctaaactagacgctcaattacagcgtcttgctaagaaataccggagcacctatacaaggtacgcagacgatattacattctccacaagcagaccaaattttcccagcgccctggcctacttcagtgacgatactggcaaaatcgaaattggagacgagctgaagagtataattcaggagaacgggttcaagattcatgagcggaagtctcggctgcagcccaacagccgaaggcaggaagtgaccggactaacagttaatgtatttccgaacgtaaagcgtgatttcgtccgggagatccgcggaatgttgaacgcctgggggaaatacgggtacgaggccgctgaacagatttacaggcagaagtacgccggcaaacatccagaaaatgaacgcgagcatctgtcctttaagagagttgtgcagggcaagctgaactttcttaaaatggtgaagggggagaataacagagtgtacctgaacctgattaagtggttttggaaattggcgcctgaactggcaaaacccgaagtcatcgcacccctgcccctggtcaagcccatggtgtataccgaaggaaagacggattggaaacacctgaaaacagccttttatgcactcaagaagatgggtctgtttgagcagctcgatatccagttcttggagtacggggacgagactccaatgggcgattcagaactgttaaagacatgtcaagggggttctaaaatgctgcacgagactcctcaaatctttatcttcgacagggataaaccagacgtggtgaagcatgtgaccgacaccgacaaaccgtacaaagtctggggtaataatgtgtttagccttgctataccgatcccagcccaccgcgttgacatcaacgatgtgtgcatcgagttttactaccaagacaaagatataagacgatcggatgaaaacggacgcaggttatatctgagtgacgaattcgattccaagaacggcaagcacaattcactcaacgtctacaccagaagcgagaaaatacgcaagatcaccatcatagattcacaggtgtttgattttgccggtgccagcgttgccctctccaaggacatgttcgcagaactcattgccaatgggaatcctcagttccagaatgtggatttttccgagttcggcaaaattttcgacgtgatcgtagctattcttagagagaattcttga

SEQ ID NO: 7925 - RNA, 1749 nt, synthetic construct
  source 1..1749: mol_type = other RNA
atgaccctggtcctcagcgctaaaccggagaacctccgcaagggtttcctgtccctgcagagtgccaaagacatcgcgggcttgttggagattgacctacagctgctctattatcacctttacatacgtccagaatcttctaggtacacttcatttgagatccctaaacgcagtggcggaagccgaagcatcttggctcccattagcgcgctcaaaattatccaacggaagctcaaccaggtgctcctgtccgtctactccgtgaagccaccagtgcactcttttgttctgggaaaatccatcgtgacaaatgcatccgtgcacgtcaaacgcaattacgttttaaacgtagacctgctggacttcttcccaagcattaattttgggcgagttcgaggcctgttcatgggcaaaccctactgtcttaatcccaaggttgcgacaattttggcacagatctgctgctttaagggcaatttgcctcagggagctccaacatcacctatcgtgagtaacatgatatgcgctagaatggattctcatttaacccagctggccaagaagaatcggagtgactatacaaggtacgcagacgacattacgtttagcaccaacaagggggtatttccctctgattttgccgtcataaacgaattagagcagctggaacttgggaaggagctggtcagaatcatatccgataacggcttccagatcaatcatactaaaaccagactccgtagtcgcaagcagcggcaggaagttaccggcgtcacagtgaacaagtttaccaacgtgcgtaggagctatcttagatctattagggccatgcttcacgcctgggagaagtacgatctggagaaggcccaggagaagttctggcatgattatgataaaggcaaataccggtccccatacaaatcaaaaccttcattcaagcgcgtggtgagaggaaagattgaatatctcggtatgatcaggggcaaggacgaccctctgtaccagcggctactggggcaattgcgagtgctggctcccgagctggcaaaaaaggctaagaagattcaacctgtgtatctgcagggctcacaagccattgtgtatactgagggaaaaactgacatcctgatattagagactgcatggaaaaagctgtatcccgacaagctgataccttttatcctcaagccttgcgactttaacccggcagacaaagcacacgggacgggaggtgcctctttcttgtccaattttataaagtacgtctcccccgatagtcccaatgtgattatcggaattttcgacagagatcatgatggcattagggcctacgagggtattggggaaagcttcccagagaaaaagggtctagggtcaaagctggctaaacacggcaaggccggagccatccttctccccatcccaaaaggcaaggaaaagtatgctaagtataagaacctctgtatcgaattctacttctcggaaaaaacactaaaccggaaaaacgagggcggtaaagggttagactttcaatttgggacggaggccatccatgtagccggaaaaccagcatcgggaagcaagcccagcgctattagagaaacccgcaccatcatcagggggaaagatgtcttctctaatgatattgtacctcagctcccgacatcagcgttccggaatttcaaacttctgttcgatgtgatcatcgctacccttgaaaagtgtaaaactaaggttgcctcccactga

SEQ ID NO: 7926 - RNA, 1569 nt, synthetic construct
  source 1..1569: mol_type = other RNA
atgtataagatagaactgtcagctaatcccgaaaagctgaaggctagattcctggctctcaagaagcctgaagatatagccgagctgttagaggttagttacaaagactttgtgtactggatttataggactccagagaaataccggtatgtgtctttcactatccctaaaaagcatggcaccccacggtatatcgacgccccaaacaacaacatcaaaatcctgcagcagaaactcaactacatcttgcagattgttttctctccaaagtattgcgtacatgggttcaccaacgggaggtcagtcgtgacaaacgccagaaaacatgtcggacgacgttacgtccttaacatcgatctaaaggacttctttccatccattcattttggccgagtaagaggaatgtttatgggcaaaccctataatctccccagcaaagtggcaacgtttctggctcacctctgttgttataaaaaagtgctgcctcaaggcgcaccaacaagccctgtgatctccaatatgatttgcgcgaagatggattctgagttgcagagacttgctgccagcaaccgttgcagctatacaaggtatgccgacgacatctctttcagcaccagcaaacactcctttccatccgcccttgccactatcaacgatctggggcaggtggaagtggggaaggaactggttaggattatcactgaaaacgggtttcaaatacaccccgaaaagatatggttacggcggaaggaccgcaggcaggaggtaactggtatcatcgtcaatgagcgcaccaatctaccccgcaagttcaccaacaatattagggcaatgttgcacgcatgggaaaagtacggtctggaaagtgcccagaagcactttgaagaaaagttcgataaaaagcacagagcgccctggaaaaagaagcctaggttccaagatgtcctgaaaggtaagattgagtacctgggcatggtcaagggtaaagagagctccacatacctgcgttttttagaccagttaggccggctcgctccgaagcttacaggaggacgcggcacgcctcaagatctcctgttccgcagataccaggcgctcttgaaatctgacgatccccagggaagaggctacctgctgcagtcactgctgcatgatgtgttcacttttctgaacgttacgatcgagaagagcttcaccagaaatcggaatggcgagcaaattgatggagcctttatttttgaggggtggcattacattgtggagtgtcggtggcgcgagaaagtgagtgacatccgacaggttgatgggctattgggccaggtcctgcgatccgggaaacagaccatgggagtgttcttcagtattaatggatggtcccaaaatgtgccgacccttttgaaacagaatccctcaaagagtatcattttgatgcacggtgacgacttccacgcccttctttctcagaagatatccctagataagctcctcaagggcaaaatttcggagctcaacctgaaatcggagccttttatctcagcagaagagataatcaagaaagacgacacatga

SEQ ID NO: 7927 - RNA, 1452 nt, synthetic construct
  source 1..1452: mol_type = other RNA
atgtcgctgtggctcgctgatccccctcatgtgctgaaagcccggttccacgcactgctcaggccatttgacattgccgcactgctcgacgtgcctttcggagactttttttactggacttaccgtgtcccaccaagcaggcggtacactactttttacatcgaaaagcatagtggcgcccctcgcagaatcgatgctcccgaattgaacattaaaatcctgcagcagaagctgaatcaggtgttgcgcgctgtgtacgtgccaaagcgctgcgtgcatgggtttgtgccgggcagatcagtgttaaccaacgcccaagcgcatgccggcagacgtcacgtcttcaatatagacctcagagacttttttcccagcataaatttcggccgggttagaggcatgttcatgggtaaaccttatcggctcccgccaaaagtagcaacggtgctggctaatctatgttgtttcgatcgccggcttccacaaggggcacccaccagtccagtggttagcaacatgatctgcgctcgcatggactctcagattttgggactggcgtatagacacaggtgcacatacacccgctatgcggacgatatgaccttctccacatctagacgacctttccccgctgaaatggccacacttaatgacctgggccaagtggccgttggagctgaactgcggggcatcattgagggcaatgggttccgggtccatccagagaaaatctggctgaggggtagggatcgaagacaggaggtaaccggactgacagtgaacgtagagccaaacgtccgccgacggtatgtgaaccagatccgtgccatgctccacgctgccggtaagtatggcctgccatctgcacagtccgagcgagagcagaggtacgaccacaaacatcgcgcaccctggaatgaccccccttcatttgagcgggcgctgcagggaaagattgaatatttggggatggtcagggggcacgcctgtcccaagtaccttaagatgctggatgatcttgggaggctggccccgcacttattcataataagaggaacccccagggaacgcttgctccggaggtaccgggctcttctaacatctccaaaccatcaggccagggggtatcagttgcaggcactcttcgaggaaggagcaagacctggtagagccggccgcggtggaattagtgccactcctgatcgtggcggtatctgccccggaacgccatcattacgggggcgcacacttgcccctaggtttcctgccagccatcctaccactgctaggggctccgagggccatgttcaggctccctacgaatcccaccctcgaccgagaatccaacccaggcacgggccggttgacgagcaagtagagcgtcacgagaagagagcagttcaccgacaccccgcgcgagatgaaattgtcgtccccgtgcaccatagctga

SEQ ID NO: 7928 - RNA, 1536 nt, synthetic construct
  source 1..1536: mol_type = other RNA
atgtctgacggacctccaagcaagccactacctctccccctctcccctacactcgcgaaaagcgatgccgacattaaagcagcctttcgggtgttacagtctgtgacagatgtggccgacctgctggaggtacgggagacacagctgacatacgcaatttggcgcacaccggaggagaagaggtacagcacctggagtataagaaagaggtccggcggcacccgcactattgatgctcccaggaagacccacaagatcctgcagcgcaagctggcttatgtcttatccctggtggcccagagaaggagcgttgctcatggattcagccccggtaagagtatcgtgaccaacgccgccgcacatgccaggtgtcgttgggtgttcaacgccgacctcaaggagttctttccaactatcaactttggccgggtacgtggaatgctgatggggaaaccctaccgggtgggggaaagagcagcaacggcaatcgcacagctgtgttgccataaaaggttgcttcctcaaggggcccccacctcacccgtaatttccaatatggtctgtgctcggttggatggagagctgcgaagactggcagagcactacgggtgcaattatactcggtacgccgacgatatcacgttctccacgaacaaaaagacatttccagaagaactggcgactcttataggcgaaggaaccaaggctgccgtgggctcagccctgtctcgagtcattgagagcaatggattccaggtgaatccagacaaggtccggctccaaggcaaacgcactcgccaggaggttactggcttggtggtgaaccgcaggcctaatgtcaggcgtgcattcgttcgacaaatcagagctatgctgcacgcctgggaacggtatggctacgacgccgcccagaaggagttcctggataagtatgatagcaaacatcggccggacggggcctcaggtagaacctacgaacgagtcattaggggcaaacttgccttcctcaagcaggtcagagggaaggacgacaaccgatacctagcaatgcgtcgcagattgagaagattacttggtgaagtggacgctggcgtcggaaggggtgtcgaaatggagtacgatgtctttatttgccacgcatctgaggagaagacaacagtggtggttcctttggctaaagctttaaatgacgctggcatacgcgtgtggctcgatgaggagaagataggatggggggactcagtaaccaaagaaatcaatgacggtctggccaaatccaagtttgttgtagtggtgctgtcggcggcatttatgaaaaagaaatggcctgctaaggaaatgaacgcggttctcaacaaggaaatcgcctctgacattacctgcgctctcccactgatcgtgggcgattcgagtgataaaaagatcatccttgagacttatcccttgctagctgataaacactataaagaatggtccccgtctgatatcgggaccattgttggggcgctgaaagctatgcttagtcgctatgcctga

SEQ ID NO: 7929 - RNA, 1635 nt, synthetic construct
  source 1..1635: mol_type = other RNA
atgcaggtgcggttgtctcagtcctcagcagacgagctgagaaggcgatttttcgcatgccggacagccagagatgttgcccgtctattggaagtcccatattcggtactgcattatcacgcatgcaaatccccagtgtccatccgctacgaaacctttacggtgccgaagagtacagggggctcacggcaaatccttgccccagccaccgccctcaagttgctccagcgcaagctgaatgtcgtgctgcaggctgtgtacaggccaagaccgagcgcacacggctttctgcccgctagatctattctgacaaatgcccgctgccacagcggacggtcatacgttctcaacgtcgatctggaggacttctttgggagcataaacttcggcagggtgagggggatgtttatggctcgtccatacaacctcggcgagggagctgccaccgtcatagcccaactttgttgtcatctgaatagactcccccagggagctccaaccagtccaatcgtggcaaatatgatatgcgcccggcttgatggcgagctgcagaggttagcgattcggcaccgatgtacatatactagatatgccgacgatctcagcttctcctgtcacagccatacattccctgaagccctcgctacctactctcctgggacaggaacctcggccagagttgggcccgagcttagccgagtggtgcaccagaatggcttccgtcctaaccccagcaaagtcaggctacaaaggccctctgagaggcaggaggtaaccgggctgattgtcaaccgggatcccaatgtacaccgcacgttcgtccgccaagtgcgcgcaatgctgcacgcgtggcgaaaattcggtctggaagctgccgaggctgagtttattgccaagtatgggtggagacacagagcaccggaacgggcgactccaagatttaggcgagtagtgaagggcaaactggactttctgcgcatgatcaggggaaggtatgaccccctgtaccgcaaattgttgcgcgaatactgcaccctttccgatgagcacttcgaagaagcccccaccgcccctactgtagaggccttgattgcacgggctgtttgggtcttggaatgcgatatctgtctccgccagggtacggctttttacctgagaggcaacggattagtgtcctgtgaccatgttgtttgcgaccacatccgggctttccggccagatgcacctggaactaagttcaatatcgacattgtcggacgacattctgtggttgacttagctgttctgcgactgagggatgccgacttttcagacgatggattacgcgctggtacagcgagtgctctccagaccggggacgaactaactgtttggggctttcccaatttccgtcttggggatactgtgcaggtgcatcctggcagggtggcgggattccgtcaggtgtctggcatcagacggattctggtgtccgcacctatagtgcggggggcaagtggtggtcctgtgctcaacaggagaaacgaggtgatcggcgtggccgtaactggtgcagagacaatggaaaccgcccatgagacagaggaccatggcgtccttcctatcaacgccctggagcacgtccccctgcgctaa

SEQ ID NO: 7930 - RNA, 1614 nt, synthetic construct
  source 1..1614: mol_type = other RNA
atggagataaaactgagagcggatgacagtacactcatcgaaaagttcattgccctccaaagcagaaaagaggttgcggaccttctggagattgatgtgaagaccctgatctactttttgtacaggagaaaggacaaggacaactataaaatcttctacctgaggaagcgaagtggcaaagaacgaactatttgcgcaccgattaactccctgaagattatccagcgaaagctgaactacatcctttccctgatctacaaacccaaaccttctgcccatggattcattgtggaacggtctatcttaactaatgcccaggcccaccttaagaataataatatgctcaacgtcgacattctggacttctttccaaacatcaatttcggtagagtaaggggaatgtttatggcaaacccttacaatatccctccggaacccgccactgtattggctcagatatgctcttgtaacaaccagcttccccagggggcgcctacttctccaatcatttctaacatgatttgcgcacaattagattcccagttacagaaactggctaagaagcattcatgtacatatacgcgctatggggatgacctctcgttttcgacatggcaatacaagtttcctaaggaactgggatacaaaacaaaaaccggcgaggtcatcgtgggaatttccctcgagaagataattaggcagaatggcttcaaacacaacaaagataaagtgaccttgaagagccggaaatcacgcctgtcagtgaccggtctgattgtgaacgaaatcccaaacgtgcccagaaagttcgtgcggcaaattcgggccatgctacactcttgggagaaggatgggctcatcaaagctgagcagatccacctcaataaatatcgctataaacagaagaacccgaaggcatttcaacctaaattttcaaacatcgtccggggaaagataaactacataaggatgatcaagggagaagagaatccagtctatcagaagctggccagcaaattcaatgatctcaacgggggtggttttcccaagtattaccacaatttgcgcgaggaactagaagccgcagtgtggatcatagagggcgaaggcggaaccaaccagggcacaggcttcatgctagaaggatttggaatgattacttgcgctcatgttctgaccaagtccatggaggctttccggtgcaatgactatgggaacaagttccccgtggagatcatttcctatgataacgagaatgatgtagccgtcctgaagataaagggcaatgagaattatcattacctccgtgtgggcgattccgacgagatcgacgttgggagtgagatcaaattgagtgggtttcctaactacaacattggggatagcatatatatcgacgatggcaaagtcacgttgtgtaggaaaagcctgggtcgtaccagataccttataagcgctcgcattgttaagggtaacagcggcgggccagtccttaataagaataatgaggttattggcatcgctgcaaagggagccccatgtttcgaagacaagaatatggacgagaaatttgaggtgattccaatcacaatcatcaatcccgaacccctgtga

SEQ ID NO: 7931 - RNA, 1656 nt, synthetic construct
  source 1..1656: mol_type = other RNA
atgagaaataggttggacattcaactaagaaagaacattgatgaggccgtcggggagtttcaaagcctttccagtccgcacgatgtggcggccctgctagaaattccctataaggtgttgaatttccacttatacgtcgcccacccaacccgtagatacaagacatttaccgtgcataagaaatctggtggggttagagagatttgcgcacctgtgactgctattaagatcatacagcagaaactcaactacatcctgcagaacctgtacaagaccatatataagaagaagttcagtgttcacggtttcatatatgggaaatcagtgagaaccaatgcgcagagccacacgcggaaggactacgtgttcaatatcgacctgctggatttctttcccagcatcaatttcgggcgggtgaggggcatgtttatggcaaacccatataggctgcctcccaaggtagccacggtcctcgcccagatttgctgttttaacaatcagcttccccaaggggctcccaccagccctatcatctctaatatgatctgtgcgaggatggacgacgaactgtatcgactggctaaacggttcgattgtaaatacacacgctacgttgacgacatgactttctcaactaaccggcctaacttccccgccgaactcgcaaacgtcacccgtttggagagtggctggcgactgaaagccgacgtaggaaaagaactcaacaaaatcatagaggagaataagttctcagtcaacacgtccaaagtttggattcagcaccgcaactgccgacagaaagtgactggcttaatagtaaacgagttcccaaacgtgtccagaaagtatacaaatcagattagggctatgctgcacgattgggataaacatggcctcatagcagccgaaaaccggtttgtgaatgactacgataagaaaaagcgatggccatacgagccaggtatcctttttaaaaacgtcgtgaaaggaaagatcaactttttgaagatggtccggggcgaccgcaatcctacataccagaagttctccgagaagttggcctccctcgatccggatttttctttcatcagaattgttagggaagctgacagcgacaatctgcagcaggccgtatttgtgcttgaatcaccaagagggcaaggcaccgcttttatgctgcgtggcatcggcctagtgactagtgcacataacttaaaaaacgacaagctggacacatatctgtacaagaccgatgaaccagcagacaaacagcggctgaaggtcaagcatatcaatacaaacctcgactttgctatcattgaggttgctcaaggttgggcaaaagcatctctggttaggggagattcgactattcttaagaccagggacacagtgaaggtgatcggatttcccaattatgccaaaggaaagagcattcatattcacgacggaaaaattaccggccgcggacgctggttcaaagtcaagactctcaatgtgagcgctcgcatcatatatgggaactccggaggcccggtgctgaatgataagaatgaggtcgtgggtatcgcgttctacggcgcccctgatcctgagaaagccgatcgcattgaatctggggtaatccccatcgagatcttggataaactcatgtga

SEQ ID NO: 7932 - RNA, 1743 nt, synthetic construct
  source 1..1743: mol_type = other RNA
atgtcgattagcctcgacgcaagtgaagaggagctgcagaatgacttccataacctggaggatttggaggatgtggctgatcttttggatgtggagtcctcgaaccttatttatcatataagagagagcccagaggagggacgatataaaaccttcaccctggacaagtcaggtggcggggagcgtgagatcagtgcacccgtgagcgcactcaaaatcatacagcagaagttaaaccagattttacaggccgtctacacgccgaaagccgctgtgcacagttttctgcccgacaggaatattcggacaaacgcagaacagcatgtcaaacagagatttgttttttgcgtcgacctcaaggacttcttccacgagattaattatggaagagtctggggccttttgcaggccgtgccttacgaactgcctgaggatgtcgcgaccgtgctggcgcaaatctgctgtcataacaatagattgccgcaaggggccccaactagccccatagtgtcaaatatgctctgtgcacagctggactctgaactgctgcgcctcgcggaatccaataaatgtatctataccaggtatgccgatgatctaacctttagcacatccatgcgccaattcccagacgaactagccaccggaggggaggatggaaacgtgaaggtggggaaggagctgagagaggtagttgataagaatggtttcgaactgaacgaggacaaaactcggctacaacacgaagattacagacagatggttaccggcctgatcgtgaacgaaaaggtaaacgtgccacgagaattcgttcgagagattcgcgccatgctgcacgcatggaaagcccacggctacgaagctgctgaggaagaattcctgagggaatatgacacgaagaatcggaagtccgagaaagaggagcctgtgttctccagggtgatcagagggaagcttgaatttctgtcaatggtaaggggcaaggatgacaagatctacaagaaatatctgacagagtacagtaggttgtctaacacgcctattaatatcgacaatcaggaggagcctgaaaacgacacatctaaactcatcgtgtacacagaaggcaaaacagactggaaacacctaaagcgggccattcgcgaactggctgtcaaccagtccagtgaacttcccgatctcgagttcaacgaaactgagtccgatcgcggcgacgatgaactccttgagaaatgccgacatactagcgagtcagaaggccagcaccagcacgcacacgttttcctgtttgaccgcgatcagccaaatcaggtccaggaagttactgaggatgaccaaagttttcgttcatgggggaataacgtgttttctgccgctatccccccacccccccatagagaggatgtcaacataagcatcgagttgtactacgaagatgacgaccttctcaaaagggatggaaactctcggcggatatttttaggtcaagaattccacaagacctcaggaaagcataaagaagaggccaagatcaattgctctctgctgaacaagactggtgacgaaaaccgtattattgacgatcgggtgttcaatgaggagaatgagaacatctccttaagcaagaatgacttcgctgagtacattttgaacgaggaacctccttttgacgatattaattttaagcccttcgctaggatctttgacctgctcagcgaaatcgaggagcgcgtagactcttga

SEQ ID NO: 7933 - RNA, 1590 nt, synthetic construct
  source 1..1590: mol_type = other RNA
atgatcacagaactgaccgccccggatatagtgctgactgacaagttttttgccctggcaagccccgaggacgttgcagatttactggaactgaaatcctatgcctttcttcagcacttgatttttatattgccttccagcaagcgatataaggaatttgtcatccctaaacgtcgtggcgggaagagatacctgctcgaaccttcacccaaccttaagatcgtgcagaaaaagctctcttacgtgcttcagctggtttacaaaccaaaacggtcagtgcacgggtacgtcaacggtagatcgattgtgactaatgctattcaacacgtgggacgacgatatctcctgaacattgacctggaggacttcttcccgagcatccactttggaagggtgcggggaatgttcatgtcatatccatacaacttcaacggccgtgttgcaacaacactggcacagatttgttccttgcggaattgcctaccccagggggcgccaacttctcccatcataagtaacatggtgtgcgccaaactagactcagagttacagaaattagccaaacaacatcgatgctactacactcgctatgccgacgacctgactttctccacctccatcaaacagttcccaacagccctggccgtatctattgtggaggggaaacgcctcagggtggaggctggcaacgagctgtccgaggtgatcaataggaacggcttcactatcaacgttaagaaaattagactccagaagcattctcagcggcaggaggtaaccaaccttaccaccaacgaatttgtcaatgtcaatcggaagttcattagacaaattcgcgcaatgcttcacgcctggcgcaaattcggatatgtggctgccgagattgagttcaggaacgaatacaataaaaagccacctaacaagccatacaagaaacagcctagcttcaagaatgtcatcaaaggcaagatcgagtttgtacagatggtcaggggtaagaatgatcggatcttcattatgctcaataatcaagcagcccagttggaacgcatccagaatatcgagccctatcaattccaaatactggaggatgaagaccatgagattgtaagcctgatagcgtctggagaaaccgagtgggtggaatttaaggaaggggcttgtttagaccctcacacaggcgagaacaacaagaagaacatgtctcataagatactcagagctgttgcatccctcattaacagtaaggttgagggcagggtgctgattggaatcaaggacaatggtgctatcacgggcgtcgagagagaatatgctctggctgatcccagcaaggtcaattgggatgggtacgaattgtacctgacaaattttctcaacgattcgctatcaatcgagaatgcgcataacttctttaagatcagtagacacgccattaatgataagattgtgtgctgtatcagcacgaggatggctgataagcccgtgttggtccacgagaaactttatatacgcagtggcaatcagagcaaagaaatcaaaggtaccgaaaaagtggactttatcctgaagtgggccacctccagttga

SEQ ID NO: 7934 - RNA, 1446 nt, synthetic construct
  source 1..1446: mol_type = other RNA
atgactatcaaattaaccagtaccgatactgtgctaaccgacaaattcttcgccctgacttcccccgaagatgtcgctgatttgcttgaacttaaaagctacagctttctggagtatcttatcttcatcctcccatcttcgaaaagatatcgcgaattcatcatccccaaacgcaggggtggaaagcgctatctcttggaaccaattcctaatctgaagatagtgcagaagaaactgagctacgtgctacagttgatctataaaccaaagcacgcagtccacggctatgtcaacggcaagtctattgtcacaaacgccacccagcatattggcagacgatacttgctgaacatcgacctggaagatttctttccgtctattcactttggacgggtgaggggcatgtttatgtcctacccatacaactttaatgggagggtggctactacgttagcccagatctgcagtctcaggaattgtctaccgcagggagcccctaccagccctataatcagtaacatgatttgcgccaagatggactctgagctccaaaagctggctaaacagcatcggtgttattacacaagatacgccgacgatctcacctttagcacatccatcaagcagtttcccccagccatggtagtgactctggtcgagtctaaaaggcttcgagtggaagtcgggattgaattaagcgagataattaaccgcaatggattcaacgtaaacatgtccaagatcagactgcaaaaggacagtcagcggcaggaggttacaaatcttaccacaaacgagttcgtgaatgttaatagaaagtacatcagacagatccgtgccatgcttcatgcttggaggaagtttggttatgtggcggccgagaacgagtatcgcaacgtgtataataaaaaacctcccgacaaaccttacaagaatgcccctagcctgaagcgggtgataaagggtaagattgacttcgtaaagatggtgcggggccaggaggacaaactgttcattaagttgaacaatcaggcagcccaactggagcgagcggaacgtattgagccctactttttcgatatactgcaagagcccgatcacgaactcatgactgtgatcgctaacggggaaacggatttagttgagtttaaggaaggagcttgcgttaatccccacacaggcaaagacgataaacgcaatatgagctcaaaaattctccgggcagtcgcttcactcatgaactcaaagtcaaacggtgtggtgctgattggggtagcagataacggagcaatatccggggtcgaacgtgagtactctgttgctaatccagcaaaggcaaattgggacggctatgagctctatctgaacaatttgctgaacgactccctgtcagttgagaatgcgtacaagtacttcaatatctccagtctgaccatgctgaactga

SEQ ID NO: 7935 - RNA, 1578 nt, synthetic construct
  source 1..1578: mol_type = other RNA
atggccatatatctggagtccactcctgagattatcgaagggaggttcagggatcttgccactcctgagggcatcgccgaactgctcgagctctcctctctcgcatttctgaagtactgcctttacaccttgccacaggcccgcaggtatcgcacgttcacgatcccaaaaaggagcggaggggaaagaattatcctggagcccgagcctaacttgaagattatacaacagaaactcctgcaggtcctgacccttgtgtaccagcctaagagagcggttcatggctttgtggacgaacggtcaatcgtgactaacgcctcgccgcacataaacaggagggctatccttaatgtcgacctactagacttcttcccctccatacacttcggcagagtcagagggatgtttatggcctttccatttcatttcaatgacaaagtggccaccattctggcacagatttgtagcctgccacactgtctgccacagggagcacctactagccccatcatcgctaatctaatctgcgcgaaaatggactcacaactgacacaactggctagaacccatcactgctattatactcgttacgccgatgacttgaccttctcaacaagtttagcccactttcctaagtctctggccactattatctctgaggagggagaaagaacagtcgagatacgagaagaactggcacgcattatccacaaaaacgggttccgcatcaatcccaagaaggtccggctccaaacacgggatcaccagatggaggtcaccggccttgttgtgaacagaaaggtgaacgtgaaacgatcctatattcgacatgttcgcgcaatcctgcacgcttggcagcagtatggttaccaggccgccgccgacgagtactttgctaaatacttcggaaaggctccagacaagccctacaagacactgccaggcataagacaggtgattaaaggcaaattatcattcatcgcaatggtacgaggccaggaggaccatctgtatattcggtataacaaccaagccgctcagttagagcgccgtgatctcccggaaccccatatttttcggatacttgctgaaccggataatgctatcgtcaggttggtggccgagggtgagtctgtatgcattgaattcaaggtgggggcgtgtctcaacccccataccaataaacaggataagaaaatgaaggacaagatcgttcgtgcggtggccagtatgatcaacagcttgcccgtggggcacctgctcattggtgtgaaggataacggcgagatcattggcgtcgaacgggagtttcccgtcgctgacagtagtaaacagaatcgcgatggatacgaattgtacctggcaaatatcttgaatgatagcctccaagtgaataacgcacagcagttattcaccattacgtttcataatgtaggttcccacaccgtgtgtcaggtgcagacaaccaagtccatgcaacctgttctggtaaacaatcaactctttattcggagccaggcacagacaagggaactgagcggacaggagatggttgagtacatccagcaatattcttga

SEQ ID NO: 7936 - RNA, 1755 nt, synthetic construct
  source 1..1755: mol_type = other RNA
atgtccctgcacctctcgtcggatccggacacactccggcagcaattctttcagctgaagtctcgcgacgacctgctgaatctactggacatttctcagcagcagttgctgtactacctctacatctgccctgagaataaaaggtatagacacttacgcctgaggaagaaaagggggggatatcggacgatttatgctccagccacccacttaaagattgtccagcagaaactctccagcatcttacagctcatttacgagcagaaacccgcggtccatggcttcgttccacacaaaagcatagtctcaaatgccgccatgcacttgaacaaaacgtatgttctaaatctcgacctacaagattttttcccgtcaatcaattttggtagagtgcgggggctgttcatgaatcagccgtactatctcaacgaagaagtggctacaatcctggcccagatatgttgtcatagaaacaccctaccacagggggcacctacctccccagttatatctaacatgatctgcgccaagctcgacagagagttattgaggttcgctcaggccaatagatgcgtctacacgaggtatgctgatgatcttactttctccactaatacaagacagcccccttctaagctggttcgcaggactgaggccacagctagcattgagctggggcgcgatttggtgagcatcatcaccgcgaacggcttccaggttcatcctgagaagagccgtctccaagtcaaaggcagacgacaggaggtaacaggcctgaccgtgaaccatttccctaacgtcccccgtcgtcttattagacaaatcagagcaatgcttcacgcctggcggaagttcggtctggatgcagcccaacagcactattatgctcattattgccaccggcagtacccagtgtttaaaccccgaccccccttccggcaagtgttaatcgggaaaatcgcatttgtaggcatggtgcgcggcaaacacgatcaactgtacctccgccttcgagatcagctcttgaaccttgatccaacttacagggcggcggtggaaaagaaggctgaagaaacttttattctcagtacccccctgatcaagactgaggggaagaccgactggaagcatatcaagcacgcactgcgagtgttgcaagctcaaggcctgtatgccggactgtctctggatttcgatgagagtttgaccgagggaggatcaagcgagttgaagaaaacttgctattacctttctcgggtcaagcaggcccagattataattgcactgttcgaccgagacgagcccaacatcatcagagaggtggccgacggtgatcggttcaaggcttggggaaatcaggtgtttagctttgtactgcccattcctgaccatcgcacccacacccctgacatatgtattgaatttctgtaccctgacaacaacctgctcctggtagacgaacacggcaggcggctgtacctgtcctcagaatttcatgaaacaagtggtaggcataaagaaaatccagccatatcatgtctgctttccagcaagttcaaaaaggacgcaaaacttagtattatcgacgcgagtgtgttcgatgcaaatcatcgttccattgccctcgccaaagatgcctttgcagactacatcttgcacgatcaggtgccttttaaccgcatgaacctagacggatttaagccaatcttcgatatgataatcgctattcttagggctgagacaaataagacatga

SEQ ID NO: 7937 - RNA, 1689 nt, synthetic construct
  source 1..1689: mol_type = other RNA
atgctgagcgctgccctcgctatctcgcgcatcggaggccaggtgagcctacgcatccacccagtgcccacatccacccagactcgccacttgaccgcttcggacgacgatttcaggcagtctttcgccagccttatcgatagggacgatgttgtaagattgctcgaggtgactgattctacactgatatacctgttgtatcggcctaggcctcggtacacgacttttactgtaccaaaacggggtggcggaataaggaagatcatggccccagttggcagtttgaagatcgttcagcaaaagctgaatcaagtgctaaatgccgtctatagggtacgaccctcagtccacggctttgcaatcgacaggaatgtgaagaccaatgctctgccgcacgttgggaagagatgggtgctgaatatagatctgctcgacttcttcccctctataacctttccacgggtgcgcgggatgttcatgggtcgaccatacgctatccccgaaagagccgccaccgtccttgcacagatttgctgcaaggattctctccctcagggcgcaccgacatcacccgtggtcagtaatatgatctgtggcaaaatggactccgagctccggcgcttggccactcactatcgctgtgtttatacgcgttatgccgatgacatgactttcagctgtaactcaaaggaatttcccgctgatttagccaccacttatctggacggagaaatgcggccaattgttaccgtcggagatgtgctggtgaaagccatccaggccaaccacttttcaattaacaacagcaaatccacactgagagggcatggtacgagactcgctgtgactaacgttaccgtcaacgagtttcccaatgtccctcgaacatacatccgccaggcacgctctatgcttcacgcctggcgtaagtatggcgtcgagagcgctgacgactcttacagggccagtcgaggcttaagacctgcggacgaccggtcaaggggtcaggttttccgaagagtggtgctgggaaaactggaatacgtgcgtatgatgaagggagacacagatccagtgtacattaacttaaagaaccgattagctgacgcggaccctcggtacccaagggtcccaaccatcgtaacagagcaacagctgggcgctgcactgtgggtggtggttagtcaacggggcgaagagattcggcagggaaccgcttttatgctgcaggggtttgggctggtcacttgcgaccatgtaatcctggaccgcaccgaggtctaccagatatccgatcctaccaatgcatttgacgcaacacccgtaaagagaaacggtcatatcgacctcgcgattctgtccatcgatcagaaacccgaggcacagttcacaggggccggaagagcagccattctcggcgaggatgtgacgctcattgggttcccgaaccttggtcccggcgataccgagcgcacagaaagggggcatgtgaccggactaaggactcggttcggggtgaaacacatacttatctccccgacaatttacagcggccatagcgggagtcctgtgcttgatgcggaattgcgtgtgattggcattgcccaaagaggaattgattatagaaacgacgatcctgatgcaatcgagccttccgcgattgccatcgacgaagtcaataaactgtga

SEQ ID NO: 7938 - RNA, 1695 nt, synthetic construct
  source 1..1695: mol_type = other RNA
atggccaaggcttactcaagagagctgaaggacccaccgagtgtcctggcctcacgcttcgcgagtctccgggattacagggacgttgctgctttattggaggtggatgctccaacactcgggtttctcctttatcggtccccccctagcgtgcgttatcatacgtacgatgtgccaaaacgcagagggggttcgcgcaccatatcagctcctatggcctccctcaaattcgtccagcgcaaattaaaccaggtcttgcaagccgtgtacagcgtcaagccatctgtgcacgggtttgtggacgaaaagtcaattatcagtaacgcagattgccatgatcgcagacgtttcgtgctgaacgtggatctggagaatttctttggggttatcaacttcgggagggtgcggggaatgttcatgggtaagccatatcgcttacctgagcgagctgccacagtgctcgctcagatttgttgcttcaacaatcagttgcctcaaggcgcccccactagccctgtcgtctcaaacatgatttgcggccagctggatgcacagctacagcgcctcgcccgggaccataaattgacatatagcaggtacgccgatgaccttacgttttctggcacgaatcatgtaccgtctgagcttggagccgacagacgagcacccaaaacatttgacgtgggccctcgactgaccgcggttatctccgcaaacgggttcgcaatcaaccggaagaaagtgaggctcgccacagctgctgaaagacaggaggtcacaggtctggtggtgaatcgaaaggtgaatgtaccgagaaaatacatcaggcaggtgcgagcaatgctgcacgcctggaggaaatttggactggctgcagcggaagccgaattctttgcacggtatgacaaaaagcataggcccgtgagtaagcgccctactttccggagagtggtgaggggtcggttggaattcattgggatggttcgcggaaaggacgatcccctctttcagaacctgctggcccagtatgacgcctgtgtggctccgtccggtagaagcaccccaagagcacccaacgatgtgattaggggagccctttgggtcgttgaagaagaccacagcgagatgtaccagggcaccgcctttgcagtatccgccgattccctgcccgagcacctgagagttgcggtacgggctgcaggcgtcgagtggactctgatcacctgcgaccactgtctgctttctggaatgaaagcatatcaccctgctaatagcggagcattctttcctgtggaagtcgtggcgcgtgacaatacactggaccttgccgttctggctgtcaggactgccagtctgggcaccttgccattagacctgtccgctaccatgacagatggaatgtctctacgtgtagctggctttcccaactacggtcccggcatgaccgccccaatatactccggaaccgtcgttggcactcgagcctggcatggccggcaactgcccattctcgatgcgactatagtagctgggatgtctggcggccctgccctgaataatagcggggccgtgattggggttgcggttaccggcgcaatcgaccacgcatctgccaaggctactgagaagcacggagcagtccccatcgccgccctttcggagttgcaagccctaccaaagcccgagccactctga

SEQ ID NO: 7939 - RNA, 1521 nt, synthetic construct
  source 1..1521: mol_type = other RNA
atgtcgacagagctccactctaatccagaggtacttcgcgaacaattctatggcctggagcaccccaaggatatcgcaaaaatgctggaaatctcctacctgactttgaactactacctgtacaggttacccgagaacaaacattacaccattatcgagatacctaaacgaagcgggggtaagagaagtttaagggtgcctatcagccccctcaaaatattacagtccaagctatatgaggtgctgttgtgtatataccaaccgagggcttctgtccacggcttcgcgaggggacagtcaatcctcactaacgcagaagctcatctccagagaaagaaccggaccttcatcctgaatattgatatcgaagatttcttcccgagcatcaattttggccgcgtccgcgggatgtttatggcccgtccttataacaggtctgaaaaagtggctacagttctggcccaaatctgctgcgttgataaccagctgccccagggttccccaacgagtcctattattgccaatatgatttgtgccaaactggactcacagctgcaacggttggccaaggaacaccgatgcttttatacacgatatgcagacgacataactttttccacttcactgtcttcattcccacgcgcgctggcgaaggtggaacacaacacctccggcaatcccctgattcccggatcaaagctgaatgagatcgtggagaagaacgggtttaccatcaatcctgacaaggtccggctgcagagttccgacaggcggcaggagattacaggattgacggtaaataaattgccaaatgtccctcggaagttcttgaaccaggtgcgggccatgctccatgactgggaaaaaaatggatacggcagagcccaggaaaaccacttccagaattggagaaagggatacagctctccgtacagtagccctacaagctttgccgctatcgttcgagggaaaattgagtacattggtatgattagaggtacacagaatcgcacatatcgtaaactactgaagaaactcagtgagctggatcccactttcaaaaaaagtgggcttgtggatatgcgcgagcagatctttattagctatagccacaaggacaaaaaatggctcgaggaactaaagcgtcatctaactgtcctcgagcataaccataagttggttgtctgggacgataccaagatcgaggctggctccaagtggagacaggagatcgagaaggcacttaactctgctaaagcagccatccttcttgtgtccgataacttcctggtgtcggactttatcagagaacacgagctcccccctctgttacaagccgctgagaaggagggcctgaaaatactctggattccagtaaccagcaccatgtatgaatataccgagattgtggaataccagtgcctgaccgaaccatcccggccacttaattcactcaagaagtctgaaaggaacagggagctggtggagatctgtagaaagatagcagaacttgcctcttga

SEQ ID NO: 7940 - RNA, 1542 nt, synthetic construct
  source 1..1542: mol_type = other RNA
atggacatcgagctctctgcaagtcctgaagatctccagaaaagatttttcgcccttcaaacatctgaggacatcgccgagttgctcgagattccttacgactaccttatttactacttataccgggtaccgtttgagcaccagtacacgacattcttcatccctaagaaaagcgggggaacgagaaagattacagccccaatttcccctctgaaaatcattcaaagaaaactcaaccaggtgctgcaggctgtatatatccccaagccttcagttcacggatttgttcccggccggagtatagtgaccaatgcagaagcacatatgtacaagcggatacagaagaagaaatcacagaaggttgagaagccacgcaattatattctgaatattgacttggaggacttttttccgtcaataaactttggaagggtccgtggcatgttcatggccgtcccctataagtgtcccgaaagggtggcgaccgtgctcgctcagatatgttgcgcgtacaatgaactaccacaaggggcccctacctcacctatcgttagcaatatgttgtgctccaagttagatagccagctgcagcgactcgcacagaaataccgctgccactacaccaggtatgccgacgacattacttttagcactagccttctatcgttccctcgcgctttggccacaactgaatactcatctcagagcgggtaccaagttgtggtaggtccagaattgaacgtgatagtcgaggagaatggcttccggatcaatcgacaaaaggtgagattacagacccccgatcgcagacaggagatcacaggactcaccgtcaatgaatttcccaacgtcaggcggcagtacattaaccagatcagggcaatgctgtatgcttggaaaaagtttgggcatgacaacgctgaggaaaggtatcgagagctccacgataatcaggaataccaatgcccggacaaactgctgccatcctttagaagtatcgtgcgtggcaagatcgagttccttggcatggtgcgtggaaagcaagacaggacttatctgcgcttcctggaaaaattggccgaggtcgatcccgaattcagggccaactgggagatgaacaagatcaaaaaaggcggcaccaacaaacaggtcttcattagctattctcgaaaagatgaagatttcgctcggaagctggtgaatgccctgtcgaatcggaacatcggtgcgtggctggatgtaaacgaaatcagtccaggtgaaaattgggttaatgtgattcagaacgggctggtggtgtgtgagctgatgcttgtcatcatatcccccgatagcatgtcttcttcccaggtggcagaggagtggcagtattttctgtcccagagtaaacccgtgattccacttctgtataagaacacaaacactatcccatacaagctagataccaagcagagaattgatttccaagagcattatgaattcgactccgccatggacatcctgctgcgcgctctcaatagagagaacatcgcttccaactga

SEQ ID NO: 7941 - RNA, 1665 nt, synthetic construct
  source 1..1665: mol_type = other RNA
atgacagatgtcgaacacagggaagacactggcgcacggttttcagccctcaaagacgcgcgggatgtagctagcttgctggacgtgtcctatgagtacctacgtcaccacctctatcgcgcccccgcaggtgagagatacacgttattcaccattaggaagaaaagcggaggcgtgcgagaaatcatggcgccccgtcgaccgttgaagctgctgcagcacaggcttgcaaaagtcttagagtgtgtgtacgaaccaaagtcatccacacacggtttcacccgcaagcggaatgttctcactaatgcccatattcatgcccggcgtaagcacgttcttaatatagacctcctggacttttttccctccatcaatttcggccgggtcaggggaatgtttatggctaacccataccgctgcccacctgaggtggccaccgttcttgcgcagatctgctctcataacaatcagctgccacaaggagccccgacatctcctgtgatcagtaacatgctgtgtgccaggatggatcgccatctccaggaagttgctaagcagtaccgatgtgcctataccaggtacgccgatgacctgacttttagcacctatctggacgagtttccacctgagttagcatcaatgcagaccgaacacggtgtagacagatgcgtcccgggccggacactggtgaatatagtgaccaagcgcaacggattcagaatcaacgagagcaaggtgaggttgcaaaacaacaaacagcggcaagaagtgaccgggcttacaacgaataaattcccaaacgtgcagcgagcctatgtgagggtagtcagagccatgctccataactggaaaaagcacggcctcgaggcagcacaacgccaatacttgagcaagtataacaaacagcaccgccctccagaatctgtgcaacccctgttccgatacatggtgaaagggaagattgagtacttgggaatggtgcggggcaaggacgacgctatctatcagagatttctcaagcgcctgagggaattagcccctgatctggtcaaggcatcttccgtagacgatccttacgccaagatacttgacagactgtgggtcctggagacagaggaaatcggcaagtgtagtcagggaactgctttctatattcaggattacggcttcgtgacctgcgcacatgtgctgggggagtctgagcttgccatcattactgcacacaccagacatgacgcttcacagaaatatagggtcaaggtaacagccaaagacgatcagattgacttggctcgtctggaagtcatcggggtgacgcctcaggtcggtctgaaagtaggggcctccgagagtcttcagatcggggatgcaataaaactcgccgggttccccaaccaccatatcgatgataccggaattgttgctagtggcactgttattggccgaagaaacgcgcccgtgactagagagccccggatcctgattagcgctaatatcattgccggtaacagcggcggacctgttctggattcgaacaatagagtgatcggagttgcggtcagggggggggctaatgaagaggagtcccgcaatacagaatttcacggcgtggtgcccatagaggctctaggacggctagttgtggctggcgtcggtgggaattga

SEQ ID NO: 7942 - RNA, 1662 nt, synthetic construct
  source 1..1662: mol_type = other RNA
atgacagcaagccctcaaagggaggagatacggacacagtttacttcattacgcagtaggtccgatgtggcatcactcctcggggtcaccgatcgtgcccttcgctacagattgtacgggctcccgatcccttcacagtacgtggtattcgaaattagaaagaagtccggtggcctgcgcagtattgccgctcccatccctccacttaagatcctccagcgccggctgcggaagatcttagagtgtgtgtatgaaccaaaagatgtggtccacggatttaccgtggagcgctccattaaaaccaacgctactcggcacgagaagtccaagcacgttctcaacgtcgacatctccgaattcttcttgagcattaacctcgggagagtgcgtggaatgtttatggctgcaccgtataaatgcgagaaagaagtcgcaaccgtcctggcccaaatagcctgcctggagggcaaattgcctcagggggccccaacaagtcccataatttctaatatgttgtgcgcacggttggatgctcatatgaataggcttgcaggatcttttaaatgtacgtactcaaggtacgcagacgacctgactctgtccacgctgcagactaagttcccgcgggaggtggccgaactgagaattgtggatgggcagcccaagtgttttgccggtcctaaattgattcgggtactaacaaggagaaatggcttcaagatcaacctgagcaaaattcggctggccaatagaagtcagcgccaagaggtgacaggcctggttgtcaatgagaaggtgaacgtccctcgactttttgtgcgagagatacgtgcaatgctccataacctgcacaaaaaaggcgtcgaaaagtgtcaacaggattatgagactaattacgcccgacacaggcgcccttcttcgccagtgcccccattcctgtgggtgctgaggggcaaggttagctatgttggaatgattcgcggggagaatgacgagctgtatcggaaactgttgaagaggctcgacgagctggcacctggactagtgaaggttcccgtcatcaaggacgagctggattccatatttgagcacctctgggccattcaggtggagacagaggctggggacggaggacagggcactgctttcatgttgcggggagtcggtctagttacagcgagccacgtgcttggcaccaagaaaatcctgggtataaagatgcagagctccgacggacgagtggaaagagaagcgaccgtgtttcgaagagatggcctgctggatctcgccattctcgaatctcctgacctagatccctctcgtgggctggaagcctctactcttaaatccaccaggaagatggctgtaaccttattaggcttccccaatcataacacaggggaccccggccatttcgatcagggtatcgtaacctcaatgaggagaagtccactttcggaggaccaaatgtttctgatctcatgcccaatcatccatggccacagcggcggacccattctggacagtagctctaaggtacttggggttgctgtgcgcggcgctatcagcagaaaggaagccgcgctcaccgagttccatgccggtatgccaatcgctgcgatcgaaaaattaacgaacgaaatggccgaacccgaaaaatga

SEQ ID NO: 7943 - RNA, 1635 nt, synthetic construct
  source 1..1635: mol_type = other RNA
atgccatatcatctgaccaagagcttagatctgctcagagaggaatttaaaaagttgaactcccctcaggctgtggcagcccttttggaagtagactacaaacgacttatatatcacttgcacaaagtcccaccttcaaagaggtataccgttttcacaattccaaagaagtccggtgcggccagacagatcactgcccccatctcccccctcaagattctccagaaaaagctgtcattcattttaagcagcgtggtggattctaagcattccgtgcacgggtttgtgcgagggagaagtatccggaccaattctagagtccacgctggcaagaagtatgttttcactatagatctggagaacttcttcccgtctatcaacttcggccgggtacgcggtctattcatggcccccccgtttaaatttaacgctgaaaccgccacaattctggctcaaatctgcaccttcgagaattccttgccccaaggggcaccaacctcccctgtcgtcagcaacatactgtgtcggaagatggatcagcaactcagccggctcgcacgcaactacaaatgcgactacactcgatatgctgacgacatcaccttcagcacagccaaggaaacctttcccaagtcaatcgctttcacgctccctgactcaaaggaaccgcattgtggagatgagcttagcaggatcatctcggatagtggatttactataaacgccaaaaaagtgagactcattgagcgctgtaggcagcagaaagtcaccgggctcgtttccaatgaatttcccaatgtcgatcgccgttttatccgccagattagggcaatgctgcacgctgcgcagaaatttggcttcactgccgccgagaaggacttccacgcgaggtactacaataagctactaaaacctggtggtaaaaagccctctttcaaaaaagtgctcaagggcaagatcgactttgttggcatggtgcgcggcaaacttgataggctgtacctgaagctgattagaaagttacagctgctggatgagacactggtgcgggcagtgcctagtgaggcttggattaacgaaatcaaagcagccctgttcgtgatagacgttcataagcctgctgaaaagcctggggtcccaacaatcgaacaggggacgggctttctattaaagggaatcgggctggtgacgtgcgcccacgtcattaatgagcgaattgggaaactggaggtgtatcagggagccgaccccagcaaactttacgacgtggacgtttctattgaagatctggacgccgacatagcagtgctgaccatccatggattcacagggccccaactcttgcagggggacgatgggatcgtacgggaggatacagaggtgattctggccggatacccaggctatgcccgtggccatagtggtactataggccggggcagagtagtgggcactaatctgcactttgacaaaaagcgcatgcttatcgatgcagttatttttccaggaaattctggtggccctgtcttgaacaacgagaggagagtaatcggcattgccgcaaaaggagacggaggacaaaattcaattgtgccaattagtgcgatcaaggaggctatgatcaggtcgcgttga

SEQ ID NO: 7944 - RNA, 1758 nt, synthetic construct
  source 1..1758: mol_type = other RNA
atgtccattagcctgtcattactgaacgaagagttaaaggagagactcttcaacctccagagcaggaaagatctcgcagatttgctcgaaattgatgaaaagcagctgatataccatctctatatcattccgcccgaccagaagtacaagaaatttatcatctccaaaggtcatggctccgtgagacgtatagacgcaccaatcagtgctctgaaaattatccagcggaagctgttgaaggtgcttacctgcgtgtatcgcgtgaagaagcctgtacacggcttcgtgtatggcagaagcatcctgtcaaatgctaagacgcatagacgacgccgctatgtgctgaacctagacctgcaggacttttttccctctataaacttcgggagggtgaggggtatgtttatggcacggccgtaccaccttaactccgccgttgctacagtgctcgcccaaatatgttgtttcaacaatcagcttccacagggagccccaacgagccctattgtctccaatatggtgtgcgctaagcttgacgatgaactccaacggctgtcgggaaaatatcggtgcatgtatactcgctatgcagacgatataactattagcaccaatctgcccgcattcccttcaaatattgctaccctcagtgataagacagggcaacccgagctgggagtcgaactgcagaggatcattgatgagaacgggttcgttgttcacaaagataaaacaaggctccaaattaagtcgcaacgccagcaggtgacaggccttaccgtgaatcgtaaggtaaatgtgaggcgttcttttattaatcaggtccgagcgatgttacatgcctgggacaaatatggcctcgaagcagctcaggaagaatttatcaataagtacgacatgcggtctagaagtccttacaagaacaagaatggggtttctttcgcacgggtggttaaaggaaaaatagattacctggggatgatacgtggtcaggatgacacgatctatttaaaatactacgcccaatactgcaggttggctggcattcctaaccgccgggccttgacttacccagtggacgaaactttgcttcctctgattgtcacagagggaaaaaccgactggaaacacctgaagattgccctgtccaagctgcagtcagagggaatcttccagaacctgaacatcagcttccacgagtatgaggacaatatggaggcgggcgacaatcgaatcatccagatgtgcagagatcgggctttgctgccaaataacgtcataactatcttcatcttcgaccgagataacaaggaggtgataaagaaagtaaccgagaacggccaggagtacaagacttggaataacaatgtgtttagctttgccatccccgtcccgaatcacagaaccgagacaccagatgtctgtattgagctatactacaggaacgaggaaattactagggaagatggtaataagagacgactttacttgagtcgcgaatttaatcctgagtcagcccgcaatcatgacgggagtctgaactgtaccgatatgaacaaaatccgggatcagaggaaggttaacgtcattgactctaatatctacaactcttccaaagagaatgtagccctacccaaaagcgactttgcggactatatcctgcaccaggaggaaaacttcaacgactttgattataccgagttcaaagccatctttgagatcatccaaagaatcattcaggaaaaccccattacatga

SEQ ID NO: 7945 - RNA, 1434 nt, synthetic construct
  source 1..1434: mol_type = other RNA
atgggaaagctcctctcaagatctaattcccagatcatcgaaagattcgacgcgctggagactcccaaagacatcgcagatctactcgaagtcgactaccagcattttgatagcatactgtttaaaaccgcccgcgccaccctgtatagagagtgtctaattccgaagaaaaacggcgagttcagacagataaacgtgcccgcagtgcagcttaaaaatattcaacgccgactccatgaagccctgcaagtcatccataaaagcaagctcccttctcacggattcgagcgtgaacgttcaatagtgacaaacgcagaagctcacgtcaagcaaaaatttgtgcttaatctcgacctgaaagatttcttcccttccattaatgctgggcgggtgtggggcatgtttcagaccgtgccatttaactgcaatgaaaaagtggcttcaatcttagccaacatctgtactttcaaaaatgagctgcctcagggggctcctactagcccgatcgtgtcaaacatgctgtgcaggaaactggattccgagcttcagaagctggctaagaagtataatgcaacgtacacccgatacgctgatgatataacaatctcctttagctacggggagatccccaaaaacatcgccacaacgaacgagttgggccaattagaacttggtaacgaaatcaagaacgtcattaagaacaatggcttccggatcaattatgacaagtttaggttgcagtctaagaacatgcggcaggaagtgacaggtctaaccgttaatgagtttgtaaacgttaatcgcaagtacgtgagacagattcgggcgatgttgcatgcttgggataaatacggatacgagaaagcagaggaagagtttaggagagagtatgacaacaagtatcgcccacactggaagagcaacccctcgttcaaaaaggttgtcaagggtaagatagatttcctcggaatggtccgagggaaagatgacaaggtgtacattaagtatagggaaaagctcagggagttggccccagacattatctctgaaccacctcctccaccagagagtgagtccccccaaagtatggtacccattatccggaccgagggaaaaaccgattggaaacacctgaaagccgccttaaggtggctgattgacagaggcgagataagtgatctgcagattgaattcgacgaattcgaggagactttgggggaacctctgctgctgcaggactgtgaagcactttgccggcataagcagcctaggcccattattgccatctttgaccgcgatactaagaacgttaataagttccacaacgagaagaagggctacaaggactggggcaataatgtgtttagcttcgctatcccagtaccggcccaccgcaaaaatacacccaaagtttgcattgagctgtactattga

SEQ ID NO: 7946 - RNA, 1743 nt, synthetic construct
  source 1..1743: mol_type = other RNA
atgaaaaacctccttcaatatagccctgagatcctgaagaataagtttcactccctgactacacacttcgacctgtgtgacctgttagagatcaagtacaaggacttaatttactacctttacaggattgatcccgatgtccaatacaagaccttttacattccgaagaagaacgggtcattccgggagattaacagccccatcagcactattaaaattatccagaagaagctggcccagatactcaatgctgtgtatctgcctaaggaacctgcgcatggattcatcatcgaaaaatccatcctgagcaacgcccgactgcacgttcgccgtaaatatgtgcttaatctggacctcgagaatttctttcccacgattaactttggcaggataagggggatgttcctcaaaaagccatacaattttgaccccaaaacagccacaattatcgcgcaaatatgctgttataaaggatttctgccccagggcgctccaacatccccaatcttgagcaacatgatttgctccaagttagactcaaatttgagctttcttgccagcaagaacaaatgcatctacactcgctacgctgatgatctgtcgttcagcacctccttgactaattttccaaaagcaatcgcaaaaccgaatcctaccggtctggtcgagttgggcgaagagctgaagaagataattagagacaatgggtttgaggtaaattctgacaaaatcagactccagtacaaacaacagcgccaagaagttacgggtctagttgtgaatgaattccctaacgtaaagcgtaaatttgtccggcagatacgggcaatgctccacgcctgggagaagtttggctatgacagtgccaattatgaatactcaactgtgtacaacaacaaaacccggtttgcctcatcttctgtcgatttcgcgaaagtggttgcaggtaaaatagagtttcttgggtttatcaagggaaaagacaaccagatttatcagagcttcttgaacaaacttatcgctctggatcccgagaagtttaagtatttggagaagttcgtgatttcttctaccaactacgttaatcccttggtgtttaccgagggcaaaaccgacctcaaacatctaagagctgccctgaatcatttccagaagaatggcgagtttaccgagataaagctggagttcgatgaagaggaaaaggaaatgggggacgaagagctgctaaagttatgcaaaaactacgtgaagatgacaggaaatgcaaagccaataatcttcattttcgatcgcgacaacgaaaagataatttcccaggtcgacaataaagggagttacaagatttggggaaataacgtgtatagtttctccatccctattccagaccacaggacagatctcacttatagtccgatcgagttctattataagaacgaggaccttaaaatctgtgacgtaaaatcaaggagattattcctctcagatgaattcgataagaactccggacgacatctgttcgagaaggaactgtcttgtaacaacctgaagaagatcaaagattcgaagctgaatattatcgataactctgtcttcaacagcgaatctgtgaacgtgtccctcagtaaaaacgatttcgccgaaaatatcctcctaggcatcggcaagtttgctgacgtggatttcgccagtttcaaaaagatttttgatctgatcctgcagatcatcaaaattcaggacaattga

SEQ ID NO: 7947 - RNA, 1467 nt, synthetic construct
  source 1..1467: mol_type = other RNA
atgagccacaagctgaatagcccaccacaggatctggccaagtctttctccgcccttaaagacgggcgcgatgtcgctaaactcctcgaggtggagtatgcccacttggtgtatcacctgtataaaatcccacaagaggctagatacagccagttcaaagtgaagaagcgcgggactaacgaattcagaacgataagcatccccaacgggtccctgaagatcattcagaccaaattggtccaggtgctggaagctgtgtacttccctcgtatcgcagttcatggattcattaaaggtaaatccatcctgtctaatgcgagaatacacgcgaaccagaagtgggtcttcaacgctgacctggagggcttcttccccagtattaattttggaagagtgcgaggcttatttattgctaaaccgtatgttcttccggacaatgtcgccacagtgctggctcagatctgctgttataacaatgaactcccacaaggcgcacccacgtcgccgattctcagtaatatggtttgcgcaaagttggatagcgagctgcggatcctcgcacagcattcccggtgcaactatactaggtacgccgacgacctgaccttttcaacatcttcacctaagtttccccctcagatagccagtattgatggcgattcccagaacacaattatcgagctgggagagcagttgcgcacaatcattgggaataatgggttctgtgtcaatgcacagaaaacccgactccaaactaagactcaccggcaggaggtaaccggactggtgacaaaccagtttcctaacgtgtcacggcaattcatcaggcaggtgagggccatgctgcacgcatgggagaaatttggattagagaaggcccaaaccgagtacttaatgttgtaccgggaccagcagcgcaaccccctgaagaacgatcccaagtaccgtaatgtatcacttaaggacgtaatcttgggtaaaatcggctttattggatctattcgcggtaagactgactttatctacattaagctactcaacaaagtgataagtctctccccagaactcgccaagcaaaaggataagattagtgcacttatgtcgagcgggccagctccccttataagggtgaccaccgaaggccctacagattggatgcatatcgaaaccgccttcaataacctgcagtctaaaggcctatttgccgggctagcgttcgacttagttcgatacgaacacgatatgggccattctagactgctgtccatttgtgaagcctacgctaccctgccaatacctggtggacttagccatgtttttatctttgatagggacgaaccccagatcgtcaataaggtcaatgaacatggcgacgtgaggaaatggcctaacaacgtatattcattcagcattcccatcccaacgcacagaactaaaacacctgagatatgcatcgagctgaattga

SEQ ID NO: 7948 - RNA, 1635 nt, synthetic construct
  source 1..1635: mol_type = other RNA
atgcccgaagcccagagatataccacattcaaactggctaaggcttccggcggttttcgaatcataagcgtccctaatcactctctgaaaatactccaacaaaagctgaaccacatcctacagatggtgtaccagcctaaggcctccgtgcacggcttccttcaaggaaagtccatactcacgaacgctgaacgtcacgttaagaggaagtatgttctgaatctggacatcgaggcattcttcccttctatcaacttcggcagggtgcggggcatgtttatcgccgccccctataacctgccagagaatgtagccacggtattggcccagatttgctgttaccagaatcagctcccacagggtgccccgacttcacccattataagcaatatgatttgctcccgcatggacgtggctttaaaaagattggctcagacatataagtgtacatatacacgctatgccgatgatattaccttctctacctcgaagccccagtttccaccccagatcgcgtcaatctttaacaagcaggagacttctgtcattgtcctcggaacagaattgaatcatgttatcgagtcaaatgggttcgaagtgaacagttccaaggtgcgcctgcagactaaaaatcaccggcaagaggtgaccggggtgacggtcaatcgatttcctaacgtcaagcgggcttacattagagagataagagcaatgctacacagttggcgggagaacgggtttactgaggctgagcagatctttagggaaaagtacgacagcaaacaggagaacagaaaccctaaccttcccatcccatccttcgcaaaggtgctgaggggcaagattgagttccttggcgccgtgagggggaagaatgaccatatttatctgagatatctgaacgagctcagcagcttggcaccgcctggcaccattaagttgccaaaatctgtgggcaagagcaatatcattaaactgaaacccaccgtgtacgtcgagggaaagaccgacaaaaaaatactttcaattgcttgggccaagctctttgaatcccgcccaatccctttcaacatagaagatagtaacctgagtcaaacagaccagggaggaggtcttgggggggcagagattctcaaacagttcattagtgttgtgcgtgaggaccacttgcatctggctatcgcgatgtttgatcatgatcaagaaggaatcaagtgctacaatagtctcccaaaatacttcgatcaggtatcggagctcgaggcgaaaattagcaggcatggcaaagccgcagcctttctgcttcctgccagtgatcagaaatccgaatacatcaagtacgagaattttgtgatcgaatacctgttctctgatgctgccttagccaaaactaccgaggacgcacaggggctgatcttccagcaagcgtctatcgaacagcgcatcgttggctctggtaaatccttccggctgtcaagcacaccgtccagcattcccgaaacccgtaccatcaaggagggaaaggttgtattcgcagaacggatcgtgccccacctagacaagtcagaatttactgaatttcgatttgtcttcgcaaaaatccagcaaattataacttacatggccagcttatga

SEQ ID NO: 7949 - RNA, 1695 nt, synthetic construct
  source 1..1695: mol_type = other RNA
atgaataatctgtcccctgtgctgtcggcctcagctgaggagttgagaaaaaagttccaggagttacaaacccgtgaggacgttgccaatctcctggagatagatgaatcccgcctgaattactacctctacatcattcctgagcctcatagatacaccacatttcaaatcccgaagaaaagtggaaaattccgaacgatttctgtcccagcgaccgccctgaagattttgcagaggaagcttaatcaggtccttctcgctgtctatcagcccaaagcagctgttcacgggttcgtcctcgggaaaagtattgtgaccaacgctcagatgcacctaaggcaaaagttcgtgctgaatatcgacttgaaagatttcttccccagcattaacttcggacgcgtgagggggatgttcgtcgcacctccatacaaactcccgcctatggttgccacaatccttgcacagatttgctgctggaacaaccagctgccacagggcgcaccaacaagccccatagtgtccaatctcatttgtgccaagatggacagtcagctgttgcggctggccgagaaacaccgctgtgtgtatactaggtacgctgatgacataactttcagcacatctaccagtcagtttccgatcgcaattgcacgaaagtctgaagtcaccaatcaggtggaagttggtggggacctgggtagagttattaacgaaaacggttttgagatcaacagcgacaagatccggctacagacaaggcaacaaagacaggaagtgaccggacttatagctaatggcaagacccctaacaaaacacccaatgtccaacgacgctatttgaaacagatccgggcaatgctacatgcctgggaaaagtttggcttggataacgccgagaaagattttctcgagaagcatgacggtcactataggcaccccaacctcaacgaaccatcttttaagaaggtggtgtgtggcaagatcgaatttctcgggatggtccgtggaaaggacgatgtgacttatcaccggtttagagataagctgtggtcccttgcgcccgagttagcccggtttgatccagagatagaatcaactaacattcccacttctgtactgataattacagaggggcagactgattggaaacatctcaaggccgccttacagcagctcaaggaggccggcgacttctccgacctgaatatcgaatttcgcgaatatgacgacagcatccaaatgggtgatggcgaactggtaaaactgtgtattcagatggccaagatccctcaatctaaaattacaatctgcctgttcgatagcgacgcaccctccaccctgaaaccactggctctgagcgacgctatgtacaaacacatgggaggcaatgtgttcgctatggtactaccaacgcccaaccataggcagggactgcctggggtgtgcatcgagcactattaccaggatagcgaaatcactcgggaggacacccacgggagacggctttacctttccaatgagtttcatgagaagagtatgctgcatcgcacgaagcacggcatctcaacatcagacagacgcgtacatgatttgaaaaaggtggtttgccaggtgctgtgtaagttaggcggcgcgggacaggccttagtctcaaccgtgatgaggcgtaacttccgactgagaatcactgcgtga

SEQ ID NO: 7950 - RNA, 1959 nt, synthetic construct
  source 1..1959: mol_type = other RNA
atggtgaacgtagacgaggagttgataaagaactttcagaacctgaaatctgtgaagggcctatacctcctgctgcagaaattccacacaggacccgcatcatttccagactatagcacctttagacagattctgttcaatcaatggcaagacgagccctatgagtccttcaaaatggccaaaaagaatggcagtcataggaccattgaggtgcccaagcctgagattaagctgctccagcagtctcttaatacaatcctccgtggtatctatgaaccaaaagccagtgtacacgggttcaccatcaaaaagaacatcatttcaaacgctcagaaccactgtggcaagaaatacgtgttcaatatcgacctggcagatttcttccacagcataacccaacagcgaatccggggggtgtttatgaaacccccttatagtctgccttccaaagttgccactgctatcagccacctgtgttgctacaatgatcgattgccgcagggagcaccaacttcgcccattatatcgaatatagtgtgcgccaagcttgacagcgggctgaggcttcttgccaaggaaaataactgtttctatactcggtacgccgacgatataacttttagcacgacacgcaagaactttcccactgacttaggagtaatatacggcggtggaacccaggatatcaagattggagacaaactcgcctccatcttagctgagaacggatttaccgttaatgctgcaaaaacaagaatccagattaacactcttagacaagaagtcacaggcctcactgtcaatacaaaggtgaatgtgtcccgtgattatataaggcatgtgcgcgctattctgcacgactgggagctgaacgggtacgtgaaagcgaactcaaatcactggtcacattgttctaaaaagcacttacggcatgggaacattgatgacgttctgggcggtaaactggcttttatcggccaggtaaggggcaacgaggatcttttgtataagaagctgctccagaagtatgcggggctaattgttaatgaaatggctcgcgatttggctctcaagttcgacaacaagttatacgagttatggtcaggtgtgatcgatcagtacctggaacaagcagtgattgattatgtcgccaacgagaacattacaaacgaggacataaagaatggatttgaggaactgaagaaactgaagcctattaacggccgggactacaagcaaagacaggacccagactacaatcaagtgggcgtccccgtcgcctacacctttctctatctacctcgcaagatcatggcagccactgcgatcctgacacattactttggacagaagaacagtaggatcccctataatatcctcgatattgggtccggcacgaatgctgtttctatcgcaatcgggctgtttttgttcaccgataagatcaatatcaacttgaccgccctagaaccatcccactatatgcgccatttctgctcataccagccaaatttcagtcatctgaatattagctacagggaggggatggttggagaatggcaggatgtgctgcattccaactactacgagcttatctttatgtcctctgtgctgcagaattctttcaatgaccaacaggatacctggtgggaagatcggtgtcgagaactctataactgctgcaaaaacaacggcacgtttattatagtcgagccaaacgccaaaatggatctgctcaattctctggtcaacgccatgcagaaaattggttggagtttcaaagaaagactcttcctgagcaatctcttgcctaaggtcagcaagaacgacgaattgatcaaaatgcagaagctgaccgaccttaaaaaagaatacaagtgcgactatcacaattacagcgtgtgtaactggaatcctaatccgaagtataacgagatcatttacatcttcgagaaatga

SEQ ID NO: 7951 - RNA, 1932 nt, synthetic construct
  source 1..1932: mol_type = other RNA
atgaggtatttactgcgcgaggctagcgaaattgtggagagcttccggaaaattaacagctttcaggactttgcagacctcttggaggtagattacttttggttcaagcaggaactgtttgccgtgcctctggaggagaagtatacatcatttaccatacccaaacggaatggggaatccagagagatctatagtcctgtgtccgggatcagggagattcaggcccgtcttaatgaagtcctgaggcttgtctacgagcccgaacgcaaacaatctgtgcatggatttaccacatcccgcaacattgtaacgaatgccaaaaaccactgcaacaagaaattcgtcttgaacctcgatattaaagacttcttcccaaccattactcagcaaaggatcagaggtgtaatgatgagcccaccatacaacctgccgagccagatcgctaccaccatatcacatatctgctgttatgagggcaaactacctcagggcgcaccaactagccccattattagtaatatcgtgtgtgccaagcttgactcagagcttaggttgctcgcaaagcagaataaatgtttctacactcggtacgccgatgacattacgttttccacaattgtcaagaacttcccgctctctatcgctaagataactggacttaaaatcactgatgtgtctctctccgacaatctgatcagcattttcaagtctaacggtttccagattaatttcaacaaggtgagaatccagggagacaatcagagacaggaggtcacgggacttactgtcaacaataagcccaatgtctccaggaaatacattaggcaggtaagagcaatgctccacgactggcacaaaaacggttatgtgcaggcctatatcaatgacagtgctatacgctaccaaaaaaacaagaaccgagttaactttagctcggccctgcgggggaaaatcgagtttattgggcaagtgaggcaaaaagatgacttcatataccagaagctcctgacattttacgagaaactgatcgagcgagaaatcatccgtcagagatccctgaagttcgacgacaaagattataacaattggtgcgattctgtggacgagtacgctctacatatcattaacaactacatcgatgcgataagcgttgatatcgataatatgaaggagtgtatacaacagggatttgacgaacttgataaactccgcaagaagcaggatccagattatgacttgcctggtgtgccgatagcttatgcattcaaatacctcccccgcaagatcatagctatgacagcggttctgagtcactatttccgtgaggaaaatgtgcctatccctgagaaaatcttagatgtcgggtctggcacagacgcagtggggatcgcgttaggcctgttccggcaaaagatgtcatttcaaattaccgccatagaaccctgctcctatatgagacagtttgccatgttccggccttctctgcccaatttggaagttctcaatgtgaatggccgactaggcgactggttcaactacttgaacaacaactactttaacctgatctttatgagctccattctgcagaattcattcgaaaatctgggaaattcgtggtggctggagtgggcaaatgaactgtatcaagcctctaccaacaatgctcgattaattcttattgagccttcagttaaggttaagctggtgaacaagatgaagtgggccatggaaagttccggctggatcctgcgggaacagctgctcctgtcagatttgtttccaaacgtgttcaataagggctgccagttaaagaaactgacaagtctcaagcaggagctaatcggcaactactgtccatggcccgtcagcgggtggaatacctattacaagtacaacgaagtgattcacatctatagtaagaataaccagtga

SEQ ID NO: 7952 - RNA, 1725 nt, synthetic construct
  source 1..1725: mol_type = other RNA
atgactaaaacactgttgagtatcactccgattgaacagagggaggccttttttgccttaaaaaccagacgcgatatagcagtcttgctcggctataggtacgacggcctggtctaccaaatttacaaaatccccgcagaaaagaaatacgaaacattctttgttcccaagaagagcggggagctaagaaccatccacgcaccttcaccaaagatcaagcgcattcagcgattactgaacgaagtacttcagaatgtgtacaaaccgaaacccgttgttttcggctttactagtgggaagaatatcgtcgacaacgccagtaaacacaaaaagaagaattgggtgctgaacgtagacctcgagaatttctttccatctatcaatttcggacgagtgagagggatgttcatgcacaagccctacaacctccccgatgaggtggccacaacactggccaagatttgctgcttcgagaatagcattccacagggagcgcctacttcaccagtgataagcaatatgatttgtgctcaaatggacagtcagctgcaggatctggcttggaaacacagatgtttctataccaggtatgccgacgatatcactttcagcactaccctgcacgaatttccactggagatagcaaaggtgaactctgtcctttcaatcgatcttggtcaagagttaatcaacatcatccaacagaatggtttcgagataaaccatggaaaagtgagagcctttgcttatttccagaggcaagaagtaactggcctgacagtgaataagttccctaatgtgcggcggaagtttgtaatgcagatacggtctatgctgcacgcatgggacaaaaaagggctccagaccgctgaggccgaacactacgaactctacaataagagacatcataaccagaactctaagctgcccgcctataagaaggtggtgaaaggcaaaattgacttctttgggatggtgaagggattaaacaattccaggtacatggaattcaagcgcgagtacttgcgtctttcccgacgggacaaaaacgtcccttttaaaaacatttcggcgaaaaccgagagcaaaatcattatttacacagaaggcccgaccgatcccccaattctgaaaactgcctggcagaaactttatcaggacgagatccttttcatcattacccctgtggaaatcaagcccggaattgctacaggggcaaccgcactagccgctgagctcaatacccatcgcaagcagcatggcatagttattggtatcttcgatagggatgctgaaggcatcaaggcttataagtccctccacagcggagagtttgaggaaaaggatggattcaagatttccatcgaccggaacgcagccgcgattatcttgcctatccctaccggtaaagagaaattggccgaactggataaactgtggatagaaaactatttctcagaaacggccctaaatacgaaaacgaccgacggaaagggcctggcgtttgagtataagccagttgtcgtgaccaaaaagattggggacaagatcattgaagagacaaagacagatgagcgttccctcgagacagccgtcataaaggacggtggcaagcgcatctttgctgagaagatcgtgcctacgctccccgttgacgagtttaaggggttcgagctggtctttgagaaaataaacgaaatcgctgagttgctgcaggagctgtga

SEQ ID NO: 7953 - RNA, 1662 nt, synthetic construct
  source 1..1662: mol_type = other RNA
atgtcgccccacctcccacattttgttgcacgcatcgtgctgttgaagaacctgctggacgtgaatacgtcaagagagctggccacctttctgaagatcaattacgaaaaccagctgatatttcacgcttaccgcgtgcccagccacgagaaatacctgacattcgagattcccaaaaagagtgggggaacccgtaggatcctagctcccgcgactgctctgaaactgattcagagatctctggccgaaaagctgttggagatctataaacctcgagcatcaacctacggtttttgcctcggacggggggtcgtcgacaatgccaaacagcacttgggcaagcgggtgattctgaacgtggatttcgagaatttcttcccctccattaactttggccgcgtccgaggactgcttatggccaagccttactctatgcctaaggaagttgccaccatcgttgcgcagatatgctgccatgacaatcagcttccccaaggcgcaccaaccagccctgtggtgagcaacatgatctgcaggtccctcgatcggcaacttcagattatggcaaggaaacataattgttggtacacgcgctacgtcgacgacatcacaatttctactaataggaggcggttccccccgcagattgcccagagaaccgatgacctgtctgctaccgaagcgcagttaggggaggagttcaagggtatcgtggaaaatgcaggattcaattttaacccctccaaaaccaggatcttaacaaacatggaaagaaaggaagtgactggcgtgaccattaacgaattccccaatgtgccccgtagctacgtaagacaaatccgcgcaatgctccatgcttgggagcactatggctttgccgcggcccaagaagagtatattaaaaagtatcagccagcttgtcggaacgataagaagggcgcagtgaactttgagtgggtcgttagaggaaagctagagtatctccgtcaggtgcggggcacacaggatccaatcttcatcaagcaggcttcacgcttcaatcttctggcaagctcctctataaaattgccgctcgctgccgagacaacagatgtaactacctccacttggatcgtacagtctactagtgccgacggcaagaccctccaggaggggacagcctttttcttggaaggcgtcggtctggtaacatgtgagcattgcataatcggccctactattatattttcagcctccagcccaacgattgagttcccggtggtggctagtaaaaaaaacgcttataccgacgttgcgatcctgaactttacagatgacctccagcctacgaagacacaagacctcagaagaaacaaaggactgggcgataatctgccacctcctcttactgatatccgattaataggatacccaaactgggcacttggggccggtatgagtataaggctcgggcgagtgacctcaattaaccacgacgaacctcggtattttcagatcgacgccagcatcattagcggcaactccggggggccagtcttggatgccgaaggtttcgtcttaggaatggccagtaggggggcaccaaatcaagaggatgctcaaaagactaatgatcaccgcgttgtcccgattcaggccatcttcgacctatgtaatcagtga

SEQ ID NO: 7954 - RNA, 1773 nt, synthetic construct
  source 1..1773: mol_type = other RNA
atgtcactgagtaatccgctgcccccccgaaacgctgcctccttaaccgagctgtccatactgcagaccaagagggaggtggcctccctgcttggtatcaagtacaagtacctcatatactacatccataagtatccccacgacaagaggtatacttctttccagattccaaaaaagagcggaggcgtgcgtgaaatcctaagcccaatcggccccctaaagtttattcagaggcggttgtctgaggtgttgctcaaggactataaagtaaaaccttccgtgtatgggttcgtgaaggaaaaatccattctgaagaacgcacaaagacatgtgggtaagcgttatgtgttcaacgccgaccttaaagacttttttccatccatcaactcaggacgcgttcgcggtatgttcatgtcacctccttactctttaaataaagaggtagccaccttcctgacacagatttgttgtcacaataatgctttgccagcgggggcccctacgtctcctattatcagtaacatcatatgtcggtccctggataaccagttgcaagaactggcaaaggagaaccgatgcacctacacccggtatgttgatgatatcacgttcagcacaacactcagatcattcccccaatctattgctcacattaacgaagccggtcagatcgaggcaggcagccggttaaaccagatcgttagcgccaatggattccagtttaactctaaaaaagtccggctgcaggctaagaacaagagacaggaagtcactggattgacagtgaacgaaaagccgaatatcacccgcaaattctctaaccagattagggcgattatccacgcaatcgagaaatatgggctggaggcggcagagaaggagtttctggctaaacaccaaaaaaaacaccgcaatccaaaacttccaactgcgagtctgctgcgcgtgctgaaagggaaaatcgatttccttggcatggtacggggcaaatgcgacccgctgtatctcaagttcctgagacagctgaaggccatagctccacaaatggtgaaggacctccctgaacccaggaaggagtgcacaaaagttgaagtctggaccgagggcaagactgattggaagcaccttaaagccgccttcacaaatttaaaaggccaggggtactatatcaatcttgagattgacttcaaggaattcgaagacagtatgggggagggagagctgtttaagcactgtcccatttggagtaagacaacccatcagagccccttgatatgcatcttcgaccgagatattcctactagaacaaaagaggtcatgaataatggaaggtttaaagattggaccaataatgtcttctcttttacgatcccggttccagagcaccgtcagtccactcaagaggtatgcatcgaactctactacaaggattccgaactgaaaagagaagatagtaacgcaagacgactatttctctcgaatgagtttgacgcaaaaaccactattcataaggagattcctggcctcatatgtcctgataagaaggctaaagacgccaagaagttgaccgtcattgacaacaacgtgtaccatagcctcaaccataaacgggagaatatcgccctgccaaaagacgatttcgccagcaaggtgcttgctggcgaaaagaactttgatgactttgacttttcgcagttcaagaagatctttgatgtcattgtggaaatagctgacttttcaaggcgcaattaccccagcaacctctcaccctga

SEQ ID NO: 7955 - RNA, 1641 nt, synthetic construct
  source 1..1641: mol_type = other RNA
atggaaaagatgcagctgaagcttacagcatcagatgacgaacagattaccaagtttaaaaccctcaaaaactactacgacattgccaatctccttgaggtcgagtctcgctatctgaagtatttgttgtaccaccccaagaagacgcactacaagatcttcttcatcaagaagaaatccggcaatctgcgaaaaatctgcgcccccatttcctcactcaaaattatacaacagaagttggcacacgtgctttatctaatctatgctgcaaaaccaagtacacacggcttttgtccaaataagtcaatcgttacgaatgcccagctccatatcaagaaaaagtacgtcttcaacatcgacattaaagacttcttcccctcgattaactttgggcgggtttacgggatgtttaacgggtggccttacggccttccgtcgcgtgtcagcgctgtgcttagcaagatctgctgcaacgacaacgaattaccacagggggcccccacctcccctataatcagcaacatgatttgtgccaagttagatagcaaactccaggaactcgctaaacggtgcaacattacttattctaggtatgcggacgacataaccttctcctccacttcccggttgcctaaagagattgtggaatttgaaatcctggattccagtgtcgccataactacaggcgaaagacttcgaggtgttctgaacaacaatggcttcgagataaataacgaaaaggtgaggctcaagtataagaccaatcgccaggaagtcactggactcacagttaacgagatcactaatacaaaaagaaggtacgtcaaacaggtgagagcaatgctgaatgcctgggagaagtacggcttgaaaaaggccgacgaggagcatttcaacaagtttaacataaagcagcgtaaccccgagttcaaaaaagccagcttcatgcaaatcgtggaagggaaaatcagttttatcaagatggtaaagggtgagaagtctcccgtttaccggaagctggccaacaggttcattaatctatctggcaaaaagaagctgaagtatttcatcgatccaaacgatgagattaaagctgctctgtgggtactggaggacgacattacgggataccaaggcagcgcttttatgttgagcggagtgggactggtgacctgccagcacgtgctgtcaaagaatatccaggctttcaagtgtgaagatccatccaaaaaataccgggtatcttctgtactgcaagacaaagattgtgatctggcaattctaaaaatcgataccgaggatagtcattatttaaaagcgggaagatcagaggtgataagacatggtgagctgatcacaatcgctgggtttcctcaataccgactgggaggttctcttattatcattgagagcaaagtggcaggtttctatcctcgctttaattttaagaggatcctcatcgacaaacagattgtgggaggcaatagtggcgggcctgcgctgaatcgcgataatgaggtcattggcatcgtggcaaccggggccgaaaattttgaaactaccacaaagaccatagagtatggaatcattccgattgagctgatattcgaaatgctgaagaagagcgagatctgtatttga

SEQ ID NO: 7956 - RNA, 1611 nt, synthetic construct
  source 1..1611: mol_type = other RNA
atgaacaactatatagaagtggacaaaaacgtactaagggaattcaagaacctgaagaatgagagggatgttgctaatttactccaaataccctataacgtcctgcattactacattgtcatcaataggaacaacaactacaagaagttcatcatcaaaaagaagaacggagaaataaggaccatttatgccccaatcagttcactgaagattcttcagagaaagctccacaaaattctgagcgagttctataaggtgtactatcgcccatctgtgtacggcttccgagataatctcagcattgtggataacgcacggaagcaccaggataagaagaacattttccacatcgacattaaagacttcttcccttcaatctcttataaaagggttattgggttactctcatccgggatatttaactttccatactccgtcagcatcatattaacaaaaatctgctgttaccagggcatgctgcctcaaggcgctccgacaagccccatcctgtccaatattatttgcagtaaactggactacgagctgcaactcatctccaaagacaattattgcacgtatacaagatacagcgatgacatagtattttcaaatacggcgaatactttccctaaagacatcgctaccgacggcaaatgttcagacaaactcgtgagcattctgctccggaatggattcaagatcaatgattccaaggtctatttgcaaaggaatattcagagacaggttgttactggactgacagtaaatcagtttcctaacgtgaaacggatttacgttaaaaagatccgtgccattttgcattcctgggagaagtatgggctaaagaacaccgagtccatctactgtaagaagcgggaagtcgagaaagaaaaccggaaggaatttatgtgttctttggtgaaggtgattgagggcaaaattgcctttctgaagatggtgaagggtaaggacaactacacctacctcaaaatctacaagagattctgcgatcttattgggcgcgaatttccctaccacgatctacttaatgcactgaaagtggagaaacgagtcatgcttaataagtacgccaagtctatcagaaaatgtatctaccggtgcaatcagtcttacgcttacgatatctttaaacccacgaatgatcttatcaacagtttggacaatcttggaatcgacgccagagattaccatcgttttggtgataggatcgacgatttatatatgatcttctatgagggaaccggttatatagaacgcctgaaggagcattctttggatcgtacaataattaccgaaatcaacatactcaggacctattatcgacacgacattgatcacgggaagactaatgagatccgccggaaacgaataaaaacgatgaaggtgattcagaagtacatcaacaaaaacagcattatcaacgcaagtgaattggacctgtatatcttccagaagaagctgtacgacaacgtgatgatatttctggaagagctggaggagagcatcaataagaatacctataacaatgacacgactggcaacatccgccgcctcatcaaagagattattagttcgctgaaaagactgtga

SEQ ID NO: 7957 - RNA, 1530 nt, synthetic construct
  source 1..1530: mol_type = other RNA
atgcaggcattttttaaggcgtccaatctggaactgattaacagatttcacaaagtcgatgggttaattgacctggccaatctgctggaggtggattctagcgagcttctgcttctgttttacggattgaggcgggggggcggctactataaagagttcagcatcccaaagaaaaccggcggtgaacgcaagatactggcacccgactcgcgcctcaaattcgtccaacggaaactggcttacgtgttaagtctggtgtatttcggaagacccagcgtccacggtttcaggctaggtagaagtataattaccaatgctgaatgtcacgccagaaagaaatgcttgctcaacatagacctcaaggacttcttcccaactatacacttcggccgggtgcgagggcttttgcaggctaaaccctatggtctatcaaaaacaggcgcgaccgccgttgccggaatctgttgcttttgggggaagctgccccagggggctcctacttcacccgtaatttccaatatggtgtgcgccaaactggactatgagcttcaagccctcgccaggggagagggagctacctattcgcgatatgcagacgatatcaccttctcaactcaaaggaggaatttgtccgagaatatcgtgaagttcgaaaattctagctttattgctggccctaagctggttgaaataatcaggaagaatggcttcgagattaacaaggataaaattaggatgcggttccttaccgaaagacaggaagccaccgggcttgtggtgaacaagtttcccaacgtcaaacgttccttcatccgcgaaatccggattatgctgcatatgtggcggaaatttaacctagaaacagcctccctcttctatggtatgaaatttccaggacgtgagatctactttcctgaaattgtacgaggtaagattaacttcgtgaagctggtaaaaacggagcgggatccaacatacctcggacttgcagagaagtttaacgacttggtgggcaaacccgtctttaaaatcgtgccaatcaaggattggcctgacgaggagtacatcccggcaggacatcgctacagagccatcgagacgctcgagactatcttcgctaacgctgacaaggaaatcttaatcagcgacaactttctccgaaaagatatcgttggcctactggagaagcaggttggccgcagccctcgcctgaagattcgcctgctcttttctagaggccgttacaagtcagaggagcgaaagtacgcagagtgcattgaagcaattaagaagatggtgtccctccataaagatctgtctatcgactgtcgggaggttttaccagggggccctcatgggagaaatattatcatagaccgggaagaagtctaccacagcggacacagtttggatcagctggggtctagggccgatagtatcataaggatgcgcatccagtccgccaagagagatgccctgcaggacatcgagacatggttcgcgaactctgctgaaattccgttgatttga

SEQ ID NO: 7958 - RNA, 969 nt, synthetic construct
  source 1..969: mol_type = other RNA
atgcgcccggatttgctgaattcccctgaggtcctcaaagaaaagtttcggaacctaaaaaccttgatcgacgtggccgatattctggaaattgattgcaaaaccctgatttatctcgtgtaccggaagaataagcctacaaattacaaggaattcgtgatcaagaagaagtctgggggggaaaggcgtatactggcacccacctccactctgaaaattctccagagaaagctgaactacatcctgtcaatctgttacgagccgaggccctcagttcagggttttgtcaacaatagaaacatcgtgagcaacgcctccgcccatagcggaaagaaaatcgtgtttaaccttgacttgaaagacttctttccttcaatcaactttggacgggtaagaggcctcttcttaaaaccaccattcagtctcccagcacccgtcgcaactgcccttgcaaacctgtgttgccacaataatcagcttcctcagggtgctcccacatctccaatcatttccaacctcatctgctctagaatggacggagcgtttcaagcgctagtaaaaaaatataacgccgtctacacccggtatgctgatgacatcactatctctacacgacaagcttttttccataaagagattgttgagagtgggtcggcccctctgtgtgggaagggcatattaagtatcattgcaagcaacggcttcattataaatgatgccaagacgcgcatattacgtacaggtcgaagacaggaggttactggactggtgaccaatcgcacgcccaatatcaagagggagtatattcgggaaattcgagtgttgctggacaagtggaggaagtacgatctgagggtggctgaggaagcttatttcaagaatcgccttaaggaacgcgccccacacataaagagcgtggagttcagcaaaatcattgagggcaaaatcaacttcgtcaaagacggctga

SEQ ID NO: 7959 - RNA, 1656 nt, synthetic construct
  source 1..1656: mol_type = other RNA
atggatacgcagctaaaggcgagccaggatacaataatttctttatttgcagcactgcgcacccccagggatgttgcgaaacttctcgaagtgccttacggccttttgatctatcatctccacaagactcccccaagcacccgttatatctctttcgccatacgaaaaagagccggtggcgaacggattatttcagcccccggaaccgcgctgaagatcttgcaaatcaaactgaattacgtgctcaaaacagtataccgtccaaacagctgtatttatggattcatcgtcaacggagggatcgtgaaaaatgcaagcgtccatgcgaatcggaggctggtgtttaatctcgatctgaaggatttctttccaagtattcacttcggtcgggtaaagggcatgttctcatctcctccctacaactgtccctccgaggtgtcaaccgtcctggctcagatttgctgtcttcccaagacttatccctccctggctccatatgctcaattaccgcaaggggcccccaccagccccattgttagcaacatggtgtgctcaagtctcgactcccaactgctaagactagccaagaagtacaagtgcagttactcccggtacgcagacgacattacattttccactaacctgccacgcttccacgaggccatcttagtggagtcccaggccgaggaaggccgcatctctgtgacagctgggagtgagcttaaagctatcatctctagcaacaccttcagaattaatgagaacaaagtccggcttcagagggcaatgcaacggcagtcagtgactggcctgactaccaataaattccctaacccgccaagacgcttgatacggcaaataagggcaattctgcacgcttggaccaagtatgggtatgagaacgcccagaacgagtttaggtcacgatactttaatagaaccaggaatcctaacaagatggctcccgagctgaagcatgtcctgcacgggaagataaactatgtgggcatggtgagaggccagacagacccactgtatcttagctatctcaaacagctgaaagccctggcccctgaactcattattaggcaggtgattgacgttatggacgccctgtgggtcctcgaatctgatggcgcttacgcccagggaacgggatttagtttgaaggggtacggtatcgtcacctgctatcatgtgctgcgagctagaacaaaactgttcaaggccaatacgcctgcaaagaagtacaacatcgaagtcatcatacaggatcaggaactggacatcgcagtattggccacggacgggcctcagggccctgaattgctcctagaagaaggagagcgtccacgccaggatgactggattcttctgacagggtacccttcttactccgcccacgcaaccggagtggtcagaagggggcgggttactggttactatcagtttttcggcactgagcgaatgctcatcgacacaccgatcgtgtacggcaattccggtggacctgtgctcaatcaaagcaataaggttgttggcatcgcggccaaaggacccgtatcgttgaacgatgcccagaaaacagagaaatttgaggtgatcccgatatcgatcctgcgccgcttagctcccccagcaccaactgctcagtga

SEQ ID NO: 7960 - RNA, 1587 nt, synthetic construct
  source 1..1587: mol_type = other RNA
atgaatacagagctaaagagttcggacgaggaattgaaaaagaaattcttcgccctcaagaataaacacgatatatgcgccctgctggaaatcgacattaagactcttatctacatcctttaccgaaaaatgccatcgaccaattactccactttcacgattcagaaacggtctggggggcttcgcgtcataaatgcacccagcacatctctgcgcatcctccagcagaagttgaactacatttttcagctcatcggtatgatcgctccttgtgctcatggctacatcaatggtaaatccatcgtttccaacgctaagcctcacgccaagaaaagatatgtcttcaacctggatatcgaggatttctttccaagcattaattttgggagagtgagaggtctgtttatgagctacccgtactacctgccaaaagaggccgcaactatactagctcagatttgtacttatgagaacgaacttcctcagggcgcaccaacctcacccatcatatctaatatgatatgcgtcaagatggacaagcagctcatgaaactggcctatgataccaaaagctattacacccgatatgctgatgacatgacattttccacaaccctccggatgtttccctccgaactggcttataataaggccagtggggaaatcgtggcgtcttcaagtcttaccaaagtgattatcgacaatggtttcaagataaacaactccaagattaggctgcagaagtctacccagtcacagcaagtgaccggcttgaccattaaccaaatgcccaacgtgaaaaggacttatattaggaacattagggcgatgttgcattcttgggagaaatacggattagataaagcagaagaagaatatctgagtaagtacaactatcggaacaaggattacatcaaaccatgctttcaagacatcgtgaaaggaaagataaacttcgttaagatggtaaagtcagaggactcaaaagtcttccggaacctagcgattaagtataatcaattagccggaagtggattcagcgattatacaatcaatcagccctcagaggagatcctcttacagatctataccgagggaaaaaacacagaacatatcgagaaggcaattcacatactggacaaagatttgtctgccctgatttacaacgggaagattaagatcgttaatggggtagagcacagaagcggcgaccagcaactcaagaccacatacgagattatgagcaaaagtaagaactccaacaagttcttgtttgtgtgggattgtgactctaagaataagattaatagcctggttgaggagaataacttcttcaagtttgtgtttgcctccaacactgataatacgaaagtcgaaaagggcattgaaaatctctatcctgagtccctgttcactcaggacctctactccctggaagaaacaaaaaatgattacggcggcaaaaagagcgaggagaaattcgacaaaagcaagtttcttaacaagatcaaggaagaaacggacccttacgtgtttgagaattttaagccgctgttccgtgagatccgcaacatcctggacatgtga

SEQ ID NO: 7961 - RNA, 1584 nt, synthetic construct
  source 1..1584: mol_type = other RNA
atggacgtcgaattaaattactccaatagggagttgaaacagaagtttgctaacctgaagagtttgcgggaggtttcagatcttctcgagatttccagtgacaagctcaagtattacctctacattcttgatgacgagaagaaatataacgagttcaagattccgaagaggtcaggtggcactaggtctatctcagcgccaaacgatagcctgaaaatcctacagcagaaactgaaccatatactccggttgttctacaatccccgcgtttgcgtgtacggttttgtgaacgacagggatatcgtggaaggggcctctaagcatacggacaagaaatacgttctcaacgtggatattaaggacttctttccctctatcaatttcgggcgggtgtggggactgttccaagcaaaaccctttaatcttcccgaggaggccgccacagtcctcgctcaaatctgtatctttaagaattcactcccacaaggagcacccaccagtcccgtgatatcaaatttcatttgtgccaaactggatagtgagctgactcgacttgctaaaaagcataaggtcacatatacaaggtatgcagacgacctgacattttccacaaccatcccagttttccctaagagcctggccaaaattaacgatgccgggcagactatagtgggatctgagttggaggagatcattaacgacaacgggtttgaggtgaatcacgataaagtcaaattgatgaacagcagtcaacgacaggaggtgactggcatcaccgtaaacgaatttaccaacgtaaatcggagctacgtccggaaaatcagagcaatgttacatgcatgggaaaagttcggttatgaaaatgctgaagacacttttcacagagaatattgcaaccctggtataaaccctgaaagatccaaacctcctcttgataaagtaatcaagggaaaattggagcaccttggcaaggtgaagggcaagcacgatccggtgtttctgaagtattatcacaagctcgtaaaactagacgataagtacgaacgcgaacactataataagaagtaccagctgctggaccacaacgaataccccttcatcctggatcgcttgaatgaccgtttccaggacatcaagaagctgaaaccacatccgagaggctatgcgttcgaggacttcttaaacgagctgttcaaaacctactcgctagagccacgaaagccttttaagaatgtgggggagcagatcgacggatccctgaattttgagggaaatgcctacctgatagaagctaaatggcaggataaaaacatcgaggccaaacacctgaataatttccaggtgaaagtcgactctaaggccagctgggctcgcggcattttcataagcatctccccattcaccgatggatgcctgaaaaactttcgcgaaggcaagagcacgaagctcctgggcattctgggggatgaaattgaatccatgctcaagcataaaattgacttaagagaggttctgaagtacaaagcccgtaagtctgtcgagacaggcgattttttcaccaggattgagaacgaacttaaatga

SEQ ID NO: 7962 - RNA, 1095 nt, synthetic construct
  source 1..1095: mol_type = other RNA
atgagtaaagatacaagccattctctcctcctttatgacagttgtaaggaactgagtgagaaattcaagaagcttgagtcgcctcaggacgtggctcagctgctggaagtaccgtacaagaatctcatctactatatctaccgaaaaagcgaagatagccggtacaatacatttatcgtgcctaagaagtccggcgggtctaggacgattcattcccccaataaatctctggcgatcatacagaggaaactttcccaggtgctgtacactatctatagacctcgtgccagcgtccacggtttcgcagccaagcgtagtatcgttaccaatgcgaaggcacacatcaagaagaagttcattctgaaccttgacttgaaggattttttcgattcgatcaactttggacgcgtgagaggggtgttcatagccaagccatacgaagtcaacgagaaagttgccaccattctggctcagatctgctgtttcaacaataaactgccgcaaggcgccccctcttctcccataattagcaacctgatttgcgccaaaatggactccgaattacagcggttcgctgaggagtacggattattttataccagatacgccgatgacataactttttcaattaaccgcgatgaattgccatctgcactggtcgactcctataaaaaaggcctcccacatgtggtgctcggtaaggagttgaaatccatcattgagaagaacggattccagattaacgatgccaaagtcagactggcctataaaacacagcgacaagcagtcaccggcctgatcgttaacaagagcgtgaatgtaaaccggaaatatattcgcaatctctacggggcactacacgcatgggagaaatatggtctagaacaagctgtggagacttatatatcaaagtacgctaaaaagcccattctgccagagaaggacattcctgcttttttggactcattgcgcgggaagatcgagttcatcggaagcgttaggggcaaagacgatgacctgtaccagaagctcttaaatatctttaatggccttaggcggaaggaggccgataaggaatcaatcgctgtggaatga

SEQ ID NO: 7963 - RNA, 1095 nt, synthetic construct
  source 1..1095: mol_type = other RNA
atgtctaaaaacttgtctcattcgattctgctctatgatagttgcgaagagctgtccaagaaattcaaggaactgaaatcgccacgagatgtggctcggttgctagaggtaccattcggggacctgaattattatctctacaggaagtccgaagacagcagatacaaaactttcattgtgccgaagaagtctggcggttccagaaccatctactctccccacaaatcactctccatcatacagaggaagttaagtcaggtgttgtacgcggtgtaccggccccgtgcatccgttcacggctttgctgtccagcgcagcatcatctccaatgcaaaggcccacacgaagaaaaagtttatcctgaacctggatataaaggactttttcgactcaatcaacttcggaagggtgcggggggttttcataggcaagccttatgaacttaatgatcaagttgccactatactggcgcaaatttgctgttttgacaacaaactgcctcagggagccaggacatcacctatcatcagtaacctgatttgtgccaaaatggattcagagctgcagcgctttgcagagaagtacggttttttctacaccagatatgccgatgatatcacttttagcattacacgtgaagagcttccaaccgagcttgtcgcttgctataagaagggcctccctaaggtcgtgcttgggaccgagctacggagcatcatcgagacgaatggctttgaaatcaatgaggcaaaagtccgcctcgcctacaagacccagaagcaagaggtaacagggttaatcgtcaataacaagagcgtgaatgtgaacagaaaatacatcaggaacatatatggcactttccatgcttgggagaagtatggactggagaaagctctcgaaatttacaagagcaagtatgccaagaaaagcattcttcccgagaaagacattccccattttctcgatagtctgcgcggaaaaattgaattcattggttctgtgcgaggaaaagacgacaacctgtaccagaaattattgaccatcttcaatgacctgaaatctaaggagacaaatgccgaaaacattgaaaaatga

SEQ ID NO: 7964 - RNA, 1134 nt, synthetic construct
  source 1..1134: mol_type = other RNA
atgaagaagaaagcatacctgtcgcttttcctgtacgagtcttgcgaagagttgtccaagaagtttcaggagttacaatcccctcacgacatagctcagttactgcaagtcccatatgagtatctgacttattacctgtaccggatccctcatggcagtcgttacacagagtttcgggtactgaagaaaagcgggggatacagaaccatccacagcccgaagggatcactagggattgtgcagagaaagctcagccaggtcctgtatgctgtgtacagaccacggccttcagttcatgggttcgccgccagccggtctatagtgaccaatgcaaaagcccatgtcaacaagaaattcgtcctgaacgtggacatcaaagatttcttcggctcaatcaactttggccgcgttcggggtatgttcatcgccaatccatacaaattggacgagaaagtagccacagttcttgctcagatctgttgcttcgataacaaacttccccagggcgccccgacgtctcctgttgtttccaacctgatttgtgcgaagatggactcagaactacaacgatttagtaaacagcatggtctgctgtacactagatatgccgacgacataaccctcagtagtaaccgcaacgaactccccacttctttagtctcccactatgagaaaggactacccaatgtgatgctgggagatgagctgaggtccgtgattgagagaaacggctttcagattaatgaggcaaaggtccgcctcgcttataagacccagcgtcaagaagtgaccgggctcattgtgaatcaaactgtgaatgtatctcgcaaatatgtgcggaatatcgacggtgctctccacgcctgggaacgatatcgcctggaggctgcgacagaaacctaccgagcgaaatacgccaagaaaactactttccccgagaaggaaagcgcactcttccttgatagcttgaggggaaaaatcgaatttgtgggctccgccagggggaaggacgatcacctgtaccagaagctgctcaagaagtttaatgatctgaggaccagggaagcaattgaccagaagacaacagagacagagccattgcagaccacgttggaacttccctttaacgattga

SEQ ID NO: 7965 - RNA, 1077 nt, synthetic construct
  source 1..1077: mol_type = other RNA
atgaataagaacagttctttatcaatcctgttgtatgattcatgtgaagagcttagcaagaagtttaaacaactacagtcccctcaggatgtggcacggctcctgcagatcccttacgactatcttatatactacctgtaccggcggcccgatgacctgaggtacacaacattcagcatacccaaaaaatcagggtcgcatcggactattcactctcctcacaaatctctcgccattgtgcaaaggaagctgagtcaggtcttgtacgcggtgtattctccacgcccctccgtccatgggttcgcagcttccagatccatcgttactaacgctaaagctcacaccaagaagaagttcgttttgaacattgacatcaaggacttttttgattccattaacttcgggagggtgcgtggtctgttcatcgccaaaccgtacgagttaaacgagaaagtggcaaccattctcgcccagatttgctgctttaataataagcttccccagggggctccaagtagcccaattatcagcaatctgatttgtgcgaagatggattcagaactgcaacgcttttcgaaggagaatggattgttttatactaggtacgccgacgacatcaccttcagtctgacaagaaacgagctgcctccgggcctggtaagttcttaccagaaaggatttagccaggtagtgctcggcaacaaattacgatcaatcatcgagaacaatggtttccagataaacaatagcaaagttagacttgcctatagaaatcagaggcaggaagtaaccggcctaatcgtcaatcaaggcgttaacgtcaatcgtaagtatatccgcaacgtctacggcgcactgcatgcctgggaaaaatacggccttgaggaagccgtgaaggtgtatataagcgagtatgctaaaaagtccgtgtctccaaagcagaagtatatccaagactaccccgattatctgacgtccctgcgaggaaaaattgaattcataggaagcgtgcgcggaaaagatgacggtttgtaccagaagctcctcaacatcttcaacgagctcattaataagtga

SEQ ID NO: 7966 - RNA, 1101 nt, synthetic construct
  source 1..1101: mol_type = other RNA
atgaagaagaacatctccttatccccattgttatatgattcttgcgaagatctatctagtaagtttttgcagctcaaaagtccgcgtgacgtggctagactgctgcagatcccatacaactatctgatctacgccatttatcggaaagacgagagcctgcgataccgtacattcaatatccctaaaaagtcgggggattaccgagtcatttcctcccctcataaatccctcgccataattcagcgcaagctgtctcagattttgtacgcagtttataaaccccgccccagtattcatggctttgcggccaagcgcagtatcattaccaacgcccaggcccacaccaagaaaaagttcatccttaacatcgacatcaaggacttcttcgatagcattaatttcggcagggttagaggcctgtttatggcaaaaccttacgaactgaatgaaaaggttgccaccatcctggcccagatatgctgtttcaataataaattgccgcagggagcaccatccagccccatcatcagcaatctgatctgttcaaaaatggactcagagcttcaaaggttcgcgaaggagtattcgctgttctacacaaggtatgccgacgatctcacactatcattgactcgggatgagctgccttccgagctcgtagcttcatacaagaaagggtttagtcaggtcgtcattggaaatgaagtgaggagcattatagagcagaacggctttcaaattaacaattccaaggtccgcctggcacatcggacccagagacaagaagttactggccttattgtgaacaaaaatgtgaacgtgaaccggaaatacatcagaaacattttcgggactttacacgcttgggagaagtacgggcttgaagaatctgtaaagacatacataagcaagtatgctaagcaacccatactctctcagaaggacgtgccaacgtttctggacagcctcagaggtaagatcgagtttgtgggatctgtgaggggtaaagaagatcccatctatcagaaactgctctcaatatttcacggacttaagaacaaagagatcgataacgctattgtcgtggacagcgagaattga

SEQ ID NO: 7967 - RNA, 1065 nt, synthetic construct
  source 1..1065: mol_type = other RNA
atgtatgaaagttgtgaggacctcggaaagaaattcaaggagctgaaaagtgcccgagacgtggcacagattctcaaggtaccatataactacctcatttactacatctaccggacctctgagaattctaaatatcagacgtttaacctggagaagaaatccgggggctacagaacaatccactgtccaaataattccctggaaatattgcagcggaagttgtcacaagtcctgtattcggtttacaatcctaagccctgtgtacatgggtttgcagccaacaggagcatcgtcactaacgccaaggtgcatacaaggaaaaagttcgtgctaaatatcgatatcaaggactttttcgacgctattaattttggtagagttaggagcctgtttattgccaagccctatcaattgaataaagaggtggccaccatcctggcgcagatctgctgctttaaaaataaacttccgcaaggagcacccacctcacctatagtcagcaacctcatctgcgcgaagatggacaaggaactgcagaattttgctaaagagaacgggattttttacacacgctacgccgacgatatcaccttctcaataaaccgtgagaatcttccatccgggctggtcagttcttacagcaagggttttagcaaagttattctaggcgacgaactcagatccattattgaaaacaatggcttccagatcaacgagagtaaggttcgattagcctacataaatcagagacaggaagctacaggactggtggtgaacaaaggcgtgaatatcaaccggaagtgcatccgcaacctgtacggtactttacacgcttgggagaaattcggcctggagcaagcacagaagacttatatcttcgagtatgctatcaagcctgtgagccccaacaataaggtccctcccttcttggattctctgcgcggaaagatagaattcattggctcagtgagggggaaagatgatccactttatcggaagttacttaacattttccacgaactcaaagaaaaggagtccgataaaaacaacatcattgtgccgtga

SEQ ID NO: 7968 - RNA, 1095 nt, synthetic construct
  source 1..1095: mol_type = other RNA
atggaatcacgctctgatttcctgcagcccctcctgtacgaaagttgcgaggaactggccaagtcctttaaatcgctgaagtctccacgcgggctagcaagcctgttgaaaatcccatatgagtatcttgtgtactatgtataccggtttccccaggacaggaaataccgagctttcaaaattttaaagtccagtggaggtcatagggcgattctggtgccaaataaaagcctcaagatcgtacagagaaagttgtcacaggtcttatatagcatatacaaccctaggccgtgtgtgcacggatatgttcccggcaagagtattattaccaatgcaaagtctcatactagaaggaaattcatcctgaacatcgatatcaagtcattcttcaagtctatcaactacgggagagtgagaggcctctttatcgccaaaccttattgtttaaacccccctgttgccacatttattgctcaaatatgctgccacgagaatcatcttcctataggcgctcccacctccccagtggtttccaatctaatttgctccaaaatggatagtgagctgcagaggtttgcaaaggagcacggttgtttctatacccgctacgtggacgacatgacttttagcatcaacaagaagaatcttcccagcgctctcatagccaaccatggccctggcttttccgaggtggtcctcgggaatcaacttcgtgagataatcgaagaggataatggttttcagattaacagcagcaaaattcgtttgcggcactacacgcaaaagcaggaagtgacaggactgaccgtcaacaagttcgtcaatgttgaccggaaatatattcgaaacctgctcgccaccattcacgcgtgggagaagcacggcttccagaacacgatcgacatgtatatgaaaaagtacgccaaggaatcggtcctgccagggaaagaaacaccgaacttcctttcttacctccggggaaaaatcgagtttgtgggctctgtgcgcgggaaaaatgacttgacatacaagaagctgctgaataaattcttcgaactgaagactagagattcaaagatgatccggggaatctga

SEQ ID NO: 7969 - RNA, 1119 nt, synthetic construct
  source 1..1119: mol_type = other RNA
atgcgtaatcagaaaaccatctccctggaaggacgcacagacgatctgcagcaagactttctcaaggtcctcaacaacagagacttagcgaagctgcttgaaatctcatatcctcagttgatctatcatagcctgaagacaattaatagtgtcactcggtatcaaacattccaggtccagaaaaagtccaaggggactcgtaaaatttgtgtgcccaacaagtctctgaaaatcattcagactaagatatcccagatactatacagcatttacgagcccaaaagttgcgtgcacgggtacgtggttgagaaaagcataatcaccaatgcaaagtcacacaggagaaaggagtttattctcaatctcgacatccgcgattttttcggatctattaatctcggccgggtgcgggggttattcatcgccaagcccttcagcctgccaaaagaggtggctaccactatcgccaatttgtgttgccacgaaaataaactaccacagggcgccccgtcttcacctattctgtccaaccttatttgccagcaattggatagagagctccaatatttcgcacagaagaatcgactttattataccaggtacgctgatgatatcaccttttcgagcgagtatctggagagcctcaagtctctgataaagaacctggaattagtaaccgaaaactaccctatcctgctgaacaacgaacttgagtacattttcacaaagaatggtttcaccatcaaccaaaagaaggtgcggctcctgtacccccatcaaaagcagcaggtgacgggcttgattgttaacgaaaagctaaacgtggacaggaagtacatcagaaatttgagggccgcattgtatgcctgggagaaattcggacttgaggaagctagtcaggtttacctggaaaaatacgcgaaaactcctacactgcgaaggaagaaaaaaagttcttttatcgaggccattcgcggcaaaatcgagtttctgaagaatgtaagaggtgaatcagatccaatcacacgcaagtttctggacaagtatagcgagctctacgaggaatacaaaaaaaacgtcatacaggctaaagaggagccagactcccagtccacgtga

SEQ ID NO: 7970 - RNA, 1110 nt, synthetic construct
  source 1..1110: mol_type = other RNA
atgcggaaccagaagaccattttcctcgagggcaaaacagatgatttacagcaggatttcctgaaggttctaaacaaccgcgaccttgcaaaactgctggaaatctcatatcctcagctgatttactactccctgaagactatcaactccgacaccagatatagaacatttcaaatccagaagaagacaaagggtacaagaacgatttgtgttcccaataagagcttgaaaatcttacagaccaagattagccaaatcctgtacagtatctatacccctaagagctgcgtgcatgggtacgtcttcgggaagaatatgattactaacgcggcagcccaccgacgaaaagcatttgtgctgaatttggatatccaggacttctttggatccataaatctaggtcgggtgcgcggcttgcttatggctgaaccatttagtctgagcaataccgtcgccaccaccatttcaaacctgtgctgctaccagaataaactaccacaggggagcccgagttcccccattctgtccaaccttatttgtcagaaactcgatcgggaacttagccattttgcgaagaaacaccggttctactatactagatatgccgacgacataactttttcctcgaagagtttggatgccctgccattcctgattaagaatctggaccttgtgaaggagaaatatcccatactcctctctgacgagctcgaatacatattcacgtctaacggctttacgctgaatcagaataagatcaggatcctgtatccacaccagaaacaacaggtaacaggacttgtcgtgaacaaaaagctcaatgtgaaccgtaaatacatccgtaacctgcgcgccgccttgtacgcttgggaggaattcggactggagaagacatctcaagtgtacctcgagaagtacgctaaaacacccactttgaaacagaagaaaaagtcaccttttgtcgaggcaataaggggcaaaatcgaattcctcaagaacgtaaggggcaaaagcgatcctatcacccagaagttcttagacaaatattcggagctctattctagggacgttactcaagctaaggatgatcaggactctcaatcaacctga

SEQ ID NO: 7971 - RNA, 1056 nt, synthetic construct
  source 1..1056: mol_type = other RNA
atgtacctggaatccagctgtgaaaggctcaagcacgattttctaaagcttgagaataaccgtgagctagctgagctcttaaacataagcttcagccggatcacctactatgtcgtgcggataccagattcggcacggtaccgctcctttcagatcaaaaagagaagcggcgggtttcggaagatcgatacacccattaaatcactcaagatcatccagcagaaactgtctcaggtgttgtattcagtctaccaggaaaagtcttgcgtgcatggcttcgtggtaaacaaggacatcattagtaatgcacgagctcacaccaaaaaggacttcgtcctcaacatcgacttggagaacttctttggaacaatcaattttgggagggtacgcggcctgttcattggagaaccctataatctgccccaggacgtggcaactatgattgccaacatttgctgctataacaatcagctgcctcaaggtgcccctacgtccccgataatatctaatatgatttgtgagcgcctggacaggaagctgcagcaattcgccaggaagtataagctgttttacacccgctacgcggacgacattacactgtcagcgactcgaaaggagattccttcctctttagctaccgtctcacccgagaatagaaacaagatcgagcttggtgacgaattgcagaaaatcatttacgagaatgggttctccattaatcataaaaagacgagaatcgcctatagtgatcaatcccagaaagttactggcctgatcgtgaacaagaccgttaacgtgccacggaaatatatccgagacgtgagagcagcccttcatgactgggataaaaacggctatagcaaagcccaggaaaagtaccaccttaaatacgctaaacaaccatcactgcagagtaaggatagcccttctttgcacgattccctgagaggatctatagaatttattgggcacgttaggggaaggaaagataaggtgttctgtcgcctcatcgccaagttaacagtcctcaaataccgtgatctgagcaaaagttga

SEQ ID NO: 7972 - RNA, 2148 nt, synthetic construct
  source 1..2148: mol_type = other RNA
atgatagagtatgacaacaagtacaatcagtacttgcataagttcaccaaaatcaagacgtctctatctgaggataaatttaggctggtagaaatcaatctgaaaactatcctgagtaccaaaacattcaatggcctcttattcaccaatgagtgtcttaactacttcatcaacaaggacaagaataagtttcccgattggttcataaacaacattgaaagcgagatcaagcgtcgcgacgagctcctcaccctgaagaataatttcttcaagatcaaacacgagcacgagttagcggggatcttagggctggactacggtactctggtatatcacatcttcaaggtgcctgacaacaggaagtataagattttcaagatcccgaaaaagacaggaggatataggactctgtgttctcccatcagtaacatcaagttgatccagaaaaagcttagcgaaatcttgtacgaaatttatatccctcggattaatgctcacgggtttattcccggccgtggcattgtaaccaacgcacgaatccatgtgaaacagaatgcaatcctgaatattgacatcaaggactttttcccaaccattaatttcggccgggtgcggggcctctttctgaacaaacctttttattttcccaagtggattgcgaccttaattgctcagatctgcacataccagaatcagctgccacaaggatcaccagtgagtccaattatctcaaacatgatttgtagcaagctggataacaagcttagcgcaatctcaaagaagtatttctgctatttctcgagatacgccgacgacatcactttttccacgaagaaatatgatttccccgaggagctcattaggaaaatcaggattatcattgaggaggaaggattcatcgtgaataataacaagttccgcatccagaaaaagaatcagcgcaaagaggttactgggataacagtcaacgaaaagttgaacgttaagcgaaaatacatacgcaaaatacgggccatgttatcatcctgggagaaactaggatatgagaacgccaacaacacttttaacaagaaaattaagcccacttacccccacattaactttctccctcgactcgataattccttgcatggtatgattgaatatgttggtcaggtgaggggaaaagaggacaacatatacctgaagtttctagagaagtacaatgcccttaataagacaccacactccgaaagagccataaacaataacgaaacagactcaaaagtggagaaacgggaagagcacaatcaaaacccgcaacatgtgcctataaaagtgtgcgaactgctgaatagctttaaaaaagagggctcttacctcaagaaactcgttcacaatgatgaggataagcctgacctgccaaaaatcttggacggtgctaaaaatgagatcaacaccaagaagtcaattctgccctacgaactttattccaacatttgggtgaacctgatacgtctttacgaaaaggaggggatgggcgtctggaatagaaatgataagaagcacccaattagtattaccaagttcaacgacaagatcatccaatttaagaaggatatcagattcggcgcctcttcggatcagacgagcatgtttacaaccattcagtccattatcaaagagctacccaacaaacagctcgaaaacaagattaaagtcaaccctaatctggacaaattggacatctatactgatgtgcagcatatcagaaatgggttgaagataatcatagagcacgttattaagtacatcgacaaagggaatggaattcggattaatctgtccgaacttaaatgggtcaatgaaaagctgtacaagtatgaaatcagcatctgtaacctgaactcctctagttatatcaacaagcaggtgctgattaagcgctttaacgatctcgagcatgacctcccaaaactgaaagataaacacagttccaaagggcatctgtttaatagatgcgactggtacatagaggctatctttgacggccaaataagcaagattaacgtccttagcaaagataacccggatggttctacattcgaagatgcaaatcctaaatctaacgatggcttcacccatatactggtcttctacggaatgtga

SEQ ID NO: 7973 - RNA, 1650 nt, synthetic construct
  source 1..1650: mol_type = other RNA
atggtgtatatctataagatcgaacctaatcgcagatatacaattttctcaattcccaagcactccaagggtgagcggaaaatctctgtgccctttaaatccttgaagttcattcagaagaagttgagcaatatccttcagactgtgtatgagcccagcattcaaactcacggattcatccaagagcgctctatcctgaccaacgccaagctgcactcacggaaaaagtatgtgcttaatctcgacctcaaggacttttttccaagtattaatttcgggagagttcgagggttatttatccaccattacaatttctcaccagcaattgcaaccgtgctagcccagatttgctgttttgataatcagctaccacagggcagtccaaccagccctattatttcgaacatgatctgctctcgaatggataacgagttggctaaactcgccaaacggtacaattgtatctattctaggtacgcagacgacctcaccttttccacttctgaatactacttcccccatgagcttgctcggaccaaaatcgtgaataatttcacgataacgagactgggcgaagaattgagagacacaattgaggataacggctttaggatcaataacgagaaagtccgcctgcaaaagacaaacgagcgtcagatagtaactggactagttgtgaataagttcccaaatacaacccgcaagtatgtgcgtcagatccgtgcgatgttatatgcatggggtaagttcggactgcagccggccgaggaagagtacttcaaaaagtacgacaagaaatacagagccccctataaaatcaaaccgtcctacaagaacattgttcgaggtaagatcgcctttctgggaatggttaaaggcaaggaggataaggtgttcattcggtactggaaccaactggtggccctggctcccgagttcggtaaaccgatcgtcccaagtaccatatctgcttttatcccccctattatatatactgaaggcaaaaccgaccctaaacacatggaagcggccttgcaacatctgaagaaacgcgggacatttcacgacctgatcataaaattccatcaggaggagggcgattccgggctgggccatgacaacttactcaaaatgtgccagaacttcagtaaaactcctaacagcgaggccaggatctttctgtttgaccgggatgtcccaggaaatgtgaagagtagggtaacaggcaagggagaattcaagtcctgggggaacaacgtcttctcattcttacttcccattcctacgcacagagaaaacaacgcggatagcgtctgtatcgaactgtactttgaagataaggatctgatgctgaaggacgaattcgggcgacgcatttttcttaatagggaattcagcaacctcagcggcaggcacaaatcccttgatttgatttgctccgacagaaataagataaagagttcactcctcgagataatcgattcttcagtctacgattctaatgaccagaacgttgccctgagcaagaacgacttttcgaacctgatactcgagaggaagcatcctttcgatcaggtcgacttttccgcttttctgaagatcttcaaagtaatcggggacattatcagcaaagtgaacgctaatgcatga

SEQ ID NO: 7974 - RNA, 1695 nt, synthetic construct
  source 1..1695: mol_type = other RNA
atgaagaagtatactgtgaaattaaacgagaacgaaatcaaaaggcggatagccgacttttgtgacgattccaaaggcgaaaaaacgattgaggacttcctcgatacaagtttaaagggcctgaagatcaaactgtacaagaactacaatgaactctataaggaaaagatgatcctcaaaaggaacggtgagcagcgtatattaagagtgccgaataattacctcaaaaaaattcagcgcaacctcaattacatcattcaaacaatctacaagggaaagtttactagtcatgcgtttgagaaagcttccgagggcaaatccaaaaatattatcacaaacgccaagattcacactaataagaagttcatccttaagatcgacttgaaggatttttttccttcaatatcgttcccccgtatttacggagtgttccagaaacctccattcaattttgataacaagactgccaggttgctggctcatatatgcatattccagaagtccctttctaaagacgatgtcggagaactaccccagggggcacctaccagcccaattctgtctaatctggtttgccggaatctggacaatcagcttttcaaattgtgctctaaaaacaagtgtcaatacagccgctatgctgacgacattaccatcagcacgaatctgagcatcatgcctaatgaaatttacagcaacaacgatatctccacccagataaaggagattattaagcagaacggtttcattatcaaccaggaaaagaccaaattgttgacacagaaaagaaggcaaatggtaacgggattggtagtgaacaaaaaagtcaacctgaagcgaaattatatcaagaatatccgcgctatgcttttccagtggcagcaaaagagaatcaaatacatgcgcatactcaagaataagaagaacatcttcaccatcattaagcttatcaagaagtcgaacttcaagaacattaactctaagaacaagaacgagcgaaagaaaataattaaggatctgctgagcaatgacaagtacaacaatactatctacttcattgccatgaaaagtgcactactggatgtggagaaagagatgcacgacaagtactatcagaacaagtttgacaaacccaaatttaaacgggtgctgtcaggtagaattgggttcgttaggaaggtgaggggggatgaggatgatatctatcggaaactctggaatcaatattgctacctgaacaataagaagaagaagatcaaacccctgataatcaagaatgtgagcgacgatccgatttggaatattattaacaaaggggagtctatggagctggaactaaaacaggaatactcagaacagcatttactggagacaatcaacgcctttctcaattccaaatttaatggcacactcatctttggcgttgaagacctgacccacattatctacggcatcgacaaagagctgaagactaagagtaaagacgcctttcgaaatgagatcatacacaaaatcttcgatacctttaacccacagaagcagctgcccgtcatgtgtaaattctatgagcgctacaagaaaaccatttgtataatcgaagtccagccatatggagagagaatctatcttgacgcaaagaacaagatttatttcgaacggatggatgggtattcacaaaaaagacaagacccttga

SEQ ID NO: 7975 - RNA, 1731 nt, synthetic construct
  source 1..1731: mol_type = other RNA
atgaagaagaagtttcagcatgacctcaaggcttccaaacagcagattcttgaaaaactggacaagatcagcaataatccccttgccaccaagaaagacgtggccgacctgttggaacggaacctgcaggcactttgtataaaactgtacgtcaacaccgatgatctctacgagatcagtaagatacaaaagaagaatggcaaggaaaggataattttcaagccaaacccttatctgaagcaggttcagcgcaacttgttgtatatcttgaacttgaagtacgagtcaaaattttgtagccacgggttcgagaaagacaaatccatcaaaaccaatgctgccactcatgtgtctaaaaaatacatcctgaagtgcgatatcgagaatttttttcccacgatcaacttcaagcgcgtctatggagttttcaaatctccaccttacaactttaaccctgagattgctgcattcttagcacacatttgtatttatcaggtgtcaacaactgataagcacgatctcggtatattaccgcagggggcgcctacctctccccttatagccaatctggtttgcagaacgctggataatcaactattcaagctggcgaagaacaataagtgctattacacacgttatgcagatgacatgtatttcagcacttatctaaccaactttccggagaagttgtatacgaatggtaaactgagcaacgaaattgaggagattatctacaacaacgactttcgaattaactatgacaagaccaaactgatgtacaataatcaaagacaagccgtcaccggaattatcaccaataaaaagctcaacgtgaaaaggtcctacattaaaaacactcggactatgttatacctgtgggagaagttcaagaataaatatacgctgcagctgtttaatgctacatccgaaaaggataccgttcttcatctgctaagcctctgcaaatctctgatattcttcccttcaaaatctgaattcaagaaataccacacactcaacgtcactgaacaggaggaccttgtgcaaaagtacctcaatgacgataataaacgtaagaacatgtactacgccatcgctaccgagttatccctttatgaagccgaacagctcatgcacgagaaactgtataaaaacaaagtcaagaagccgttctttaaaaatgtgctccggggcaagattggctatattaagctgatcagaggagaggacgacaacttgtatcgcaaactgtggaacaggtactgcaagatcataaactcaaatcagtttaagccactaatctaccccaatactcctgataatagaatctacaacatgctccacagcgtgaaagaagggctggatgtggaattcaaagagtattacgacaagaaaaagctgctggagacagtaaatagttttctcaattccgataagggaggtcagcttatcttcggcatcaacgacattaccatggagatcaccggcatcgacaaggagattaataagcaacaaaaaggggaagacggcttacggacaatgataactaacatcatttgctcgaagtttcatcccacaagtcagctcaacatcacctgtaaattccacaagatctacaacaagacaatttgtcgcatcgaagtacagccataccataataagccaatctactacgagcccgggaaatattatattaggcaggatggacgaaaacagctggtgcagacatga

SEQ ID NO: 7976 - RNA, 1737 nt, synthetic construct
  source 1..1737: mol_type = other RNA
atgaagaaaaatgaacacaaaccgaaacacaatctctttttctccgacgaaattatcctggagaagattagtagtctccagaacaatgtgttcgccgagaaaaaagatatggcagccttgttaaaatccaatatcatagccatcggaattaaactgtacaagcacaatcatcttctgtacaaaagcatatctatcactaagagggatggcaccactcggacgatccgagagccaaatgcttatctaaaacagcttcaacggaatctggtgcacattctcaacctcatctacaaaggtaagttttgttcccatggatttgaaaagggcaaatctattgtgaccaacgccaagttccataccaacaaaaagtacatcttcaagatagacctgaaagactttttcccatcgattacctttgcccgcgtctatggggtattttgctcgccgcccttcaacttcaacaaagatatctctatcttgctggcacatctctgcatataccaggagactctgtcaagtgactctgagggtgaactgcctcagggtgcgcctacaagccctataatctctaaccttatatgccgtagccttgataatgacttgttcaagttatccaagaagtataagtgcaattacacaaggtatgctgatgatattacgtttagcacaaatctcagcgtttttcctaaggagctgtacgataattcccagatcggcaccgagctgaataagattatcattaagcaccagttccaaattaacgagtctaaggtcagactggtgtcaaataagagaagacagatcgttactgggatcgtggttaacaaaaaaaccaacacaaagcagagctatatcaagaatatacgaacaatgctccacaattgggagaaggcgaagtataaatatgtgcatatcctgttagactccaaggtaactctggagaagaaaattcagctggttaagctctcaaaaattcccatcattaaaccatgttccgaggaagtgcaggtggagaactttaaaaagtttttcgacgaagagaacaagaagaacaatatccacaacatcatcaaactggctatcgagcttggtctgcaagaagcagaagccgagatgtatgagaaattgtacaaagacatcgaaaagaaacccagttttcaacgcgtgctgctcgggaagatgggacatttgaaaaatgtgcggggcgaagacgataacgtttacattaagctttggaatcgctactgcaggatcgtgaacatgaacaagtacaagcagtatagcgtcaaagacattaaagaggatggattgtggttcctgctgtacagccaggaggaaaatcttaacatcgagttcaaggaaaactatcaaaaagatactgtgctaaaggtgataaactcatacctgaatagtgaaaccggaggagtattaatcctgggcgtctcagactatcctagagagattgtcgggatcgaccatgaaattaaaaagcaccagaaaggcgaggatggcttcaaactatccatgcagaatgctatcattgacaagttcaagccaaacaagtcactcaacattaactacaagttccacaaattctgtaacaagacgatttgtgtcatcgatattaagcatgagaaagagcccatatactttagccccgaagagaaggaattttatgtcaggcagaacgggaatacaagtaagttgaaccactctaatccatccgaaaccatatga

SEQ ID NO: 7977 - RNA, 1602 nt, synthetic construct
  source 1..1602: mol_type = other RNA
atgaagcataatctcaagagaaagcccaaagacatcatcgagaagtttaaagctctctcttcacgagaggatgtcgcggaccttctggaaatcagcgataagcagctgcggtactacctatactccctgtccgatactgagaagtacaccaagtttaacatacccaaaaagaatggggggtccagggatatcacggctccaataaagaacttcaaactcatccagaagaacctggcccatattctgtatcttatacacaatcctcggatttgttcttacggcttcgaaaagaattacaagaacaaagaacaggagacagtgtacaaaggcatatgtccaaatgccaagctgcatatcaataagaacaacgtgctgaatgtagatctgaaggacttctttactagcattaattttggccgcgtgagaggaatgttcatggctttaccccataattttagttcggatgttgctaccgttatcgcccagatctgctgcaccaataatgcactgccgcaaggggctcctacttcacccatcatctccaacatgattctaaaaagcttcgactccaaaatgctcaagttggtgaaacctttgaaatgtacatattctcggtatgcggacgatatcactatcagcacaaacctgaagacgttgccaaaagagatatacgattacacccagaatagcatatcaaccgacttaaacagtattattgaggataacggattcgaggtgaacaaacagaaaatccggcttcagacaaagattcaaaggcagtctgtgaccggactaatcgtaaataagaaaaccaatgtccctcgtgattatattaagaacattagggccctcctgtttcgctgggagaaagatggcgaagaaaatgccgacaaatacttccaggaacactttaaaaagtgtaagcttagaagagtgcttctcggccggatctcacatataggaaacgttcgaggtgtggaggacccgattttcattaagctctggaacaaatatcacatcttaatcgggcaatccgataagatcaaggcactgattagtgaggacaaggagattttgacactgattagtaagggcgaaaatagcgagctcgaattcaaacaggcatatgaatatagccaggatgaaaaacgctgcaacaataagctgtattacaggcctcaagggaaaaaagaggacatccccaccatgaaacacaaagtattgaagacagtctgcgcctttctgaactccaattcgggtggcacacttctcctgggagtcgaggacaattcaacgataagaggcctgaaagaggacatcaagaacaataagaacaacctggactctttagccttgtctattgaccacgcaatcaaggacaacataactcctagtccaatcggtaacattaagaccaagttctacaagattcacaacaaatacatctgcaagattgatatcgagccatattacgaccccgtttatctgaaaactcacgggggaattttttatgtgcgtcatgacgtcgagagcgtggaaatcaaggaaaaagataagattgaccagtggatcagggcccacaacaaactccaacgcaattga

SEQ ID NO: 7978 - RNA, 1713 nt, synthetic construct
  source 1..1713: mol_type = other RNA
atgaagaaaaacttcacggatctaaagacaaaaaacgacctggccgagtttctagacataacaataaagcagcttgattacaatgcctataacgaggacaagaaatacaacaaattccacgtacccaaaaagaatggatccaagcgcgagatatatgcaccaattccaagcctgaaaaccatccaaaaaaaactcagtaaggagctcactaaactgtacttgcctaaaaaacacgtgcattcctatacttcaaaaaagggcatccgcaccaacgctaagattcatgtcaatcagaggtttgtgttcaacatcgatttggaaaatttctttccaagcatcaactttgggagggtcagtggcgttttcaaagcacctcctttcaattttaacaacgaagtggcctacatccttgcgcagttgtgctgtcaccagaactcactgccgcagggatccccctgttcccctgttatttctaacctaatttgtcgctcacttgataacgacctgaaacgcctggccaagaataacaaatgcttctactcgcgttatgccgacgatatcacattttctactagtctgcgcagattcccagattctctctgtaagatagtgaagcacgagatccaaattggtgaaaagctcaacgagatcatatgcaagaatcgatttagcatcaatccgaataaatctagtctcaagcggccatatgaacatcagtatgtgaccggcctgaccgttaaccagaaggtcaatgttaaacggaaattcctgaagcaggtgcgagctatgttacacgcttgggagacttttggattatccaatgccgcgcaagaacattttaacaagtatagcgtaaggcacaaatctaagaaggacgactcattgtttatcagaattatcgaaggcaaactgctgttcgtggcagatatacgggggaagaatgatcccatcttcaaaaaactcctggccaagtttaaggtgcttgctccaaaggatacgttaaagaactacctctcttatcagggcgataagatcctggtgtataccgaaggtaacacagactggatgcatctgaagcacgcactggagtcctttaacgtaattaataactacctgcaagtgaattcggcaattaaaatctacgagtacgatgagactttaacaattggtgacaaaaagcttatggagatactaaggggccatttgctgtccgacaacaccaggcccataattggggtgtttgatagcgataaccctcagacactgggggagttcaatcctacccgaaaccggaagtacctgaatttcgacaatcgcgtctttaccttctacctgccccaaccctttcatcgtaagacggacaaaaattgcattgagcactactataagaaccacgacctttgcatcaaggacgagtacggacggagaatttttctgagcaatgaattcaatgaccagtctggagaacatatcgaaatggaaaatgtgcgttgtgatttcggccagaagaagctcagaatgactgacgggattatcgatagcaaagtctatgatttggaagagagaagtctcgctctcagcaagaaagactttgccaggaatatccttagcaaacacgacaacttcaaaaaggtcaatattgactcattcagattgattttcgaccggatccaggaaatcattaaggatatcgagtccatcaagaacgagtga

SEQ ID NO: 7979 - RNA, 1797 nt, synthetic construct
  source 1..1797: mol_type = other RNA
atggaatcaaataaactgtcaccagaagaactcgctaagaagaacgaagaactccggaattcatttctagccactgacagtattaagaaactggctgtgttcttcaacttacggcactctgtgctgacttaccgcgtatataaagtgcctgaggacgagaagtacaaggagttcaaactcaagaagaaaaatggggggattagaatcatcttgtcacctaatgagaagctgaaattcttacagcgcaagatatcggacgttatatacttgatttaccggcccctaatctatagccatgggttcgagaagggtaaatccgtcaagaccaatgctcagatacatgcaaagcagaggttcatcctcaacatagacctcaaggatttttttagcagcattaatttcggcagagtgaggggaatgtttatgtctccaccctttgccttttctcctgaaatcgccacaatcttagcccagatttgctgttacaaaaatgcgctgccccagggggctcctagttctccagtgatctctaacattatctgccttaagcttgatcgccagctgtccaaattcgcgcttgaaaacaagtgttactactcacgatacgccgatgatatcacattctctactagctgcaagaaatttccgaaacagatctcctctatcaaaacgggcaaggtcaagctgaatactaaactcgaaagtatcatcagcaagaacggctttgagatcaacgaggaaaagattagtttccggtcggagtatcaacagcaaattgtgacaggcgtcgtggtcaatgtatcccccaacgttaagagaaagtacgtaaggcaagttagggctatgctgaacgcctggggaaagtatggcctcgaggaagccgagagagagcacttcgagaaatacagcacaaagaacagaaacatcctgcgacagcgcccgtcacttcgtgatataatctccggtaaagtccactacatcgggtatattcgcaaaaagttgaccggatccgacaagctgtatatcaagctcaagaaagatctggagaaactgattaaggaggaagacagcatccccaagtatcaggacaacggtagccagctaccattgattataactgagggacatacagactggaaacacctgaagaacgcactgtcacattttaaagggtttaagaaggatgcaattgacgtggagttttgggaatatgaacaaaacctgaagttcggagactcggttcttaaaaagttttgtctgaaagagtcacacaagcccaaatcccggaaatacatttgcatttttgaccgtgattctcctgaaatcattaagtccatgaatggcgataacaacagtagtttcaaatattggggcaataacgtctactctttttgtctgccaactccatccaatcgagaaaattattccaatatcagtgtggagatgtattacacggattccgaggttaataccattgacactgacaccggaaagagcctgtttttcaccaatcagataaaggaaaccattgaggtcaatcttaccaacaatacaacgacccagaaaagggagatcctcaaaacccctttggcaatcaacgagttcgataagaagatattcgactacaaagtggatttgatcaagaacacaacaggcgtgcaagtggcccatagtaaaaccgtgtttgcatccagggtatataatagccacaaagacttctctaactttgatttaagcgagttcgaaaaagtgttcaccataatcagcgagattattaaacacaactctagccagtga

SEQ ID NO: 7980 - RNA, 1632 nt, synthetic construct
  source 1..1632: mol_type = other RNA
atgaagttcacagagcttaaagcgaacattcagcttgccgccaagctgaacatggattatagctacttcacctatctcatctacaaacgcaccgacgatcaaaattatatcccatacatcatccccaagaaatccgggggctataggaaaattgcagctccttgtaaaactctcaagtatatacaacggcagatcgccaattttatctacgacgaaatacaggtgaaagattgtgtccacggttttgcaagaggcaaggacattaaaactaatgccaactatcatctcaagagaaagcatatcctgaacctggacttgaaagacttcttcgatagcatcactgtcaaccgagtgtacggtgtatttcatgggcacccgtttaactttccagaaaagttatcaagctgtctggctaagatcgcaacatattacggctctctcacacagggcagcccacttagtcccatcattagtacattggtgtgcagaagattagataatgaccttaaagcctttgctgtcaagtacggactcaggtactctcgatacgccgatgatattaccttttcctctattcggaccatgaaggagctgtttaaagagaatcccgtgacaaacaaaattattttgtgcaaggagttggtggatatcataacgagaaatgacttccaaatcaacgaagataaggttcgatatcgcaacaagacccaaaggatggaagtcactggcctgattatcaacgataaaccaaacctcgtccgcaactatcgtgaccagataagggccatgctgcacgcctggaagaagttcggttatgagaatgcggagaaagaatacctgtccaagttttcccgcggacacaaaagcttcaaacaggtcatctacggtaagctcaatttctacaagagcgtgcgtggcgtgacagaccactactaccagcagatggctaaactgttcaatacactatccccagacatgaagctcttgctgaagcctacacctgaggaaataattcagaaggcagtatgggtcattgataatacagtaaatgctgagaagaacgattctccgattgaacggatgtctcaggggacgtgctttttcctaaagaacatcgggatcgtgactgccgcccacgtactgtttcctaacaaaaagaacaccaccgacgagttcgacgtggacttcaatcagtcacccatgtccaatttctatatccttaacccaaccaatcctagccatagggtgaatgttcagctcgtgaatctggacaagaatcgcgactgggctgtgttatccctgaaaaacactaacgatctgtctattaaccgggactacttcgagcttgaatcatgctgcaaaattcagacgggcactgaaatcatgctgtgtggatatcccagttttgaactggggcaccagatcaggaaagaaaccggccaaattgtggcaaagaagaccgagcacgcggttaagaaattcgagatcactgctgatatacggcatggcaacagcggaggacctatactgaataataagatgcaggtgttgggatgggcagacgccgctgaccccagtatcgttaatgagattggggagctactggataactacaaatcgacctcagtttga

SEQ ID NO: 7981 - RNA, 1671 nt, synthetic construct
  source 1..1671: mol_type = other RNA
atgaatgatcccaccgagcaggccaaactggagcaagccttcagaggccttaagacacgggatggagtcgctgctttactgggcgtcaaccgtagaagcttggcataccaggtgtttaggcaccctaagccgtatatttcctttgctattaagaaaaggagcggaggtatgagaactatctctgcccctaaccccagcttgaagaaaatacagcggtccctttctaagtacctctgcgcagtttataggactcggaatcctgtgcatgggtttgccctggaacgatccatcgccaccaatgggaacgtccatctggacaaaagatacattttgaagatcgacctcaatgagttctttgactcaattcacatcggccgcgtgatcggacttttcgagaaggtgtttcacttcaacaaagacgtcgccactttgctggcccaaatctgctgcaggacaggctctcttccgcagggcgcacccacaagtccagtgctatcaaacctgatatgttggaacctggataatgaactccggcgcgtggctatgacacatcggtgctcctacacccggtatgctgacgacataaccttcagcaccaaccaggcacgcttccccaaagatctcgccacgatcgcagaaatcgatggagtggccgcagtgactgtcggtgctgccattattggagttgtgactgccaacggtttcaccattaatcaaagcaaagtgcgactgctcacgaagacccagaggcaggaagtgactggagtagtggtgaatgtcaagagaaatgttgaccgtcgcttcatccggaacataagagctacactctttaagtgggagaaactggggactctgcacctccagaagcagtacgaagatgtttatcgtagatcggcaaatccctctaggccaccagccgccatagaagatgttattcgcggaaggattgagcacatcgcttatatcagaggtcaaagggacacactatatgctgggctggccacacgtttcaataagctcgcggaaaaatggctgatcattcccgcgaccgcctttgaggcgttcaccgctcgattacggcgagcggtttgggtgattgagtgtgacggagacaaactaagtcctgatagtgagccaagcgacggcgccttgatgcaaggcaccgccttttaccttgaggggaccgggtgggtcacttgtgcgcactgtgttgagtgggatgggattgacaatagcaaggtgaagtacctgtttcgacctgataacccctctaagcggtactctttcaaaatctccagatcccagccgacggtagacgtcgctgtgatatccgccgacataccagcaagcgaatacgaacccctgcagattgccgctacagcaccttcacgcaacaatcttgtacaggtggtaggttggcctgagttccgcctgggcgatgagatcaccgtgatggacagtagaatcatctcgtttacaatggtcagtggcatcaggaggatgcgcgtctctgccccaattatcggcggcaattcaggtgggcctgggctcaacgctgatggccaggtgatcggagtggttgtaacggggtcccataaaggcgaacagactattaacaacgcattaatccccatttcagcactgagctatctggaggatacaccagactga

SEQ ID NO: 7982 - RNA, 1137 nt, synthetic construct
  source 1..1137: mol_type = other RNA
atgatctgtagcccgctggatacccaactaatacggttagctaagaaatatggaatcgtgtacactcgctatgtggacgatataaccctcagcacatttaacgattccttccccgaagctatagtcaagggtgaggtgtccaatcttattatcggctccgagctggagaacatacttaagcggaactccttcagtgtgaatctggacaaagtctttctgaataataacttcacacgccaagaagtcaccggccttatcgtgaatcgattcccaaatgtgaaaagggagtacatcaaaaaccttagggctattctccacaactgtttcaaagaaggaatatacgaaacggccttagaatacatttgtaagggctactgcaagaacaaggatattatcaagaattctgacaacaaggagtgcgtgaataattggttcaaatacgttctgaagggcaaaatcaacttcatcagagaaattaaaggcgccaatgattacatctttctgaaatatgcccagcagctgaatagattgttcaacgaggaactcttcaatctggactttttagacgagttcatctacaacgtcgttgtgctggagactatgaaccccgataatattgttcaggggtctggtttttttattaaggatcgtgggctctttactaactaccatgtaacggagaacaacgaattttactcggtaaaaacatacaagatggagaacctcggcgcggtgttgaaggggatgaatgaaatcaacagtaacattgacatcgattatgcactgtatgacctgaagtcttcaaagatctcaggattggagctgggagagtctaagaatatcaagataggggacaaaatcgtcgtgataggttatccagaatattgcgataatgacagccctaatatccagacctgcaatatcattagcaggaccaactatcttggggaatgtctgtatactatttcagggagaattgtccatggcagcagcggcggcgtagtgctcaatatgaaccacaaagttatcggaattatcaaggcaggggtggtcaccctcaacgagtcagacacatccagtaaacagggttttattcctattcacctggccctagagcatttgaacaagggagtttga

SEQ ID NO: 7983 - RNA, 1665 nt, synthetic construct
  source 1..1665: mol_type = other RNA
atgctgcgtgatgagttctaccggctgtccactcgagaagacgtggccaagatattggagatcgaggaaaaaagcctacggtacttcctttacgccaagaaacctgataatatgtataccaccttcaagatagctaaaaaaagcggcggcacccgggaaatttccgcacctgccaaggaactgaaggctatccagcgcaagctcgcttatatcctgaatctggtctaccgggtaaaaccaagtgtctatggcttctttcatgaacgcaatatcaaggacaatgcctctaaacacactaggagaaaagtcattctcaacatagatctgaaagacttcttctcccaaatccactttggcagagtgcgaggtatgctgatgaataagccctacggtatcgggcaggaggctgctaccgttatcgcacaactggcgtgttacaaggggatattaccacagggtgcgccatcaagtcccgtgttaaccaatatgatttgcagccctttggacacccagctcacaaacctggccaaaaaacacggtctggtttatacaaggtacgcagacgacattacgttttctactttcaacccggtatttcctaaagacatcatagagcgagacttgagctctattatcatcggccaggagttggatgctattctgaaaaaaaacagcttctccgtaaatcccaagaagatcttcctcaataataacaaggtgagacaggaagtgacagggctggtggttaataagtttccgaatatcaagcgcgagtatatcaagtccatccgggccattcttcataattgtttcaaaaatggcgtctacgaaacagctatcgattacgtggcacgtgggttttgtaagaacaaagacatcgaggagaacatcgataacatcgagtacagggacattatcatattatggttcaagtctgtcctgaagggcaaaatcaattatatcaaggagataaggggctcagatgactacacattccttcaatatgccgatcaactgaacagactcttcggagaggagatttttaacgtcgagaagcataatgagttctttaacaagatcgcctacaacgttgtgattctggagaacagaaacaagctggtacaggggagcggtttctttttgaaagatgttggactggttactggataccatgtgactgaagatcgcggattttttatggtgaccacatataaaggggagaatattggcattgtgtctaaggagatgaatgagatcattagcgacaagaacattgactacgcaatctataatcttaacaactcgtcgatggagggactcgaactcggggattccaatgagatcgagattggagataaagtgacggtcgtggggtatcccgactacattgagggcgatacgccctatgtgcatacctgcgaagtgacatcaaagaccaagtatctaggagaatgcctatatactgtctcagcgaggattattcacggggcctctggcggggccgttcttaacaaggacaacaaggtaattggaataatcaaggccggcgtggtcagttacgaagaaaaagaagacgtgggtaagcacggatttgtgccaatacacatagcactcaaacactggatgagtcagcaggaaaaccagaaaattaacactgaaggctga

SEQ ID NO: 7984 - RNA, 1665 nt, synthetic construct
  source 1..1665: mol_type = other RNA
atgattaatatcttctccaaaaacgacgacgaattaaaaaaggccttttatgcccttaagagtcggaatgatttggccaatctccttgagattgaggaaaaaactctgaggtactttttgtatggaaagagcgacgacgataaatacaataccttcgaaatccctaagaagaacgggcagtttcgcaagatagctgcacccatatcacctctgaaaaccattcagaggaagctaacatatgtactctctctggtttataaagtcaagccgtgcgcttatggattcctcaaagaccgcaatattaaatctaatgccaagaaccattccaagaaaaaggtgctgctcaacattgacctgaaggacttttttagtcaagtccatttcggaagaatacgtgggatgctgatatcaaaaccatatgacatcggcatcgaagccgctaccagcattgcacagttgacttgttataaaggggttctggcacaaggtgcaccttcctctcctattctaactaatatgatctgttccccaatggatactcagctgatcaagctcgcgaaaaaatacaaacttcaatacaccaggtacgctgacgatatcactttctctaactacaatgagcaatttccgcagggaatcataaagggggaaatcaataacctgattatcggagatgaactgaataacattctgacaaagaacggctttgaagtgaacatgaacaaggttttcctgaacgacaacttcacaagacaggaggtgacagggctgatcgtcaacaaattccccaacgttaaacgagagtacgttaaatcattacgcgcaattttgtacaactgttcccgagatggcgtgtataataccgctaaggagtacataagtaagggcttttgcaagaacaagaatgtgctcgagaatcaggacaacgaggagctggtgatcaattggtttaagatggtactcaaagggaagatcgacttcatcaaagaaatcagaggtagtaacaataacatcttcctgaaatacgcgcagattcttaataaggtgttcaacgaggatatttacgacctcaacattttgaacaagctcacgaataacgtggtcattctgaattacgaagacaataagtgtatgattcagggtagcggcttcttcgtaaaagatgtgggcttatttacctcataccacgtaacagagtcaggcgccttctttagcgtgaaaacccagtatctggaaacaattggtagcgtggccaacgagtttaatgagatatccaaagataagcggatcgactacgcgatctacgatataaagaagtctacaatcgagggatttgaagtcggcaacagcaaggatataaaggtcggcgataaagtcattattatcggctaccccgagtatcaggaaaaagataccccaaccatccagacgtgcaatattaccagcatgactacgtatttgaaggctccactatgcatcgtgagcgggcggatcatacacggagcctctgggggtgtggtgcttgacatgaatcacaaggctatcggcatcattaaggccggggccgcctccactgagaaagaatataaaggaaagcaaggcttcatccccattcacctggcacttgagcatatgaagaacaacaagaaatcgatcagtaattga

SEQ ID NO: 7985 - RNA, 1266 nt, synthetic construct
  source 1..1266: mol_type = other RNA
atggtgaatatcttcaagaagagcgatgaagagctgaaaaaggagttttacaacatgattagtcggaaagacgtcgccaagctgcttgatatcgaggataagtcactcagatattttctgtatagcgacaagaacaaatctatgtacactacattcgaaatcccaaaaaagaaaggcaatcctcggcgaatcaacgctcctaacgaggagttaaaaaatatccaacgtaagctgtcatacgtgctgaacctcatctataaagtgaagccgtgcgcctatggcttcatcaataacaagaacatcaaggataacgccaagaatcacgttaagaaaaagatgatcttgaacattgaccttaaggactttttcactcagattcatttcgggcgggtccgcggcatgctaatgaaacccccctatggaattggtgtacaggcggcaaccgtgattgcccagatcgcttgctacgacggcgtacttcctcagggagccccatccagccccattctgacgaacatgatttgctcccctctcgacactcaactcactaatctggctaaaaagtacacactgaagtacactagatatgccgacgacattaccttcagcacctatgagagtacattacccaagagcattctcgattaccaagttaattctctgacaatcgggaatgagctgaatcacatactgaacaaaaactctttcagcgttaatccagacaaggtgcacttgaataataattacacaaggcaggaagtcaccgggttggtcgtaaataaatttccaaacatcaagcgcgaatacataaaaacattaagggcgatcctgaataactgtaccaaaataggagtttacgaaacggcattggagtacataaacaagggttattgcaaaaacaaggaaattgctacgtccaaagaagataaagagaaagtttgtaactggttcaagtgtgtcctaaaaggcaagatttcatatgtgtcccagatcagaggctacaaggattacatctttctcaagtacgcacagaaactgaacaggatattcaacgaggagatttttaatctcgactatgtggatgactttatttataacgtggtcgtgcttgaaacctccaatcttgataatgtgagtcaggggtcggggttctttatcaaggatataggattgtttaccaactatcatgtgactgaaaatggagagttctacaacgtcaagacctacaaaatggaaatcctgggtgtggtgtctaaagagctgtga

SEQ ID NO: 7986 - RNA, 1659 nt, synthetic construct
  source 1..1659: mol_type = other RNA
atgttcaaaaagacagatcaacaaatcaaggactgcttctataagctgaaaaaccgctctgatgtatctgatcttctggagattgaggataaaagtctgcgctactttctgtatgtgaagcgaccagagaatctatatgtcacctttacagttttgaagaagaacgggaataaacgcataatcaacgcgccgcaggccgaactgaaatctattcagaggaaactggcttacattctcaatctcgtgtacaagatcaagcctagcacacacggctttgttattggaaagaacatagtcaccaatgctaataaccactgtaagagaaaggcaatcctaaatattgacctcaaggatttctttacccaaattcactttgggcgagtcctcggcatgttggtgaaggggccctatgacatttcgaaagacgcagcaatcgtgatatctcagatcgcctgttgtaatgctgtgctgccccaaggtgctcctagcagccctatcattaccaacatgatttgctccccactggacactcggctgaccaggcttgccaagaagaacaatagcaagtacactagatacgctgacgatattaccttcagtacattcgacaagcagttcagtagcaatatgattaattccgatatcctcaacctgaaactaggaaaagacctgaacaaagccattaaagataacggctttgtggtaaacgaagacaagatattcctcaatacaaagaacacaagacaggaggtaacaggcctggtcgtgaataagtttaccaatatcaagagggagtatctcaagaacatacgggctatattgcataattgcgagaaggataatgtctacaacactgcgaagacctacgtaaaaaaagggtattgcaaaaacggacagatcaaagccaatatcgacgataaaaattacgaaacccaggtggtgctgtggttcaaggccgtcattaaaggcaaaatcaatttcatcaaggacatccggggaaagaatgacttcatttacttaaagtgtgccgagaaagccaatattatcttcaaagaccagatcttcaacatatccaagctgaaggattttaaggacaaaatcatctcaaacgtgctggtgttaaaaggtgataacaacggcgtgcagggatcagggtttcttcttaaagactttggattggttactagctttcacgtcactcaggataacgcattttacaaggcctatcattacaacgagtatgaggagacgtctctttgcgtgatttccaaggaaatcaacgaaatcaaaagcgacttgaatatcgattacgcaatctacaagttcaacaaggataacgagaatttcctcgaagccggctcttcggttgaagttggagacaaagtgaagataataggttatcccaactttatgaagggtaacagttataacgtgcagacttgttatattacctcccgtaaatactacatgggcgcaattttctttacggtagggggtacagtcttccatggcgcttcaggaggggtggtgttaaatgatcaaaacaaagtggtcggcatcattaaaggtggggttgtttccaacactgagtcagaaaccaatgaaaatcagggctttgtcccactggacatcgtgctgacgcacttccatcagcagtga

SEQ ID NO: 7987 - RNA, 1719 nt, synthetic construct
  source 1..1719: mol_type = other RNA
atgttcaaagcatcagacgacgaacttattgagaagttcaacaacttgaagaaccgagccgatgtagctgagctgcttgaggtggacgaaaaatctctgagatatatcctctacgttaagaggcttgagaacatgtacaagaagttcaacattagtaagaagaagggcggatttagaaccattaatgcccccgagggtagcctcaaaaccatccagaagaagctgtcttacatctttagcctgatctacaataagaaggcttgcgcgtatggttttataaagggacgagacatcaggggcaatagcaagcagcacatcaaacgcaacttcattttgaatatcgacctggagaactttttcgactcaattaatttcgacagagtcatctgcatgttccaaaaacctccttacaatgttgagaaagatgcagcaaccgtcctatctcagctggtgtgttgtgatgggattctacctcagggggcaccaagctcccccatcataacaaatatgatctgtaggcctctggacacccaactggttaggctggccaagaagtttagcttaaactacacccgttatgctgatgacatcactttctcgtgcaacaagtcaactttcccaaaagaaatggcctactatgatatgcaggaaaaactctgtatagggaaatcgcttcaggaggttatatcacgcaatggatttaagatcaacacaaacaaagtcttcctgaactataaggaccggggccaggaggtgacaggacttatcgtgaatagatttccgaatctgcgtcgcgaatacctgaaagaaattcgagccattctctacaactgtcgcaggtatgatatatattcccaggccaagaagtacatcaaagaatcctcctacactaacaagaacataatgcggattagtatgttagaggacaaaaagagcaaggagattatctacaactggttcaagaatgtcattatcggcaagattcggttcattgggaatatccggggcaaggagtccccgtgctatatcaaatatgcgctcgaatgcaacaaactcttcgatgaggagatattcaagatcatcaaatctaagagccaagaattgatagagaacacagtgtttgtggtgaagattgagaaagggagcaagtatattcagggaagtgggttcttcattaaagatctaggatttgtgacttctatgcacgttacaccagatattgatgagacgtacgacgtatttacccccaaagaggacatcccccggaaactgtgcttgtttaataataaagccaacaaccaggaactcgattactccatatatgaccttaagaatccaacgagtaactacctcaaactgggcgatagttcaaatttgaatatcggtgacagaattactgtatgtggctaccctatgtatgataaaggcgatagcatctatattcaaaacggcgagataacaaatctgaagaaggactattttggcagtagaatatacaccgtgtcacaaaggctcatccatggtatctccggtggcgccgtgttaaataccaataacgaagtgatcggaattatcaaagctggggctgaaaatatggacgaggaagacgaatccattcaggggtttatccccatcaatgatgtcattgaggatgtgaagtctcagggaattgaactgcgcccaaaatctatcctggtcaaatccaacaattacaactga

SEQ ID NO: 7988 - RNA, 1665 nt, synthetic construct
  source 1..1665: mol_type = other RNA
atgctggaggagccgaatatggtgagggagaaattctttaacatgaaaagccgtgaggacgtggcggatattttgggcattaaggagaagagcttacgctatttcctgtattcgatcaaacctgataatatgtatgtcgagttctcaatcagcaaaaagaacggcggggagagggtcatatgcgctccaaacgacaagctaaaagctatccaacgaaagctcgccgtaatcctgaacatggtctacaaaaccaagcctgcagcccacggattcgtgctcgataaaaacgtggccactaacgcaaaaggacatgtgaagaagaaatacgttttcaacattgacctggagaactttttcgatcagattcatttcggccgcgtcagaggaatgctgatgaagccaccctataatttgggagaagaagcagctctagtgatttcccaaatcgcatgctacaaaggcaagttgccccagggtgccccaacctcacctatcctgaccaatatggtttgtgcacccctggacacgcagttgacgaaattagccaagaagtacaatctgcaatattctcgatacgcggatgacattacatttagcacctacaaggctgacttccccgtggagatagcctacgtggactttaacggtgtccatgttggaacagtgcttgaggagctcattaagaaaaacaacttcctgatcaactacaacaaggttcggatttccgactataggcagagacagatagtgaccggtctggtcgtgaatcagttcgttaaccttcgtagagattacatcaaagagattagagcgttgctttactcttgtaaagtgaagggcctgctcgaaagtgccaagctttatgtagaaaaaggcaagtgcaaaaatccaaaaatcatcgaggccgtcaattcaggtaagagtgagaaggaagatgagataataaactggtttctgcaagtcctcaagggaaaaatagaatacatcaagtccattagaggcgataataatccgacctacctgaaatatgcctctgagctcaatcgggttagcggcaagatcttttttcgggttgacgagtatctggattttatcaagcagattgaaaagagcgtctttatcatcgaaattaacgctctggacgattacattcagggcagtggctttctcctggaccccgatctccttttgactaaccaccacgtgactaagaaggagggcttttataaggtgacaaccttcaaagaagatcagatagggatcatctccaatgacatcaagttcttaaagcgcaatgagaatatagactacgcctgttataatgggtttgggcgcgaggatcttatcccttgggaactgggagactccgatgacatcaaaattggctctaagatcattatgatcgggtaccctgattataatctaggaaatactccagacgtccagacagtgtatgtaacaggggaaaggacgttcatggggcagaaactgatcactgtgagtggtaggattgtgcatggagcttctggcggggtagtactcaacgaagaacacaaagtgattggtatgatacggtgtggggttgtgtcctactgcgaaaccgatacaactaacaatcacgggttcatccccattaacgacatcatgaaagacattaagtcatga

SEQ ID NO: 7989 - RNA, 1662 nt, synthetic construct
  source 1..1662: mol_type = other RNA
atgaggcaggatagcgaacagataaaagagaagtttctcacactggagacaagagaagatgttgctgccctgttaggcattcaggacaagtctctgcgctatttcctgtacagcattaaaccggacaacatgtactccgagttcattatcaagaagaaaaatggagaagaccggcacatttacgcaccagatcgccgattgaaaaatattcagcgcaagatggcgcagatcctgaattgtgtctacaagatcaagcccgctgctcacggattcgtgcttgacaagaacattgtcactaatgcggagaatcatatcaagaggaagtacatcttcaatatcgacctggaaaacttctttgaacagatccacttcggaagagtacgaggtatgctgatgaagcctccatactctatcggtagtgaggccgcactggttatcgcccagatagcttgttataaaggcaagctccctcagggagcccctactagccccattctcacaaacatggtatgttccccccttgacacccaactaaccaaacttgctaaaaagtacaacctgcactatacccgatatgcagatgacatctccttctcttcctaccgcgatgagttaccaaccggtatcgtgtacgaagacctcgagggtatacacatcgggaaagagctacgtgagattttatcccagaatagctttgccgtcaatagcaagaagacccgcgtctttgactatagaaaaagacaggaagtcacagggctggtggtaaatgagtttgtaaacattaggagggcctacataaagaagattcgtgcaatcctttaccattgcaaacaggatgggatctatgaaaccgcaaaagaatatgtggagaagggcaattgcaaaaacagctcgatcattgagatgattaagaatgaaaccgaagagaacaaagaacgggttgccgaatggttcaaagaagtgcttaaggggaagattggatatattaagttcgttcgggggaagaacgattacgtgttcctgaaatacgctaaagagatcaatgagctctatggggaggaagtattctcaatcgagacggagttgaaactgatagacaagattgaaaagtccgtgttcgtgctggaatttgagagtgaggataattatgttcaagggtcagggtttatcgtgcgggatattggcctgctgacgaactatcatgtgactgataataacgagatttacacagttaacacgtataaaggcgagaaaaaatgctgcgtctctaacgagatgaacctaataaaaaacaacgagtccatcgactatgcctgttatctctacggcaagactagtgaggacgcgctcgaattgggcaactcagatgagctggacattggatctgaggtgcttgtcatcggctacccagactattacactggcaactcacctgaaattcaacacgtgaatataatctctcaacggccgtttatgggccagaagatctttacaatatcgggtagaatcgtgcatggcgccagcggaggagtggtcctcaacatgtcataccaggtggttggggtcatcaggtgcggaagtgtgactctgaaggaaaccgagagtaatagcttgcaaggctttatacccatcaatgaaattgtgaacgatttgatggcctga

SEQ ID NO: 7990 - RNA, 1695 nt, synthetic construct
  source 1..1695: mol_type = other RNA
atgataaacgccaggactgatattgagactgaaaaactgttttaccagatgcagagcagggaagatgtggccgacattcttcagatcgaagataaaagcctgcggtacttcttgtacgcaataaaacccgacaatatgtataccgaattcaaaatccccaagaagaacggagagtaccggaaaattagcgcaccaaataaaaagttgaggagtattcagaggaagctcgccgatatcttaaacattgcctacaaagtgaaaccagcaagttacggtttcgtcaaaaacaaatccatttaccagaacgctgataatcactgcaaaagaaagaacgtgctgaatatcgacctcaaagacttctttacccagatccattttggccgcgtgcggggtctatttatgaagcctccgtataatttaggagaagaggccgccatggtgattgcgcagatagcttgctatcgcggggttctgcctcaaggcgctcctacttcaccgattattaccaatatgatttgctcaccactggacacacagctgacacacctggctaagaagaaccaggttgtctatacaagatacgctgacgacataaccttttcgtgttacaagaacagttttccagaggcactcgtgtaccttgacaagggagatatccatatcggcaaagagctggaattcatcttgaagaagaataacttcgtggtcaacatgaataaagtgcgcctgatggacaacagaagacggcaggaagtaacaggcctggtagtgaataagtttaccaatctgaagcgcgaatatatcaaagaggttagggcgattttacattgctgtaagaataagggcatttatgactctgccaagatctacgttaacaaaggtaagtgcaataatcaccgaatcaaggcctatattcagaatgaggacaaggtggacagaaaggaggatgtctctaactggttcgagcaagtgctcaagggtaagatagggtacattaaactcattaagggcaacgataatcctacattcctgaaatacgccaaacaacttaatatcatctccaacaagaagatcttcaacatagatgagtatgacaagtttcacaatatgatcgacgacaatatctttattctgcaatgcaccagcaagaatgtcgcgcgtcaagggtccggcttcttgctgaagacttatggccttatgacctcctatcacgtgatccctgacgataacttctattccgtgaagaaaaacacgggcaaacaggtcggagtcatcacaaaatcatccaacctctataaggagtcctacgagatagattatgcatgttacatcaacatctgtaacaatttcgacaaaagtcagaacgggtttgagcttggagacagctctaatctaaaagccggagataaggtgattatcattgggtaccccaactatatggatggagatactccctatattcatacgtgttacatcacaaacaagacctcttactttggccaggagctgtacaccatcagcgggcgaattgctaagggtgcttcagggggcgttgtgctagatttgctccacgaggtagttggaataatcaaaggcggggtcacttctctcgaagaagatgacgaaagcaatgacccagagttcaaacacgggttcatccccatacacgatgtaatcgaacatatgcgtaactga

SEQ ID NO: 7991 - RNA, 981 nt, synthetic construct
  source 1..981: mol_type = other RNA
atggaaatctcggcactgaagcatgtgaaggacaaattttacaccttagagacaagacaagacgttagcgaactccttggtattgaagaccgatccctgagatattttctcttcaagagacggcctgagaacctgtattataaattccgaattccaaagggcatggatgggttccgtgaaatcaatgccccaaaggatgagctgaagacaattcagaggaaactggccaatatccttaatgaggtatacgaagcaaagatctgcgcctacggcttcattccagggaaggatataatacagaacgctagaagtcatgtcggacggaatctggtcctaaacattgacctcaaggattttttcatacagatccacttcgggagaattaggggcatgctgatgaaccctccctactccttaggccgtgaggccgctaccacaatcgcccagatcgcctgccttaacggcactcttccgcaaggagcccctacatctcccgtgttgagcaacatgatctgtgcccctttagacaattctctgatgaaactggctaagaaaacgaagtgcacgtacacccgatatgcggacgacctgactttttcaactcaccggaaggagatggataaagctttggtgtacttcgataataacaacgacgtggtgttgggagcaggtatactgtctctactgcggaagcacagctttaaagtcaatcccgataagatcgctttccgcaccaggtatgatcgccaggaggtcaccgggctgactgtgaatgtgtttcccaacgttcgccgctcctacattaaaaggctccgggcaatcctccacaaatgtaaaaaggacggagtatacggtaccgcaaaggagtatgctattaaaaggcagataaagaatcgcgtttggttcgtcaaccatgcggacagttcacagaagaaagaactcatcaactggtttaggcaagtgttgattggcaaaatctga

SEQ ID NO: 7992 - RNA, 1683 nt, synthetic construct
  source 1..1683: mol_type = other RNA
atgaatcgcgacgaagtgaagaaagcattcctggagttaaagactcgagaggatgttgccgaattgttgggaattaaggaacgtagcttgcgctacttcctcttcaaaagacggcccgaaaggctgtacaccacattcactattacaaagagaaacggaaagcctcgagaaatctctgttccttgccgcgaatggaaagagattcagcggaaacttgctgatgtgctttcctgcgtgtacgcacctaagatatgcgcctacgggttcatacccgggaagtctatcgtggataacgcgaggcaacataccaaaaggcaccttgtgctgaatattgacctgaaggacttctttacgcagatccactttggaagggttcggggcctgctcacttccccaccctatggtatcggggaggaggctgccaccacgatagcacagatagcctgtgtgaatggggtccttcctcagggcgcaccatgttctcccgtgctgaccaatatgatatgtgtcccactagacaattctatgatgaagtttgccaaagcaaccgactgcgtctacacacgttatgctgacgatatcagcctgtccacttttaaaagatcgttcgatccagaggttgtgtatctggatggcgagaaactctgcattgggtcgaagttacagcatatcttcgataagcactcattccagatcaacccagaaaaggtggcagttcggagaaacacagagcggcaggaggtgactggcttgacggtgaatgttttccctaatctgagaaggtcatatattcgcaatctgagagctattctggaccactgtcaacgcgacggcgttcaccaaaccgcgaagacttatatcgagaaggggttttgcaagaatccctctattctcgctacgtacaagtgcgacgaggcacggggttctgtcgaagattggtttatcagtgtcctaaagggcaagattgaatatatccgtaatgtcaaaggcgctgagtcactcacatacctgtcctttgcccaaaaactcaacgaaattgtaggggtggaaattctggacatcagtctgttgaacaggctcgagacaattgccgagaagaacacctttgtgcttgagtgtaaccagggggagagcttctatcagggcagcgctttttatgtgcctaatatcggtttaatcacttcctaccatgtcgtcgagagcggcgagtttttctatggctacacccatatggactacccgtcaaaacccgccatggtgataggattgtccctgaaccgagtcgcggataaccgcgaaatcgattatgccatatttagtcccccactcacagatctaggtgaatacgccctgaagattggagacagcaaaaagttaagagttggcaacaacgtcaccatcatcggataccctaaccaccaaatcggaaatacacccttcatccagaattgtgcgattacaagtgaaaagactttcatgtccgctccgtttttcaccgtaagcgggagcattgtacatggagcctcaggcggtctggtgctcaacaccggttttgaagtggtgggaatcataaaaggcgggattcagtccctggacgacgacgatgtgagtggaaaccagggcttcatcccaatccacctggtacttgaggacatggccgagaaaaggaaagatgtaaaatga

SEQ ID NO: 7993 - RNA, 1701 nt, synthetic construct
  source 1..1701: mol_type = other RNA
atggaatctaaagaaatcaagaccaaattcttccagcttaaaacccgaactgatgtcgcagatattttaggaatagacgagagatccctgagattctttctattcaaagtgcgccctgagaacatgtacataaggtttcagattgcgaagaggggtggagggttccgggaaatatgtgctccaaacaggaagctcaaaagtatccaaaggaaactcgccgatatccttgaaatcgtttatagggaaaaggcctgcgcctacggctttgtgcgtggaaagaacattgtgcagaacgcacgcaatcataccaaatcagaacttgtgctcaacatcgacctgaaagatttcttttcccagattcattttggccgggtaaggggcatgctgattaagcccccatacggtttgggggaagaggccgctacaacaatcgcccaaatcgcgtgcttggacgggaagctgcctcaaggggcaccgtgttcccccgttatcacaaacatgatctgtgccagcctggataaccagctgatgagactagccaaaaagactgggtgcatctacacccggtacgctgatgacatcaccttttcaactaataagaagcagttcgacgatgagatcatttttctgaacggcgggtcactggaactgggaaaaggcctgtccaacgttctcactaaaaacagttttattgtgaacccggacaagatcacgttaagagcgaagagctctcggcaggaggtgacaggcctggttgtcaatcaatttccaaacctgagaagagagtacgtcaagcagctacgggccataatctataattgctccaaaaatggggtctatcataccgcccagcagtatatcgaaaaagggttctgtaataacaccaaaattgctaccgtggtccacgaccctaatcaccgagaagaggtagagaattggtttcgccaggtcatagtcgggaaaattaattacatccgacagattaagggggcaggacacgccacatacaaaagcttcgctctgcgttacaatcggttagtaggcgaggattttttcgaagtgcctcaggatgatctcttggctgaactgatgcggtcggtctatgttttggagagcgaggagcgacagggcagtggttttgccgtaaagggtataggcctcttcacttccaatcacgtgactggcgacggagcaaagtatgaggtgtttctgcccgatggccagggcgatgtcgaaatcaaaggcatcataagcaacggtgataacctgatagactctgatgacacgattgacttcgccctctttgatgttcccttcgccaatgaaagcaatctcgagatcggtgactctgacgaggtgaagttcggatccgacgtgattattgcatcattcccagactatgcgaagggaaactctgtgaggatcgagcatcgcacagttgccggcgaggctcgcttgttcggatctaagatcattatcatcgacggggtgattttccacggagcaagcgggggcgtcgtggttaatgacaagaataaggtgattggtattgtgaaggctggcattcaggatgctgtgagtaaggacgaacttcttagtaatcagcgccatggatttgtacccatcaacctggtgatgcaacacataagagagcaccaacgtccagcatcagaggagaaccaccaggagacaatgacgtga

SEQ ID NO: 7994 - RNA, 1668 nt, synthetic construct
  source 1..1668: mol_type = other RNA
atgttcaaacgcagcgataacgaaataaaggagctcttctccatcgctaagactaggactgatattgccgacatgcttgagattgacgaaaaaagccttcggtactttcttttcgtgctccggccggaaaacatgtaccggtccttttttatctccaagaaaaatggcgggacccgccagatctttgcccctagtaaaaagctgcgaaatattcagcgaaagctcgcatatatactcaacctgatgtacaaaccaaaaatttgcgcgtatggctttatcaagaacaagacgatcttagggaatgctttgcagcatactaaaaaggccgaaatcctgaacatagacctgaaggattttttttcccagttccatttcggtcgcgttgtgggcctgttgtgttctaaaccctattcgatcggaaaggaagccgcaactaccatcgcacaaattgcgtgcttaaatggtattcttccgcagggagctccaacaagtcccgtgctaactaacatgctgtgcgtccccttggacaatcaactgatgcagtatgccaagaagtatggactggtatacaccaggtacgctgatgacattacattttcaagttacaaccgttgtatctctgataatatcatctccaaagtgggcgataagatcctcttggacgacagtctaaaaaaggtgctcgacaagaatagcctgatcgttaatgacgagaaaatcactttcaggaccaagaatctgagacaagaagtgacgggagtcattgtaaacaagtttcctaacgtgaaaagggaatactacaaaaacataagagctctgctgcacaactgcatacagaacggcatttacatcgaggcacttaaatacattgacaagggctactgtaagaatagaaacatcatctctttccggagcgaccccaagaagcaacctctgattgaggagtggtacaaatccgtcttgatcgggaagatacattttatcaagcagatcaagggggagcactctttcaccttctatagcctcgccctggaggccaacaaggtcttttccaagaacatatttgacctcacctatttcaatcagatgaacgagattatcaacaaaaacgttttcgtcctgcagtcgaccgatgaaatgaagcagggcagcggattctatgtgcccgggtatggactatttacctcataccacgtgacagaggataaggatttctattacctgtggcagaatgacgtgaaagccgtgatttctccaatttcagcggacataaatcaagtgtccgccgataagatcatcgactatgccttgtataacatatctatcgctaacgtagcaagtctcagcatgggaaattcatcaaatctgaagatcggtgatacagttgttatcgcaggattcccaaattacatcaaaggggatacgataactaaagaggagtgtaaaatcacaggcaagacaaaactttttggcgctcctttctacaaagtttccggtaaaattgtgcacggcgctagcggcgggattgtcttaaatacaaaccaccaggtcgtcgggattattaagggaggttgctctagtgaggatgaagacaatacctctattaagcagggcttcgtacctattgacctggtgattagcgatttaaaagccaaatcagtgctgtga

SEQ ID NO: 7995 - RNA, 1707 nt, synthetic construct
  source 1..1707: mol_type = other RNA
atggatggtaacctgccggaaaaaaaactgttctatgagttaaagacccagaaggacgtggccgccctgatcggctgtaaggaacgaagtttaaggtacttcctctacgctggaaactgtattgtgaaatacagaacctttaccctcaagaagaccgatggctctcagcgcattatatctgccccaattcctccccttaagaagatccaaagaaaactagccaatattctgaacgtggtgtacaagcccaaagcgtgcgtctatggatttgtcccgaaaaaaaacttcatcgaaaacgcaaagcaacatgtcggctgcaaatatatcttgaacatcgacctcaaaaacttcttcaatcaaatccactttgggcgtgttcggggagtcttaatggccaagccatatcagctttcacaagaggcagctggagctatagcacagctggcatgttttaacggcactctgcctcagggtgctccctcctctccaatcttaacaaacatggtgttcagaagctttgacaatgagctgatcaagtttgccgctaacaacggaatcaaatatactaggtacgcggacgatatgaccttttctagttaccggaataaaatccccgaggagctggctacggtcagcggcaacaatgtgcgccttggcaccttcctggaaaagctgctggagaagaataactttgagatcaatcccaacaagattcacctcttcctcaaaaatcagcaccaggaagtgactgggctgactgtgaatgcaatagtgaatatcaatcgacggtatctgggccttctgcgcgtgattctgtacaactgcgacaaaaagaacattgataatcccatctatgagtccgccaaaaggtatattaagctcggttactgcaagaacaacaatatcatcgagttggccaaaaacgataagaacaaggacaagatcgaaaagtggttcaagcaggtactgatagggaaggtgcgctttattaagcaagtaaaaggcgccgattcgtttagctactattatttcgctacacgttataacaaggtgttcaaagatacggtcttcgatctcagtctattcaactacgttaacatgaggattcagcagaatgtctttatcgtcgaagccggcactaatcaggggtctggcttctacctgaaaggctacggatttatcacctgttaccatgtggttgagaaaaataaggaggaaaagaaagagaatgagaaggagatatatgattccgtgtgtatttacagatgcgttgatcggtcaaaacagccatttaagagactaaggaaggaagagattattctgaaagacaagttccttgactatgccctgtaccggctcgacgagaacgaagtcgagagcgcttacaaaatcgggaatagtgaaaaagttgagttgggtgaacaggtgaccataatagggttccctaattacctggaacaggacacatttagcttgatcaagacacacattacttcaaagagcaatttcatgaatgcacctgccttcttggtggactccaaaatctttcacgggacatccggtggagcggtgctcaataaagactcggaaattataggactcgtagtagcagggagccaggatacagcctatgaactaaagaatgcgtttgttcctatccatgagattatggcttctctttcctcaaagaacattcatgagttgtga

SEQ ID NO: 7996 - RNA, 1650 nt, synthetic construct
  source 1..1650: mol_type = other RNA
atggaagataatgttaaacggaagttcaaacagcttaatagtcgcgaagacgtcgctaatattctggaaatcgaagacaaatctctgcggtatttcctgtattgcgtaaaacctgacaacatgtacaagaacttcgagattaacaaacggaatggagggaccaggattatctccgcccccaataagaagctgaaaaacatccagagaaagctgctgcaaatactcgaaaacgtctatacccccaaaatttgcgcttacggtttcattaacggcaagagtatctatgataacgcctcaatccacttaaaacgcagacagattctcaatctggacctgaaagactacttccttcagataaactttggacgtgtgcgcggcatgttgctgaagaaaccttacgagctgggggaagaagcagccactgtgattgctcaaatcgtgtgttacaaaggtaaattgccacagggcgccccgactagtcccatcatcgcaaatatgatctgcgccccgatggataaccattttatgaaactggctaaggccaacaatatgaaatataccaggtacgccgacgatctcacctttagcactaggacagagtttcctacctccattgtgcgcatcgaaaacgatacagtagtggtaggcaagaagatcctgcaaatcctaaagaaggacggctttttgctgaatgaggagaagatttatttgaggtcaaaggacaaaaggcaggaggtgaccggattagtggttaataagaaggttaatgtccgaagagattacgtccgggagctccgagcaatactgcacaactataaaaacatgggtgctgaggacgcgatcaagttatatgtgaagaaaaagaagtccacaaacatttcagctgtgaatatagacacgctaagcgacaagaaaagacaggaaaccatcaatcagttcaatgagattctaaaggggaagataaacttcatcaaagacatcaggggcgaggacgatttaatttacatcaaatacgccaatgagcttaacagaatttgcaacaaggagatcttcaatctcgacaaacagaaagcgtttatggaaaagttgaagaacagcattttcattctccagtcccgctacacttgtgtgcaaggaacaggctttctgcttaagggcatcggactgataactaattaccatgtaactgaggatgatgatttttacgacgtttgtatgtgtaacaagaacaagattgccgtcataagtaataagctcaacctcatcaaacgttctaaacgaattgattatgcatcctacaagattctcgatgcaaaagaggatcaattcttggattgcggcgacagcagcaatctgcagatcgggagcgaactgaagatgatctcttatccagagtataacgatgaggacacgcccaacatacagacaattgagatcacgggttcacgggagtacatgaagaataagatcatcaccatctctggaagagtgatccatgggtcgtctgggggtgttatccttgatcagaaacacaaagtcgtgggcgtggtgaattgtggaccagtctcccttgaagaaacagacgacacaattatacaggggtttatcccaattaacaccatactgaaggatattagcatgcctacttga

SEQ ID NO: 7997 - RNA, 1083 nt, synthetic construct
  source 1..1083: mol_type = other RNA
atgttgttcctgagacaggccgaggcgagtcctgtgatagattttggttgcgaccctcagcccgccacctgcctttttcctacttccgcctgccctgtcgctttgagacatgcaggctgcagcggaagagaggcggagtgcagaaggacctcagcactcccgctgttgcattcgcagccgcagccattcctgcgtgcttcagataacgagttgcggacaaaattccgggccctacgggcgcttgaggatgttgcagacctattagaaatccagcccaggagcctgcgttggtatctctacgtggacaaggtgcgatgtcaatataaggaacggtcactgccaaaatcccacggcggtaccagacgcatttgtgttccgccaattcccctccgcatattacaggacaagcttctgcgcatcctgacgttgatctatgccgctaaaccctgcgtgactggatttgtcctggggcgcagcgtcgcaaacaatgctaacccacatgtgtgtaagcaacacgtactgactatcgacctggataattttttcccctctatccactttgggcgagtacgaggaattctgcaatctccaccctacggcgttgcccctcctgctgcatcagtgctcgctcagctggcctgtcatgatgacggacaccttcctcagggggccccaaccagtcccatagtcgccaacatggtgtgcggtcctcttgactctgctatgctccagatggcaagcaacaataggctaacctacacacgctacgctgatgacatcaccctgagcactaatctgcggaccttcccatccgatattgtccgtcaggatgagcatgacacttgcgaggttggggtggttctgcgcgacctcctggccgaacacggattcacgatccgggaaggcaagacaaggctgagatccagattaaggcggcagacagtgacagggctggtggtgaacgaggttgtaaatgtcaggaggtcttatgtgaggcaactccgagccttgattcacagttgtagcacagtgggcctccttccctccggctactgccaggaactctgtattgaatgtgcatga

SEQ ID NO: 7998 - RNA, 1365 nt, synthetic construct
  source 1..1365: mol_type = other RNA
atggaaattgtgctgcgcaccaataaagaggagctgaagaaaaaattcggccggcttaaaagcagggctgatgtggccgatcttctggaggttagcgaccactttctctgcaagatcctgtatggtgtgaaggaacgcagaaaatataggatcttcgagatccagaagaagtcctccaaaactcggcagattagcgcacctcctaagaatatagcaatcctgcagtctaaactcaacaccattctaagtctggtatacgagcccaagccttgtgttcacggattcgctgagggaaggaatatcctatccaacgctcaacaccataccaaaagacgccacgtggttaacatagacctgaaggattttttcccgtctatttatttgggaagggtaaagggcgcgttaatgtctaaacccttttgcgtcggaagaattgccgctgaagtgatatctcagatttgctgtagagacgatgggatcctccctcaggggggtgcaacatcaccaatcatttccaacatcatatgtcgttctctggataacgatttaatgtccttcgcacgaaaaaatcgatgcaagtatacaaggtacgccgacgacattacactgtcaactagttccttcagacttccaactgccgtgggcaaagtcgagaatggtaacctcatcctgtcagacacactggtgctcatcgtagaaaaacacaagttcatcataaacccaaagaaggttcggtacaccccccctttcttacggcaggatgtgacaggcctcattgtgaatgagtttccaaacgtgagaaggtcatacgtgagggaggtccttggggctctccatgcctgggaaaaacatgggtatcgggctgccaataagcgctatatgtctcactttcgcctgcgagggcaagccgggctggatcttgagaacgtcttgagaggaaagatcagctttattcggatgattcttggagacaatagcccaatctttcgaaaactggcgcgtaagtacaacggattggcaagtaataagatcgcaattatccaaatcgaggagactgatccctaccccctacgcggggggaatacccgtatccagatgtggaatcggtggttcaacagatacaaagccgcgattttcttcatagaaaccacgaacagcaaaggcgacaagtcggccggtacagccttctatattggcaacaatctgtttgctacggccggtcataacctggaatacggcaagccgatcttttactttggagacagtcccaaggctgtcgacacctttaccgaatacaacaagaagagcactgacatcggcttgataaggaatatgggcgagattctcggctcggaattggattga

SEQ ID NO: 7999 - RNA, 1677 nt, synthetic construct
  source 1..1677: mol_type = other RNA
atgaactcaaggcaagatgtggctacttacctgggaattagcgatgccagactatgcgccattctgtatggctattgtgaccgccggcggtacacggagtttcaaatccccaaagcgtctggcggccaccgtaagatcttggcacccccgaaacgactcaagtggctgcagtccaccttacttcgccgcctcgaagggcagtacacgcctaaggtctgcgttcatggtttcgttaagaatcgctccatcgtaacaaatgcccgggttcactgtggtagacgactgactgcatcctttgatttggaagactttttcccaagtatacacattggcagggtcaaaggtatctttaagaatcccccttttagctttggtgaggatgcctccgaggtgctggctcagatttgctgctgtgatgacggcaaactgcctcaaggaggagtcatgtctccctatcttagtaatctggcctgcagatctctcgataacgacctgcttcgcctcagtcggcagcataggctgaggtactcacggtacgcagacgatcttacattctctagcaatgatcgctactttcctcacgaggtggtggaactggacgttgagcagcctcagccgggagagagattagtggaattgattacctccaatgacttcaggctgaatcattccaaaatggtcttcagaactagtacacgaagacaggaagtcaccggcttgaccgtcaatgcatttccaaatgtgtccaggaaattcgtgcgcggaatcgaggcagccctctcatcatggcgccgatttggctacgacgcggcccaagctcacttcctagagaagtaccacgaaggagggggcagcgagctctcttctgtcctccgagggcggatcgcctttctgtcgatggttagaggcaaggacgatttcatcgtgaggcggctgagccgggaattcaacgacttggggcagccatccataaacgtgaagccactgactaccgctaggccttcccccagacacaacagcagggctgagtggcaaacttggatcaggaagtatagtgagggcgtattacatttacttttcaccagtcctgaaggcgacccaagttgcggtactgcctttcacataggaaaagggaccttcgccacggcacgtcataacgtctttacagaatgtggtgcggtacatgacgacctccggctgaagcatgacgggaacgagttcgtcgcaaacgtgctcgctcctctagatgccgatgcgaacaccccagacgtagccctgctttcgtgtaacgccctgtctaaactggccagaatacccacacaggtacgactgcccgaacttggagaggagattgttgctattggattccctagcatcccacagcggaatgtgacacaagtggtgcacagcggtatcgttgaggccctgccggtgaactacagcgatcgtctacgttttatccaggtgtcattccagtccgggggcggcttatcagggggatcactcattgatgccgggggcaatttgctgggggtggtggtggagaacgtgttcatgcaggctgcagacgcaggcgggattacagctcccagcagaccctatggacaggctgtcccagttgaatatctggatgacctcttgaagtcttatgatagacagcagaggcccatccgctga

SEQ ID NO: 8000 - RNA, 1548 nt, synthetic construct
  source 1..1548: mol_type = other RNA
atgcgactcagagtccacttagcacagggtgccagggggaaggctcacctgagcaaacttcaattccatcttaacaagcctctcgaagaagctgccgcacagattgtgggcgctcagacggccgacgatattgctgaggtgctcgaggttccgaagggccaactgctccacatcctatattcatatcctgacgagaagaagtacatcagcttcgacatcaaaaagaagaatgggggatataggaacatcaaggctgcgaagggaggattgagagtgctgcagtctaaactggcccccctgttggcttcgcattatcggcttaaaaatcccgtgcatggcttcgttaaagagagaaacattgtgtccaatgccactcagcataaaagaaagagatatgtcttcaatgtggatctgagtgatttttacggtaccatcaacttcggaagggttcgggggcttttccgcgccaagccatttgaaatgggcgagaaagccgcaagcgtggtggcacaaatttgcatctttaaaaactctctgccccagggtgctgctacatcccccataatcagcaacttcatcgcctcagagctggatagaaaattatcaaggctggcacgacgttacaagctcacttacactagatacgccgacgacattacgttctctagcaataatcgcaattttccagagggcatagcattctacgacggtaataatccaattacaaacgactgtttcgtgggccaggtcttggaagagacagttagtggctgtggattttccatcaatcacgaaaagactcggctacaaattcggggggttaggcaggatgttaccggactgaccgtcaatgagttcccaaatgtgagaaggtcgtatatccgaaacattcgggccttgctgcacgcctggcgtaaatttggccctgatggggtagaggtgatatatcgaaggaagtacgctaaaaataagtcccgcctggtagataccgaacgccattactttaaggaggccctctacggaatgttggcatttctgaggatggtgcggggcgaagacgaactttatttaaaactatgcctccagaccgcggagttggacaaggcgcctcctgagctgatcaaacgtatgaaggagcagtacaagatgtacgatgtgttcatctcccacgcctctgaagataagattgacatagtacgccctatctacgacgcgtgcaagagtctcggcatatccgcctttcttgacgaagaagaaattgattggggcgacagcctgaccgaggtactgaaccacgctctcgggaagagcaaattatttctggccgtcctgtctaacaactctgtcggaaagaaatggccccggaaagaaattaacgccgcgttggctcgccagatggatgggaaacagaagtttcttccactggtggtcgggtcacccgatatggacattttcggtctaacaaatgacctgctctatgtgaactggaaaaacaacccggatgagatcgcagagaaactcaagtttatcctgagtaagtatgcatga

SEQ ID NO: 8001 - RNA, 912 nt, synthetic construct
  source 1..912: mol_type = other RNA
atgtcaaagctgcaataccagctcgtcaagtctctggatatagcagtaaagcagatcgttaaactacagacagctgaggacattgcccagcttctggaagtaccaaaaggccagttactccacatactctactcgtatcctgcggaaaaaaagtacatcctgttcgatatcgctaagaaaaacgggggattccggaacatcaaggcacccaagggcgggctgcgcatcctacagcagaaactggctccgatcctgtattcccactacaagaggagaaatcaggtgcatggattcgttaaggacaaatccattttgactaacgctaaaatccataagaggaaacggtacgtgtttaacattgaccttcatgatttctatgggagtattaacttcggtaggatcagaggcatcttcaaggcgaagcccttccaaatgggcgataaagcggcaaccgtgttggcccaaatctgtacatttgaaaatagcttaccacagggtgccagtacgagcccaattctgagcaatttcattgccagcagcctggatcagaagctctctcgtatatccaggcgctataaactcacctacactagatatgctgacgacattaccttcagttctaatgcacgagactttcctgaggcaatcgccttttttgatggtggcaaccccataacaggagactgctatgccggacggatcctggaggagacaatagtgtcctctggatttgctattaaccacgccaagacccgattgcagattaaaggcgtgcggcaagatgtgaccgggctgactgtcaatgaatttcctaatgttcgccgctcctacatcagaaacattagggcccttatccacgcctggaataagtacggggactcaggcgtcgaggacgtgtatcgttcacagtga

SEQ ID NO: 8002 - RNA, 1530 nt, synthetic construct
  source 1..1530: mol_type = other RNA
atgcctgaaaaactgaagcccgaattaaacaagaacctggatgagtcagtgagagccatctctcagctgtccagcgtgtcagacgtggcttcttattttgaaatacctgaaggccagctgttgtacatcctctacaagctgccagataacaagaagtaccgtttctttgagatcaaaaagagacgaggcggccatcgcctgattaaggcgcccataggagggaccgctatcctgcttaagaaattgaaaccagcgctgcaccaattgtacaaaacgaaatcgtgcgtgcatggttttgtcaatgggaagtcaattgtcagcaatgcgaaacagcacaagaaaaagagatacgtgctgaatgtggatctcgccaatttctacgacaatattaactttggacgtatcaggggcttattcatgtccaaaccgttcaacatggcaccgaacgcagctaccctgatggcccaactatgtactcatgacaattctttgccacaaggtagccccgtaagccccgtgttgtcaaactttatcgcctcaaatctggataagcgccttaccctcttagcaaagaagtatggactgcaatacagtaggtatgccgacgacattacattctctacatccaagaaagatttcccaaagtcttttggctattacgaggggaataaccctataacggggaatatggtcatcggcaagctcctggaagatcagattttggctagcggtttcgtcatcaattatgacaaggtgcgcttacagtatcacggagttaggcaggaggtcacaggtcttaccgtcaacgagtttcctaatgtggagcggtccttcgtgaggaagatccgggctatgattcacgcatggaagaagtttggactgattgaggccgagaaaacttacattagctgctacgcgaagcctactctggacatctcaagcgataacctgaacggagcctattacaagagtgtggtttacggacgattggcattccttaaaatggttagggacgaagaagatgaggtctatatgaaactgtgtctgaaagtagccgagatcgattccaatgctcctcggaagatcctggaaaccaaagagatgttcaacaagttcgatattttcatctcccatgccagtgaagacaaagacgacgtggctcttcccatttatgaggcctgcaaaaaaatcggcgttaacgcttttctcgatgttaagtatatcagatggggcgacagtctcactgagaaaatcaaccacgcactcgggcagtcgaagtttgtactggctattctttccgaaaatagcgtggggaaaacctggccaagcaaagaaatcaacgcagcactcgcccgcgagattgaagggaaacagaagatacttcccctaattgtaggctccccagatctgagttctgtgagtctactagtggacaagctccattttccctgggagaaggacgcctctaaagttgcccaccggataaaagagctcacatacgagaagtatcagatatccaattgtaagtga

SEQ ID NO: 8003 - RNA, 1515 nt, synthetic construct
  source 1..1515: mol_type = other RNA
atgctgaatgtcaaacttaagagcaccataggcaacacggtgaagatcttcttgtctagccaaaacaccgaagacgtcgccaacgtcctcgaaatcccaactagacagttactctatctgatctacaccctaacagacgaagaacggtatagcacattctttctgcctaaaaaacgcggcggacagagagagatttccgccccgcgcaaagggatttctatcctgcagaagaagctgttgactatcatcgattcaatctggcaccccaagccctgggtgcagggttttactaacagccgcagtatcctcacaaacgctagacaccacaagaaaaaatcctacgtcttgaacatcgatcttaaggacttttatggctcaatcaatttcggacgcgtgcggggtctattcatgtcctacccttttaagctggggcacaaggctgcaactatcatcgctcaactggtaacatttaataatctcctgccccaaggggccagcacttcacccataataagcaacatgattgcttttaagctcgataacatgctggtgaaaatcgcaaggagatatcatctcacttacacacggtatgcggacgatattacgttttctaccacaaaatccaactttcctaaagaaattgcagagatcgaggggacgaacccatcgaccggcaatattaagctgggacatatcttggaaaaagctattaaggaatctggattctctgttaactacaaaaaggtgcgattgcagatccctttcgtaaggcaagaggttacagggctgaccgttaatgagtttccaaatgtggagaggaggttcattcgtaatgtccgtgctatggtgtatgcctggcggaaacatggcctcattgaagctgaacgagagtacataaacaaatacgcatcacggaagctggagataccatctgggaagctgaagggaagttactacaagaatgtgctctacggcaagcttgcgtacattaagatgataaggggtgaggacgatcagattttcatcaagtattgcctgcagttggccgaactggacagcgatccccccaaacagattcagaaggccaaagaaatgcatgaacagtatgacgtgttcctttgtcacgcctcggaggataaagaggacattgccaagccgattttcgaagatctaagtaatgccggtatcatcgtttttctggacgacaagtacattaaatggggcgattccttcgtggagaagataaatcacgcattaggcaaagctaaatatgtcattgccatcctttcttccaacagtgtgaccaaagcatggcctgttaaggagataaacgcctccatcgcgagagagatagtaggcaaacaaaagttcctgccacttatggtcggggacggaaaagagatccagagctttcaggatgagatgcccttaatcagtgacaagaagtatctgatctggaagaatgacacctcagagattgtggataaaattaagtccctcatgtcaagcaagtga

SEQ ID NO: 8004 - RNA, 1587 nt, synthetic construct
  source 1..1587: mol_type = other RNA
atgagatatcccaaaattgcgaagccaaccacagagctcgtccgtcccacagaggatagcgttaaattgtttaaagccgctcatacctttggggacgttgccgaacttctcgaagtccaccctggacatctcaagaggtggctgtataagtatccgggacactccgggtacaaggacttcgaaataccgaagaagaatggcaagcccagacaaatcagcgcgccccccaagaacatcagcattctgcagcagaagttcaagaccatcctcgatgctgtgtaccagcctaaagactgtgtcttcggcttcgtcaataaacgctccgtagtcggaggcgcgaacattcacaagaaacagtctcgctgggtgctgaatatcgacctggaagacttttatacctcaattcactttggacgcgtgcggggactgtttatgtcgtttggggctggggagaacgcaagcaccactctggcccacctggtgacaaaggatggcgtgcttccacagggcgcctgcacatctcctgtgatttccaatatgattgcctttaagctcgacagaaaactgatcaacatcgccaacaagtacaatctgaaatattcccgttacgcagatgacataacttttagttaccggtactgtacattcccaaagcatatcgcgatcctggataaatactccggggatgatcaggaacagcataaagagggacaatacaagtctggcctggaacccgaaaatatcaccttgggtcctctgctggtgcatgccatcacgaaaagcggatttaccatcaacaccaataagaaccggttattctcaaagcgacagaggcaggaggtaacaggtctaacagttaacgaattcacgaacgtgaataggaaattcattaggcagatcagagcaatgatccacgctattcggaaattcgggcccgagttggcaggcatcgagtatatagagaagtatcgcgctccttacaagaattgcgaagttaacaaccacgcagagtactttcttaacgtcctatacggcaagttgtcattcctgcggatggtgcgaggtaaaactgacgtatgttatctcgatttttgcctctctatgagcaagattgatccagagccaccaactttcatcaaagaagccgtcaagatgcgacagaaattcgacctatttatcattcatgccagtgaggataagaatgaaatcgccactcctcttcacgagcacctgactaagatcggcctgaatgtgttcatcgacgagaagtatattaaaatcggcgacagtttcatagagaaaattaatcatgcccttggtcagtcaaagcacataatcgctatactgtcatctcattccgttgaaaaaagttggcctaagcatgagcttcaagccgtgttagctagacacattgcatctgatggtaacgggaaaatcattccaattatggctggaaacaagtatgagatacaaacgatcttggacaaatggccgttactcagcgacaaaaggtaccacaagtgggaaggggatcccgacgcagcagcccaagagattgctgactccattggcaccgtgataagttga

SEQ ID NO: 8005 - RNA, 1602 nt, synthetic construct
  source 1..1602: mol_type = other RNA
atgaagggacaaaagattaacatcaagctgaaaaaacccttcaaagagagcatgacactatttgaaaacttgcagacacaggaggacgttgccaattttttcgaggtcgagcaccgatacttaatgtacctcgcctataaggacaaacgccctcactataaggagttggtgattccaaagaagactgggggcacaaggaagattagcaaacctgtcaaaagcatcgatatcctccaaaaaaagctgctaccattcctgcaggaaaagtataagatcaagaagccagtccatggattcgtaaaaggcaagtccatcctgaccaactcccagcagcatctgaagaagaaattcatcctgaatatcgacctcaaagatttttacgacagcattcacttcggtcgcataaaagggttgtttatgtcagagacatttaagatgggggagaatgccgcaaccctcgttgctcacctatgttgcaataatactaagatcccgcaaggtgcgtgcacctccccgatcctgtctaattttattgtgagtcagctcgacaagaagctgatggaatttgcgaagaccagccactgcacatatactcgatatgcagatgatattaccctgtcctcaagcaagaatatcagcaacactgtcattaaagatgagaatagtagtttccccatcaatggattcgagctgagctctgagttggagaaacttattcacttctgcaacttcaccattaactataagaaagtacggctggagtccaaatacataaggcaggaagtcactggcatcactgtgaacgattttcctaacgttaagaggacattcataagacagatccgcgctatgctgcatagttgggaaaaggatggccttgacatcgcctctcagaaacacctatcctttaaaaaacgggagtacagtatttcatcacccgagaaattctttaagaacgtgattatcggcaaattagcttacttgaaaatgattaggggggaggaagacattatcctgcgtaaactgtgtctcaagtttacggcactggtgtcaaatgatgaagtgctgccaaagttcattcgcaatatcaagatgaagtacgaggaatttcaggtgtttatctgtcatgcaagcgaagataaagaaaagatcgccagacccctctacgacgagttagtaaagcttgggataaagtccttccttgacgaaaaatatatcgaatggggagactctctcaccgaaaaaataaatcatgcccttggacaatctagatatgtgatagccattctttcagacaactcgattgaaaaaaagtggcctaaaaaagagatcaactccacgctgagcagagagatatctggtgataaggtgttgcttcccattctggccggcgacgagcggaaaatctttaaggtgttccctctgctccacgataagctctacaaactgtggaataacgatgctaagttcatggctaatgaaatcaagaacttactgtccagtacagaagactacgaaattaaccatgaggttaacacctctgagtcgtctatattggagaaaatcaaggacttcctcacgaagataaagattctgaaatga

SEQ ID NO: 8006 - RNA, 1512 nt, synthetic construct
  source 1..1512: mol_type = other RNA
atgaccaagaagctgcatatcaagttacaaaagacctttgaggaaagcttagaactgtttaataacctcactacagcttcagatgttgcttccttcctggagattccactgcaaaccctaatctatatactctacaaagacaccaagctgcactacaaggagttcaagattaaaaagaagagtgggaaagaccgcatcattaacaaaccaattggcagcattagcatcctgcagaaaaagctgctgccatttttgcagttcaagtacaagatcaagaaacccgtgcacggcttcgtaaataaaaagagcgtactctcaaatgctgagcagcatctgaagaagaaattcatcctcaatatcgatctgaaggactttttctcctcgatcaattttggaagagtcagaggtttgttcatctcctatccttttaatatgggcaatgacgccgccaccctgatcgcccagatctgttgccataagaacgggcttcctcaaggcacatgtaccagcccgatcctctcaaattttatagcctctagattagacgtcgagctcatcaagtacgctaacgccactcatacgacctatactaggtacgcagatgatataacattctcaagcacaaagaagctgtcgtccaagatgataatttacgacatggattctaaccctgtgattaacggttttatcctgagtgactctcttaaggaactgattaaattcatggggttcgatattaactacgataaagtccgccttgagacgaagaatatacgtcaggaggtgaccggaattactgttaacgacttccccaacgtgaagcggaactttatcaaacagattcgagcgatcctacactcttgggaaaatcttgggctggaagaagccgagaaaaaacacctggaaacaaagaaactaaagatggacatcagttccattaaaaatgacggcaagtatctgaaaaacgtcgtgattggaaaattggcatacctcaagatgatacggggcgagaatgacattgtcttcattaagctcgcactcaagctggcttctctttcatccgacaacctcccgaaattcatcaaggagattaaactgaaatccgaggagtttgatgtgtttatatgccacgcaagcgaggacaaagagaaagtggccaggcccctttatcgagaactgactgaattgggaattaatgccttcctcgatgaggagtacattgaatggggcgatagtcttacagcgaaaatcaatcacgctcttggacggagtaagtatgtgatcgctatcctatctaatagctcaattaacaaggagtggcctctgaaagaaataaactccacactggccagggaaatcagcggggacaagaaattgctgtctatattggtgggtgatgaacaggagatctttaaagttttgcccttattggccgataagttatataaaccatggaacaacaacgcgaagacgctcgcaatcgagattaagactatgctgatccccaaatga

SEQ ID NO: 8007 - RNA, 1536 nt, synthetic construct
  source 1..1536: mol_type = other RNA
atgctcataactcactcaaaactacttcctaagatcaagaaggacattactgaacaggaatccttattctctaaacttcagacaaccaaggacgtggcagatttgctggaggtgccctacaaacaattactgtacatcctctacaagcaggacgactctaagaaatatgagacattttctatccccaagaagatgggtggtatgcggatcatcagtaaaccgaaagggtccatcagtatactccagagtaaactattgcctctcattacctccaaatatactgccaagtcgtgtgtccacggatttgtgaaaggaaaaagcatcctcacaaatgccggtgcccataaaatcacgcagcacaccaagatcctgaacatcgacatcaaggacttttacgattccataaatttcgggagggtgcggggcctgatgatgtcccatccctttaacatgggaaacaaagcggccactgtggttgcacagatactgtgttggaagaataagcttccccaaggcgcttgcaccagccctgtcatctccaatatgattttgcacaggctagattcaaagctgaccaaactctgcgaagatctgaagtccgtgtactataccagatatgccgatgatattacaatttctagcaactgccctgtgtttcctgagactatcgccacctgggaccccaagaccaaagaagttcgattgaatcaagacttcgagaacatattcaagtcagagaacttcaacattaactatagcaaagtgcgactcaagtcaaataaagagcgccaggaaattacaggactgaccgtgaacgagttcccaaacgtccgtcgagtttttatccggcagattaaagccatgattcacgcatggaacaagtttgggcttgaggccgcagccaaggagtatatcgaaaaatacgacaggaaaaagttcaacgctgaaaatagcaacgttgtggactatttcaaaaacgttgtgtacgggaaattggcctacctgtacatggtgagaggcaaagagggagctgatcgcatttgtcagagatttgcagaacgcatactgaatatagatgacgaggtgccaaactttatcaagaatatgaaggagtccaagtacgatatattcctgagtcatgcttcagaagacaaatgcattgccgaaagaatctacaaagaatgtacgagcaacaacattaatgcgttctttgacaaggaatgcattaaggtaggcgactcgatcccggagagaattaatgatgctctgcgcacttctaagatcttcgtaattatcgctagctacatgtatagcgaaaagaagtggacatgtgaggagctgtggagtgctgtcaataaaacgatagagacaggggaaattaggatctatccaattgtcatcggcgatattaacgagttcaagcggaattatccacttctgggccataggaaggcaatgcggtgggaaaacaatgaatctgagatcgtaaaggatctggagaattttttacgtgtccaagagaatgaggtcaagtga

SEQ ID NO: 8008 - RNA, 1776 nt, synthetic construct
  source 1..1776: mol_type = other RNA
atgaaaaaaaaggaggaactggctcccgaataccttgaacgctttctgcaactcaactctattaaggagctttctacctttcttaacctgcggatttcagccctggaatatttcttgttttatgcgccagacgaaaagaagtatcgcattttcaagatacagaaaaggaacggaaatctgcgttctatttcaactccaaccgaaagactgaaagagatccagcaaatcctccagattattttccagtacttatacgccggcaagcctagcgtgcatgggttcgtccagaataagtcgatcattaccaatgctaagctacacattaacaagaagatcctcgttaatatcgatctctctgacttttttagctctatcagttttgggcggattaagggtatattcttaaaccaccccttcaatttcaatgaagaggtcagtaacgctttgacacgcatttgctgtcatgatgggagcttgcctcagggtgcccccacctcacccattctttctaactttgtttgtaggcagctggataaccagtttatgaagctcagcaaaacgagtaaggtgctgtattcgcgttatgctgatgatattactatcagcacaaacctcaagtcactcccgcaaagtatcggcatcatcgagactgataagctcgaactatccaatgagatcaagaagattctgcataaaaacggcttcaagatcaactacaataaggtgcgcttcgcgctgaagacaaataggcaggaggtgaccggcctcatcgtgaacaaattcatcaacatcaaacgcgactatttgcggcaggtaaagtccatgctgaatgcgtgggagaaatacgggctgtacttagccgcattcgagcacttctccaagtttaatcccaagacttatatgccgggcgacattgaactcgcatatacaaaagagttagccgggaaaataaattacatcggaatagtacgaggaagggacgacgggatatacgagaaactgtacacaagaatcaaagtcttggctcctagcgtaatgctgtcaatcatccggagacaaattcagagtagcaaggatcctatcctgttcaccgagggtaagtctgatattaaacatatcgaggcagccttttcccactttcgatcccagggactgtatcataacttgtcacttcatttccaccattacaaagaagaagacaaaatgtctaacggcgagctgcttaaattctgcgagacattcagcaagtcacacgagacgggctccattgtgatttgcttgtttgatagggacgatgaaaactttcttgccaatgtggccagcaccaaaaatactttcaaagaatggggcaataaggtgttctccatggtcctcccaataccagatcaccggaaatttacagacatctgtatcgagcacttttacactgataaggaaataaccaccaaggacaagaatggaaggcgaatctacctgtccaatgagttcaacaaagagactggccagcacgcaaaagaaaaactgaccataaagcacgttaacaaactgcaggctagaagagttcaaattattgacagcggtgtcattaataccgaaaacatcaactttgccctaagtaagaaccaatttgcagagaacatcttcaataaagtggacggatttgacagtttcaacttcgaggctttcaagctaatatttgacaatatccagacggtgatcgactatgccaacgatgaggcaaagaagtccaataaaatagagatgtccattctgtga

SEQ ID NO: 8009 - RNA, 1731 nt, synthetic construct
  source 1..1731: mol_type = other RNA
atgacccctgaggagattaaagaattaaccgaccgctttctcgccatcaagactccacgccagttagcaaaggtcttagacgttgagttcaagatactgacatactatttgtacaaggtgcccgaactgaagaagtacaacgaatttgacattcggaagcggaatggcaatgctcgccgaatcatagcaccaattggaggcatcaagagaatccagaggagtctgaatttcattctccagacactgtacccaacaaagaaagcagtgcacgggttcactctgggtaaatccatcaagacgaacgcgctagcccacgtcaagaaaaacctcatcataaacatcgacatcaaagactttttccctagtatccattttggcagagtaatggggctgatgatggctagaccgtttaacttcaatgaacctttagcgcgggtcatcgctcaaatctgttgtcataaggctagtcttccccagggagctcccacgtctcccattatctccaattttatctgcaggaagatcgataatgcgtttttgaggctgacatcatacaaccggtgcacttattctagatatgccgacgatataacgatttcaactaaccagaagaagtggcccaccgagattgctcgcatagagaacggtaaagtgctcctgtctaatatcatacagggcattttccactccaatggtttcctgatcaatgaagataaaactcgacatgcaaccagagtcaaccggcaagaagtgacaggcttggtggtcaatgagtcgatcaatattaatcggaagtactatcagcatgtgagagccatgatccacgccgtagagaaatatggcattacacttgccgccaacgagcactttctcaaatacaatataaagtccaaggagcccgataatattgagctgagcttccagaacgaactcgttggcaaacttggatttattggattcattaaggggaaagagaactccacctacaaaaaactggccgctcgtattaacactgcagaacctgggatccgactgaaaatagtgcagaatgagatcgacgaggcagccaaccctattatttttggagaaggcaagaccgactggagacacctaagtaaggccctcacaaaactgaaaaaggaagggatgtttaaaagcctgtttctgcgattcaacaggtacgaaaaccttgaaattaacaacgagcagcttttggatatttgcaaatcactgccaaagggagagccatctaagaagatcgttatatgcctatttgatcgggataccaagaaaattaacaatgctgttgttgagaacggtaaggactttaaatcatggggtaataatgtcttcagcctgttgatgccgatccccgtacataggaagttcgacgagatttgtatcgaacactattatctggacaccgagctcaagcgtacagaccatgatggcaggcgcatcttcacctctgacgaattcgataaagtgaccgggatccataaacaagagaatcttcaatacccatacattggctatctccagccaaacttccctaggattattgacagccacgtgcgcaatgatatcgggcagaatgtggccctgagcaagaacaacttttccaacaacatactcaatgatgtgcccttgttcgatgacttcacctttagccacttcaaaataatcttcgatcgtatcgaagagatcatcactagccaccctgtgggatga

SEQ ID NO: 8010 - RNA, 1740 nt, synthetic construct
  source 1..1740: mol_type = other RNA
atggaagaagatttcgacaaggacatcctcaattcatttttggaggttgaaactgaccgtcaattagcctcagtcctggacatcccctacaagaaccttatctacaacatctacaaactgccagacgaaaaaaagtacgagatctttgagataagcaaacgaaacaaatctaagcgtcaaatttgtgcacctattagcggaattaagaacatacagaagaaactctcgattatcctgaataatctgcattctcccaaatattgcgctcacggctacgtcaaagataaatccatcaagaccaacgctcagatccatgtaaagaaaaggattctgatcaatatcgacctgaaagacttctttacatccataaatttcggcagaattcgaggcttgttcaaatcctatcctttcaatttcaacgataaggtggccacaatcctggcccaggtctgttgttacaacgggtgtttaccccagggcgccccctcaagtcccatcctatccaattacatatgtagaaggcttgacaatcaaatcctcgatctgagtcagaaatgcaaggttgactacacccggtacgcagacgacctgacgttttcaaccaatcttaaagagctgccaaaagagattggggtgattcgggataacgaactgttccttagcaatgaactgatttctatcattgagtccaatggatttgttatcaatcgccagaagataaggttcgctctcaaaaataaccggcaggaggtcactggactcatagtgaacaacaggatcaacattaacagaaagtttgtgcggcatgtgagagccatgttacacgcttgggagaagtatggactggagaatgcagccatagagcacttcgaaaagtacaattacaagaacaagaaggtggaaaactatatcttctccttccttaaggagatcagcggtaaaatcggctatattggttacatcaagggcaaaaacaacagcgtatataggaacttgtttcggcgcattaaggaacttaacccagagattaagctaccggtgccaaaggatattatcgagtctaatacagccatcgtgttttgcgaggggaaaacggacgcgatacatattgagacagctttgaaatacctcaaaagcaagggagattttatagacctcaacattggattccatccttacgagggtaaagagatcagtaattcaaccctgtatgatatctgcaagaactggagcattactaagaaaagtgatcgcgttgatatattcctcttcgatggggacgatcgccgctataaccgtaagaacatctgtcagtatcctaacttttacaaacactggggggataaagtgtatagcgtgatgctgcccattcctccacaccgagactttgaggaaatttgcatcgaacactattataccgacgatgaaatcaaaacaaagggtaacaaggaaagaagattgtacttaagtaccgagtttgatccgaacacctgctttcacaaggaagaaaatgtcaatttcgctaataggaagacaattcggtcttcgtatcctaagatcatcgatggcaatgaccgcgttctgaatgaattcggcgtaaacgtggccctgactaagatggcatttgcagagaatattgcgaataaaactggggaattcaagaagatttccctggagaacttcaaggtcctatttgatgtgctcctgaagatattggaggactctaaagacgagaattga

SEQ ID NO: 8011 - RNA, 1713 nt, synthetic construct
  source 1..1713: mol_type = other RNA
atggaggagttgagcaaggataatttcctagcaagcactaacaagcgggaactagcagcttccctcggaatcaagtattccaccttggcctatctcctgtaccacctgacagacgaaaggaggtatagcgagttcgaaattaaaaagaagaacgggaaatcacggatgattgctgcccctacggtggggatcaagcacgttcagtccaacctggcctacatccttctggacatataccctagtaagaaaaatgtgcatgcttacctgaagaagcgaaacattaaatcgaatgcatcacaccacctgcataagaagcttttaatcaacatcgatctcaaggacttctttccgtcaatcaactttggtagagtgagggggttattcatgtcacacccttttaagttcaacgaagaagttgcgactatcttggccaagatatgttgttacaagaatactctgccacaaggagcacccacaagccccattctgtcgaatttcatttgccgcaaactcgacaatcaacttgttgatctggctcagaaaggtcgcttctcctacacgaggtatgctgatgacattacctttagcacgaatcttagtcccctatctcaggtgttgggcaccatatccgataataagattgtgctgtctgaggagcttacctctatcattaccagcaatggctttacagtcaatcaggacaagacaagatatgccaccaatgccaaccatcaagaagtaactggcctggtcgtaaatgagtttcctaacgtcaagcgacaatacgttcgccacatacgtgctatgcttcatgcttgggaacagtatggcctgaccctcgccgcccaggagcacttttccaagtacaatacaaagcacaagataatctcaaacccagagattagctacaagaatgaaattgcagggaagataggttttgtgggctccattaaaggaaaagacgacgatatttaccggaaaatgtgcatccgattgcgcgaactcgatccagatatcaagcttgccgtggcgtttagcaatttccataacgagaacaagcccgtgatttatggcgaaggcaaaacagactggaaacacctcaaagctgcactgcggtactttcagcataaaggggaatttctggacctcaatattcatatcaccgagtactctgaacaggtaaaaatcaataacgcggagttactggcaatgtgcaaaagtaaagccctcgatgccaacaaacacaagctgatattcctgttcgacagagataaccaccagatcaattctgaagctagtttgaacgagtccaactataaatactgggggaacaatgtgtacagtgtcctgttgccaaagcctgaccatagagattttaacgagatctgtatcgagttcctgtatgaagatgaaatcatacagaggaaagacaataatggatatcggttattcatcaacaacgagttctctaaagacaccggaaggcacttaatcaatgagaaactgcaactctctaacctgggtattatccgttgcccctacccacggattattgagcatgatgtgatggacatcgaaaccggcaagaacaaagccctgcctaagaacaacttcgcgacttatattctggagcagcagccgccctttgacaatgtcagcttcgagcacttcagaggaatctttgagctcctaacaactatcgccactgagtga

SEQ ID NO: 8012 - RNA, 1734 nt, synthetic construct
  source 1..1734: mol_type = other RNA
atgcagaccgagatgcccgacatccagagcaccttccaggcagtgacgactaagcgggagttagcagagaggctggggtctagtctcaagatgttggcctactacctgtataagctcccgccagaacagcagtataaaaagtatgatatccccaagcgggctggaggaacgagagaaatctacgctcctatatctggaattaagcagatccaaaagcgattgagccacatactgcagaattatcagcctgcaaaattttgtgtccatggctacgtcaaggaaagaagcattaaaacaaatgcttacatccacagaaggaagcgcatagtgatcaacttagacctgaaggactttttccctagcattaactttggtcgggttcgcgggctctttaaatcggccccattcggattcaacgatgaggtcgccaccaccctggcacagatctgctgtcatgatggaaagcttccccagggtgcaccaacatccccagtgatatctaactacatctgccgaagactagacaatgagttgattgccttcgcgagaaagcacaagattaactactcacggtacgctgatgatataacattttcaaccaacctccaatttctgcctacagccgtggggcatattaaagagcacaagatcgttttatccaatacgctgcagaagatttttcaggacaacggattcacaattaatgaggagaaaaccagatacgccctgcgcaccaaccggcaggaagtcactggcctgattgtcaatgcaggtattaatgtgccccgcaaatatatcatgagaatccgcgccatgttgcatgcttgggagaaatatgggctggaagccgctgccaaggagcactttgaaaaattcaactacaagcacaaacacccagactacccagagattgcttttaaaaacgagctgactggcatgctgaactacgtgggccagatgaagggtattggcaacagagtgtacattgccctctactatcgaatcaagcgtctagactcaaatatcaaactgtctatccccgaatatatcccggctcccgaaggaactaccgtagtgttctgcgaaggcaagacagatccgctccatttggagactgccctgtcatggtttcaccagcaaggcgagtttagtgaccttgatctgcatttcttcaaatggaggtccgatcttgacattaataacgacaccctcttgcagatgtgtcaaactaggccacaggcaaagcgcgataatcgaatcgagatctatctttttgaccgtgacgtgcccaggtatatacaaaaggccgcggagaaagataaaagctataaacactgggaagccaatgtgtatagtgctttactgcctgtacccgaacatcgggatttcaatgagatctgtatagagcacttctaccctgatgaagacctccttaaagaggataaggacggcaggcggctgtataccactcgtgaatttgaccctgagtccgggtgccatctcaagctcaaagaggtttattacgcgggcacaagggcgcaactacgctgcaagtaccctaagattctggactccaatgttaggaaaaccgggtctgatgaaaatattgccctgagcaagaacaacttcgccaagaacatctttcacaaaacagggtccttcaaagaagtaagtttcagctacttcaaagtgatcttcgagctttttgaagagatcatggctcaggcaaagtga

SEQ ID NO: 8013 - RNA, 1728 nt, synthetic construct
  source 1..1728: mol_type = other RNA
atggatggttttgacagcaacatgatcgagttctgtgaaatcgattcacgacgggatctcgctgcatatcttggttgccagtacaaggatttgatctataaccttttcgtgctccccgacgacaagcgttataaaaagattcagatcccgaaacggaacggggacacacgcgacattctggccccaagctctggaataaagagagcacagagaatgctggcaacaattttaagcgacttgtacaaaaggaagtcatgcgttcacggttacgtcaaaaaacactcaatactgactaatgcctccgtgcacaagaacaaacgaatcgtgatcaatattgacctgaaggactttttcccatcgataaatttcggcagggtgcgggggcttttcctgaatcccccttttagctgttgtgaggaggtggccactttcatggcacagatctgctgttttgacggcgtccttcctcagggcgctccaacatctccaattatcagtaattacatctgcagatccctcgacaacgaattgctgaagtttgcgcgaaaatatcgtctcgactacacacgctacgctgatgacattacgttctcaactaatttacgcgaaatccccagtaggttgggagtaatccaggagaacaagttagtcctgtcggaatacttcacctccatcatagaagaaaatggcttcaagattaacccgagtaaggttcggtattcttatcatactggacaccaggaggtgaccggcctcgttgtcaataagatagtgaatgtacatcgtaagtacgtgaaaagaatccgcgccatgatccatgcttgggagaagtacggcctcaccgcaacagcaaatgagcacttcgagaagtacaactataaacacaggctacccgaatccccagattacgcgtttaagctagagctgcaaggtatgatgggctttctcgccgcggttaaaggcaaaaacaaccaagtgtatgccaggctgtacgagaggctgattctcctggataagcatacaatcttgcagcctcctctgcggattaccgcccccagagactccgtggtcatttacggggaaggcaaaaccgacgtggttcacttagctgccgcatatcgccattttcaacagcaaggagaattcctggggctaaagctgcatttccatcgctggggtaaccatgatgtaaacaacgagtttgtgtacaatatgtgtagaaccaggagtgaatccaaagagaatgataacctggagatttatatcttcgaccgagacgttgctagatacgtcaaagataccacggagaacgggaagggatttaaaagatggagcgaccgggtatattccgccgtccttcccattcctcctcaccgcgattttaatgatatctgcatcgaacacttctactccgatcaggatctggcccggcgagataagtctggaagacgcatatacaccagctttgattttaatccgcagtctggaaatctgaaggacagcaacgacatctattacccatataggcaggagctgaagaggacttatcccaaaattatcgacgataaagtgatgcgtataagctctggcgaaaacattgccctctcaaagaacaacttcgctttgtatatctctcgggggattggggaattcgctgatgtggactttgagaattttaggcctatcttcaaacttattgaggagatagtgcacaatagtatgcggtga

SEQ ID NO: 8014 - RNA, 1713 nt, synthetic construct
  source 1..1713: mol_type = other RNA
atgaaaaacaaggaataccgcgatttcttgttacttggaacccgagaagatgtggctaaatttctaggcggaagcctcaagaacctgagctttctgctctatattctgcctaaagagaaacagtatcacgacttcagcattcccaaaaaaaatgggggcaaaagacagatttcctctcccatctcctctattaagcgttaccagagggagctggctgatattctctcagaatattaccacgttaagtctacggtgcatgggtatgtcaagggaaagaatataaagacgaatgcgataatgcattgcaataagaagtggatcgttaatatcgacctgaaggacttcttttcgtctatccacttcgggagagtcctgggggtattcaaaagcaagccatttgaatttaacgacaaggtggcaactcttctggctcagatctgttgctttgatgggaagttgccccagggagccccaactagtccgatcatatcaaattacgtgtgccgaaatctcgataataacctcattaactacgccaagaaaaacaagctaacatactctcgctatgccgatgatatcaccttctccactaatatgagttcactcccagagaacctaggtaaaatttccgaggaccacgaactccggctgtctgacgaactgttgggcatcatcacaaacaataattttgccgtgaactcaaccaaagtccattacgcaaacagaaataataggcaggaagttaccggtctgatcgtgaataagaaggtgaatatcaagcgaacatacatcagaaggataagggctatgctacacgcatggcaaaaattcggcctgtctaacgccgctatcgaacactttaacaaatacagcatcaagacccaaatccctgacttccctgacttggcctttaagaaacgtatcacgggacagataggctttatcggtcacataaagggcagcaatgacaacatatacaggaacctttacaaacggatcaaggaactggaccctatgactaaacttacacttccgaacattatttccagcccagagagctgcaatgccataattctgtgtgagggcaaaaccgatagtatacatcttgagacagctctgaaatatttcatcgaaaggggcgaattcgtaaatctcaagattcacttctacaaataccccgacgaggcaaagatcaacaactcctacctctataagttatgcgaggctcgggatctgatcctgcatgacgtccggattgtgtgcctctttgactgtgatgatgcgaaatatgttaaacactgttgtgagggaaagaaattgtataagaactggggcaataacctgtattcatgtttattgccacaacccatgcatcgggacttcaaagagatttgcattgagcacttctacactgatgacatcctgctgaagaccaacaacaaagggagacgcatttacctgtccaacgagtttgtgtatgagacagggtttcataagaccgagaatattcagatccgcaagagagacgatgccaagagtccctatcctaagattattgacagcggagtcttcaagtcaaatggcgaaaatatcgcgatgagtaagaacgactttgccaatagtattgccgcaggtgaaaaacctttcgataacatatcgttcgagacttttcgcccaattttcgatttaatctccgatatcgtgaacgagtga

SEQ ID NO: 8015 - RNA, 1725 nt, synthetic construct
  source 1..1725: mol_type = other RNA
atggaggagaacaaaaactacgaagacttcttacaagtcacgaccaggtctgatgtcgccacttacttgggtggcagccttaagaacttatcctacaacttttacgtgctgccaaaggagaagcagtatactaagttcgcaatccaaaaaaagggagggggcgaacgacatatctgtgcaccggccagtagcattaaactctaccagagacgcctggccaccatcctgagcccttactactccactaagcccacggtgcacgggtatgccttaaataagtcaatcaagacaaacgccaaggtccattgcaggcgaagatggattgtcaatattgacctcaaggacttttttcagagcatgcactttggtcgggtgagaggagtatttctgtccaacccattcgctttcaatgaccaggttgccaccaccctgacacagatttgttgcttcgaaggcgtcctgcctcagggggcaccaacttcgcccattatatccaatttcatctgcagacgcttggataatgagttgctagaatttgcaaagaggcacaaactatcctatagtcgatatgctgacgatattactttcagcactaacttggctgcgattcccgctgaactcggcactattagagaagataatatcttaacgctcagcaaggaactgcgggatattattgagaacaaccagttcatcgttaacgagagtaagatccgattcgccggtcggaacaaccgtcaagaggtgacagggctgatcgtgaatgaaaagataaacgtaaagaggacctacattcggaggatccgcagtatgctgcatgcgtgggagaagttcggcatagctaatgctgctaaagaatacttcgagaagtatgccacaaacaacaaaatgcccgactatccggacgttgtgtttaagcggattctggtcggcaggatcgcatttatcaaacagataaaaggcattgacgacaaagtgtatcgcaatctgttcgggaagattaaagcgttggatcctactatcaggttgaccctccccacactcatcacatctcccgatacctgcagagccgtggtactgtgtgagggcaagaccgatggaatacacctacacgcggccctccagtacttcatagagcgcggagagtttgtggacctgaacgtgtacttctataagtacccgaccgaagcagacctctccaatagctacctttacaagtattgcgagtcatcaaatctgagacagcagaaaaagcgtacaatctgcctgtttgattgcgatgattcacggttcgtcgccaagtgtcaagaagaggggaaactttacaagtattggggtaacaacctgtactcttgtatccttccaaaacctgcccatcgaggatttgacgagatctgcatagaacacttttatacagatgaggttctttgtagagagtctaataaacatcggcggatttatctctctaacgagtttgatcctatcaccggcaaacaccgtaccgaggacctgatcatgagaaaacgcacagacgctaagagctcttatccaaaaataatcgactcaggagtttttaaaccaaatggggaaaatgtggcactcagtaaaaacgatttcgccaatctgatcgcaacgcgcaatgccccttttcacgacatttcgttcgaggaattcaggcccatctttgagctgctttccaggattgtgaatgctgcttccgaatga

SEQ ID NO: 8016 - RNA, 1761 nt, synthetic construct
  source 1..1761: mol_type = other RNA
atggacaccggtaacggaaatatcctgaacgggtttacggacctcaaaagtaaggccgaagtggctgaatacctgggaggatcgctgaagaacctgtcttatgtcttctacgtgcttcctaaagagaagcagtacaagaccttttccattactaagcgcaacggaaaaaagcgcaccattaatgctcccgtatcctcaatcaggctgtaccagaagcggttagctgagattctgtcaggtttttacaaacgaaaaccatgtgtccatggttatgccaaggggtgctccattaagagtaacgccaaaatacactgccgtaagaagtgggtggttaatattgacttgaaagatttcttccccagcatccacttcggtagagtgcggggcatgttcttgtcccagccctttgaatttaatggcaccgtcgcgaccaccctggcccaaatctgctgctttgagggcgcactgccacaaggagccgccacttcacctattatcagcaactttatttgccgccgtttagacaatgatctcattagtttcgcaaagaagcaccgccttacgtacagccggtacgcggatgatataacattctctacgaacctgcccgctctcccggaatccgtaggcaccattgccagcgacggctccttagaactcagcgacgatctgagaagactgattgaaaagaactcattcaacatcaatgagtctaaaatcaggtattccgatcggcataatcggcaggaagtgactgggttaacagtgaatgagaaaaccaatgttcgaaggacttatgtgcggcgagtgagagccatgttgcatgcctggcaacagtatggccttaaggacgctgcgagagaacactttgagaaatattctgacaaagtcatgcccgagtacccagaactgacatttagtcggattgccactgggaggatccgctttataagacagattaaggggcccgatgaccatgtgtaccggaacatgttccgtcagatcaaggcattggatgcaagcataaaactcgatctgccagcattcttcaatacaccggacgggtgtaatgccgtcgtactgtgtgagggcaagaccgatggactacacctccaagcagctctccgctatttcataggaaaaggagagtttacaggccttaagatctactttcacagatatcctgataagatggacatcaacaactcgattttgtacaagtgttgcgagacatccgtgacaaggcagtctaatattttgcgcatctgtctatttgaccgagacgaccgaacatttatgaaaaaatgcagagagggcgatagtctgtataaagattggggtaataggctctatagttgtgttctgcctcagcctgaacatcgggacttcagtgaggtgtgtatcgaacacttttacagcgacgaagtcctaagaactaagtctccaaagggccgccgtatctatctgtcaaacgagttcgatccagggaccggcaaacatctctctgaggaccttacctgtagaaaaaggactgatgctagctgctgctaccctaagatcatagactcaggggttttcaaacccaacggagacaatgttgcactctctaagaacgacttcgctaatctgatctttaacagggagggggacttcgccgatatctccttcgagcactttaggcccgtgttcgaacttctgagcgagatcatagagaaggatggcgcgctaaaggagaaactgagggcctccagctcagcttga

SEQ ID NO: 8017 - RNA, 1713 nt, synthetic construct
  source 1..1713: mol_type = other RNA
atgacggggggctgtttttacatgtcaatcgagaatagagacattctgttttacaatgctgctacgaaggaaatgctggccgccgcactaggaacccgactgaaccggctcgtttattacctctacgtcgtgcccgactcagaacgttatacaaaaaagtgcatactgaagaagagcgggaaagtgcggaacgttgccgccccaagaagcggtttgaaattcatccagaggaatctggcgagcatcttaaacaccagtgttcctcagaaaagttgcgttcatgggttcgtacctaagaagtccattataagcaacgcatccgtccacctgaaacgcaattttgtgattaacctcgacctgaaagacttctttccctcgattaacttcggccgggtactgggactgtttaagtcggcacctttcaacttcaatgacgaggtcgcagttactttggctcagatatgttgtttcgagggctctttgcctcaaggcgctccttcatctccgattatctcaaatctcatctgccggagcttggataatgacctgatgcgcttagccaagagtctgaaacttagttactccaggtacgctgacgacatcacattctccactaatctgaaagagttgcccaagggcctcggcgaagaggtggaaggcaaatttattccatctgaagcgttggttgacatcatcggccgtaacggtttcgagcttaatttcaacaaactaagatgcagacgcaagtgtcagcgccaagaaatcaccgggatagtgagcaacgagaaacttaacgtgccccgaaattacgtccgccgagtgagggccatgatccacgcttgggaagtatatggtttagagaaggctgcctacgagcactttggtaagtactccaggcgtaggttcctctatcctgaggcatcttttcgcaagagagtggcaggaatggtgggatatatagggatgattaagggggtcgattcccccgtctacttaaagttatacgagaagttgaagtccctcgacgatagtattaagctgaaaattccggaatacagcggctcagccgatatggtagtgtactgcgagggcccaacagatccgatgcatcttaaggcggcgctgtaccactttcggtcaaagggaatgttcaactcccttaaggtggatttccatatgtatcgggacgatatgaccgtcggtcacggggagctgtataattatatggtgcggaagcacctgatgaaaaaggataatgtgatcgaggtgtatcttttcgataatgacctgaagcaatacgtgcagaaactcgacgggaaaccttttatcactgttggacaccccaaaatttatatggcactgctgccaaaaccagaacatagggatttttttgaagtgtgtatcgagcacttctataaggatgaagacctgtgcaggaaggatgcaaacggaagaagactgtattttgcccgcgaattcgataaggacactggcgcccatgtgacagaggatgtcaggtctgtcaaactacatccactcaagcagcccggatacaccatcattgacaacagaattctggataaagacgatcgaagtgtagctctcagcaagaaagactttgcccttgccataatgcatcggaagaaatctcacagcgacgtcgatttctctgcctttaaagctatcttcgagatgctacagatgctcgtgtga

SEQ ID NO: 8018 - RNA, 1713 nt, synthetic construct
  source 1..1713: mol_type = other RNA
atgggcgccttcttcatggactacgacgagaggtatatgcgtttctatgaagctgacacaagagagctcctcgccgtggcactgggcacaaagccaaataggttaagctactacttatacgtgctaccagagtcagaacggtacaagaagaagtccatcctgaaaaaaagcggtaaggtgcggaatgtagcagcgcctactggaggcttgaagttcatacaaagaaatcttgccgatatcctaactggatctctagcccagaaaagttgcgttcatgggttcgcgccagatcggtctatcgtcaccaacgccaaggttcacctgcgacgaaaccttgtcatcaatctggatttaaaggacttctttccgagcattaacttcgggcgagtgtacgggctgttcaaaagccacccctttaattttaacgagctggttgcagccaccctggctcagatttgctgtttcgaaggcagcctgccccaaggaagcccctgtagccctgtgatcagtaatctgatttgcaggtctttggataaccagcttatgcatctggcaaagtccctcaaaatgagttattccaggtatgccgacgacattaccttctctacgaatttgaaggaaatccctgaggaaatcggtagtattgtggacggccgctttgtcccatccgagaagctgaccgggattatagagaggaacggtttctcactcaacgtaaacaagactagatgtcgcaatagaaaccagaggcaggaggtgacgggtattgtaaccaatcaaatccccaacgtgccgcgaaactacgtccggagaatcagagctatgctgcacgcatgggaagcctacggccttcagaaagctgctgaggagcatttttctcggtactccaggaagcattgtgtgtatcctgaagccagcttcaagaagcgcttggccggcatgattggctacgtcgggatggtgaaaggacgtgattcatccgtgtacataagtctcttcgagaaacttaaagccattgatgaaaccatccggttgcgcctcccggaatactcgggcgatgccaagatggttgtgtattgcgaaggaattacagacccaatgcacttgaaagctgccctgcgccattttcgtagtaaaggcctgtttggtggcctgaagatcgattttcacatgtacagggacgatgtcccagtcgggcacggggagttgtataagataatggaggggcgacacctcgttaagaaagacgatgtgatcgaggtctacttatttgacaacgaccagaaagattatgttaccaagcttaacgggaaggcttttatgacttaccgccaccctaaagtgttcatggcactgcttccccagcccgctcacagagacttctatgaagtgtgcatcgagcatttttattcagattccgacctgatgcggaaagacgcaaaaggacggcgcatctattttgtccatgagtttgacaagtctacaggctttcacaaaactgaatcagtgagatgtctcaagctctcgcctctaaagcagaaagagtatacacccattgtagatggaatactcaatgaaaaggatcagtctgttgccctgtccaaaaaggatttcgctctggcggtactgaatggaaagcaatcccatgcagacgtggacctggatgcgtttaaaagcattttcgagatgttcgagaatatatacatctcatga

SEQ ID NO: 8019 - RNA, 1686 nt, synthetic construct
  source 1..1686: mol_type = other RNA
atggagctttctaaggcagaatcacgggaggatgtgctcctggccctgtgttctagctggaagaacttggcttattatatatacaggctaggtgatcgacggtacgaaaagatggagatagtaaaaaagagtggcaagttacggaacattgcaagtccagtgcgtggcctgaaatatatccagcggaacttatcggccgccctatcatatggctataggcagaaagggtgcgttcatgggttcgtcccccagagaagtattctcacaaacgcatccgttcacgtcaataggaggtatgtaatcaatctggacctcaaggactttttcccttctattcacttcgggcgggtcgtcggcatgtttgttggaccaccttttggatttaatcacgaggtggctgtgactcttgcccagatctgttgctttgaaagagtactcccacaaggcgctccaagctcacctgtgattagtaacatagtatgccggaagctcgacaatgaactcctggggctcgctaaagaatgtaggttaaactactcccgctacgccgatgatattacattctctactaacctgtgcgagatcccggaacggctgggaagagttgaaggtgagcgtttcattatatctgacgggctccgccgcatcatcgcggataatggatttgaattgaacgatgagaaagtgagatggagctctgagtattacagacaggatgtaactggtcttgtggtgaatgagaaagtgaacgtgccccggacttacatccgtagaatcagaagcatgttgcatgcttggcagaagtttggtcttcaggccgcagcgaaagagcattactccagattcagctttaagaaaactaacaattgcgaagaatcctatcgacgccgcgtcaccgggatgattgggtatgtcggcatggtcaaaggccgcgactccaaggtgtacttgtcgctggtgagcaaactatacgacctggacaagggtatgtccctggccgttcccgatctgaaggacaagacaggcatggtcgtgtactgcgagggaaagacagatcctatccatcttaaagccgccctctcagcttttcgcaagcgaggactgtaccacgaattagacgtgtgtttccatatgtacaagccggacaagtcaatttccaacagtaccctgtacgagatctacgctaaaagggatgtcgtgaaggaagggaatcagatagaagtgtacctcctggattcagacgacaaaagatacacagataaagtgaaggccgacggaaagtgttacaccaaaggcggccaaaatatttatctagcagtcctgcctaagcccgagcatcggaatttcgataccgtttgcatcgagcacttctataccgacgacgacctgcgtcgatgtgacaaaaacaataggcgcatttatctgtctggcgagttcgataagaacacgggactgcacttggtggagtccggcctgaggacgaccaaattgtcacccctggccaagtctgactatgccatcatcagcgagggggtccttgattgtcatgatgtgaaccacgccctgagtaagaatgagtttgcacgagcggtgtcctgcagggcagctagccacaaagatgttgagttcagccacttcagcgttatttttgacatgcttatggacatccaaaaggacgctttgtga

SEQ ID NO: 8020 - RNA, 1701 nt, synthetic construct
  source 1..1701: mol_type = other RNA
atgaacctgctcaacatcaagtctaaggaggatcttttggattatattgggattgaagaagcccagctgaatcacctgctgtatcggttgcctaacgcctacaagtatcatacctttgaggtgaaaaaaaagaacggctcatctcgtattatcaactcacccaatcctgagttaaaggtcatccagaccaagctcaaagacgaccttgtggagtttttcggcaaaaagaactgtgttcatggctttgttaaggacaagaacatcttatctaacgcgagcagccatctcaaaaaacagatcctcattaacatcgatctgaaagacttctttagcactattcattttggtcgcgtaagagggatgttcctctccagcccctttagcttcccagaaaggatagcaaccctgctcgcacaaatatgttgttttaatgggctacttccgcagggcgctccaacgagccctatcattagtaactttatctgccggaagcttgataacagcttcattcagttctcaaaaaagaattccttcttctacacacgatatgctgatgacattaccttctcctccaatatccgaagtctgtcttcggagctcggaattttcaacaaggaccagttcgagattagtaaatcaattctgaatcagatccacaacaatggttttacgatcaacgagtcaaaggtcaggatggcctcccgatttaacaatcaaactgtgaccggaatcaaagtaaacgtaaaacccaatgtgtccaggttttatatcaagcagattagggcaatccttcacgcctgcgagaaacatggcgtcgaaaagactgccattgtgcacttccagaagaacgaaatcgatttgaacaggctcaagtccccaattgacttcttcattaagagactagtcggtaaaatcagtttcataggtttcgttagaggaaaggatgacttcctattcaagaagctgtatgaccgggttaaggtcatcgtgcccaacgcccggctgagcattatttacaagaagatagacgaatccaagaacacactgatcttgacagaagggaaaacggactggaaacatatcaaagctgcgctgataaaactgcaggcccaaggcgcttataacaacctcaatttgacctttgctgactatctggacgagcacaaggtgtcgaattctgagttattcaagatctgtgaatccataccgaaattaggaatgcagaaaaataagaccatctgcatctttgatcgtgacgataagaacttcatacccaaagtgacaagtataaacgacttttacaaggattggacaaataatgtgtactcaatggttctgcccgtgccaaaacaccggaatttcgagaatatttgcatcgaacattactacacagatgacgatctgttcacttacgatcacaacaatagaagaattttcgtgagcagcgagttcgagaataatggcaatcacaagcttgagaagtatcgctacaaagggaatctggagaagttgaaaaaccgctttcctactatctttgatagtcaagtagtggattcttctggagcttctatagcactgtccaagaatgattttgcagactacgtctacaacaacaatccacgctataattcatttgacgtcgaagcctttaaagagatctttaaccacatctacgtgattgaaaataccactcctaaatga

SEQ ID NO: 8021 - RNA, 1620 nt, synthetic construct
  source 1..1620: mol_type = other RNA
atgcgctcgcaagaatttctgaaaatcaaaacagaggccgaccttgcgaattttttgaatatctctgaaggcacgcttaagtactactctaatccaatcacaccatccaaggcttacactaccaccattctgaaaaagaagaatggtgaagatagaatcgtgtgtgcacccgtacggatcctgaaatatatccagcggcagattagtgacgtcctgtatgaactgtacaagccttccaggtgcgtgacaggatacgtgcggaagaaatccatttgtgacaatgcaagacctcacacttcaaaacgcatgataatatgcctcgatctcaaggatttcttcaccagtatacactttggccgcgttcgtggcatgttcctcaatcagccctttaatttcaataccacaatcagtactgtgctggccaaccttacatgtcgaaacggatgtttgccacagggcgccccttcgagccctatcattagcaattacatctgccgacggttcgacggggactttatgaagttgtgcgccaaatacaaactagtgtacacgagatactgtgacgatatcaccattagcacaaaggcctactccttcccacattctattatctattttagcaccacttggtccctgggagatgacatccgtgagctgattcaaaagcacaacttcatccttaacgaatcaaaatttcgcgttgtgaccaacaaaacacgccaaatggttaccggactggtcacaaaccagaaggtaaatattcccaagaacaaataccgtaagctacgagcagaattgtattataccctaaaaaacggactcgatgaagccgcgaagcacgatgggtacattcataacaagatcgtggacaagaatgccttcctgaaccatctgcggggaggggttaactttttcaaaagcgtgctcgctgtggacaaccctagatacaagtggttagctaatgagttcaacaaaattgtaggcgagaattactttttcgtgccatctagttgggacgagcttaagaacaaagctatattcgtcctgatgaacaataaggagacgagccaggggactgcattttacgtcaccgacatcggtttaattacctgcctgcacactgtgtgcgcgatatctgggaggcccagcaagtcagacgtcgagactgcactcaacgattattacgcctttctcccgaacactgagtataaccacattaagctgtcttattgttggcatagcaatgatcttgatttgctggtgctgaaattcgtggattacacgatcagaatcgggtatgagatcgagaaaaatattgtcctgagtgatggcataaatcatctgaaggccctcggctatcccgagtatggtttgggttgttcctgctgcttcatacaggacatgtccatcacatctaacagggtactctgtggtttaaaactctacgtggtggacaagaccttttatactggagctagcggggggccggtttttaactccgcaaacaaggtcgttggctatattgataggggaaatgagattggctcagacgaagaaaggtataatgctttctgctcaatcgcccccttactggacgagttcaacaagggcacactgtga

SEQ ID NO: 8022 - RNA, 1665 nt, synthetic construct
  source 1..1665: mol_type = other RNA
atgtataatgaatttgggaggatccaacactttaagaacattgaaacaaaggacgacctgctctacgtgctgaatatcagtagtcggaagtataactacctagtataccagaagaaaaacctctacacctccttctatattaacaaaaaacagggcggttttcgcaaaatcctttcaccctgttatgatctgaagaagatacagaaggaactcaacattattatgagcaacaactacgagtttaacaatgagacagttcacggctttgttaaagagcactctattaaaaccaacgccacagtccataaagacgctaattacatcgtcaacatcgacctgaagaatttcttcgacaatattcacttcggccgcgtgcgggggatgtttatgaagcctcccttcaatttcagcgactatatcgccacaaatctcgcaaaactcacttgttatgagaaaaaacttccacagggggccccaaccagtccgaccattagcaatataatttgctataggatggaccgggaactgagctacctgtgcaataagtataattgcagatatacccgttacgccgacgatataaccatttccacgaaaatgctctatctgccgaaagagatcgccaaattcagagatggacaggttattctgagcagcaatataacagacactattaagaacgaggggttcaccattaatattgacaagctgaaaatctctcccaatactgatcgccaggaggtgactgggctcattgtgaacaagaaggttaacgtgcagaaggtgtatatcaagaagctgcgggcattgctcaataacgtatctaagtatggcttctacttggaaggatgcaaatactttgagaagacattgaacgattgttctaataaggactatgtggaacatagattcatcaacgtcttgaaaggtaaaatcgagttcctaaaaatgatccgaggcatcgatgactacgtgtacataaaatatgcgagcctgtttaacgagctgatcgggtatgagtacttcgataccgactacggtctgacaatgaaggagttcatcgaaaaaagggtgtaccctcttatctcatacgatgaaatggttcaaggaacttgctttatggctgacgagattggcatgataacttccacacatgtgctaatatcacctcaatcctttatcaccgagaacaaatataaagagatcgagttaaaggacaagtttaatttctgtactgtcggttcaaagccattctatatcctggatcactacaacagaaagtatatcattaaccctgaaatcacccgtgagcagattaactccgacatccttttttacaaatgcatccccagtaagaagcgatttaagataaacatgacgtacgagcccaagatcggcgaaacggtgtatcttgctggctacggagaattcaaagatttcaagacctccacgattaattacataaagtcgaatgtgaccggatacacagaatttttaggaaggaaagtcgcatgtatcaactctaagatataccatgggatgtctggcggtccagtattgaattccaatagggaagtcattggaattatctacgctggcttaaacctggaggatgatgataacggggtcatcagcaagactaatggattcgtgctgtttcagtga

SEQ ID NO: 8023 - RNA, 1551 nt, synthetic construct
  source 1..1551: mol_type = other RNA
atgaactttatcgatattaagtccactcaagatctggcagactactttgagctggattacaatatcctggctagaattacttatggaccttctcggagcaacctgtacaaggttttcgagattccgaagaaatccggtggctcccgcatcatccacagtccggagaaaaccctcagagtaattcagcgcaagctggccgatgaacttaagcagcactatcgcagacacgacgccgccttcggctttgtggacaaatattcgatcaccgataacgccagtaagcacataaaccaggattggattctgaacttggaccttgctgatttttttccctctattcacttcggacggatcaggggtttgtttcagaaaaccccattcgcctttcctgacaaggtcgcccagtggatcgcacagctggctacatttaatggcaccttaccacagggtgctccctccagccctatcttgaccaacatgatctgcttacgcttagataaagatcttaaaaagctggcacgacggcatgatctgtcttacacaaggtacgcggatgacattacgctcagttccaaaaagtatttccccaaggaaattgccaagatggagaaatcagacaacgaatcactcgcgactctgggggccgacgttgtctctataatagagaagaacggattcaaggtgaatcccagtaagacaaggttggtgagcaaatctggaaggcaggaggtcacgggtatagtggtaaatgagaagagcaacctaccacgacactatatcaacactatccgcggggagatagggcaacttaggtaccttgatggcgaagccaaagatgccctccaactgagagttttgggtcgtctcggacatctgaaaaaagtagtcggcgaatatgaccctcgttacattaagctcaaggctaaactacatggcattaagctatcatgttcccccaacgaaacaatgtacagggctgtgaactggatcgtcgagaacgacgatggcgtgtatgggacagccttccatgtcgaccatcttggatggattaccgcatgccatgtgataaccaaaccagcagctatcctgaatttcaagctcttccatccagacgactcccaaaataagtacgcaatccagctgaagagcaacttcttcgatgctgacatcgactacgtgatcttcaatgcacctatcaaaccaatcataagcgccagaatcgctccgaagcagatagagaatggggaggcctgtgtgctgtcgggatatcccaatcacaatcacaagaacaatagcgtgagcattattgaagcgaaaattacctctacacagacgatctttaaggcccctcggtttgtgatcgacgcaaacatttttcatggcatgtccgggggaagtgtttttaacaaagagaatcagctggtgggcctggtgacccacggcaatgaagacggggggaccactgttctccagtcagcgttcacttcaatccacctcgtcatgaatgacattactaataaatctccccaacgaatcattcggacagaatga

SEQ ID NO: 8024 - RNA, 1734 nt, synthetic construct
  source 1..1734: mol_type = other RNA
atgtcccacctcgccaagctcaaatccgccacgtctaggaaggagctggcacttatactggggtacaagccaaaaagcatgaccgcaatcgtatataagacccctaccgcagataaatacgccacatttgatattgacaagaaatctggtggaaagcgcactatcaaggcccccgctcctaagctgaagaacttgcagagtcacctgtctcacgtcctctatcagtgcctagctgagatagatcgggcgcgggacgcaaagcctattagctttggattcagacaagatagatccattactgaaaacgccagtaggcacaagcgtcgccgctgggtcttaaatctggacctggaggatttttttccttccttcaacttcggccgggtcaggggattcttcctgaaagacaaagcctttgatctgcatccagaagtagccaccacgatcgcccaaattgcttgcgacggcactgcccttccccaagggagtccctgttcaccagtgatctctgagctcatcgcacagatcctcgacatgcggctggtccgactcgcgaaaaagcacggtgtgacctacacaaggtatgctgatgacattactttctccacaagccagaaggacttccctgccgggcttgcccaggttgacgagagcgatccctccgtttggcatctcagcgatgaattgaccagaaaaatagtaacctccggtttcgctatcaacaacgctaaaacaaggatgaactttcgaggctctaggcagattgtgacgggtcttgtggttaacgagaaagtgaatatccggagtgactattatcgacgtgcgagggcgatgtgcgatacattattccagacagggcaatactataaggctgtgattaagcccgatgatgctgacgaggaaccgaagccggaagtgacttcaaacctgaacccactacagggtatcttggggcacatctacgccgtcactcagagtgccgaacggcgtgaggtgtcggagcagagacaaaatcctcgagccattaggaaattgttccggcgctttctgttctacaagtattgtattgtgttgaacgaaccactgatagtgacagaggggaaaaccgatccagtatatctcagagaggcagtcaagtcaagagtgaagttccagccaatgctaggggcccatggcaaagacggctttaaacacgcagtccgctactttaattatggcggcctggctcatgaggtgatggacctgggaggcggcacgggagacttgaaatctatacctctggactacttaagaaacctgaaacccagtaaaggcactcataaaccttttgcttacaagccaatgaagtaccccgttatcatcgttttagacaatgacgatggactggctgccgtcgcgagcacagtgaagaagaacttcggaaccgagatcgataagaaaagcacacaggatttttacaatgtcatcgacaatctctacattgttaaaacccccgaagacggctccaagaatacctgtatagaagacatgttcccgaaagaatggagagaatacaagatcaatggaaagaagctgaatactgcatcgaaaattgatccctcaaaggacctgtcaaaagaggcctttgcaaaaagcgtggtgaaggcaaatgccgacaaaattgatttttctgggttcgatcctcttcttgagcgcatctgcaaggcagtgcagcactatgccgctaagagctga

SEQ ID NO: 8025 - RNA, 1098 nt, synthetic construct
  source 1..1098: mol_type = other RNA
atgaccgccatcgtctacaagactccgctcgccctgaagtacaccacatttgagattgataaaaagagcggcggaaagagaaccataaaagcaccagcaccaaagttaaagaaactgcaagcccacctgtcccatgtcctgtatcagtgcctggcagagatagagcgcggtagtgatgctaagcctatatcatttgggttccgtagggaccgctctattagtgaaaatgctctgagacacaaaaggcgaagatgggtactgaacctggaccttgaagatttcttccccagctttaactttggccgcgtgcgaggcttttttctcaaggataaggctttcggcttgcaccctgaggtggcaacaactatcgcgcaaatcgcttgtgacggagccgcccttccacagggttctccctgtagtcccgtgatttcggagctcattgcccagatcttagacatgcgcctggtacggttggcgaagaagtatggggtgacttatacccggtacgccgacgacatcactttcagcacctctcagaaagattttccgacaggcctggggtccgtcgatcccaacgacccagccgtatggcatctttcagaggaactggtggggaaaattgtgacttcagggttcgccattaatgatgccaagaccaggatgcatttcagaagcagccgacagacagtcacaggtctagtggtcaacgagaaagtgaatattcggtcagactactaccgtagggctagagccatgtgtgatacgcttttccagaccggacagtattacaaggttgttatccaacccgacgaagacgaagagcccaaaccagatgttacgagcaacttgtctcctctccagggtcctctcatccccttcgctcaaggccacaccatttcccgggaagaaacttgcggcatcgtctgttgcctactcatgctgttaaaagacgtggcagtgtggtgcagaacaatcgctactcagaaaataaggttcggagctgtgtgccggccaatccctcgcgagtgtaatcctcggtccaccggaaagtgtgatgcattttgcaccgcgacgaatacagggttggttaggtcctga

SEQ ID NO: 8026 - RNA, 969 nt, synthetic construct
  source 1..969: mol_type = other RNA
atgtcttatcttcacaagctgaaaagcgccacctcccgcaaaggtttggccgagatcctgggatatcgccctaaggccctgactagtatagtctatatgaccccactggaccagaagtataccatcttcgaaatcgataagaactcgggtggtaaaagaacaattaaggcaccagtgcccaagctgaagaagctccagagtcacctgtcccatgtcctcaatggctgcctggctgagatcgaaagagaacgttctgctaagcccattagtttcgggtttcggaagggcaggtctattgctgagaacgctagaaggcacaagcggaagcattgggtgctgaacctggatctggaggattttttcccgtcctttaatttcggaagggttagggggttctttctcaaagataaagcattcggcctgcatcctgaggtcgccactacaatagcgcagattgcgtgtgatggggctgctctaccgcaaggctctccttgttcacccgtaatcagcgaactaatcgcacagattctggatatgcaccttgttcgcttggcaaaaaagtactcagtgacctacactaggtacgccgacgacataactttcagcacttcacagcgtgaattcccaacaggattagcaaccgttgatactaacgaccctcctgtgtggcacctctccgacgagctcgtcgacaaaattgtgacaagcggctttacggtgaacgccgccaaaacacggatgcattttcaggacagccggcaaatggtgaccggactcgtggtcaatgagaaagtgaatatccgctccgattactatagacgagcccgagccatgtgcgacgtactttttcagacgggccagtactacaaggttatgacccaacccgacgacgataacgaggggcccaaaccagaccttacctcaaatttgaatccattgcaggcgagcttagccatcttcacacaatga

SEQ ID NO: 8027 - RNA, 1740 nt, synthetic construct
  source 1..1740: mol_type = other RNA
atgaacgtaacccatctgaagaagttgcgggccgcatcaagccgcaaagagcttgcggttatcctcggatacaaacccaaaactctcacagctatcatttatcagacccctccagcgctgaagtacactactttcgagattgacaagaagtccggtggcaaacgcacaatcaaagccccggaaccccgtcttaaaaaactccagacccacctgagtcatgcattatatcagtgtctggccgagatcgagaaggatagaggcgctaagcccataagcttcggattcagaaaggaccgttcaatcgcagaaaatgcttcacggcataagagacggcgatgggttctgaacattgacctggaggatttctttccctctttcaacttcggcagagtcaggggcttctttctgaaggacaaggcctttgcgctgaaccccgaagtggcgacgactattgcccagatcgcctgcgatgggacagcattgccacagggctctcccagctctccagtgattagtgagctaatcgcacaaattctagacatgaggctcgtccggttcgcaaagaagtacggcgtcacttatacccgatatgccgatgatataaccttttcaaccagccagaagaattttcctaatggcctcgccacagtcgatcctaatgaccctaccgtgtggcatttgtctgaagagttggttggcaagatagtgtcctctgggtttaccataaataacgccaagacacgtatgcattttcggggatccagacagatggtgacggggctggtggttaacgagaaagtgaatatccgaagtgattactaccgcagagctagggctatgtgcgatatgttgtttcagacagggcaatactataaagtggtaatccagccagatgaggaggacgaagaaccaaagccagatctcacatcaaatctgaaccctctccaaggaatccttggccacatttactccgtgactcagaccgaggagcgcagagaaataagtgagcaaaggcagaagcctagggccatcaggaaactgttcagacggttcttattctacaagtactgtatggcacttaaggaacccttgattatcaccgagggcaaaaccgacccagtgtatctgagggaagccgtgaaaagccgcactaagtttcaccctgctctaggtgctcctggaaaggacggattcgagcacgctgttcgctatttcaactatggtggcctcgcccacgaggtcatggatctgggagggggtacaggagacttaaaaagtatccctctggactacctgcggaatttaaagccatccaaagggtcgcacaagccgttcgcccataagcccatgatgcacccggtaattattgtgctcgacaatgatgaaggcctggccgctgtgggtagcaccgtaaagaagaactttggagttgccatcgatattaaaagcacggacgactattacaacgtgacagagaatctgtacatcgtcaaaactcccgagaacgggacaaagaacacttgcatcgaagacatgtttccaaagaagtggagggaccataagattaaagggaaaaagcttaacacggccagcaaaatagaccctaccaaagatctttccaaagaagctttcgctaaatccgtcgtgaaggccaatgcggacaaaattgatttttctgggtttgaccccctgctggaacgaatcgataaagcaatccagcaccacgcagcaaaaccgtga

SEQ ID NO: 8028 - RNA, 1734 nt, synthetic construct
  source 1..1734: mol_type = other RNA
atgtcacatctcaagaagctgaaggctgccaccagccgaaaagaactggctgccgtgttggggtacgctccagcctccatgaccgcgattgtctataaaatgcccaaggatagaaagtacactaccttcgagattgataaaaaatctggcggaaaacggaccatcaaggccccggtggctaaactaaaaaagctgcagagccacttgagtcacgtgttgtaccagtgcctttccgagatcgagaaggatcggggtgcgaaaccaatctcattcggcttccggagggatcgtagtatcgctgaaaacgcgtctcggcacaagcgccggagatgggtgcttaatctggacctggaggacttcttcccgtcgtttaattttgggcgcgtccgtggctttttcctgaaagataaggcttttcacttacatccagaggtagcaacaaccattgcccagattgcatgcgatggtaccgcacttccccaagggagcccctgctctccagtgatatcagagctcatcgctcagatactggacatgcgactggttagattggctaagaagtacagcgtgacgtatactaggtacgccgacgatatcacattcagcacaagccaaaaagagtttcctaaggggctggcccatgttgatgccaatgatccttccatctggcacctgtctgacgaactggtgggcgagatcactggctctggctttgtgatcaataacacaaagattcgcatgcacttcagggggagccggcaaatggtgacaggcctagttgttaacgagaaggtgaacattaggagcgactattatagacgcgccagagcgatgtgtgactccttgtttcagacgggaaaatattttactgtcactcagcccccagcaggggaaggagaggaacccgtgccagaacttatcgattcattgagtcccttagagggcatactcggccatatatacaccgtcacacaatccgaggaaagacggtcagtccaggagcagagacagcagcccagagccatcaggaagctttatcgcaggtttctcttctataagtatttcatggcacttaaagcaccactgatcgtaacagagggaaagaccgaccctatttacctgcgggaagctattcagtctcgcgccgacagtcaccccgtgttaggagtactcggagaggacgggtttaatcatgcagtccgatactttaactacgaagggctcgcccatgaaattatggacttaggtggaggtacgggtgatctgaagtctatccctctggactacctgcgtaatctgcgaccttccaaagaggctcacaaaccgctgctccataagccaatggaacaccctgtaattatagtcctcgacaatgatgaggggctggccagtgttgcctccaccgtgaagaagaacttcggcgtcagtataaacttgaagtcaacttcggacttctacaacgtcactgacaatctctatattgtgaagacccctgaaaacggcagcaacggaacatgtatcgaagatctgttccccaaagagtggcgcaattataaggtgaatggcaaaaagctcaacaccgcatcaaaaattgatcccctgaaggacctatccaaggaggccttcgcaaaatccgttgtgaggcctaacgccgactctatcgactttagcaaattcgattccctacttggaaggatcagtaaagcaattgaacactacgccgctaaaccttga

SEQ ID NO: 8029 - RNA, 1719 nt, synthetic construct
  source 1..1719: mol_type = other RNA
atgtctaggaaggatctggctggcatcctgggatacaatccttcctccttgaccgctattatttataaaacacctaacgcctccaagtatactactttcgagatcgacaagaagagcggcgggaaacggacaattaaggcgccatcaccaaaacttaagaaattacaatcccacctctctcatgtcctctatcagtgcattagcgagatcgaaaaaaatcgggaatgcaagttgaaaccgatatcattcggtttccgtaaggaccgaagcatctttgaaaacgcagccaggcacaaacgacgccgctgggtgctcaatatcgacccagagaacttctttccttctttcaactttggccgcgttcgtgggttttttctgaaggaccgggccttcgcgttgaaccctgaagtagcgacaacaatcgcccagatcgcctgtgatggtgcagcccttcctcagggaagtccatgctctccagtgatttctgagcttattgctcagatcctcgatatgagactggtcaggcttgccaagaagttcggagtcacttacacgcgttacgcggatgacatcacctttagtaccagtcagaaggagtttcctaccgggttggctcgccctgacggcactaatcccacaatttggcatttatctgacgacctggtgggaaaaatcaccaattccgggttcaccatcaactctaataagactagaatgcactttcgcggctcgcggcagatggttactggattggtcgtgaacgagaaagtgaacatacgtagcgactattacagaagagcccgggccatgtgtcaccacctgttccgcaacggccagtatttcaagtccatgctccctcaggagaaagacggtgaagagccgaagcccgagcttaccggaaatctgaatccactagaaggcatcctaagttacgtgtatgcagttacacagagggaagagaggaggaacgaccaggaccaacggcaaaaaccccgagctataagaaagttatatcgccggttcctgttctacaaatatttcatagccctcaaggcccccctgatcgttaccgagggtaaaaccgatccaattcatttaagggaagccgtgaagtccagaaccaaattccatcccgcactcgggaagccgggtaaggacaggtttgatcacgctgtacgatactttaaccacgggggtctggcttcagagatcttggatctggcaggagggggcacgagcaatctccggtcgattcccattgattacaaacggaatctacacgctaataaaaaggaacaaaaggcaatagcccgctgtcccatgagattccctgtcattctggtgctggacaacgatgatggcctgaagacaatcagctctactatcaaagagatgtttaaggtggaatttgtagtgagttccgacgccgatttttaccatgtaacagataatctgtacgtcgtgaagacgccagagaacgggaataaaaacaccagcattgaggacctcttccccgataagtggcgaaacatggaactgagaggcaaaaaattcagctcagcaaataagattgacagtagcaaagagtacggcaaggaggtgtttgctaaatcagtcgttaagcccaacgcctgccagatagatttttcagctttcgatccccttctggaaagactgtgtaaggtgatcgaacatcactccggagcaagggcaagctga

SEQ ID NO: 8030 - RNA, 1707 nt, synthetic construct
  source 1..1707: mol_type = other RNA
atggcagagatactcgggtaccctccatctagcctgactgctattatatacaaaaccccgacagcatctaaatatactacgttcacagtggacaagaagagtggagggcagagaataatcagtgcccccatacctaagcttaaaaagctgcagagccacctgagccatgtgctgtatgagtgcctcgacgagatagagaagggccgggccgcatcaccaatatcgttcgggtttagggcaggacgctccattgccgaaaacgctgcaaagcacaagaggcgcagatgggtgctgaacatagatcttgaggacttttttccaagtttcaactttggccgagttaggggtttctttcttaaggaccagagcttctccctgcaccccgaagtggctacaactatcgctcagattgcctgcgacggtgtggcattgccgcaaggctcgccatgttccccgattatctccgaactgatctcacagatcctcgactccagattgttacggctagccaaaaaatacggcgtcacttacactagatacgcggacgatatcactttttccaccagcaagaaagagttcccagcgggacttgctacgcaagatgcgacagaccctaccctatggaatctgtccgatgagctcagcggaaagattacctcctcagggttcgtcgtaaataatagcaagaccaggatgcaatttcggggaagtcgtcagatggtgacaggactggtagtgaacgacaaggttaacattaggagtgattactacagacgggcaagggccatgtgtgactctttattcgaaaccggaaaatacttttcctctatggtccctcccgccaaggttggcgacgatgccgtgccaaaccgcaccgacaatctgaaccctttggagggtatcttgtcacacatctatcacattactcaagccgaggaacgcagagatgtgcaggaacagcggcagacgccacgagccatccgcaagttgtaccgcaggttcctgttctataagtattttatcgccctcaaggagccccttattgttacagagggcaaaaccgaccctgtctatcttcgagaagccgtgcgtagactgccccagtttcatcccgcattagggacacctggggctaagggattcaaacatgtgccgcggtactttggttatggaggtctggtcagcgaattgctcgatctcggcggtggcggcacctcaaatctgaagtcaattcctctcgattatcggcgtaatctgaatccaacgaaaaaagagcccaaggcttttgggtttagacctatgagcttccccgtcatcctggttctggataacgacgacggcctctctcctatcgcagggaccatcaagaagaccttcaacatccaaattagtcagtctagcacagaggacttctaccacatcatcggcaacttttacgtagtgaaaacacccgaaattctagccactggcaatccacctcagtcaacatatattgaacagttcttcccccagaaatggcgagattaccccctgaatggcaaaaagttttccaccaaaaacgagattgatatcaaccgcgagtatagtaaagaggtgtttgctaagtctgtcattaaaccaaatgctgcggccatcgatttctctgggttcattcccctgttaaagaggatcgaaaaagtaatgaagcatcatgctgcccagacttga

SEQ ID NO: 8031 - RNA, 1749 nt, synthetic construct
  source 1..1749: mol_type = other RNA
atgagccacctgaagaagctgaaggccgccacttcacgaaaggagttagctcaattcctcggttacaaaccttccagcctgactgccgttgtgtataagattgccaacgacgacaagtacaagatcttcgagatcgacaaaaagaccggaggtaagcggataatcaaggcacccataccaaaactcaagaagctccagagccatctgtccaacatgttgtatcagtgcctggaggaaattgagaaagacagacagctgaaaccaattagttttggtttccgtaaagaccggtcaattgcagacaacgccagcaagcataagcgacggaggtgggtgctgaacctcgacctggctgacttttttcccacttttaatttcggaagagtgaggggatttttcttaaaggaccatgcatttgagctgcatccagaagtagcgaccaccatcgctcagatcgcttgtgacgggacagccctgccgcaagggagtccatgcagccctgtgatatctgagctgatctgtcagattctcgacatgaggatgctaaggctagcaaagaaatatggcgttacctacagtcgctatgcagatgatattaccttcagcacaaaccagaaagagttccccaccggcttggcatctcaggacacaggggacttcaccatttggcacctgtccgaggaactcgtcggaaagattgagaatgcgggctttactgttaatgatgagaagacgaggatgcacttccggggttctaggcagactgtgacaggccttgtggtgaatgaaaaagtgcaagtcccatccgattaccatcgccgagccagggctatgtgccacgcgttgttcgagactgggaaatattacagatctgaagtggaatcagaagacgaggataaagaaggcgagcttgaaccagaactgattgacaatcttaaccctttagaaggcatactgtcgttcatctatagtgtagctaaacacggcgaccaccgccctatcgaagagcaacgaaagcaccccacggccatcgcccgtctttaccgcagattcctgttttacaagtacttcgtggccccaaagaagcctctcatcctgaccgaggggaagacagatccggtctatctgcgtgaggcagttaagcggcgggacagctttcacccaggactaggtaagccggaaaaggacgggtttaagcatgctgtccgctacttcaactatggaggattggctcatgatattatggggctgggcggtggcggaacatcaaatttgaagagtgttcctctcgattatgcccgcaatctttaccccaaaagaggaaagcccagagctataaaacacaggcccatgaaattccccgtggtcgtagtgctcgataatgacgatggcttgggacccctggcatccacaatcaaggataccttcggcgtgcggattactcagaaatctacagatgatttctaccacgtaaccgataacctgtatgtcgtcaaaacccctgaagatgccgacaaaaaaactttcatcgaggggctctttcctgagaaatggcttaaaaaggagctgaacggcaagtcatttaacgcggaaaacaagatcgatcccgacaaggaatacagcaaagaggtttttgccaaatctgtgatcaaaccaaatgctaaggatatcgacttttccgggtttgatcctctattagagagaattcagaaagccatacttgattaccagacgaaattgggctcctga

SEQ ID NO: 8032 - RNA, 1716 nt, synthetic construct
  source 1..1716: mol_type = other RNA
atgtctcagttggaaaaactgaaggctgccaaagatcgaaaggagttagccactgtgctgggctacaaaccatccgcactcacagcaatcatttatcaccctccagcaaaggaccgctacacaaactttgaaatcgacaaaaagagcgggggaaagcgcaccataaaagctcctgatgcaaagctcaagaagctccaaagccatctctcccacttattgtatgcatgtctggatgagatcgaaaaggagcgagatgctaagccactgagctttggcttcagacgggatagatggattgccgacaacgccaccaggcataaacgccgaaagtgggtgctaaaccttgacttagccgactatttcccttcattcaacttcggacgggtcagagggttctttctcaaagacaatagcttcgctctacagccagaagtcgctactaccatagcgcagattgcttgcgacgggactgctctgccgcaagggagtccctgctcacccatcatcgccgaactcattggccaagttctggatatgaggcttgtgcggctggccaagaaatacggtgtgacatactctcgctacgcggacgacataactttctccaccagtcagaaagactttcccgctggactggcctcccaggacccaacagatgcgaccatttggcacctatcagacgagttactgggcaaaattactgctagtgggttcgctgtcaatcccgccaaaacaagagtgcagtttcgggggtctaggcaaaccgtgacgggcctggtggtaaacgagaaggtgaacatacctagcgagtactatcgcaacgcaagggcaatgtgcgatgccctctttagcagcggccagtacttcacctccatgaaagcctctgcacccgagccagaccttacgagcaaccttaatcccctggaaggcgtgctcggccacatttatgcagttacccagacagaggaccggcgggacgtacgagagcagagaatcaaaccaagagccatcaggtcgctttaccgccgcttcctattctacaagtattttgtcgcgctgcaggcacctctgatcgtcactgaaggtaaaacggatcctgtgtatcttagggaggccgtcaaggcacgtacagcgttccaccccgtgctcggagccaagacagctggacgttttgaacatgctgttaggtacttcaactacggtggacttgcccatgagattctggatctgtcaggcgggggttccggaaatctcagatccatcccgctggactatcgtcggaattttcagcctagtaaaaatgatccgcgggccatagcacacacacccttggcgcacccagttatcttggtactggataacgatgacgggttggcttcggttgcctccacgatctgggataatttcaaagtgaagatcgatgtgaagactaccgcccatttttatcacattatccagaacttgtacgtggtcaaaacccctgaggccggaggtaagtctgctattgagtctctctttcctgacgtgtggctgaatattgagctgaacggcaagaagtttaattgtagcaacaccatcaaccccgaaactgagtatagtaaagaagttttcgcaaattctgtcgtaaagcccaatgccggtaatatagacttctcaggctttgatttgctgctggagagaattgtggccgctatcgaacatcacagggccaagtga

SEQ ID NO: 8033 - RNA, 1278 nt, synthetic construct
  source 1..1278: mol_type = other RNA
atgagccagttagaaaagttaaaagccacaacgtatcgaaaagaactcgctgcccttctgggctttaaaccccaggcactcaccagtatcgtgtacaaaacgcccctgagtgaacgatataccacttttgagatcgataagaagacaggaggcaagaggacgatcaaggcgccgtcaccaaagctcaagaagctgcaaacccatttaagccacctgctataccaatgcttggacgaaattgagaagcaacgcggagaacagccccttgctttcggctttcgcaggaagctttggatcgcagataacgcagctcggcacaaagggaggcggtgggtgctgaatttggacctcaaggacttctttccttcctttaatttcggccgcgtgcgtggattctttctcaaggataaatccttcgagctgaagcctgaagtggcaaccaccattgcccagatagcctgcgatggggtagctctgccacagggttctccctgcagccctgtgatatctgaaatgattactcggattcttgacatgcgtatggtcggcctggccaaaaaatacaaagtgacctactctagatacgccgatgacattaccttttccacaaaccataaaaacttcccggtggggatcgccgttccagatggggaggacgcgactaattggaacctctctaacgagctgctgggaaaaattacatcctgtggcttcgaggtcaactcagaaaagactcggatgcagttcgatggatccagacagatcgtcaccggcctgatcgtgaacgagaaagtgaatgtcgcaagtgaatattatcggcgcgccagggctatgtgtgattcactattctcaacaggcagctattttcgcagtatgaaggagcctaaggaagataatgacgagccaactccagacctgatcaatgggctaaatcctttgaacgggatattgggtcatatctacgctgttacagagactgaggagagaagagcgatctccgagcagcgcattaaacccagggcaattaggaagctttacaggcggtttctgttctacaagtacttcgtggcccttgaggtaccactcatcgttacagagggtaagaccgaccccgtctatctgagatcggctgtccgaagaagacccgactttcaccctgtgctggggaaaatgaagggagattctttcatacacgccgtgagctactttaactatggcggactggcccacgaagtactggacctcggtggcgggggagttggtaatttgaaaagctga

SEQ ID NO: 8034 - RNA, 1722 nt, synthetic construct
  source 1..1722: mol_type = other RNA
atgagctacctgagcaagctgaaggccgctcagtctaggaaggagcttgccgagattctcggttactcagcgcagtcattaaccgctatcgtctatcagacacctgataccagcaaatataccaccttcgagattcccaagcggtcaggcggcacacggactattaaagcccccattcccaagctgaaaaaactacagactcatttatcccacgcactgtatcaatcccttgatgaaatagagaacgggagagaggcacgacctctcagttttggcttccgcaaaggtcgctcgatttccgagaacgctagctgtcataaacggagacgttgggtgcttaacctggatctcgaagacttttttccctcattcaatttcggcagggttcgtggcttcttcttaaaagactcttcttttggcttgcacccagaggttgcaacaactatcgcccagattgcatgtgacggggtgagtcttccgcaaggtagtccctgcagtcctatcatatctgagctaatcggacacgtacttgacatgaggttagttcgcctggccaagaaatacaaggtcacctactctcgatacgccgacgacattactttctctacaagccagaaggacttccctgccggaatcgcactcccggatcctgcgaatagcgcaaattggatgctgtccgaagagttgctgtcaaaaatctctaattccgggttttccgtcaatcagtccaagactagaatgcattttcggggaagcaggcaaagtgtgacaggcctggtagttaatgaaaaagtgaatatccggtcggaatactatcggaacgctcgatccatgtgcttctccctgttcgccaacggcgtgtattataaaaagaacgcagccactggagaaagagagcctaccgacaaccccaatcccctggaggggatgctgagtcatatatactacgtcacccagtctagcgagaaaagagagattcaggagcaacgcattaatcccagagcctcgaggaaactgtaccggaggttcctgttttataaatacttcttgaggctcgacagaccgctcatcgtgaccgaaggaaaaacagatccaatatatctgaaggaagcgatcgagcggctagatgccttccacccagccttgggtcagaaacgcaacggccagttccaccacacggctcgctattttaattacaaggggaccgctcacgaaatcctcgacctcggtggaggaggaacagcaaatctcaagtccattccaatcgattatcgaaggaacctgatgccctacaagaaagaacctcgcgctataagccatcgaccaatgctgcaccctgtgattttgctcgtggataatgatgacggcctgggggctctggcttctactgtgaaggaaatgttcgggacaaacatcagtttgaagactacaaactcatactaccatattgtggagaatctctttcttgttaagaccccagagaacaacgaaaagaagacgtgcatcgaggatatgtttccactgagcgtattgaagagagagcttaatgggaagaagtttaaccctagcaaccagatcgatatcaccaaagaatactccaaggacatcttcgcgaaccatgtggtcaaagccgaagccgatacgattgactttagcggttttacgccactgctagaccgtatcaagaaggtcatagaggactataagatctcacacggctga

SEQ ID NO: 8035 - RNA, 1734 nt, synthetic construct
  source 1..1734: mol_type = other RNA
atgtcctatctggaaaagttgaaaaacgcaaagaaccgtaaagacctcgctcgccttctgggctttaagcccagcgccctgaccgcgattatttatatgatccccgtggaggaaaaatatactacctttgagatacccaagaaaagcggcggaacccggacaatcaaagcacccgcacctaaattgaaaaaactgcaaactcacctcgctcactggctgtacgagtgcttagccgaaatagaggaagggcgagactccacaccagtcgcctatgggtttaggaggaagggtactatcgccgccaatgcccacaaccataagcgcagacggtatgtcctcaacctggacctagaggacttcttcccaagcttcaacttcggtagggttcaggggttctttctgaaagacaaggccttcgagttaaacaaggaggtggctacaactattgcacagattgcttgtgatggcacagcattgccacagggctcgccatgtagtccagtaatctctgagttgattggacagatcttggatcttaggctgttaagattttcgaagaaacacggagtgcgttacagcagatacgctgacgacatcactttctccacaaaccagaaaaattttccagtggccctggctattcaggactctctcgatctctctaagtggacgctgggcgaagctttgatcaatgagatcgagcaagcaggttttaagatcaacgccaacaaaacccgaatgcattgccgaggctccagacaaatggtaacggggctcgttgtgaatgagaaggttaatatccgatcagattactaccgcaaggcaagggcaatgtgtgacagtcttttccagacgggaaaatactttaaaacactgaaggtgtctgacgatcccaaagaggagccccagcctgatttcaccagcaaccttaatccgctagagggtatcctgagccatatttatgacattacccagaaggaagatcggaggggtgtgtcagagcagagaaaggagccgcgggctattcgggctctctaccggagattcctcttttataagtattgcgtggcacctaaggccccacttatcgtgaccgagggcaaaactgacccagtgtacctacgcgaagcgatcaagtaccgtgactccttccatcctcgcctggggaagcccggcaagaatggctttgaattcgcggtcaagttcttcaattatggaggtcaggcccacgaagtaatggatctgggggggggaggatctggaaatctaaagtctatccctctggattatctcaggaacttagatgctacaaaaaaggggcggaaagctttcaagagcaagcctatggcctaccccgttattctcgtcctggataatgatgacggcctgagagacatagccggaactctgaagaccaacttcagcattagtataaaaaccaataccagctccgatttttaccacataaccgagaacctgtatcttattaagacacctgaaacttcaggccaatcatgcatagaagacatgtttcccgagaaatggaaagaaaagcctctgaagggcaaaaagtttaacccaaactccaaaatcgatcctcagaaggagtacggcaaagaagtttttgcgaattccgtcgtcaagccgaatgccaatgaaattgattttagtgggttcgaccccttgctttctcgcatcgtgagtgtgctggatgactacaaagccgcctcatga

SEQ ID NO: 8036 - RNA, 1728 nt, synthetic construct
  source 1..1728: mol_type = other RNA
atgagctatctgaagaagctgaagagcgctaaaaatcgcaaagccctggcctcaatacttggcttcacccccagcgcgcttacctcaatcgtgtatcaaaccccgctcgaaaagaagtatacgaccttcaagatcccgaaaaagtccggaggtgacaggatcattaaggctcctaaccctaagttgaagaagcttcaaacacacctcgcgcattgtctgtactcatgcttgtcggagatagaggaaggtcgcaatgccactccagtagcatacggatttagaaaagggggtaccatagccgccaatgcaaagaatcataaacggaggcgctacgtgctgaatctagacctggaggacttctttccgtccttcaatttcggccgggtcaggggcttccttctgaaagacaaagctttcaagctggaagaagaagtcgcaactacaattgctcaaattgcctgcgatggcgaagctttaccacaagggtccccatgttctcccgtgatttctgagctgatcgggcaggtcttagatctcagactcctacgatttgccaagaaacatggcgtgcgttactcccgatacgctgatgatctcacatttagtacgaaccagaaagatttccccccagatttcgctcagcaggacgcctctgatctttctaagtggaccctcggaaatgagttagtgcagaagatagagggagccggctttaaaatcaatgcagggaaaacccgcatgcagtgcaggggaagcagacagatggtgacgggtctggtcgttaacgagaaggctaacattaagtcagagtactatagaaatgccagagccatgtgcgatagcctgttccagactgggcagtactttaagactgtcatcagccccgacatccctaacgacaaacctatgcccgatcttactgacaacattaataggttggaagggattctcagtcacatctacgatgttacacaatctgaggaacggcggcctatcgcggatcagcgtaaggaaccccgagcaatcagactgctgtatcggcggttcatgttctacaaatactgcgtcgcaccaaaggttccccttatcatcaccgagggtaagacagacccagtctacttgagggaagccattagacaccgtaacagctatcatcctaggttgggcaacccgggcaaggacggctttgagttcgccgtacgcttttttaactacgtggggcaggcgcacgaaattatggacctggggggaggcaccggtgacctgaaatcgctgcccttggactatctgcgcaatctggacccaaatcggaaaggaaggaaacctttcaaacacaagcccatggcttgtccagtaatcttagtgctggataacgacgatggcctatccggagtggctggcacaatcaagaaaaacttcgatgtgacagttagtattaagactaccgatgacttttatcacattactgagaacctctacttgatcaaaacacctgaggccaagaagaagtcctgtattgaggatctgttcccccagcagctgaaggggactctcctcaacggcaaaaagttttccgcaaaggcaaaaattgacccacagaccgagtattctaaagagatctttgcaaatagcgtgatcaaacctaacgcctcaaaaatagactttagtggatttgaccctctgctcgaccgaatagtgtccgttctagatcattatagtccccagtga

SEQ ID NO: 8037 - RNA, 1737 nt, synthetic construct
  source 1..1737: mol_type = other RNA
atgaattatcgcgacaagcttaaagccgcaaaggacaggaaagacctggcacggctgctggggtacaagccatcagctcttacctcaatcatatatgtgactcctcctgagaggaagtacacaacatttgaaatcgccaaaaagtcaggggggatccggaccattaaggcacctaatccccagctgaaaaagcttcagtcccacctggctcattatctctatggctgcttagctgagatcgaggaagaaagacaggcacgtccggtgtcttacggcttccgcaaaactcgaactattgccagcaacgccaagaatcacaaacgccgtcgctacgtgctcaacattgacattgaggattttttcccatcctttaactttgggagagtgagaggattcttcctcaaagacaaagcttttgcccttaaagaacaagtggccaccactatcgctcagattgcctgtgatggggaagccttgccacaaggttctccctgtagccccgtgatttccgagctgataggccagatcctggatctacgacttctcaggatcgccaaaaagcatggcgttagatattctaggtatgctgacgacatcacatttagtacatcccagagggacttccctgaagccctcgccgtgcaagattcagagtctttatttggctgggcacccggcgcagaacttgtccacgagattcgaagggcgggcttcaaaattaaccccagcaaaacacggatgcattgtagaggtagtcgccaaatggtgaccggactggtagttaatgaaaaagtaaacattcggtccgagtactatcggaaggcgcgtgccatgtgcgattctttgttccagtcaggaacttactttcgcagctttaccccgccagtctccccgggagttgatccacagccagacctcacggtgaatttgaatccgttggaaggtatcctgtctcatatatacgccgtgacacagagcgaggacaggaggggcatcaaagaccagaggctcaagcctcgggcgatccgcacgctgtacagaaggttcttattctacaagtactgcatagcacttgatgctcctctcattattacagagggcaaaactgaccctatctatctgcgggaagcgattcggttcagagaaatctttcatcctcagttgggcgagcccggagagtcgggttttaaattcgccatccgtttcttcaattacacgggtcaggctcacgagatcatagatctgggaggggggaccggagacttaaaatcaattcccctggactacctgcggaatttcgatgctcgaaaacgaaagccatttcagcacgtcccaatggcctacccagtcatcctcgtgctggataatgataacggtttggagagtatcggaagtaccgtcagaaagaatttcggcattagcattacagttgacagtaccgacgatttctatcacataaccaagaacctgtatctcatcaagacccccgaaactaaggagcagtcgtgcatcgaggatctgttccctgcagagtggaagaacaagagactgaacgaaaagaagttcaacccctccgggagcattgatactcagaccgaatacggaaaaaagatgtttgcaaagtacgtcgtgcgccccaactcccacaagatcgactttagcggctttgatcctctactggagagaatagtagccgttctagaccactatagcgctgaggggaagcaatctctgtga

SEQ ID NO: 8038 - RNA, 1743 nt, synthetic construct
  source 1..1743: mol_type = other RNA
atgagccagttagaaaacctgcgaagtgcaaagaacagaaaagagctagcatctttactcggctttcagccatccgcccttacatcaataatctataaaactcccctggccgacaggtactcaaccttcgaaataccaaaaaagtccggggggactagaaccatcaaggcccctaatgataagctgaaaaagctccagaggcacttggcacacctgctatacaattgcctcgcggaaatcgaagacgagctgtccatcgcctccgtcagctacggattcaggcagaatggctcaataattgccaatgccaagaaccataagagaaggcgctacgtgctgaacatcgatatagagaactttttcccttcgtttcatttcggtcgcgtccgaggtttcttcctgaaaaacaaattctttgctcttgaggacgaggtggcaactacgatcgcccagatagcctgcgacggcgaagcattgccacaaggatcaccatgttcccccgtgatctccgagcttattgcaaatattctcgacttgcggctgctgcgtctggcgaaagagcacggggttagatacagtagatatgctgacgatcttaccttttctactaactccaagaagttccccgacgcgatcgccagcgaaggtgctttaggcaactggactctgggaaatgaacttgtcgaggagattgatgacgcgtggtttacaatcaaccacgcgaagacgcggatgcattgccgtgggaaccgccagcttgtcaccggcttagtggtgaatgagaaggccaatatcaaatctgagtattaccggaatgctcgagctatgtgtgattcactgttcacccaaggccggtattataaaagcaagacctctcccgaggacgctgatgccgtacctcagcccatctggacaagtaacctgaatcctctcgaggggatcctgagccatatttacgatgtgacccagagtgaggaacgcaggccagtccctgaacaacggaatgccccacgcgccatcagagctctttaccggagattcctcttctataaaaaatgtgtggctctgacggcacccttgatcattactgaaggcaagacagatcccatctatttgagagaggctattcgccacaggaacgtcttccagccggtgctgggcagtatgggcgatgaggcatttgagttcgccgtgaacttttttaactacgaaggatcctcacatgaactcatggacttggggggaggtagcggtgacttgaggtctattccactggactaccgccggaatctggctcccgccaaagaaaagaaacgtaaacctatgatccacacccccatgtcttatccagtaatactggtgctcgataatgatgacggactcagtgcagtcaccggaacaattaagaagaactttggggttcagattgataagacaacaaccgacgatttctaccaggtgatccaaaacctctatgtggttaaggttcctgaaaccacaagcgacgcacagattgagagcctattccctgactcagtacaatctattaagctgaatggcaaggcttttagcactaaagacaagatcgatcccgagaaagagtatagcaaggcaattttcgctaaatctgtagttaggcctaatgccgataagatcgatttttccgggtttgatccgctgctacaccgaatagtggccgctattgaccactacgacgccaacggaccgaaagccttttcgtga

SEQ ID NO: 8039 - RNA, 1719 nt, synthetic construct
  source 1..1719: mol_type = other RNA
atgtcatacctgaagaagctaaaagcagctaaagaccggaaagagctggccaaactgcttggctatgagccatctagtctgacagctattatttacatgacacctttgcctgccaagtacagcacatttgacatcccaaaaaagaatggcggggtcagaaccatcaaggctcccgaaccaaaacttaagaaactacaaacacacctcgctcacctcctccaggcctgcctggtcgagattgaggccgataagttgtcgaggcccgtgtccttcggtttccgcaagaagggtcggatcacagacaacgcgaaggttcacaaaggcagacgatatgtgctgaatatcgatttagccgacttcttccctagctttcattttgggcgcgtgcggggcttttttctcaaggacaaaaacttcgagttaagcgatcaggtagcaaccactattgcgcagatagcctgcgatggagctgccctccctcagggatcaccatgttcaccagtgatttcggaactgattggacatgtgctggacgtgcgactgttgcgcctgagtaagaaacatcacgttacatactctaggtacgcagacgatatcacattcagcaccaataacaaagccttccccacggcactagccagccaagacccagcggatcccgccaagtgggtgttgggagacgaacttatcaataaggttcaaaattccggtttccagatcaaccccgctaaaaccaggatgagttgtagagggtccagacagatggtgactggcctggtgataaattccaaggtcaacatcaagagtgagtattacagaaacgcacgcgcaatgtgtgattcactgtttcagaaggggtggtacttccgtgacagtacgccacctgtagaggacggagatccccccactcctaattatatcattagcctcagcccactggaagggattctgtcttttgcctacaatatcacacagtctgaagaccgcagagagatcgcggaacagcgaaagaagccccgtgcaattagagagttataccgtaggttcctcttttataagtactgcgtcgcaccatctcagccccttctcatcaccgaaggcaagaccgatcctatatacctgcgggaggctattatcaggaggacggcttatcatcctactctgggcacttttgggcccaccgggttcaagtttgccattcgatttttcaattacgagggacaggtgcatgagatcatggaccttgggggcgggactggcgatttaaaatccgttccgatggactatctgcgcaacttcaagccctatcggaaacggaaaccctttaagcacaaaccaatgcagcaccccgttataatcgtgcttgacaacgataaaggcctccaaggagtcgcctccttcctcaaggaaaatttcgataccattatttctctgaccaccaaaaataacttctatcacatcatcgagaacttgtacgtcattaagaccccggaatcatcccctatgacttgcatcgagagcatgttcccgaaaatatggctgaagcatagcctgaacggcaaaacttttaacccggataaaccagacatcaccaaggaatttggcaaagaaatattcgccaagtccgtggtcaagcctaatgctggttccatagatttttctggtttcgatcctttcttggacaggattatcgctgtatttaaccacttttatggatga

SEQ ID NO: 8040 - RNA, 1734 nt, synthetic construct
  source 1..1734: mol_type = other RNA
atgtcctatctagcaaagctgaaggccactaaagataggaaagatttggctcgcctgctgggatttactccctccgccatgaccagtattgtgtaccagacgatgcccgccgcaaagtataccgagttcgaaattccgaagaagtcagggggaaagagagttataaaggcgcccttccctaaactgaaaaagctgcagacccacctcgctcatgtgctctatggctgtttagcagaaatcgagcagaattttgatgcgaaaagcgtgagctacggctttcgaaagggacgtggaattgagggtaacgccaaaatccacaaaagaaagcggtttgtattgaacttggacctcgccgacttctttccaacttttaattttggccgggtcagaggatttttcctgaaggacaccagctttgccctcactaatgaagtcgccaccaccatcgcccagatcgcatgtgacggcgtggcgcttccacagggctcaccatgctctccagttatcagtgagctgatttgccacatactagatgtgaggctgcttcgtttggccaggacgtatggcctccgctacagtcggtacgccgatgacattaccttcagcactaatcgccgggagttcccagcggacattgctagggtcaaccagaccgacccttctacttgggtcattgggaaggagttggcaagtcggatcgatgactgtggctttgcaattaactttaccaaaactcgaatgcactgcagaggctcaagacagatggtaacaggtttgattgtgaacgaaaaggtaaacatccggtccgaatattatcgaaacgcccgagccatgtgcgactctgtgttcaggcagggtgcctatttccatagccaccaaacacccactgtggctgggggaacccccataccagaaatgacagataatctcgcccctctggaaggcatactcaatcacatttactctgtgacacagaccgaggagagacgctccgtgcaagaccaacgatccgcaccccgcgctattcgctccctgtaccggaggttcctgttctacaaaaggttcattgctctcgaggctcctcttattgtgacagaggggaaaacggatcccgtatacctaagagaggccatcaggcatctgccttcctggcagcctagattaggggagcctacagtcaatgggttcaagttttccctgtctttcttcaactacggagggaagagtcacgagatcatggacctgggtggtggaactggcgatctgaaatctataccccttgattatttacgcaatctcgattcgtctaagagcgaccggaaaccaatgcaacataagccaatgaaatttcctgtgatcatggttctggacaacgatgatggccttggggacgtggcaggtacaatcaagaaaaacttcaatgtggggatgtcggtcacctcaacacaggacttttaccacgtgtgtgaaaacctgtacgtcgttaagacacctgaagcaggcggaaaatcctctatggaaagtatgttcccaaagtcatggaccaccatcgttcttaacggaaagaagttcaatccgagcaacaagatagacatcacgaaggaatacgggaaagaggtcttcgctacatcagtcgttaaagctaatgctgctaagatcgactttagcggctttaatcccctgttagatcgtatcgtgaaagtgatcgatcattatgcccccccggcgagctga

SEQ ID NO: 8041 - RNA, 2025 nt, synthetic construct
  source 1..2025: mol_type = other RNA
atgtccattctccataccttgcggacagccaagacccgttatgacgtggccgcactactcggctataagccctctgccttgagctatatcgtttttcagatcccgacggccgaaaagtacaaaacgttcgagattaagaagaaaggcggcggaaaacgacggattgacgctcctatcccaatgctgaagggattgcagaggaggctcgctgacgtcctgtacgagtgcctccgcgaattagaggaaccagagaagaggaaaaataagctgtctcacgctttccggaaagactatagtatcatcacaaacgccaaggcacacaaatcacggcggtacgtcttgaaccttgacctgcaaaactttttcccatctctgaacttcggtagagtccgcggtttcttcctgaagaacaaccagtttaagctggcagaacccgtagccaccattttagctcagatcgcctgtaatgatggggtgcttccccaaggaagtccttgttcaccaatactgtcggagctgcttactcattttctggatattagactggtcaagttagctgcaaagaatcagtgcagctacactcgatatgccgatgatatcacgttttccaccaatcagaaggaatttccagttgctcttgcagtagcagttggcgagggctggatcctgggagacgaagtaaagtcccggatcgagggggccgggtttaccattaatgacactaagactcgaatgcaagtgcgtggctcccgccagacagttactggtttgacagttaacgagaaggtgaacgtcccccaacgctactgtaaactcgcccgcgccatgacacattcgttccttgccaccggagcctataagagagacggcgtagatgattctagcgtgcctcgcctcgaaggggtgctggatcacatctaccatatcaaagagcgacagatagacattgcgatcgacgccgagaaaaataaagagaagcggcacaagctgcatgctgataggaccaaacacaaaaacgaatacccctcagctataaggctgatctacttccagcttgtgttcttcaaacacttcattgatccatctaaacccttgattatctgtgagggacctacagactctatctatcttaaatcagccattcgcaaactggcggctctccatccaaaactggcgagtaccaaggacggaaaactatccctagacattcacttcttcaaatactcaaagcagtctaaagacctgctgcagctgagaggaggtagcccggatttgaagtttttcctggaggcgtggcgcgacaagctcgcaaagtttaagcacaggcccatgaagcaccctgtcatcgtgctgattgataacgatgatggcgctacccagatctttaagcttgcccagtccaagaaattcggtgtgacaattggccacgctaccgacctgccgttttaccacctcggcggacatttatatctggtgaaaacccccataaaggggcctgataataagtcttgcccagaagactttagcacgaggccttgctggcagcctagaagcactgcccgtcctctgataccgacccggtctaccacacggcttgcgtcgagcgaacgtagttccctacagtccgtgtcatgcgggaggagaagggccgccagcacatcacaagccctcattcccttctctctggcactcactccctacagtatgataactcccaacgcaggcttaagggctcaacggccccgccaccgtagacgaagccaaaggtgccggcatcggcagcgcaggagtgctagacgacagccaccaccctggcctcgccctaatgtcgggtgtgcaagccagtcaatcgatctcgggagaaacagagcaggcggtggagctgcggggagagtgaatcctgtgcaggactccagcagagaagccagtatgttgtttccaaatctcaatacagcattgatggagagcaaaatgaaacgagcctccgcttttagtaaaaagactctatcctgggcaagactgtga

SEQ ID NO: 8042 - RNA, 1824 nt, synthetic construct
  source 1..1824: mol_type = other RNA
atgtccatactccaatccttaagggcggccaagacaagatacgatctggccgcactgctgggttattctccatccggcctgtcctttatagtgtatcagatccccaaggctgccaagtacaccacctttgacgtgaagaagaaagatggcggacagcgacgcatagacgctcctattccaatgcttaaggcgctgcagaaacgactggccgggatcctgtacgagtgtctacgagagcttgaagagtcagacaagcgccgaaataacttatcacatgcatttcgcaagaaccgttctattattacaaacgccatggcgcatcggagcagaagatatgtgctaaacctggacttgcagaactttttcccgtcactgaattttggtcgcgtgcgcggcttcttccttaataacaaccagtttaagcttgccgaacctgtcgctactactctcgctcagatcgcctgcaatgatggagtgctgcctcaggggtcaccatgttccccaattctcagtgagctgctcacacacttcctggacatgcggatggtgaagctggcaactaaaagcaggtgcagttatacccggtacgcggatgacatcacctttagcacgaatttgaaagcattccccgctagtctggctgtagctgtggggtccggctgggcattgggagatgaactgaagagcagaatagagagtgccggttttacaatcaacgaggcaaagacgcggatgcaggtccgtggctctcgacagacggtcactgggttaaccgttaatgagaaagttaacattccacagagctactataagctggccagagcgatgaccaatagccttctcacaaccggcacgtacaagcgggatggcgttaatgacagttctgtccagagattagagggggtactcaaccatatctaccatatcaaagaaaggcagatcgacctggccatcgatgccgaaaagaataaggaaaaaagacacgctctccacgccgaaaggacaacccaaaagaatgagtacccctctgccattaggctcatttacttccagctggtcttctttaaacatttcattgacctggcgaaaccactgatcttatgcgaggggcctacagactcagtgtatctgaagagcgccattcggaaacaggctgctcttcaccccaaactcatatcgaccaaagacggtaagactagccttaacgtacacttctttaagtattccaaacaatccaaggatctcctccagttgcgcggtggctctccggatctgaaatttttcctagaagcctggaaggaaacattggttaagtttaaacacagacctatgaagcatcccgttattgtccttatcgataacgatgatggggccacccaaatattcaagctgttgcagtcgaagaagttcggcgtcactatcggactggccactgacctccccttctaccacctaggcgagaacctgtacctagtgaaaaccccgattcggggccccgacaataaatcatgtccagaggacttcttcgatccagccgtgctgagtactaaaattgacggaaaaacctttaaccccaataaagaacacgacgccccaggagagttcggcaaagtggtgttcgctgagcgcatcgtacgtccccaagccgggacaatcgattttagcgggtttgatcctttgttggccaggatcgacgccgtgctcgacgattatgctaagaggacagctcctggacctgccgctgctccttctcctcccgcagcaggagcagcaccgaaaatgaagaagaggccacgggcagcaactgctgccgcacaaccctga

SEQ ID NO: 8043 - RNA, 1734 nt, synthetic construct
  source 1..1734: mol_type = other RNA
atgagcgccctacaggccttgcggagtgccagaaaccgttacgatgtcgccgcaatcctagggtacaagcccagtgctttaagctatattgtcttccaaattccaaccgcgaataagtacaccgtattcgaaatagacaaaaagggcggaggtcaacgcagaatcgacgcgcccatcgagaagctgaaaggactccaacggaggctggccgacaccctgtatgagtgtttaagggaactggagagcaccgacaaggtgaagaacaagctgtctcatgctttccgcgaagatttttctattattaccaacgctaaggcccacagagctagaaggttcgtgttgaacctggacctgtccgacttttttccctcgctgaactttggccgcgtgcgcggtttcttcatgcgtaatcgatccttccgcttggctgaacctgtcgctaccatcattgcccagatcgcatgtaataatggagttctgccacagggctcccctgcaagccccatcatttccgagttgatgacacacttcctggacattcgccttgtaaggcttgcagccagaaatcggtgctcatacactcgatacgcagacgatatcactttttccactaatctggaggagtttccggcagcgcttgcgacggctgagggtcaatcatggaaactgtctgacgaactgcggtctaggattagagatgccggctttgagattaatgatgcgaaaacgagaatgcaggtccggggctctcggcaaaccgttacaggcctgactgtgaatgagaaggttaacgtccagcagtactattacaagtcggcaagggcgatgactcacgcttttatcaccaccggaaagtatattcgtaacggcgacgaagagacgagtgtgcagagactcgaaggaatactcaaccatatctatcacatcaaggaacgcctgatcgacatcgggatagaggctcaggaaaacgatgaaaagcgccataaactccatgccgatcgcacaaaacagaagaatgagtatccttccgccatccggttgctctactatcagctggtgttcttcaaacactttgtggatcccagcaggcccctcatcgtgtgtgaggggccaacagacccagtctaccttaaatgcgcccttcggtcactggctacttcccatcctaaattggcaaccgccgtggatggcaaaattagcctcgccgtgaacttcttcaagtactcagatcagtcaagagatctgctgcagttacggggaggcgcccctgacctcaaatttttccttcagacatggaaagataagctcgcaaagtataagcacaggccaatgaaacacccggtgataattttaatcgacaatgacgacggcgccacagagatttttaaactcttgcagagtaggaagaaattcgggatcgatatttcccatgccaccgatctgccgttctatcacctagggaaccatctatacctgataaagacaccaatcaacggtcccaacaataagagctgcccagaagactttttcgagacatctgtaagggaaactccaatagatgggaaaagatttaaccctgataaggagcacgaggcacctggggagtatggaaaggtggtgtttgctgagcgagtcgttcgaccccaggccgctaatatcgactttagtcgattcgaccctatccttgcacgtatagaagctgttattgatgactacgccgcccggaaaagctga

SEQ ID NO: 8044 - RNA, 1806 nt, synthetic construct
  source 1..1806: mol_type = other RNA
atgagtagcctccacgctttacgtgcagcgactacccgcaatgacctggctgtccttctggggtacaaaccctccgccctgtcctttattgtatacttaacacctcctacggccaagtacaccaccttcgatatcgccaaaaagggcggaggcacacgcaggattgatgccccaacccccaggctcaagggccttcagaagaggctggcagatctgctgtatgaatgcctgcgtgagatagaggaaagtgaaccaaggaaaaacaagctgtctcatgcttaccggaaacaattttcaatcatcactaacgccaagagccataaatcacgacggtatgtcctgaatctcgatctcgagggattctttccgagccttaacttcgggcgggttcgcgggttctttctgaccaacaatcactttaagctcgcccgccctattgcgaccctaattgcacaaattgcctgtaacaatggtacactcccccagggctccccttgctcccctatcatttcagagctgcttacgcacttcttagacatgagattggtgagattggccggccgtaacaaatgttcttacacacggtacgctgacgatattacttttagcaccaaccagaaagagttcccagaggctctggctgtggctgtagcggagggatggagcctgggagacgaactaaggtcgcggatcgaagatgccgggttttcaatcaacgaatcaaagactagaatgcaggtccgcggatcttgtcagacagtcacgggcctcacagtcaatgagaaagtcaatgtgccacagcgctactacaaactggccagagctatgacccactctttgctgtccacaggttcttatctaagagacgggatctctgaaaccagtgtccaaaggttggagggaattctggactacatatataacatacgcgagcggcagatcgatatagccttgtccgccgagaaggacgctgctaaaaggaagaaactgctgagcgatcgggtagaacacactaacgagtacccttccgcaatccgaaaaatctattatcgactcgtgttcttcaagcacttcgtagaccccaccaaacccttgatcatctgcgagggtccaactgaccccgtgtacctgaaatcggcgatccgacgactggccagcgcacatcccaagttaaccagcgtgagagggagtgacatccttctgaatgtggcttttttcaagtactccaagcagtctcgggatctgctccaaatgcgggggggaagtggcgacttgaagtattttttggagggctggaaagaggaattagccagacataagcatcgcccaatgaagcacccgattattgttctgatcgataatgacgatggcgcgaagtcaatttttggaattctcaggggcaagttcggtcagtccatcgggctcgccactgatcttcctttttatcatctggatggcccactctaccttgttaagaccccgacgaggggtgcagaccacaagagttgccctgaggactttttcgaaagccatgtgctagcaaccaaggttgacggcaaaatctttaatccagacaaggagcacgacgcacccggggaatatggaaaggtgattttcgctgaaaaagtgatcagacccctggcaggtagcattgatttctctggcttcgagccgctcctggctagaatagaggccgtgatagaagattattccaaaagaactgccacacgtccacccccacctcttgcagccgttcgccctacagcatcacgggctaagagggccgtggtggccgcaaaaccctga

SEQ ID NO: 8045 - RNA, 1731 nt, synthetic construct
  source 1..1731: mol_type = other RNA
atggctgctttactctcctactcaccgtccgcggtgtcatatatcatccatatcactaggcctgccactcgatatatgacatttgatattcctaagcgcagcggtggggtgcgcacaattgacgcccccaatgaccgactgaaaggcttgcaacggagcctatcgaaactgttgtttaaatgccttcgggagatagaagctaaggatcctcgtagaaataaactgtcacacgcctttaggcctggagcctctattatctctaacgccaaaacccaccacagacggcggtacgttctgaatctcgatctcaaggacttcttcccggcttttaattttggcagagtacgcggcttttttctcaagaatgagcactttagattggcagagccggtcgctaccttgctcgcccagatcgcctgcaaggacggtaagctgccacagggctccccatgcagcccaattataaccgaactgatgacccactttttggatattagattggtgaagctagccgccaggcataaatgtacttatacgagatacgctgacgatatcacaatcagtactaaccaaagggagttcccgtcagccttagccgagctggatggcactcagtggaaactcggggaggaactggtcagccgcattcacgacgctggcttcgaagtgaatgatgcaaagacgaggatgcagttacgtggctctcgtcagatggtgaccggattaaccgttaacgagaaagttaatgtcgcccaagcttattacaaacgggtgcgcgccaccgctcatcggttcttgaccacaggcgcctatgaactagatggagccacatgtaactctgtgcctcggctggaaggtatgatcaaccacatataccatgtccgggagcgacagattgatatagcaatcgcgaacgaaggcaacaaggagaagcaacacaaactgcatgccgaacgcacgaagaccaagaacgagcgcccttctgctattagggtggtttattacgaactgatcttcttcaagaactttatcaatcccccccagccactcataatctgtgagggcccaacagatccagtgtacctcaaaagtgctatcagaagactggctgcagcacatcccctgctggccagtgtcgtaggggggaaacccgagcttaaagtcaattttttcaagtactccgaccaggcaagggatttcctgcagcttcggggaggtagtggggaccttctgtccttcctgattagctggaaagaggcgttcaatagatacaatttccgccccgcggaacaccccgtgatagtcctcattgacaatgacgatggagcgggggacatctttaactacctcaagaacaagaagaactatggactggacattgcccttgaaaagcatgaccctttttttcaccttcacggaagcttatacctggtgaagacacccgccctgggcgcaaaccataaaagctgccctgaagactttttcgaccctgccctacttgccgaaaagctcgacgggaagtccttcaataaagagaacaagatcaatccagcaactgagtatgggaaagcggtgttcgctaccagggtagtgcgtcccaaggccggtgccatcaacttcgctggattcactcccctgctggagcgaattgaggcagtaattagggattatgctgcacgaaaagcagctgccgccgcaccagttccagcagctgctgcacctacaccctga

SEQ ID NO: 8046 - RNA, 1707 nt, synthetic construct
  source 1..1707: mol_type = other RNA
atggcccatctgctgggctatcaacccagtgggctgagctacctgttatacaagctgccggtaggggctaaatacacgacattcacaatccctaagaagagtggtggagtacggcaaattgacgcacctgcaccccgaatcaagcgcttgcaaagggagctggcgaagattttgtataaatgtatcgccgaaatcgaagctcagcccggtagaaagaataccttgtctcacgcctttcgatatggacacagcatcctgacaaatgcgaaagcccataggaaaagacgctacgtgttaaacttagatctgcaggatttttttcctaccctaaacttcggtcgggtccgtggttacttcctgaaaaatagagacttcctcctgtccgaaaaggccggaacgctcattgctcagattgcatgccacgagcaaaccctaccccaggggtcgccatgcagtccagtgatctccgaactgctggcccacttcctggatatcagactggccacccttgccaagaaacatcggtgtacatataccaggtatgcggatgatttgaccttttcaacaaaccagaaagacttcccagctgcgcttgcagtggagacagaggctggctggatcctcggagatggcatagtccagaagatccagagcgcccacttcacaatccacccttccaagacccggatgcagctacgggctcgtaggcaaaccgtcacaggactggtggtgaatgaaaaaacgaacgtcagatcagattattacaaaactgctagggccatggttgacagcctgttccggactggaacttacgtgattgacggggctcccgaaactgccttggcccctattgaggggattcttaaccatatttaccacgttagggaatcggtgatcgatgcagccatcgaggccgagctcgatcccgaacgtaagaaaaagagaaagagcgaacgagcgaaggccaaacgggagactccaagcgctattagagttctgtatcaccgcctgttattctataaacacttcatagccccctctcagccggtgcttttaggcgagggtcctactgactccatctacatcaagaccgctatccgccgcttgccagcttatcacgccgcactgacagagcttaagcagggcaagcaggtccagaggctcgacttttttcgatactccaagcaggctaaagaaatcctgcagctcggaggggggacgggggatttcaaatatctcttgaccgcctacaagaagttcgccccacagtacaagcacgcccctatggctcatcctgtaatactcctcattgataacgactctggctccaatccagtgttctctgtgatggcatcactgtttcatgtaacagcctctataaagactgaccttccattttacaagcttgcatctaacctatatgtggtgaagagtccccctgtggagctcgatggctcctcatacattgagcagttctttgacccggcactcctgaccactaccatcgacggcaaaaccttcaatcccaataaggagcatgaggcagcaggcgagtacggcaaagtctggtttgctgagaaagttatacgccccaacgaagcgaatattgactttactaactttggcccaattttggcaaggatagctgcagtcctggaagaccatgccgctagcaaagcggcagttctcccgcaagccgcccagtga

SEQ ID NO: 8047 - RNA, 1788 nt, synthetic construct
  source 1..1788: mol_type = other RNA
atgtcgaaactatccttgttgaagtccgccagctccttatcagatgtggcagacctcttgggtttttccccctccgggctgagtttcgtgctctacaagcagtccgcgctcgcaaagtacaagaaattcgagattcacaagaaaacagggggaacacgcgatatttgcgctcccataggagccatgaaagccatccagagggagctggccactgtgctcaacgcctgtagagctgaaatcctcgaagcaactccccggaggcccctctcccatggtttcagagagtctttgagcatcatcacaaatgctcagaaccacaccgcccgacggcacgttctgaatgtggatctggcggacttctttccgacgtttaattttggacgcgtacggggctttttcctgaaggacaaagacttctttcttaacgaaaaggccgccactgtgctagctcagatagcatgttttgagaatacgcttccccagggctcaccatgtagtcctgtgattgccgacatgatcgcccacgtgctggatgtgcgattggtgggcttggcaaaaaagaaccgcgtgacctatagtaggtatgctgatgatttgactttcagcaccaatcagaaggactttccggaagaccttgcaaagcctggagccggccctgccgatccatggatcgtcggagatgaactcctgaaaaagatcgagggagctgccttcaaagtgaaccctactaagaccagaatgcaatttagagggagccgtcaggtggttactggactcacagtgaacacaaaggtgaatattagtcagcgctattggcgttctatccggagcatgtgtcacgcactattccaaaaaggggagtaccaccaccccgccccaaaagcaggaactcccccagggtcagctctggtcatgatcaatagcctggaaccactggctggcatgttgtctcatgcatatcacgttaaaagaaagtctctgcggtttccggacgagaaaaaggaggacgttgtcttcggtcaaacagaccatcgtcgattctggttttacaaagcttttgtagcccctacaaggcccctgatcgtgtgcgaagggcccactgacaacatttaccttagaaacgcaattcggaggctgacagcctatcatcctaagctggggaacatgaccccgcatgggttcaaatatggagttgcactattctcgtacaccaatcaaatacacaaaattctgggcatctctggtggaatcggccccctgctcaccctcgttcatgggtataagaagcagctgaaggagtacaaattccgcccaatggcgcacccagtaatcgtactggtcgataatgacaccgcactgggccagaaagtctgcaattcactgaagaaacactttggtgtcgatgtcacgcaccatagcccttcatcttttttccacctgaccgacaatttatacctggtaaaaactccattagtcgggatactggccatgacctgcatagaagacttatttgacgccgctacaaaagccatgcctttagatggcaagacctttcatacggagaaggcaggcttcgaccctaccaagcacattggcaaggcgccattcgctactaaggttgtgtctcccaacgccgccgctattagctggaacggcttcgtccctctgcttgataggattgtggctgtgcagaacgattactccgcgaagcttggcaccacacctctcgccgctctccctcataccccaacacttgcgccccttagtcccgctgccggtcatccatga

SEQ ID NO: 8048 - RNA, 1665 nt, synthetic construct
  source 1..1665: mol_type = other RNA
atgtcctttgtcctgtataagcagcatcctgccctcaagtacgccaagttcgaaatccccaaaaaagatggggggacccgggaaatttgtgcaccgctgggaccattaaaagccatacagcgcgagctggctaccctccttaacgagtgtagggccgagattctggaagcgacaaagcgtgcgcctctcagccatggattccgagaagacctaagtatcgtcacaaacgcccataatcacaccgctagacgatacgttctcaatgttgatctcgcggacttcttccccacatttaattttggcagagtgcggggtttttttttgaaggataaggacttcgagttgcatgagaaagtggcaaccgtgcttgcccagatcgcatgcttcgaaaacagtctaccacagggatctccctgctctccggtcatagcggatatgattgcccatgtgctggacgctcgactggtaggtctagctaaaaaggcgaaagtaacttactctagatacgccgacgacctgtcatttagcacaaaccagaaatccttccccgagggactggcaaaacccagcgcagttggcagtggtgtgtgggtcgcaggggacgaccttgttaagaaaatcgaagcctcagggtttaagttgaatccagccaagaccaggatgcagttccggggcagcaggcaagtggtgactgggctgactgttaatgccaaagttaatgtctcgcagaagtactggagaggaataaggtctatgtgccgggccttgtataccactggagcataccacctacctagccctaaagccggcgctcctgctggtgatcctcctgaaaaaattgcttccctgcgtgtgctcgccggcatgttgtcgcacgtgtatcacgttaagagagagtccggattcgctccagatggcgagaaagaagagattgtgttcggccatacagatcatgaaagattttggttcttcaggagctttgtggccttagacaggcccctgattctgtgtgaaggcgtcactgacaacgtctatctgcggaatgccatgcgccaaaaggcagctgcgtttccacaactggccgcgaagacaccggaggggtataagttcgccgtggccctgttctcttacgacaatctcattcacaagatccttggaatcacgggcggcattggccccgtgctcaagctgatccacggctaccgtcgccgcctgaaagcttttaagtatcgcccattcttacacccagtgatcgtcgtggtagacaacgataccgccctgaacgcaaagacatgtaacgctcttaagaaacattttggagtcgatataacacacggctcagccgatgactttttttatctcaccaacaatctctacctggtgaaaactccccttgtcggtaccaaggcaatgacttgcatcgaggatttgttcgatgatgccactttgaaaaaggacctggacggtaaggtgttccacaccgagaaagaggggtttgacgcttccaagcacattgggaaaaagctcttcgccaccaaggtgatcgcacccgaggctgctacgatcagctgggacgggtttgaacctctgttagcacgggtagctgcagtacttaacgcatacgccgccaaagtggcagctgatgcttcatccagtacaacgtga

SEQ ID NO: 8049 - RNA, 1650 nt, synthetic construct
  source 1..1650: mol_type = other RNA
atggcaggattgctggatgtcgaacctcggcagctgtcatttgcactgtacaagctaactcctcagcagaagtatgacacatttgagatccccaaaaaagggggcggagtgagaaccatccacgctcctcgcggggtgctgaaggacatccaggcgcgactcgcggcactgctgtacgactgtgtggacgaaatccaggttgcgaagccgcgtagaccagtcagtcatgggttccgccggtcgctgtctatcataacaaatgccgccaggcataccaacaggcggtatgtatttaacctagatctcgaggacttcttccctacatttaattttgggcgagtgcggggcttcttcctgaaggaccaggattttcttctgtctgagaaagccgccactttgattgctcagatcgcctgcagggacggagcacttccacagggctccccatgctctccaatcattgcagatctcatagcccacatcttggatgtgaggctcttgtccctcgccaagacttccaaagtcacctattcccggtatgccgacgacttgaccttttcgacaaaccagaagatttttcccccagccattgctactggtggggctggccccgaagatgcatgggttattggatcaccccttgcccgtgttattgaaagagcggggttttctataaacacacgcaagacccgaatgcaagaacgggcttcccgtcagctcgtgaccggccttaccgtgaatagcaaggtcaacgttactcaaagctattggagaagcatcagaagtatgtgccattctctgttccagaccggtgcctactatcgaccgatccggactggggagcctccaacactgttaatgtccctcagcccgcttgcgggaatgctgagccatgtgcaccatgtgaagagggaatcaggagttcgacctgatcgcccgggcaaggactttcaattcggtcacaaagaacaggaggatttctggttttatgcaacctttatcgcccttacacaaccactgatcgtcaccgagggaaaaactgacggcgtctaccttcggaatgccataagaaatttgcccgccttccacccagctttaggtcacattaccccagagggtttcagctttggcgttcgcatcttcaattatgagaaccaaacgcaccagagactgcgcatcacgggcgggataggccctctcagtaccttcatgatccactacggcgcaaggttgaaaagatacgggcacaggcctctagccgctcccgtcatagtactgattgacaacgacaccgcactcacaaaggagctacgcgctgcactggatcggaattacggtgtgaaggtggacctgttaacgcctgcatcattttaccacctgacagacaacctctacctggtgaaaacgcccgagttaggagcctccggcgtgagctgtattgaagacttcttcgataccgcaacaagaaagctgcccctcgatgggaagactttccatgccgatggcaaaggctttgatcctacaaggcacattggaaagagtcccttcgctaaaaaaattgtggctccccgcgccgccactattgattggactggattcgcccccctgctgtctaggatcgctgctgtagtagctcattacaaacattga

SEQ ID NO: 8050 - RNA, 1719 nt, synthetic construct
  source 1..1719: mol_type = other RNA
atgaccattctgaagaagctccaagatgccaaggatcttgaagacctggccaagattctcggtttcagccctaagggaatctcatacatcatttacaaactcgaggagaattccaagtacaaaaagttcaagatcaagaagagccacgggggggagagggagatttgtgcccctatagagccattgaagactctgcagcgccggctggcaaacgttttgtacgcaagcgtagattccattgaagccgaaaaggggatcaactccacatcccatgggtttagacgcggccattccatcatctcaaatgccagaaagcacaaacgtaggagatatgtactaaatctggatctgaaggacttttttccaactttcaattttgggcgggtgcgaggcttttttatcagtgacaatcgatttggctttcacgagaatgtggcgacgttgatttctcagattgcttgccacgaaaacagtttgccccagggtagcccttgcagtcccatcatcgctgatctgatagcgaacattttggatgctcggctcgtgaggttagccaaagaccacaaagtcacatactcgcgatatgctgatgacatcaccttttctacctccctaaaaaaattcccagcggcacttgctcagcccgttgctggcgaaggtcctgattggaagctcgcagacccgctgaccaaagctatcgagggagctggcttcaaaataaacccagacaagactagaatgcagtttcgtgacggcagacaactggtgacaggcctgaccgtcaatgacaaagttaacattaggcctgaatactatcggtacgcgcggtctatgtgccaccaggccttcaaatcaggaaagtattacaggccatctaaagtctctgtggtgggagagaaagagcctgagatgatagaaagtcttaacccgctagaagggatcttgtcacatattcaccatgtgaaagatacaatcgatgtccgcattgagcccgaaaagcggaggcatggaactgccgcccgccaactgtatcgccgcttccttatcttcaagaagttcgtttgcctcgatcagcctctggtgatatgtgaggggaagactgactctatttatctgaagtgcgcactgaggaaattaaccccatccttccccgagttagccaaaataaaggacgagaagtttacaagcaaaatctcattcttcaactacacgggcagagtacactctgtgctcgaacttggtggcgggaccgaggatctgaagtttttcttcattaagactcggtaccacgaaattattaatcgtttcggccacaagcccctgcaacatcccgtgatcgtgctcatcgataacgacgatggcgccaaaggactcttcaaaaccataaagcagaatttcggaatcaccatcgatctacagagcgacgacaagttttaccatattacagacaacctgtatctggtaaagacaatcgagaaaggcgagtccggtaagagttgtatcgaagattgtttcgaaccatcgttacttgagacgaaagtcaaaggaaaaaaattcaacagcctgaagtatgggggagcaagcggtggatatggcaagtttgtttttgccgagcaggtcgtccgaccgaatgctgacaaaatcgactttaacgggtttaagcctctgctcgaaaggattactgccgcaatagtggactacaaaagcagagtgccctga

SEQ ID NO: 8051 - RNA, 1692 nt, synthetic construct
  source 1..1692: mol_type = other RNA
atggcttatatattgtacaagatacctgacagtgccaaataccagaaatttactatccctaagtccggaggcggagagcgcgaaatttgcgcccccgttgaacggttgaaaacactgcaaagacacctggctaacgctttgtatgcttgccgggatgagattgatagggaatctggacttcgccctctttctcatgcatttaggcgtaccgtcatcgttaccaacgaccgaaggcataagctttcaatcatcacaaacgcgagaagacacaaacgacagcggtatgtgctaaatctggacctccaggatttttttcccactttcaatttcggcagggtaagaggctttttcattcacaataacgacttcaagcttaacgacaaagtcgccacgatcattgctcaaattgcttgctttgagaatgcgctacctcaggggtcaccatgtagcccaattgtggcagacttaatagcccatctgctggacgtcaggttggcgcagctcgctaaaaagcatcagctcacctactcacgatatgctgacgatctgacattctcaacctccagaagagactttccgccttcgatcgcagcgccagttacacccgagagccctgagtgggctcctggacgtgaactcgccaaggtgatcgataaaagtggcttcgtgataaatcccaccaaaacccgcatgcagttcaggatgtctcggcaactggtgactggcctcacagtgaatgccaaggtgaacattaggccggagtattatcggcgggccagagccatgtgccactccctttttgaaacaggccagtactaccgtcctctcagtgtaccggaaaccgaggccgaagatggggaggatgtcaaacttgaacccgtgacaagcctgaatccactgcaaggaatcctgagtcacatccaccacgtgaaggacgcaattgatgatcgccccgagccagagaaacgcatggatgcaactgccgctcggaagctgtatgcccgcttcctgaagtacagatacttcgtgcgcctggacagaccactgatcgtctgtgagggtaagaccgacaacatatatttaaaacacgcaatacggcagctgactgactttcaccccaagttaggtgaatgggaggataatagcttcaagtctgctatcaggttttttaactacacgggccaggcccataaactgctcgagttgggcggaggcgcctccgatttgaagtacttcttcatcaagaatcgctatgccgaagacgtcagggggttcaagcatcgaccactggcacatccagttgttattctcattgacaacgacgacggtgcagacgggaagaaagggctattaagcaccatcaaaactaacttcaacattaacatcgacctcaagtctaatgacagcttctttcacatcacggataatctatacttggtcaaaacccccgggaaaggtaaaaaggtgaaatcctgtatcgaggatttcttcgatccgaagctgctgaagacaaagcttaatgggaagaagctgaacctgaaaaaggaccatggagccgatggtgaatacggcaagtatctgtttgcggagaaagtggtacgacccaacgccgataagatcgacttttccgactttaagcccctcctcgagcggattactgcagtgattgatcactacaaacctccagattga

SEQ ID NO: 8052 - RNA, 1719 nt, synthetic construct
  source 1..1719: mol_type = other RNA
atggccgccctcctgggatataaacctaaaagtctggcctacatcctgtacaagatccctgatggggctaagtacacaacttttacaattcccaagaaaactggaggagagagagagatctgtgcccccatcgcccagctgaaattgctccagcggagactggctaacattctatatgcttgtcgcgacgaaattgataagagcagcaagctcgggtctttaagccatggtttcaggaggggacacagcatagtgagcaatgccaaacctcatcggaggagacgatacgtgctgaatctggatctgaaggatttttttccatcctttaactttggaagagttcgaggcttttttatcaagtctaaagccttcgaattgaacgagaaagtggcgaccctgatcgctcaaattgcatgccacaacaacgcattgccacagggctcaccctgctctcccgtcatctccgatttgcttgcccacctgctcgatgccaggctcgctaaaatggcaaaagcccagggtgtgacatacagccgctacgccgacgacttaactttttccacatccaagaaggagttcccggccgccctggcaaccagtaaggaaggcgaaacaaatgtatgggagttgggggaggaactcgttagtagaattgttgacgctgggttcgccatcaacccagacaaaacacgcatgcaatgccacgcgagccgacagctggtgacctctctgaccgtcaacgccaaagtgaatatccggcaggagtattaccggcgtacacgcgcgatgtgtgacgcactgttcaagactggacaatacgctgacgtcccctttaataaaagtcttgcccgtcgccaggattcagttacggctaatgaaggtggagctaccggttctggaccctgggctccagctaaggctggaataaaatccctcggtccgttaggcggcagacttgcgcacatccactatgtgaaggatactattgatacacgggaggagatagataagaggaagcatatgactgcatttcgcatgctgtattatcggttcctcttctacaagaacttcgtcgccctggacaagcctttagtgctcactgaggggaagaccgacaacgtgtacctatcactggctgtcaggcatttacctaagttccatcccaaattggggcagccatcggccaaaggcttccaatccgccctgcgatatttcaatcatgtgaacaaaacgagcaaggtaatggaactggacggcgggtccggcaacttcaaattcttcgtcttgcgttatgcagatctgatcgcaaagttcggccacaagcctcagctgcatccggttattatgcttcttgacaatgatgacggcgcaaaagacatactcgccgttatcaagaagaattacgggattgagattaagccctcatctaccaacagtttctttcacattaccgacaatctctatgtagtgacgactccccatgtgggcaagaaggtaaaaacctgcatcgaagactttttcgaaccttcactactgaaggaggagttgaatggcaaaacacttaatctcggtacccctaacccagcgaccgaatacgggaaacacatatttgcagaaaaggtggtgaggccaaacgcatcgacgctaaaatgggatggctttgagccacttctgcagagactgtccgatgtccttgaccactatgagccccctacctga

SEQ ID NO: 8053 - RNA, 1764 nt, synthetic construct
  source 1..1764: mol_type = other RNA
atgtcaatccttaaatctctgaaggccgctgaagatgtggacgatcttgcggtcctccttggatataagccaaagagtctcacttacatcctgtataaattgccagacgcagctaagtatacgacatttaagatcccaaagaaaacagggggcgagagggaaatatgtgcacccacggaccagttgagacttctgcagcgccggctggcgaacatcctgtacacttgcagggacgagatcgatcacgaaagtggaaaaggatctctgagccatggctttagacgtggtcacagcatcgtgaccaatgccaagccccaccaccgccgacgatttgtcctcaacctcgatctcaaagattttttcccgtctttcaattttggacgtgtccgcggcttcttcataaagtccaaggcatttgaactgaacgaaaaggtggctaccctcatcgcccaaattgcttgccatcagaacgcgctgccacaggggtcgccttgtagtcctatcatttccgacttactggcccacctgttggatactcggcttgcaaagatggctaaaaaggagggcgtgacatatagtcggtatgctgacgatctaacgttctcaaccaacaaaagagtgtttcccaccgcattagcaatccagaatggcgataacgccaaactgtgggaactaggtgaagagttaacctcccgcattgcagatacaggctttactataaacccggataagacaaggatgcagtgcagaatgtctagacaactggtgacatctctgactgtcaatgccaaggtaaacgttagaatggagtactataagcggacaagggccatgtgtgacaccctattcaaaaccggattgtactccgacattccctttaataagtctctcgcacgccggcgagataatgccctggctgtagccggatcggagaaagacaaagatggtgtgaaagccgctaagaccagcatcaccagcttagggcccttgtccggcaggttggcccatatccatcacgtgaaagaccgcattgatacgcgagaggaatgggaaaaacgtaaacacaagacaacattcaggatgctgtactgcaggttcctgttctaccggaatttcgccgctcttgataaaccccttatcctgactgaaggtaagaccgacaatgtctacctcagcctggccgttaaaaattccccaaagttccaccccaagttgggccagctgacagccaaggggtttcagagcaacctccggtatttcaaccacctcaacgagacacataagattatggagctcgacggagggagcggcaacttcaagtttttcataatacggtacaaggagattatggactccttcaagcacaagccaatgctccaccctgtggtactggttgttgacaacgacggtggggccaaggatatttttgctaccatcaagaccaattacgggatttcaatcaatcatgacggcaaacatggattttaccatgtgactcataatctatacctggtcaaaactcctcacgtggggaagaaacaacaaacctgtattgaagatatgttcgagccggcactgttaaaggaggagttggggggaaagaaactaaacctgggcaagctggaccccgcgaaagagtatggtaagcatttgtttgccgagaaagtggttagacctaaagcttcaactctgaaatgggacggcttcgagcctcttctccagagggtagtggaagtcctggaccactataaaccacctacctga

SEQ ID NO: 8054 - RNA, 1680 nt, synthetic construct
  source 1..1680: mol_type = other RNA
atgagtgtgttgggcgatttaaaggcagcaacctctcttagcgacctcgctaagttgattgggtacaagcccagcgctctgtcttttctgattcatcacgcacctgctacttcgaagtatacttccttcagtgtcccaaagaagagcgggggggtacggctgattaacgcgccctccccgaaactgaaaaccctgcagcagcacctagtgaccctcttgacaaaatgtagaaaagagatcgacgaagctagtaacctcaaaccactatcccatggcttccggaaagggcaatccattataacaaatgccaatccccacattcgccgccggtacgtgctcaacctggacttagaagacttctttccttcaataaacttcggccgagttcgcgggtacttcataaagaacaacgatttcaagctacataaggacgttgccactgtgatagcccagattgcctgtcacgcaaattccttgccccagggagcaccaacgagtccaatcattagtgatctggtggcacatttgttagatgtgcgtttagtgaggctcgccaaaaagaataattgcacctacaccagatacgcggatgacctgaccttttcaacgaatgtcaaagtctttcccacgagccttgctctgcagactagcccaagcgattgggagctggggaagcctctctccgacgtgatcacagatgtgggcttcaaggtaaatcccctcaagacacgcatgcagttgaggggcagcaggcaaaccgtgactgggctcactgtcaatcagaaagtcaatatccaagctggttattaccgaagggtccgctctatgtgctacgagcttttcaaaaccggactttattttcagcagggttccgcaccagtaagcgctctgcctgtcgtggagggccaactgaaccactgcttcagagtaaaacatgaggtggcctattctcggaaggtggacattcagaacgataaacgggacagaggcgtgcgaaagctgtatcgcagatttctattctacaagcattttgtccagctgactaaacctcttctcatctgtgagggcaagacagatgttatctacctgaaacttgcactccgttccctggccgcctcttttccttccctcgttacaaccactgccgcgggcgaggtcaggaacgtaggttttttcaatcacaccgatatcgctgacaacctgctgaagctgggaggtggcagcggaggaatgcagctcctgattaaggattatgcctctgtgctgaaatattttaggagtaaaccactggcccacccggtgatacttgtgatcgataacgacgatggggcggacgacatcttcgcagccatctataacgtgacaaaaaccaaggtttcaagaacatcaaccgccgacttttaccacatcgtcaataacctttttttggtgaagacgccagaatctggtattcacggcacttcaagaatcgaagacttgtttaaaccttcggtgctgaaaacagttgttgacggaaagattttcaatcctgccaagaagatcgatccgacaaaggaatatggaaagattgttttcgctgaaaaggtcgtgcggcccaatgccaacaagatagacttctcagcctttaacaaattcctgggaaggatcgaggctatcttaaaacattacaaacccccctga

SEQ ID NO: 8055 - RNA, 1782 nt, synthetic construct
  source 1..1782: mol_type = other RNA
atgctgcttgagctgagacaggccgacactctagaaaggtttgccgcactgctcaactacacaccctctggcttgtcttttattctgtacaaaatggacgccgcaagtaaatatacaacttttgaggtgacgaaggcaagcgggggagtgaggatgatacacgctcctcatattaagctgaaacgcttgcagaaagctcttgccaatatcctactcgcctgtaacgttgagatagagactgccactcccagacgtcccttatctcatgggttcgagaaaaagcgttccatctttacaaacgcttgggaacacaagaatcgccggtacgttctgaatctggacattgaggatttttttcctaccatcaactttggacgcgttagaggctttttcatcaaatcccacgatttcacgttgcctgagaagaccgcaactttaattgctcagattgcatgccgcgacggcaaactgccacagggtagcccctgctcaccgataatagctaatttggttgcccacctacttgatgtgcgactggtaggactggcgaaaagatcgaactgttcctacaccaggtatgccgatgatatcaccttctcgacaaatcaacaggagtttccagctgaactggcggccgaagacccacctcgaagtggcacctgggtccttagcgaagcgcttatcgctcagattacccggactggtttcaccgtgaacaatgcaaaaacgaggatgcaatgccgaccctcccagcagctggtgactggactcaccgtcaatcagaaggtcaacatcagagccgcctactatgcacgcgccaggattatgtgttccagtctctttaaccacgggcattatcatgtcgagatggaaccggcaccagctcctgctccaggaggaacaccaggcaagcccaagcctaagttgctgaccaaaacagccaccttagaaggtatcctgagtcatatatatcacattaagcacgcgcaagaactgaagagcaaccccgagacatataaagctaaagacccggaggctaagaagaagactaaccagaagagggagtatccaggttacagaaagctctacaaaaaattcctctacttccgacatttcgtgtccccaaccgctccgctggtaatgtgtgaaggcaaaacggacaatatctaccttcgctctgccctcaaaggcctggatccctcatatcctaggctggccgaggtcaaagatggcaaactgttcaccaagggccgtttcctcaaacattctcgggcagaacacgatatcctggaactcagcgggggatcagggaatatcgccaacttcatcgctcactatcggagcgccgtgttcaattataagcatcggcctatgaagtacccagtcatcattttactggacaatgactcaggggggaatgctgtattcaatcaagccaaggaaatgtttaagattcgggtgggttacgacacaaccgaggccttctaccacctgtgccacaatctttatctaatcaagacacctgagatggggaggactggagagagctgcatggaagatctctttgatgagaagaccagaaaggagttggtggatggcaaaacattcaaccctaaggccgacaaagatacagccacgcagtacggcaaaatggtgtttgcggaccgggtcgtgcgcgctaactacgcaatgattaacttcgacaagtttaagcccctcttggagagaatcgtggcagttttagaccacttcgacgccaacaagcccaaggcagcgacttga

SEQ ID NO: 8056 - RNA, 1764 nt, synthetic construct
  source 1..1764: mol_type = other RNA
atgctgagccagctgaagtcagcatctacaatcgatagattcgctgccgccctgggatataaacctgctgcattggcttttatcctcttcaagatgacagacgcagagaagtaccagactttcaccattgcaaaagcttcaggtggcgtgcgaactatccatgcgccgactgagaagctgaaacgcttgcagaaacgtttggctaacgttctcgccgattgcagaaaagaaatccacgataaaaagcctttatccaccctaagtcacggatttgaaccagatcgtagcatttttacaaacgcatgggctcataaaaacagaagatacgtgttgaacttagatctagaagactttttccccactattaattttggaagggttcggggctactttattaacaaccgcgactttcagctgcctattaaagccgcaacccttattgcacagatcgcctgttttcaaggcaagctgccccaaggttcaccctcgagtcctattatttcaaacctgatagctcacctcctcgacgtgaggatggctagactcgctaaatccaacacgtgcacctattctagatatgccgacgatctcactttttcaaccaatcagaagcagttcccaccagacatcgccacccaggttccagatgagcccgggaactgggtccttgggaatcggctaacaggcgaaatagtgcggacaggcttcacgatcaaccatcagaaaacccggatgcagtcccgcccgtcacaacagctggtcaccggtctgaccgtcaatgagaaggtcaatatcagggccagctactataggcacgcccgaaaaatgtgtagctcgtttttcaatcatggggtgtactacaatgagatggagtttgtattcggggttgagggaccaaggccaaagctcattgatacacccagcgtgttagagggaatcctgtctcatatctaccacattaagaatctccaattgacccgcagcacagagcctgaagagctcaagcagaaatctaacaagatcaaatatcccgcctatcgccacctttacaagaagtttctttacttccgacatttcatcaatctcgacgcccctctgatcgtttgcgagggaaagacagataacatttatctgcgtagcgccctgaaggccctctatcccgcattccctgttctggccgacgtcaaaaagggcgagctgcgaagtaaagtaaaattccttaagcactctaggatagaacacaacatattggaattaagtggcgggagtggtaatatcgcaaatttcattgcacactaccggggggccgtatacaattataagtacaggtccatgaagcatcctgtgatcgtgcttgtggacaatgactccggccagaaaggatccgtgttcccccaggcgaacaagcttaatgggaagatcgatataaactattcctccaaggaaccattttatcacctgtgccacaacctatatctgattaaaaccccagagattggcctgacgggcgaatcttgtatggaggatctgtttgacgcggcgaccttggctactaaggtggacgggaaaacattcaaccggaaagacgacaaggatacgtcaactcaatacggtaagatggtgtttgcggacaaggtagtccgcgctaattacgataagatcgacttcagcctgttcgtgccgctgctggaaagaataactaaggtcatcgctcactacaaaagcaatcccagcgcctctgcctccagtcatgtgaaatcttga

SEQ ID NO: 8057 - RNA, 1515 nt, synthetic construct
  source 1..1515: mol_type = other RNA
atgtcaaccctactcaggttgcgaaccgccaagaacctgaaggatttgagcgtaatccttggctatgagcctaagaagttgtcttacatcctctacaaaatcccagagcaggaaaagtacaactcattcgagatcaacaaaaaagatggggggaagcggttaatagaggctccaataccgcaaatcaagaaactccagaagcatctttgcaacatattgactctgtgtagcgtcgaactggccaaagacagtccaaataacattcttagccatggctttaagaagggctcctccattcaaacaaatgctcagaagcacaagaataaacggtttgtcttaaacttcgacattaaagacttcttctggtcgataaatttcggtagggtgagaggattctttatcaagaataaggacttcctactggacgacaaagtagcaacaataatcgcccagattgcgtgttacaatggaagacttccccagggctcacctaccagtcctatcatcagcaatctgattgctcacttgctggatatccgccttgttggagtggccaaaaaatatggctgtgtctacagtcgctacgccgacgacatcaccttttctacaaaccagaaagagtttcccctggatctggttaggaggtccagcgagaacccagagctgctcctcctcgggacacctattgaagaggaagtgaagagatctggtttttgtgtgaaccctctgaagacgagactgaagtaccgagacacacgacaagtggtgacgggactcgttgtcaacaagaaaattaacgttcgttccgaatactatcgcctcgcccgcgccatgtgccactcctattataagactggcaaatacctcataccctctaagatcagcccgatcgacattccaagcaccctgtgcgacagcgatgtcaaggctgatctgaaccggctcggaggcatccttaactatattttctacacccggaattactcagaccaaagatgtttgagagacaagcaggataataaatccgggatttggaaaatgtatcgcgattttatctacttcaagattttcggtgccctggagaggcctctaatcctgtgcgagggtcccactgattcgatttatctgaaagctgcaatcaagtcactgcacaatgaatatcccgaactgattgaaaaatgctctgagaggtttatctataacatcagtttcctgaagtactctaaaaccatccgggagctgttacatttgaccggggggactggcgagttagccaattttgtgggatattacgcatctatggcaaagcagtatgtgatttggaatccgatgcaccccgtgattatagtgacggataacgacggcaaacgtaagaacgcagcgactaaggtatttgctgcggtgaaacagaattccaaaaatagtcatcccactacagaagatgattccgactttttccacattaacaataacctttacctggtcaagatgccacatatcaataacaagaaatga

SEQ ID NO: 8058 - RNA, 1752 nt, synthetic construct
  source 1..1752: mol_type = other RNA
atggcatacttagaaaaactcaaggccgcatcaaccattcaggatctggccgctctgttaaacttaaaagcttcacacctggcttatgtgctgtttgtgctgcccgacgagacaaaatacaagcaatttgagattccgaagaaggccggtggtgaaaggatcatcaatgccccacatgaacggctcaaacacatacagcggtgtctggcccaccttctacagtattgcgtgctggaaattgaacactccaaaccccagcccacccctagggtgttatcccatggcttcagaaaaaaaacggaggtgaacccaaatcgaaaaagcgacatttccattggcatccacactaatgcgtacagccatcaaaataagaagtacgttctgaactttgacttgagcggattcttcgggtcttttaattttggccgggttaggggattctttatcaagaataatgacttcggcctgcatccctctgtcgctacactgattgcgcaaatcgcctgcttcaaaaatgagttgcctcagggatcaccttgctctccaatcattacaaatcttatcgcacacatcttggatatcagacttgtgagatgggctaaaaaaaataggtgtagttactctcgctatgtggacgacatcactctgagcaccaatcaggaaataccccagaagcttgcaacccagtcggaggagcttatgaagtggtccttaaataaggagatagagaacatcatcactcacagcgggtttcagattaatcccctgaagactcgcctccagatgcacagctctaggcagattgttacgggcctcgtggttaacaaaaagataaacgtcaagaaggagtattaccgtagtaccagagccatgtgtcatgccctgtattgtacagggtcctttttcctgctgggcgataagagtaagcctggcactctgcagcaattgaacgggatattggagtacatctacttcataaagcagaagaatcactgcaataaggaaccatgctataaaactaacgtggagcagcataacattaccaacctatactcccagttcctgtattttcgctacttcatcgctttggaaaaaccactcatcatctgtgaaggcaagacagatgtcgcctatctcaaaattgcaattaagcagctgaaaaagcagggcaagtacctgctgcctcaccagatcgattttttccactttacggaacgtatcagcgaggtcatgcatatcaatgctggaaccagcctactgaagaagtttatcgagaactacaagaagaacatagccttcaccaaacaaatacctcggagtcctgtaattgtcctcctggataacgacaaggcagctggagacgtcatacagtgccttgaaaacaagttcaagaaaactaacgtgaactacgaccggaaaaagaatttcatttacccagtgatcgagaacctttatgtggtattgctcccaattagaaatccccctgaagacatcatcatcgagaactttttcgagaaatcagtgctagaaaccaaactcggggagaaaatttttagtccggaaaatggaaacggttttgactcgcagcgccattattcaaagcaggtactcgtcgagaaagtgattcgacccaagcaagatacaatcaacttctctgggttcacagatattctggataacctcgttaccgcgatcgagcaatataaacccggtccggacaaaatacaggatcaagccgtatccattatttga

SEQ ID NO: 8059 - RNA, 1743 nt, synthetic construct
  source 1..1743: mol_type = other RNA
atgtcttcactggcaaaactgcagagcgccaagtcgctcgacgagcttgccgctatcttgggatacaagcccgcagcattggcctacctgctatatcatctgccgacagctcgcaaatatacaacctttaccatccctaagcgcgatggcaccccccgtgatattctcgcacccactccgaaattaaaacttctgcaacggcgcctcgctaacgttctgtatctggccctcgcagatatcgacaaggctggggctccacgacggcatctgagtcacggattcgccaaacacctgtcaattgtgaccaacgctaatgttcaccgacggagaagatacgtccttaacctcgatcttaaggactttttcccttccatcaacttcgggagggtgaggggaatgttcattaaggacaaacgatttgctctggaccccaaaattgctactctgatcgctcagatcgcctgccataacaacgtccttccacaggggtcaccatgctccccggtcatcagtaacgtcataggccacttacttgatattagacttgtgcgcctggcaaaagcgcaaaagtgtacttattccaggtacgccgatgacatcaccttttctacaaatgctaaactgtttcccgcggatatggcggctctcgtggcaggtaccgaacacgaatggaccctgggtgccgccctaatcgaggagatcgataaagcggggttcgcaataaacccggtaaagactcgtatgcaatacagagggagtcggcaggtgacgacaggcttactggtgaatgagaagcccaacattttgccagagtactatagacccgttcgggccatgtgttggtctttgtttaataatggctcctattatagggttgtacccgccactttggccggtgggaagccaggagatcccgatgtgcaggaacccgcaacgagcctagctcccttacaagggatgctgggacatatataccatgtgcgcgaccagattgaccagcgctcttctgcggaaaagaaaaaggaaacaaccgcaaccgcaactaggaagctctatcacaggtttctgttctacagaaatttcattgtcgcccctaagcctctgatcataccagaaggcaagacagacagcatctatctgcaggcggccattgagaagctgattgcctaccatcctcagctcggcaggatggacaaaggcaagttcaagagtgccctgaaatttatgaacttcagctcaacagtccatgctgtgctgcagttagggtccggatctggggacctcttccattttattcggaagtaccacgagttgctaaagcactatcaccaccggcccctccctaatccagtgatcgttctaatagacaatgacgatggtgcaaaagaaatctttggggccgccaaaggcttgggcgctattggcatctcactcacttccactgatgctttctaccgcttgggcccaaacctgtacttaataaagacccctgagacgggacctaagggaaagtcctgcatcgaggacctctttgatccaacactgctgaaggccgagatcgacggaaaaaaattcgacgtgaataagaagcacggcgagcctggtaaatatggtaaacagatattcgccgaaaaagtggtaaggccaaaaaaggacatcattgacttcagcaagtttagcggcctccttgatagaattgtcagcgccctggatgattacaccgccagtccaccccctccttga

SEQ ID NO: 8060 - RNA, 1407 nt, synthetic construct
  source 1..1407: mol_type = other RNA
atgctgaacctcgacatcaaagacttcttccctagcataaactttggccgagtccgcggaatgtttatcaaggataagaggttcgcgctagaccccaaaatcgcaaccctgatcgcgcagattgcctgccacgatcacgtgctcccacaggggtccccctgtagtccagttatttccaatgtggtcgggcatctcctggatattagactggtccggttcgcgaaggctcaaaagtgcacctattcaaggtacgcagatgacattaccttctctacaaacgcgaaggcttttcctccagacattgcagctccggtggctggttctgaacacgactggacattaggggccgccctgctcaaggagatcgagaaggccggatttgaagtcaaccccactaaaacccgcatgcagtaccgtggcagccgtcaggtagcaacaggtctgctggtgaatgagaagcctaatgtcagacccgagtactaccgcacagtgcgggccatgtgttggtccctgtttaattcaggcacatactatcggatggtacctgccgcacttgctggtggcaaagcaggagatcccgacgtaccagaacctgcaactagcctggccccactgcagggaatgcttggacacgtctatcatgtgagggatcaagttgacacacggccctcggccgataaaaaaaaagacgccacggccactgcaacacgcaaactttacatccgtttcttattctaccgcaattttgtcgtggcaccaaagcctctcataattcccgaaggaaagaccgacacggtttatctccgggcagcgatggaaaaactgaccgcctatcatccaaggctaggcgccatggataagggcaagtttaaaccggcactgaaatttatgaagttcagctctaccatccacgatgtgctacaacttggtaacggcgccggggacctgtttcactttataagacgatatcctgacgctctgaaaagataccgacataggcctttaccaaacccgattattgtgttgatcgataatgatgatggggccaaggagatcttcggggctgctaagggactgggggctgctcacattgctaggacttccactgatcctttctaccggctcgctcccaacttgtacttgatcaaaactcccgaaatcggcgctcagggtatatcatgcatagaggacttgtttgacccagccctcctgaaaaccgtgatcgatggaaaggtgtttgaccccaataagaagcatggcgaggccgggaagtatggcaaagcaagattcgccgagaaagttgttcagccgcagaaggacacgatcgatttcagtaagttcgccggcttgctggacagaattgtggctgcccttgatgactatgtggccaacccccctcccccatga

SEQ ID NO: 8061 - RNA, 1737 nt, synthetic construct
  source 1..1737: mol_type = other RNA
atgtctagcctggctaagctccaggctgccaagtccctagacgacttggcagcaatccttggatacaaaccagcggcccttgcgtacctgctttaccatctaccggatgcccagaaatatacagcatttacaatccccaagagaaacggaaacccaaggcctatactagcccctactcctaagttgaaattgctgcagaggcgacttgccaatgtgctgtacctggccttggctgatatcgacaaggccggagctcctaggcgccctctaagtcacggctttgcaaagcacctctccattgtgactaatgctgcagtgcataggagacagcggtatgtcctcaacctggatctgaaggacttttttcccagtattaactttgggagagtgcgggggatgttcatcaaggacaaacgattcggccttgaccccaaagttgccaccctgatagcccagattgcttgtcacgaccatgtgcttccccaagggtcaccttgctccccggtgattagcaacatcgtcggccacttgttggatatccgcctggtgcgctttgcaaaggcacaaaagtgcacctactctcgctatgcagatgatatcaccttcagcacgaatgccaaagccctgcctgcggaagtggcggtacccattcccggctccgagcacgattggaccctcggagcggctttgctgaaggaaatcgataaggcagggttcgaggtgaaccctgccaaaacacgcatgcagtatcgggggtctagacaggtaaccacgggcttgctcgttaatgagaagcctaatatcaggcctgaatactatagaaccgttcgagctatgtgctggagcctgttcaatagcgggacctattaccggatggtacccgctgcactcgcaggaggaaaacctggagatcccgacgtccaggaaccagcgacaagtctggctcctctgcaggggactctcggacacgtgtaccacgtgcgtgaccaggttgatacccggagttctgtggataaaaagaaagaggccaccgccacaaggaagctttacattcggtttctgttttatcgacattttgtggtcgcccccaagccactcatcatcccggagggtaaaacggactccgtgtacctgagagctgccatggaaaaattagccgcctatcatccccagctcggcgctatggataagggcaaatttaagccagctcttaaattcatgaacttctcatcgactgtgcacgacgtgctgcagataggcaacggtgccggcgatttactccactttataaggaagtatcccgacgccttaaagcattaccgtcaccggcccctgcccaatccaattatcgttttaatcgacaacgacgacggagcaaaggacatcttctcagtcgctaagaacttcggtgcaccgaatatctcgagaaccagcactgatccctttcatcgcctggccgcaaacctgtacctgataaaaacaccagaaattggggcgaaaggtacatcatgtattgaggacagcttcgacccagctctgctcaaaactgttattgacggtaaggtcttcgacccgaataaaaagcatggcgagccaggcaaatatggcaaggctcgtttcgccgagaaggtagtccaaccacaaaaagacactattgatttctccaagttcacatctctgctggataggattgtcgccgccctcgatgattacgctgccaatccaccaccaccttga

SEQ ID NO: 8062 - RNA, 1611 nt, synthetic construct
  source 1..1611: mol_type = other RNA
atgccgaagcgcgatggcacacagcggcagatcctcgcccctaccccgaagttgaagttattgcagaggcgactcgccaatgttctgtaccttgctttagcagacatagataaggcagggactcctcgtagacagctgtcgcacggattcgcaaagcatctgagtatcgtgaccaacgcggcggtacacaagcgacgcagatatgtgttgaatttagacctcaaagacttcttcccctccattaacttcggaagggtgcgcggcatcttcatcaaggacaaaaggtttgccctcgatccaaaggtggcaactctgattgcccagatcgcttgccacgaccatgtcctgccacagggctctccatgttcccccgtgatttctaatatcgtgggacacctgcttgatatccggctggttcgcttcgctaaggcccagaagtgcacttacagccgttacgctgacgacattacatttagcacaaatgcgaaggcgtttcccgcagatgttgccgccccggtgtcaggtagcgaacatgactgggcccttggagcagccctccttaaggaactcaagaaagccgattttgaagtaaaccccgccaaaacaaggatgcagtacagggggagtagacaagtcgccactggactactggtcaacgaaaaacccaatgtccggccagagtactacagaacagtacgggccatgtgttggtctttgtttaactcaggcacgtattatagaatggttcccgctgctctagcgggtggaaagccaggggatccagacgtgcaagagccagcatcttccctggcacccctccagggcatgctaggctacatctaccacgtgagaaatcaagtggatactcggcctgccgcagaaaagaaaaaggaggaaacctcaactgctacgaggaagctttatgtgaggtttctgttttatcggaacttcgtcgtcgctcctaagcctctcataattccagagggcaaaaccgattccatctacctgcgcgctgctatcgagaaactcaccgcttaccagccccgactgggggagatggataaagggaagtttaaacctgctcttaagttcatgaactttagcgcggccatacacgatgtgttgcagattggcaacggcgccggggatctcaaacatttcatccgtaaatatcctgatgcccttaaacactaccggcataggcctctgccgaatcctgtcattgttttaatcgacaatgacgacggagctaatgacattttctcagtggccaagaatctgggggcacctcacataagccgcaccagtaccgaccccttctatagactggcacccaacctgtatttgatcaaaacacccgagatgggcagtaaaggtacgtcctgcatcgaggatctgttcgagcccgctttgcgcaagaccgtgattgacggaaaggttttcgacccaaacaaaaaacatggtgaagctgggaaatatggtaaggccagatttgccgagaaagtagtccaacctcagaaagacaagatagatttcagcaagtttgccgacctgctggatcgaattgtggctgtgctggatgactacgccgcaaaccctccacccccatga

SEQ ID NO: 8063 - RNA, 1716 nt, synthetic construct
  source 1..1716: mol_type = other RNA
atgaaggctgctacctctctggaggattttgcgacattactgggatattcgccagccggcttgtcatacatcttgtacaggcagcctcccgccctgaagtaccgaagctttacaattcccaaaaggtctggcgaggaacggctgatctttgccccaaagcccaaattaaaactgctccagcgtaggctcgcggacctcctgtatgccgttttggcagacattgacaaagcggggaacccgcgtaaacctctttcacacggctttgcaaaaaatctaagcattgtgacgaacgcaaaaaatcacaagagaaagcggtttgttctgaacttcgacctcaaaaattttttcccttccattaacttcggccgtgtccgaggggttttcattaacgatcgaagattccagtttgatccaacgatcgctactcttatcgcacaggtggcctgtcacgagaatgctttgcctcaggggtccccctgttctccagtgattagcaatatcatcggtaacctgctcgatattaggcttgtcagattcgcccgcgcccataaatgcacttattcccgctatgcagatgatataacctttagtaccaacgccaaacatttcccacccgaagtggccgagcccctaagctttctgggtgacgaatgggtagtgggagctaacctggaggcagaggtgagcaaggccggctttcaaattaatcctggcaagacgaggatgcagttacggggaagtagacaacagactaccggactggtggtgaacgagaagccgaacatatgcagtgagtattaccgctcggtgcgcgccatgtgctcaagcctgtttaacacagggtcatactatcgcatggtcccagcggcattatccggtggggaaccaggagaaccagatgtccgcgatcagaccacaaagctggcccccctgcaggggttactcggacatatctaccacgtccggaaccaaatagatagaaggacctccagcgaaaaaaaacagaagcccactgctactaggagtctttatcagcggttccttttctaccgaaattttgtggtggccccccaaccactagtggtccctgagggcaaaaccgacagcatctatctcagagctgccatcgagagactgtctgaatatcatccgcggcttggctccttcgaggatggaaagttcaagcagtccgtgaagttcctgaatttctctccggccatccatgatgtcctccaactcggcggaggctacggcgacctgcaattctttgtacggcagtaccgaatatcactgaagaggtttcggcacagacctttgccaaatcctgtaatcgttcttgtggataatgacagtggtggtaagcaggtgtttaatgcagccaagggactagggatcgatggcatttctctgaaaagctccgaccctttctacaggctgacagagaatttgtatctggttaagactcccgaactgggcaacgaagggaccagttgtatcgaaaatttcttcaaacccgagctcttcaaggagaagataaatggtaaagaattcgaccccgcaaagaagcacggggctcctgacaaatactctaaacaggtttttgctgagaagattgtccgcgccaagaaggcggagattgacttttcagacttcgctcctctcctggggagaatcgtagctgtgttggacgactacgcagctaacccaacaaactga

SEQ ID NO: 8064 - RNA, 1743 nt, synthetic construct
  source 1..1743: mol_type = other RNA
atggggggacgggtcagtctgctccttaaattgaaaaccgccaagtcactggacgatattgcctccctgttaggttaccagccacagggcctggcttatattctctacaagatccccgaatccgtcaagtataccaccttcacgatcgcgaagcgaagcggtgagctccgcgagattaaggcacctattccacatctgaaaatcttacagcggagactggcaaatctgcttaactcatgtcttggagaaatagagaatgccggggaaagacgtcggcctatttctcacgggtttgtcccctccctgtccatcattacgaacgccagtgtgcacaagaggcggcgatacgtactgaatcttgatctcgagcatttcttcccctcgatcaatttcggccgagtcaggggcgtgctgatcagggaccgtagatttgagcttgattccaaagttgccactgtggttgcccagatcgcatgccacgagaactcactacctcagggcagtccctgttcacccgtgttgagtaacattgtgggacatctcctggatatccgccttgtgcgtttcgcgcgtcagcataagtgcacatatagcaggtacgttgacgacataaccttttcgaccaaccggacagcctttcctacagaacttgccgcacagcaagagagcggctcttgggggctgagccagagtctggtgagcgaaatcgagagggccggctttcgcgtccatgctaggaaaactaggatgcaggtgcgggggagtaggcaactcaccactggcctgttggtcaacgaaaaagtgaatgttagaccggaatactatcgcactactcggagcatgtgtgctgctctattcaacaaagggacatattacgaaatgaaaccagctacactggccggtggcaacgtgggggatgctgcagtgaaggaggttgccaacagcttggacttgctggagggaagattgggatacatataccacatcaggaacacagtcgatcgcagagagtctgctgagaaaaagaagaattccactgcaacaagaaaactcttccacaagttcttgttttacaagaatttcgtggctctggagcgacctctcataatcaccgaagggaaaacggatagcatatatctccgatgcgctataaggtctttatcttcatttcacggaaaactgaccattgaccggggctctaagccacgcctgtccgtcagttttctgaattttacatccactgttcacgatgtgctgcaattagggggcggaacgggggactttaagttcctaatgcttaggtacaagcaattgcttgatgaattcaaacacgccccgctgatccatcccgtgatcctcctcatcgacaatgatgatggcgcaagagagatcttcggagtggcgaagcagctaggtgttgcagacgtgagcctcgtatcacgcgccgctttttatcgcatttgcgctaatctatatctgattaagacaccagaaggtacctcccagaatcccaagacctgtatcgaggacctgttcgacagctcagtacgcaacactttactgggaggtaagtcttttgacccagacaagaaacataacgaggaaggaaaatacggcaaagcccacttcgcagaaagagtgattagacctcagtccaccgatattgacttctctaagtttgagatgctgctcgatcggatcgtagcggtcattgaggactatgccccggccaagggcatctga

SEQ ID NO: 8065 - RNA, 1749 nt, synthetic construct
  source 1..1749: mol_type = other RNA
atgagtgtggtgaagagtctcaaggaggctaagagcctgactgatttggccaagatcctaaactacaagccttctggcttatccgctattttgtatcacattcccgacgccaataagtacacagagtttagcatcccaaagcagtcagggggcctcaggaccattaaagccccagttgatagattgaatctgctgcagaaaaggctcagcgatctcctgtatagctatctggacgagatcgaacctaagaagaacgggttcaagaccgtctcccatggattcataaaagaccgatctatcatcaccaatgcccaagttcacaaacggagacgctacgtccttaacattgaccttaacgagtttttctctacgatcaattttggcagagtgagaggcattttcattaaggataaacgtttcgagttccaccaggatgtggctacaatcattgcccagatcgcatgtcatgctaactctctgccccaaggctcaccctgctcaccaataattagtaacattgtcggaaggcttctggacgtacgcctgattcggctggcgcgattatataagtgcacctattccaggtatgctgacgacatcacattttcgaccaaccgcgcccagtttccctcggaactggcacatcctgaccctgccggatcacctagatgggtactcgggtttgccttgacgagtgagattacaaaccgaggattccaagttaacaacaataaaacacggatgcagttcaaggctagccgacagcttgtgactggtcttatcgtgaatgacaaggttaacattaagcaggagtactacagaaatgtgcgctctatgtgttcgctccttttcaaatcaggaaaatactaccgggttactcccgccgtgttcgcaggtggatcagcgaatgatcccccggtgaaggtggaattcgatactttaggctctctgggaggaatgctctcttacgtgtatcatgtcaagaataccatcgataggcgggcgtccgtggaaaagaaaaaagaggcaacaagcgccgcaatccgcaagctgtaccacctctttctattctacaagaacttcgtggacctgaagagtccgctgatagtaacagaggggaagaccgatgctatttatctgaaatctgccgtcgaaatgctgagcaaatttcatccacagttgggcagcctcaacggtggtaagtttgtgcacaccgtgcggtacctgaaattcacgagcaccgtgagagacgtcctgcaattagggggcggttcctctgatatcaaattctttatcgagaggtatgcgaagattctgcggaaatttaagcacgggagtttgagccatccagtgataattttgattgacaatgacgagggcgccaaagatatattttccgtagttaggggcaatactccccacaaagatataagccttgacaagactgataagttttaccgtatctactccaatctctatctggtgaagacacctgaagttggtaaggtcaagaatatgacatgcatagagtcctttttcgaagacatcgttctgaagactgtactggagactaaaaccttagacctaaacaaaaaacacctagctcccggcaaatatgggaaacaggtgttcgcagaaaaagtggtccgtccaaataaaaagtccatcaacttttcagggttcgacccactgctcgaacgcatcgtcgcagtcatcgatgattacaaaaccaacccttccagtatctga

SEQ ID NO: 8066 - RNA, 1758 nt, synthetic construct
  source 1..1758: mol_type = other RNA
atgaccgtctccatagtgaaggacctaaaagcagccaaaagccttgacgacctggccctcctgcttggattttctgcatcgggcctgtcctacatactctacaagtcaaactctgccgcccgatacaccgaatttcagattcctaagaggaagggcggcactcgcactattaaagcgccggaacccaaactgaaactcctgcagaccagactcgctgaaatcctgtataattatctggacggaattgaggagaaaaagaaaccattcaaggctgtttcccatgggtttgccgaaggcaagagcatcataactaatgctgcagtccacaagcgccggaggtacgtcctgaatatcgatcttgaggatttttttccaaccattaacttcggacgcgtgcgtggcgttttcatcaaagatcggcgattcgaattcgaccccaagattgctacaatcattgcgcagattgcttgccacgatcattctttacctcagggctccccttgtagtccggtgatcagcaatatcgttggaagactcctggacgtccggttggttcggttggccaaggagcacaagtgtacctactcccggtatgccgatgatctcacctttagtacgaaccaatcaacatttcctgccgctttggctgccccagatcccgctgcagcaggcaagtggatcgtgggtaacgcccttgacgctgaaattgtgggtactggtttcaagatcaaccacggaaagacacgtatgcagtttcgcgactctaggcaaacggtgacaggtctgttggtaaacgagaaggtaaatatcgtgccagagtattaccgggctgcccgctctatgtgcagcgcctttttccaaaccggcaaatattaccacagagttcccgctgccctcgtgggagggaaagctgaagaccccatggaagatatagtctatgacacccctccagtgttggagggcatcttgagtcacatctatctcatcaaaaataccgtggatcgtaggacttccgctgaaaagaaaaaggaggagaatgtgacagccataagaaagctctaccatcatttcctgttctacaaaaacttcgtaatcagcgtcaggccgctgatagtgacagagggtaaaaccgatccaatttacctgaaagcagcaatagagcgactgccaaaattccatcccaagttgggcgcctttaaaggagggaagttccagactactgtaaggttcctgaactttacgagcactgtgagagacgtcctgcagcttggcgggggatcaggggacctgatgcactttatagagaagtatttcaagatcctctcaaagttcaagcacgcacctttagcggcaccagtgattgtcttaattgacaatgatgacggcgcggggaagattttcgggaaaatccagggactgacaaagtgccccccaattagcaccttaacaacagaacccttttactatatcaccgcaaacctatacatgattaagactcctgagatcgggaaagacaagggcatgacctgtattgagacatttttcgaagatacggttctcaagaccgtgctaggtggaaagactctgagtctaaacaaaaaacaccttgagcctgggaaatatgggaaggcaatttttgccgagaaggttatccgccccaataaagcaacaatcaaattcgatgcgtttgaaccgcttctggacagaatcacggccgtgctggatcatcatgccgctaaagcccctcccgccgcctga

SEQ ID NO: 8067 - RNA, 1743 nt, synthetic construct
  source 1..1743: mol_type = other RNA
atgagcatcgtgaacaaacttaaaggcgccaaaactctcgatgagttggccgacctgctggggttcactccatccgggttttcctacatcttgtaccgtctcccaaatgctatcaaatacaaaagcttcagcataccaaaaagggggggaggtgctcgaactatcgaggcacctgatgatcgcctcaaactgctgcagcgcaggcttgcaaatgtcctctatctgtatttagacgagatcgaaaaatctgggaaagaacacacacctgttgctcacgggtttgcccggtcactgtctattattaccaatgcagcatgtcataagagaagacggtatgtactgaacctcgatttagccgagttctttcctgcaattaactttggcagagtgcgaggggttttcctaaaagacaagagatttgagtttgcccccaagatcgccacacttatagctcaaattgcatgtcataaccatgctttgccacagggctccccctgtagtcccgtgatctcaaatatcgtggcgagactgttagatgttcggctggtgagacttgccaagcagcacaagtgtacctactcgcggtatgcggatgacatcacgttttctacaaaccagaaggagtttccagtagacctggcgttgcctgacccgagtggtaagggcccctgggttgtaggccccgctttgaccgctgaaataaccggaactggcttcgtcattaatgcatccaagaccaggatgcaaattaggggatctagacagttggcaaccggtctgctagtcaacgaaaaggttaacgtgtgcccagaatactacaggaccgtgcgcagcatgtgcgccaggctgttctccactggcgaatacttcgccatggtgccagccatgatggctggtgggaaggtcggggacccggatgttcgaaccagtttcaaaacgtttcctctgatcgagggtcgcctcgggtttatttatctagtgcgcgacggactggatcggcgggatggagtggagaaaaaaaagtcgcctacagccacccgcgtattataccatcatctcttgttctacaagcattttgtggctggcgccaggccattagtcatcacagaaggaaaaacagaccgcgtgtatctacgggctgccattgagaagctcactagcttccacccccgactgggaaagattgagtctggcgccttctcaagcagcatacgttttatgaatttctcacgtatcgtccacgacgtgctccaacttgggggtgggaccggagatctgaaattcttcatgcttcattatgccgacaccctgagaaagttcaaacatgccccccttaaggcaccaatcattgtcctgatcgataatgatctgggaaccaaggacatttttggcgttatgagggagaagactgtccacaagacaatcagtacgcagactaccgcgcctttctaccgagtgcacgcaaatctctatctggtcaagactccggaaacaggaaaggataagggcatgacatgcatcgaagacctctttgagccttgcgtgctggctacgaaaatagacggcctggtgtttgatcctgacaagaaacacaaggaacccggtaaatacggcaaggccgtgttcgcggagaaagtggtccggcccaacaagtccgctattgtatttgatggcttcgaccccctcctgcagaggatctgcgatgtgattgacgactatgccacacacccgggacacatatga

SEQ ID NO: 8068 - RNA, 1761 nt, synthetic construct
  source 1..1761: mol_type = other RNA
atgacctatcttaaaaaaattcgcgaggcccaaactctcaaggacatcgcccacatcctcggggtccagcccaagaccgtctcatacctgctgtatatcttgcctgacgcagaaaagtaccgcccatttgaaataccgaaacggaatggtggaaagcgcttgatcaacgcacccgaaccccggttaaaaatggtgcagagaagattggcaaacgtcctctacgagtgcattgccgaggcagagaagtgtgccccacctagacgacctctagctcatgggtttgcacgtccgcgggtaattggcaccgatgccagcaagaataagaaaaggcggtatgccctgggcatattcagcaatgccgctatccataagaataggagatacgttctaaatctggacctagaggatttttttccttctctgaatttcggcagggtacgggggttcttcattaaggataaaaggtttgagctcaatgagaaggtggcaacggtcatagcgcaaatcgcgtgtcaccgcaacgagcttccccagggctccccatgctctccaattatctcaaacctgctggggcatctcctggatgttagactgttccgtctggctcgcaaatacaagtgtacgtattcccgctacgccgatgacataacgttttctactaacaggaaagactttcccgccgctttagccaaacctatccccgaaaaggtgagctattggcaactgggaagtccgcttgtgaaacagatccagagggccggttttaaggtgaacaacgataaaactcggatgcagtggaggggctctaggcagatggccacaggattaattgtgaacaagaaggtcaacataagatccgaatattaccgcacagctcgggcaatctgcaatcgtctgttttcaaccggagagtattacattagtgatccagagaaatccctggacggactgaacaagatcgaaggtatcctgtctcatattcactatatcaaggatagggcagaccttagagagaaagaggagaaaaagaaggacccactggccattcggaagctctaccggcgcttcttgttctataagcatttcgttgctttggagaagccattgatcgtgacagaggggaaaacagaccccatttacctgagagctgctatatcgaaattgcctaaataccaccctcagctgggagaatttgtcaatggcaaattttctagcgctattcgattccttaagtatagtgataccatcgacaagattcttcgcttatcgggcgggaccggcaacctcaaggatttcattcttaagaactacaagaaggacatcaattcctttaaattccagcccctagcctatccagtgattatcctcatcgacaatgatcagggcgccagagacatcttcaacatggtgactaagagatttgaaataaagatctcccctgaaactacccaaagcttctatcacctgcacaaaaatctctacattgtgaaaacacccgaaaacgggaaaaatagtatatcatgcatcgaagatctgttcgacccagagctccgtgaaacacctattgacggtaagaccttcgacttctcaaaaaaaaacaaggcggatgataagcacggaaaaacagtgtttgcgactaaagttatccgaccccaggctgaccagatcgacttcagccgatttgagaagctgctcgatcgaattattgtagttctggacgattactacgtcaggcaaaagagcagtagcgtggattcctga

SEQ ID NO: 8069 - RNA, 1710 nt, synthetic construct
  source 1..1710: mol_type = other RNA
atggaaaatcttgagcgcctgcgtgaagctactagtttaaaggacatcgctcgaatatttggggtgcaaccaaaaaccatctcattcctcatttatgtgctcccggccgagcatcgttatcataccttcgagattcctaaacagtcgggcggcatgaggacaattaatgctcccgaaccgcggctaaagatgatacagaggcgactcgcggattgtttatataaatgcacgggagagatttatggcgagccccccaaacgcctactttctcatggtttcttacgatcccgatccattttcacaaacgcctcaatacataacagtagacgctacgtacttaatctggacctggaggactttttccctagctttaattttgggcgggtacgcggttttttcatcaaggattcacggttcaaactgcaccagaaggttgccactatcattgcccagattgcctgtcaccaaaatgagcttccacagggatccccttgctctccaatcatcactaacctcataggccatatgctggatgttcgcctggttaaactcgcaagaaagtacaattgcctgtactcccgctatgcggacgacatcacttttagcacaaacctgaccaattttcctgtcgacctcgccaaacagagcgatggagatctgagcaagtggcaactgggcaaaaagttgaccaaggagattgaagattctggcttcgacataaacaagagtaagactaggatgcagtggaaatgcagcagacaaactaccacaggactgacagtgaacaagaaagttaacatccgttctgaatactatagaagagcaagggctatatgtcaccagctgttcactagtggttcttattacacgtttgacgtggagtctcagtccgaaaaccttaataaaatcgagggcatcttgtcccacatctaccacattaagcagcagagcgccgtggccttcgaacgaagtacgcagcggacttgggatgccaagacaaccggtctgtacgccatcaggaagctctaccgcagcttcctgatttacagatatttcaacgtcagcgtaaaacctgcaattgtgacagagggcgtgacagaccctatatacctgaagctggcaattaagaaaatcaaggcctatcagccccaacttggggaatttacaaacggaagattccagtacaagatgtcgttcatcaaacattcaggcaacacaggggaggtgctccaattggacggaggggtcagtaaactgaacagcctcattaagaactaccggaaggacttagatcggttcaagtacactctgctgaccaatccagtcgtcgttctgatcgacaatgataagggtgcaaaggaagtatttaacaccgtgaagaatcagtatggcctagagatctcacacaagaaagaaaaacccttctatcacctccacgctaatctgtacttggtgaaaacccccctaaccaacaatcggtcagagtcctgcatcgaggattgttttgaccaggatacccttgacatcgagttggatgggaggaagtttgatccagctaaaaaaaatgggtccgaagacacgtatggaaagaccaccttcgcgagggaggtgatcattccaaacgctgacgtcgtctcctttgaagggtttgatgaagtgttgtctaggatttctgcagtgttggatgactacagagtgcggaggcagtga

SEQ ID NO: 8070 - RNA, 1689 nt, synthetic construct
  source 1..1689: mol_type = other RNA
atgtcccgcctcataaagctgcgagaagctaaatctttgtcggacctggccgttttgctgggctttaaaccgaaagccgtgtcctacattctgtataagatccccgagaacaataagtacatcgagttcgagatctctaagaaaaatggagggaaacgactcattaaggctcctaccgaaaaattaaaaaagttacagcggcgtttggccgatctcctgaatgagtgtttcaatcagatttccaaggagagcgggaagaaatcgctggctcacggctttattgagaaccattcaatcgtgagtaacgctaagaatcacaaaaacaagcgttatgtgttcaatgtcgacatccaggatttttttccctctattaactttggacgcgtcagaggctttttcattaagaacaggcacttttccctggatcccaatgtggccaccgtgatcgcccaaatcgcttgtcataataatgagcttccacagggcagtccctgctcacctatcatatctaacctcataggacatctgctggacataagaatggcgaatctaagcaagagagccaagtgtacgtacagccgctatgcagatgatctgacttttagcacaaacaggaaagattttcccgaatcaatcgcaattatgcaagacgacaataactgggttgccgggtccagacttatcaaagaaatcgataaagtcggcttctctctgaatacaaaaaagaccagcatgcagtttaagacttctcggcagatggccaccggattgattgtaaacgagaaggttaacatcaaacgcgaatactacaaaattgcaagaagtatgtgtcatgaactattcaacactggcgaattctatctgaataacaaggacgatagctcaggcgagacggacaacaatgaggataaggggaccacaataagtcagcttgaagggattctcaactttatataccagattaaacggcctcacgataccgctaaactgggtgaccgccggtttcaccctaatgcaattactaaactacacagggatttcctgttttacaagcacttccactcaatgcagatgccggtgatcgtttgcgaaggcaagacagatatcatctacttgaaatgcgccctgaaacagctggcgaagacatacaacgaattcattgagctcaatgatgacggcacggagtataagatcaacttccttaatttctccaagaaactgagggacgtgttcgcaataagtactgggacaagcggactcaagcatctcatggagattttcgagaagaatatgtgcactttcaacgtaggtggcaaaagcttcccagttgtggtgattatcgacaacgatgacggagcagaggacattaaaaagaagctgaagatcaagaactccgaggagatcaaggagttctatcacttcgtggaaaacctttacgtgctgattatcccaaaagacaagggtaaagcgatcgaagatttatttgagccagaagtgcttatgaagaaagtcgacggaaaagtgttcaataggcagaaagagctcgacgctgaaaaggagtatgggaaaatagtattcgccgaaaaggtcgtccgagagaaccaacaacatatcaactttgacggttttaaggaagtgtttgacaagttgaagaccgtcatcgacgattatcggaccaagaatgtatga

SEQ ID NO: 8071 - RNA, 1686 nt, synthetic construct
  source 1..1686: mol_type = other RNA
atgtctaggctcgaaaaacttagaaagaccaaaagcttatccgatcttgctaaactgttgggctttcaacctcgtgcagtgagttacattctatacaaaatccccgaagacagaaagtacatagagttcgaaatccctaagaagaatggaggcaagcgaattattaaggcccccacagaaaagctgaaacagctgcagaaccggctggcggatctgctgaatgagtgcttcgaccagatttcaaaggagagcaacaacaagagtctctctcacggattccgcaagaaacactccatcgtgacaaatgccaagaatcataaaaacaagcgctatgtcttcaacgttgatttacaggattttttcccttccatcaatttcgggagggttcgaggatttttcatcaagaaccaccactttgggctcgaaccaaaagtggcaaccgtgatagcacaaattgcgtgccacaacaatgaattgcctcagggttcaccgtgctctcccatcatttcaaatctgataggtcatctccttgatgtccgaatggtaaacttggccaagaaagcaaagtgtacctattcgagatatgccgatgatctgacattttctaccaacaagaagaacttttcacccctcattactatcaagcaggatgagaacaactggatggccggcgaccggctggtgaaagagatcaagaaagtaggattcacccttaatactgaaaaaacgtccatgcagtttaaaaccgctcgccaaatgacaaccgggctgatcgtcaatgagaagattaacgttcgtagagagtactacaagaacgctcggagtatgtgttacgaattgtttaggactggggagttctacatcgacaagaaagacattccacttaacaacgaggaagggcacaaggaaattggcacaatcaatcaactcgaaggcatattatccttcatttatcagatcaagaggcctcatgacaaggctaagcttggcaatagacggtttcatccaaccgcaataactaaactgtatcgggatttcctcttctataagcatttctacttcatggagatgcccgtcatcctgtgcgaagggaaaacggacatcatctatctgaagtgtgccttgagacagctggccaaaagctatactgagtttgtggagatgaatgacgatgggacgtcttacaagatcaaattcctcaattcgagtcgcaattttagggatgtttttagcataagcacaggtacctccggcctgaatcacctaatggagatctacgagaagaacattagcaaatttaaggtgaagggcaaagcctatccggtgattataataattgataacgacgacggaagcaaagagatcaaaaaacgcctcaacatcaaaaatgacgaaaaaatcaaggacttctaccacttcgtcgaaaacctgtacgtgctaattattccaaaggacaaggataaggccatcgaggacctgtttgacactggcgtaaggaaaacaaaaatagacggaaaggtctttaaccgcggaaaaaagattgacgagaagaaggagtatggtaagattgtgttcgctgaaaaggtgattaaagctaatcagcagaagatcaatttcgatcgttttaaagaggtgtttgatgaggttcagaaaatcatcgaggactacaaaaaacggaatgtctga

SEQ ID NO: 8072 - RNA, 1662 nt, synthetic construct
  source 1..1662: mol_type = other RNA
atgtcacaattggagaagctcagaaaaagcacttgtctgtcagaccttgccacgatactgggctacaaaccgaaatccgtcagcttcattatttacaaaatccccgaggacaagaaatacatcgagtttgaaatcccaaagaagaatggaaaaacccgaaaaatcaatgctccagttgatcagctcaagcacctccaacgccgtctcgccgatctgctgaacaactgttttaacgaaatcagtagtgaagcccagaaaaagtctctgagccatggcttcagaaagaataactctatcatcactaacgcgaacaaccacaaaaacaaaaggtacgtgtttaatgtggacctaaaggattttttcccttctatcaatttcggccgcgtaagagggtttctgattaaaaacaacgacttctcccttaatgaaaaggtggctacagttattgcccagatagcctgccacaataatgaactgccccagggcagcccatgctcacccacaatttctaacctgatcgcttacctactggatattcggatggttaacctggccaagcattcaaaatgcaactattcccgctatgcagatgacttgacgttctcaacaaatcggaaggatttcccaaatctgattgcgataaagaaagatgacaagagctgggacgccagcaagaaacttattcctgaaatagagaaggttggcttttgcattaatccggataagacgtctatgcagtttcgaacttcaaggcaggtgacaacaggtttgattgtgaacgagaaggtcaacattaagagtgaatactacaagaaagccagatccatgtgtcatgctgtctttaataccggacagttctacatcgagggagatgataccgaaaaggaaaacactatcaagcaacttgagggaatcctgagtttcatctactatgcaaaacggccacacgagcccagtaaggatgggtctaggaaatataaccctaccgctatcacaactctgtataggaaattcctcttctacaagcatttctatagcctggagaaacctttaatcttatgtgagggcaagaccgacatcatctatctcaaatgtgctttgaagcagctgagcaatacctatagcgactttgtcgatacctcgaaggacaaaattacctacaaggtgtctttcctaaatttctccaaaaacctcagggatgtgttttctatttcaaccggcacttccgggttagacttcatcatcgacaattataagaagctgagccctacctttaaggctcctcgcaaaccctacccagtggtcgtgattgtggacaacgatgacggttccaaagagatcaagaagaaactcaagataaacaatggggacgcaatcacagatttttatcacttcagtgacaatctgtacatacttattgcgcccaaaaataaaactggagcaatcgaggactttttcgacgataacattttgtccaccaaaatcggtgggaaatcctttaaccgtgagaaaaagatagatcccaattccgaatatgggaagatggtatttgccgaaaaggtagtcgcagccaatcagaagtcgataagtttcgacaagtttaaggaggtgttcgatggtatgcggaagattgttagagactgcgacgacaaaattgtgtga

SEQ ID NO: 8073 - RNA, 1695 nt, synthetic construct
  source 1..1695: mol_type = other RNA
atgacaaagttggagaaattacagaaaactacaagcctgagcaaatttgcaaagctgttgaactatcaaccaaagacgatcagttatatcctatacaagattcctgaggaggacaaatacaaccagttcgagatctttaagaaaaacggggaaaagcgtaagatccaggcccccataaaaaaactgaagctcctgcagagacggctcgctaatctactgaatgaatgcttcgatgagatttgcaacaaaaataagaagaccaagtccctctcacacggctttcggaagaagcatagtataatcacaaacgccaaaaaacacaagaatcgccgatacgtatttaacgtggacctccagaacttcttccctagtataaattttggaagggtgattggcttctttatcaagaacaaccacttttcattgaagccagaagtggccacagttatcgcccaaatcgcctgccatgataatgctctgccacaaggctctccttgtagccccattatctccaaccttattggacacttactggacatcaggatggtgaatttagcgaagaagaccaagtgtacctactctagatatgcagacgatctcaccttttccacgaataaaaaggaattcccggaaaaaattgctattaagaagaacgagagcgattgggtcgcgggaagggcactgaccaaagagattgaaaaaatgggcttttcggttaatgcaaagaagacttctatgcaatacagaacctcacgccagatggcgacagggctgattgtcaataagaagatcaacgtgaaaaaggagtactataaaaaggcaagggccatgtgtcacaatctgttcaagtcagacaatttctatatcgacaaaaactctgagaaggaggggacacttaagcagcttgaggggataatctcctttatttaccaggtgaaatcccctcattatatcgagaacaaaaaacccactgccataactgcactgtaccgaaagttcctgttctacaagcactttttttctatagacaagcccctgatcgtgtgtgaaggtaagacggacattatataccttaaatgcgctctcaaacagttggagaatgagtataaagagctgatggggaagtccgacaaaggaatcaacttcaagatcaagttcttgaacatttccaagaacttcaaagaggtgctaaatgtggccgagggtacaaccggcctcttgagcctgataaacatgtacaaagatggattcaaacacttcaagggcaaaggaaaaaaatatccagtcatcattgtcctggacaatgataaagctactggcaagattaagagccgcatacaggagcagcttaagcttaataacgataaaactgccgataagaagaaacagaaacaaaagctggacactaacaagtactatcatttcgctcataatctgcacatcatgtttgccattaaagaggatggtaaagaaatcgaagatctctttgataaggaagttctcgacaccaacgtggaaggcaaaaaattcagtcggaaggataaaattgacaccaaacaggaatatagcaaaaccatttttgctgagaaggtcatcaaagccaaccagacaaagattaattttgaagggttcaaacccgttttcaataaggtaaagaacatcatcaaggaatacagtaagaagaattctcagtga

SEQ ID NO: 8074 - RNA, 1758 nt, synthetic construct
  source 1..1758: mol_type = other RNA
atgtcccacctggagaatttgaaaaaaacgacaacactggctgaactagctctgttgctcgggtataagccaaaagccctctcatatatcctgtataagatccctcagattaataagtacaaggacttcacaatcccgaagaaaaatggtggagagcgccgtatacaggccccagtggacaaagtaaaacaccttcagaaacggttagccgtgttgctctctcagtgttttgacgagatctccaaaaaagcaaaccacaaacggtcgctgagtcatggatttcgcaaggaccacagcataagtaccaatgcaaataatcacacaaacaagagacacgtcttcaatatcgatttgatggatttcttcccctcaattaactttgggagggtgcggggttttttcattaaaaactcacacttcgggctgaaacccaaaatcgccacgattattgcgcagattgcgtgccataataatgagctgcctcaagggagcccctgctcccctatcatctccaacctgattgggcatctgctggacatccgaatggccaattttgcgaagaaaactaagtgcacctattctaggtacgccgacgatctgacctttagtaccaatcgaaaggaattcccggaaaagattgccagccaaaacaacggcaacgaatgggctactagcaggactttgaagaaggagattgagaaggttggtttcaaagttaacgaaaagaaaaccagccttcaatacaaaacatctagacagatcgctactggtcttgtcgtgaacaaaaaggtcaacattaagaaggagtattacaggcaaactaggtctatgtgccactctcttttccagagcaatgagtttttcctaggcaatacgtattccgctaagcctgctatttccgaaaacgcaaagatcaattcaaccagtcctgctaccaactctaagactccgctgcccaaaaatccacaggggaagattaagcaacttgaaagcatcctgtcctacatctatagcgtgaagcgcagacatgacagagataatgcaggaaaaagaaagaactaccctaacgccattacaaaactctatcgtaagttcctcttttacaagcatttcttttccctcaattgtcctctgatcatctgtgagggcaaaacagacatagtctatctgaaatgtgccctgcgacagttggctaatgaatacggagaattcattgaaaagaccggacccagttttatactaaagatcgatttcctcaacctgaccaagaatctcaaggatgtgctggcaatcagcgaaggcacaggcggacttgggtctttaatgggcatttacgagatttacatgaagcccttcaagggtgagggcaagaaacatccagtcatcatcctgattgataacgactcaggctcaaaggagataatcgagataatgaagcgcaaaaaaaagtgggacccatcgaagccattcgcttttttcactgagaacttatacgtggttcacatctcctcagaatctgggaccagtgagatggccattgaggatctctttgatgatcagacccagaataccactgtggacggaaaaaaattcaaccgcaagcccaagatagacagtgcaagcgaatatggcaagatagtatttgccgagaaagttatccgggcaaacgagaacagcatcaactttgacggctttaaaaaggtgcttaactcctttaaagccgccacgcaggattacaataaacggataacagtgtga

SEQ ID NO: 8075 - RNA, 1161 nt, synthetic construct
  source 1..1161: mol_type = other RNA
atgagcaaactcgagcgtttgcgagaagccaagtccttatctgacctcgccaatctgctggggtacaagcccaaggcagtctcctacattctgtataagattccgagtgagaaaaaatacagcgcatttactatcccaaaaaaaactggaggggataggcggataaaagccccaatcgatcctcttaaagacctacagggccgcctcgcagatctactcaacacatgtttcgatgagatctgcattaagagcaaacataaacgatccctgagttatggttttagaaagggcgagtcaatcgttactaacgcaattaatcatcgcaacaagaggcacgtatttaacgtggacctgcaggatttctttccctctatcaacttcggccgcgttcgtgggtttttcattaagaacaagcacttcgagttagaccctgacgtggccacagtcattgctcaaattgcttcacacgaaaacgagttaccccagggatcaccttgtagcccagtcattagtaacctcatagggcacctgttggacatcagaatggttaatctggcaaagaaagctaagtgcacgtactctagatacgccgacgacctgacctttagcaccaaccggaatgaattccccgagatcatcgctatgccggagaaatccggtagcaatatatggcttgctggcgagactttggagaaagaaataaagaaggtggggtttaccatcaacaaaaataagaccacaatgcagtacaaggcccggagacaaatggtcacaggcctggtcgtaaacaagaaaatcaatgtgaaacgggaatactataagcacgcgaggtcaatgtgctattcgctgtttcagtctgaccagtactatattgacaagcatctgaccatcccctccgccggaacgacaatactggacgatggagctgcggataaaaagtctgaacctaccaaggagtatgaaaagatcgtgggaaatatggcccagcttgaaggtatcttgaacttcatctattacgtgaaggatatgcatgataagagggaaaagcgggagaaaagaaaaaataggagtgccatggtggagctgtaccgcaagttcctcttctataagtacttcttttccgtggagcgaccacttattgtgtgtgaaggcaaaaattga

SEQ ID NO: 8076 - RNA, 1752 nt, synthetic construct
  source 1..1752: mol_type = other RNA
atgagttccttggaaaagctaaaaaaagccgtgacactcagcgacttggccgtactgttaggctacaaacccaaagctgtgtcttacattctgtacaaactttctctcgaggaaaagtataccgtatttaccataccaaagaagggaggcggagagagaaccatcaaagccccgacagagcaactgaaacgtcttcagaaacgactcgcagaccacctgggcaaatgctatgaggagatctacacgaaaggcccacataaaaaccccctgtgtcatgccttccgcaaaaagttctctatcgttacaaacgcagaaaatcatgttaaccgcaggcatgtgttcaatgccgacatcaaagactttttcccaactatacactttggtcgtgtccgcgggttttttattaagaacgtccatttcaccttggaacctaaggtggctacagtgattgcccaaattgcctgctgcggagacgaactgccccagggatcgccatgttcccccgtgattagtaacctagttgcaggccacctggacatcaggatggctaccttggccaagaaagccaagtgtacctactcccggtacgctgatgatctgaccttttccaccaaccgaaaagaatttcccgatctcattgcagtgctgaaggagggcagcgataaagagtggactgccggacctgggctcctgaaagaactgaaaagagctgattttaccattaatgagaggaaaacatccttacaaaactctactggaagacagatcgcaacagggctcgtggtcaatgataaggttaacgtcaggagagagtactataaacaggcacggagtatgtgttactccctctttctaaatggtgatttctaccggggctctcaccatgtaagcacgatcgaacagcccgttgcgagctctgatgtacaggcggaggcttccgccgaaaaacacgctaagtccgggacattgaattatctggagggtgtgttatcgtatatctactccgtgaaggcgtcacacgaccagaggaaaacctgtgccaagagatcatatccaagcgcagtcatgaagctgtaccgccagttcctgcactataaacactttttcgtgcttcagaagcctcttatcatttgcgaaggtaagacggacgtgatctatcttaaatgcgccctgcggcagttagggaagagccatcctagcctgatcaaactgaatgggaaggagttcgtgtatgaggtcagtttcttgaacatgagtaagaacctgaaggaggtgtttgcgatgtcagaggggaccccaggattggccagcataatggagaacttccacaaaaacatggcaggcttcgagggtgagggaaagaagcatcctgttatccttctggtcgataacgatagtggcgcaaaggagataaagaagaagattgatcacaagaatccggcaaagacttttcaccggtacgccgacaatctctatgtcatccttatccccaataagccgggccaagaagaaactgctatcgaacacctgttcgacgctaagacactgtctactactattgacgggaagaaatttaattcaagcgccgagctcaatcctaagactgaatatggcaagatcgtgttcgccgagaaggtgataaaggctaaccagcagaatattgacttctcaggttttgatagcattctccagcaattcgaagctgttattgtggactacaacaaacagcaaacacagtctgtcacgtcatga

SEQ ID NO: 8077 - RNA, 1710 nt, synthetic construct
  source 1..1710: mol_type = other RNA
atgtcaaacctggagcggcttcaattagccacaaccctgtctgatttggcagacatcctaggatataagcctagcgcgctgagctacatcgtgtataagattccatctacaagtaagtacaccacttttgatattccgaaaaaaagcggaggcacgcgactgattaatgcacccgacgaacgtctcaaacgcctgcagaagtcgctcgcgaaactactgatgaagtgcgaaatcgagataaacgataaactcaaccacaagaacaatatatcccatggctttaagaagaagtttagcatcatcaccaacgcaattccccacaagtcaaaacggcacgtgttcaatgtcgacctgaaggatttcttcccatctataaatttcggtagggtgagaggcttctttatcaaaaacaaacactttcagctgtgtgataagattgccactatcatagcccaaattgcctgtcatgataattcgctcccgcagggatcaccatgctcccctgtcatctccaatttggtcgggcacctgctagatatcagaatggtgaacctggctaaaagagctaaggtgacctacactcgctatgccgatgacttaacgttctccacgaataaaaaagagtttccttgcttgatagcttacaaaaagagcgggagtgacagtgaatggctcccctctaaaaaactgacaaaggagatcgacaaagtgggcttcactctgaatagcgacaaaattagcatgcaatataagacatctcggcagattgctactgggcttgtcgtgaacaaaaaggtgaacgtgaagagagagtattacaaaaagacaagggccatgtgtcatagtctcttcaggaacgatgaatactacttcgaaacattggacccagctacaaagaccattgttaagagccccggaaattttaaacaattagagggctacctttccttcacataccaggtgcggtccagtaataaactcaggaaggataagcagaatcagaagaagaactttatcggcaacattaagaagttcaacggaacatcaaataccgccaagatataccgagattttctgttttacaagcattgttttgccctggaaaaacccttgataatttgcgagggcaaaaccgaccgcatctaccttcaatgtgcgctgaagaaactcgcttcagcctatcctactttaattgacactactccagcagtgtcataccttatcaccttccttaacaagaccaaaaactttctgaacgtttgcaacttggctgacgggacgtctgggctcgaaggtatcatggataggtacgagaaacagatgggttattaccacggcactgggcagaaacaccctgtgattattttggtggacgatgacaagggagcaaaggagatcaagaagaaaatcatcaagaagaatggaaaggttgaaccctatcagaaatataccgacaatctgtatgtcgtctttattcctcgcgtatcctctaaaaataccgcaatcgaggatctctttgatccaagcgttctggcaacagtgatcgacggcaagaccttcaacaaggagaacgacatcgacagagataaagagtattccaagcaggtattcgcccataaagtcgtaaaggctaatcaggactccatcaatttcgacaacttccgtggtgtttttgatctgttcctggacgtaattagtgactatgcctga

SEQ ID NO: 8078 - RNA, 1371 nt, synthetic construct
  source 1..1371: mol_type = other RNA
atgactagattagaggctctgcataatgccaagagcatttacgatctttctaagttgcttggtttcaaggctaagtccatctcatatttcctctaccatagcactgaggaaaaatattataccttcgagatccccaaaaagaacggggaatttaggaaaatccaggctccaacggataagttgaagaagctgcagtctagactggcaaccctgttaagcgactgctttgaagaaatagacagaaatcagggctaccccaactccctctcacacggattccggcgtaaacactcgatcatcagtaacgccaacttgcacaagaacaaaaggtacgtgttcaacatcgatctgaaggatttttttcccaccttcaattttgggcgagtgcgcgggttcttcattaagaacaaacatttccagctgagcccaaaaatcgccacaattatcgctcaaatcgcctgtttcgataacggcctccctcagggctccccttgtagtcctatcatcaccaacctgatcgcacaccttatagatgtgcggctggtcaatcttgcgaagcatgccaaatgcacttattccaggtatgcggatgacatcacattctctaccaatagaaaggactttccaaaagaaatagcgtacaaaaccaacgccaatcaatgggtagtcggaaataaccttaatgccgagatcactaagctcggcttcaccattaatgacaaaaagacaaacatgcagtaccgaatgagtagacaggttgctaccggcctaattgttaacgagaaggtcaatgttaaacgcgaatattacaaaaaggcccgggcatgctgccagcttctctttgaaattgatgacttctacttgtccgagggcaagagcgggagtctgaaccagctggatgggatcctcaatttcatttaccaagtgaaaagaccccacgacaaggagaatatcggtccccggcgatttaaacccaatgccattactaaactgtaccgcgagttcttatcttatcgtcactttttctcaggagataagccgctgattatttgtgaaggcaagaccgatattacatatctgaaatgtgcactcaaacggctccaccctgacttcaaccaattgatcgagtttaaagacggaaaaacaaagcacaaggtgtcctttttgcgcttttcagacaggctgaaggatgtatttgctataagcgaggggacacctggactaactgccctaatggagatgtatgcagacctgctcaagcgctttaaaggtgtgggactgattcatccggtgataatagtcctggacacggactctggcaataaggaaattaggaagaaactggaggagaagacatacgaatttccatga

SEQ ID NO: 8079 - RNA, 1785 nt, synthetic construct
  source 1..1785: mol_type = other RNA
atgtcagatttagagaagctgaagagctgcaagagcttgaacgatctggctgtcgttttgaaatacaaacccagcgcactagcgtatattctgtacaagcttccagattctcaaaaatacgaggaattcaccatacctaagaagtccggtggttctcgtaagatcagggccccgaaagagagactcatggcccttcagaaaagactctcagaagtgctcaacaactgctactctgaggtcattaaaaactatgggaatcctttgagccacggcttccggaaagactgttcaatcgtgacgaacgccctgctgcacaggaatagacgcttcgtgtttaatatcgacctcaaagattttttcccatccattaacttcggccgtgttagggggttctttatttacaataagcacttctcccttgagccaaaagttgccactgtaatcgcccagattgtctgttacgacaatgagctcccgcagggatctccatgttctccagttgtgagcaacctggttggccacctccttgacattaaattggtgcagctggctaaactgcataaatgcagctacagcaggtacgctgacgacatcacattttccacaaataagaaggacttccccgaagagatagcgtacatagccgctgggggagattgggaaccgggtcctaagttaaccgcaactatcaataagatggggtttgccgtgaacgagagaaaggtaagtatgcaatccaagacccgccggcaggtggtaactgggcttgtcgttaacaaaaaggtcaacgtgaagaaggagtattatcggattgctcgagcaatgtgccacagtctctttaacaacggctctttttacatctcaacaatgggcaatgataccacacagagtgggacgattgattcaaacaataactgtaccgcgaagcagttagaaggcatcctgagttacatttatatgattaagggcgtgcatgacagtcgcaccaatgtagaaaagcgaaataagcccgcaagcattatgaaagcatatcgccaattcctgttttataagcatttttaccaggccgagaagccagtcctgatatgtgagggcaagaccgaccatatttatattcggtgcgctctaaaacagcttcatcaacattaccccgcactgatcgagaaaacgacagagggatggagctggaaaatcactttcctgaaaatgtcggaaaattttagggaagtgctgtctatcgccgaaggaacgtccggactagccgcactcatggacatgtacaaaaagaacatcggaatattcaaggatggtacaggaaaaaagcaccccgtcgtcatgttaatcgacaatgataagggcgccaaggaaatcaaatcgaaactgaagaagactgaggatgggaagggctataaaccttattttaccgagaacctgtacgtgatgacactgccccagggggccaacggggaagaaatagaaatcgaggatttgttcgacaaggatctgttggagacaaaagtggctggcaaatccttcaataagaagacaaaaaccgacaccaaaaccgaatattccaaaatcatcttcgctgagaaagtgatcaagcccaagcagcacatcattaacttttccaatttcatgcctgtgctgaatcacctaaatggcatcatacttagttatcagcacctcaagggatcagctcccaccgaaaaggagactgaggccctcaacgtcctgctgccaactcagactcctcaacctcccatttacgtgcctggtgtgtga

SEQ ID NO: 8080 - RNA, 1680 nt, synthetic construct
  source 1..1680: mol_type = other RNA
atggcgcgtctcctcgggtttcggcctaaagctctgtcatttttgctgtacaagctacctgacaatagcaagtataccacatttaagatccccaagaagtcaggtggagaaagagaaataaacgcacccgacccccgtttgaaagggctgcagaaacggctggctaaccttctccaaaattgttttgaggaaatttacggcagggaaagatataaccattccctatcccacgcgttccgaaaagaccacagtataatcactaacgccagggcccacaagaacaagaggtacgtgttcaatatcgatcttatcgatttcttcccttcgattaattttggtagggttcgaggctactttatcaaaaacaccgacttcggactgcatcctaatgtggcaacagtgatagcacagatcgtatgttataacaatgagctgccccagggatctcccacgagtccggtcctctcaaatctgattggccacatactggacgtccgattagtgatcctggctaaaaaaaccaagtgccagtattctagatatgccgacgacatcacattcagtacgagagagaagcagttcccgagtaccattgccacacaggatgatgccgggtgctggcatcctagctcaaagctcttgtgtatcattcgcaagtctggctttgaagtgaatcacaacaagaccaccatgcaacatcatgcttataggcaggtgacgacagggctcgtcgttaaccggaaggtaaacatcaaggcttcttactacaggcaagcacgggctatgtgctcctccttattcaagactggcgcattttacatcgggactgaggtacgtaagggtcgcagcgcaagtatttctggaaaagacctgggctcaattaatgtactgaggggcgtgttatcccatatctacaacgtgaaacgcctgaacgataaacgagatcagaaagagcggtggggcaagccaacagcaatccacaagctttatgagaagttcgtcctgttcgaaaaatttcacaacctgagaaagcctctcattttctgcgaagggaaaaccgattccgtttacttgaaatgcgccctttatagcttagcctctgagtatcccgatttgatccaagtgtctaacggggaggttaactacgccatagactttttcaagcactcgaagagcaatcaggacctgctacaattctccggtggcaccggagatagccggtacctgatcaaggattacaacaaaaagatgaagccattcctttgtaagggaaaaagatttccagtgatcattctggtcgactccgaccagggaagcaagaaagtgtttagtgctgcgaaggaggtgataggcaataatgagaacgtcactggcgacgaggacttttattacatcacacagaatctgtacctgatagcccttccaaagatcaacaatgtgtcctcagttgctattgaggacttctttgagaaaagcgttcgggaaactaaaattgatggaaaaagcttggccaagtccaatgaatctgacaaccgcaaatactatagcaagcacatctttgccgagaaagtgatcaggccaaataagggtaaaattaatttcgagcgcttcaaggggattctcgatagaattctcaaagtcattcaggattatgaaagtcgcagagaaactaaatcatga

SEQ ID NO: 8081 - RNA, 1746 nt, synthetic construct
  source 1..1746: mol_type = other RNA
atgagtgtcctccaaaagctcaaggacgccaagtcactgaaggagctggcgattctcctttcttttaagcccagccgcgtttcctatctcctctacaagctcgatgccgagaaaaagtattcgaagtttcagattccaaagaaaagcgggggcattagagaaatccaggcgccagaacccaggttgaaagcactgcagaaatccctagccgacctgctgtatgagtgtaccctggagatcgagtctaacggcaaaaagcgaccatctttgtcacacggcttccggaaacatcatagcatcgtgaccaacgcccggggacacaacgggaggaggtatgtcctgaatgtggatttagagggcttcttcccatccattaattttggccgggtgagaggcttcttcatcgccgataaatccttttccctgaatgagaaagtggcaaccgtggtggctcagatagcctgtttcgagaataaacttccccagggctctccttgctcccccgtaattagtaatttgatagggcacttgctggatgtacggttggtacgcttggcaaaagcccaaaagtgttcatactcaaggtatgccgatgacatcacttttagcactaaccagaaaaacttcccacccgctatggcggttcaagatgaaaagaacccagagaaatggatcgccggcaccaccctcagcaaaacaatcgagaacgcttggttcaaagtgaatcatgccaaaaccagactgcagagtcgaacaaaacgccaaagcgtgactggtgttgtggtcaataagcatgttaatgtggaagcttcgtactataaaaacgtccgcgcaatgtgccacagcgtgtttgcaaaaggtgaataccacaagccgattgttaagtccggggacccctctaagggagcagagccttccggacctgaaatgctgaaaaacatagcacccctggaggggatgctagcccatattgactacgtcaagtttgggcgcgactcaccacggtcaacggtcgagaacgcgagtggaaagtcgaggccccctgctacaaggcgactgtacgaaaagtttctgttcttcaagcactttgtctatctagacaagcctctagtgctttgcgaaggtaaaactgataacgtctacttacacgcagccatccgacagttaaaggctcaccacagcacgtttatcggaggcagcgaccagaagcctgagatgaaaatccgtttctttaagtacagtagaactagcaatggtatcctggggctgaatggtgggtctggacacttagcaaatctgatcgcctactactctaagaatctgaaggattacaactttgcccctctccttcagcctgtgattgtgcttatcgacaacgatgacggcgctccgccaattttcaagaccattaagcagaactacaaagtgacaatagatcatagtagcgcggaccttttttaccggatctgccataatctttatctcgtcaagactcctgaaaaggctaccacatacaaatcttacattgaggaactgttcgacgacacagtattgcagaagaagctgaacggaaaaacattcactacgaagaaagactatgataaagctacccaatatggaaaggaatacttctccaagtatattgttagacccaacgaggcttcaatcaatttcaccaagtttagtccgctgctcgaccgtatagcctccgccgtgtctcattatggcgccgctgcagataaatga

SEQ ID NO: 8082 - RNA, 1770 nt, synthetic construct
  source 1..1770: mol_type = other RNA
atgttcaaactccaagccctgagggatgctaagaaactggaggacgtcgccagactcgtcggtttcacaccaaagggactgagctttgtcctatacaagctgcctgactctaaaaagtataattccttcgagattgccaaacgtggaggaggcaaacgacagattaaggcccccgagcccagtctctctttgctgcagagacggctcgcaaccctgctgaccgagtgtctcgaggagttgaagaaggccgcgcctccccgaagatctctagcacacggcttcgaaaaaggacgcagcataattacaaacgcccagctgcacaaacgtcgcaggtatgtgtttaacgtggatctggctgatttctttccttcaatcaactttggaagggttcgggggtttttcatcaacgacaaaaactttagtctgcaacctccggttgctacagtgcttgcgcagatagcctgtttcgagaatcaactcccacagggttctccatgttcaccagttatcagcaatctgattggtcatgtgctcgacgggcgcttagccaggtttgcaaagactcacaaatgcacctactcgcgctatgtcgacgacattaccttctcaacgtcacggaaacattttccacccgagattgggacacctatcgctgggactgctgcctggcaggctagcaatgaacttcgatctcgcatcgaaaatgcaggctttaagatcaacgacaagaagacaaggatgcagtatcacgcctccagacaggtggcaacaggactggtggtgaacgagaaggtcaacgtgaggcaggaatatttcagagctgcacgaaatatgtgcgatgctctatttaaaaccggaagttacttccggatggtcccagctacactgaccggcggcgctgtaggtgatcccccagtaaagaatgtcataacaagccataaccagctcgggggaatgctcgcccatatttaccaagttaagaatagcaccgacttgcgcgccgatgacgtgaaaaaagcgaagcccactgccacccggagcttgtacttcaggtttctgttctacaaaaacttcgtcgcgaacaaaactcctgttatcgttcccgaggggaagacagataccgtttatctgcgggctgcaatccggtatagttcggcgtaccaccctagactcggggaattaaaatccgggaagttggagactaagattaggttcatgaatttctccaagatcgtgcacgatgtgatgcagcttgggcacggcacttccgaacaaaaatttttgatagcggattacgaacggaatcttagaggctacagacatgcccccctggctcacccggtgatcgtccttttcgataacgacgatggagccaagagtctgtttggttatgccaagaacaagcgccactctaagatcggcctggactctaccgacccattttactacttgggctacaatttgtatctggtaaagacccctgaatttgggggaggcaagaagtcctgcattgaggacctattcccctcaggcctgcttaagacgattatcgacggtaaagtgtttgaccctaacaaagaacacgaggaagctggcaaatatggcaaggtggtgtttgccaaacaggtggtgacgcccaatgccagcactatagatttctccggcttcgctccgctgctggaccgtatcgtagccgtactcgatcatcatgcaacgttaaaaaaggcaccacctgccccgttagcagcagcccttgtggcaacttcctga

SEQ ID NO: 8083 - RNA, 1575 nt, synthetic construct
  source 1..1575: mol_type = other RNA
atggatgccgaccatccacgcagtggtgtacttatcgcatctcgttctactaggaagcaggagaatagtagattctggtttgcttcccacggcttccataagggacggacaatcatctccaacgcggaggtgcatcgccgcagacgcttcgtctttaacttagacctggaggatttcttcggaactatcaatttcgggagggtgagaggcttcttcatccacgacaccatgttttctttagaaccaaaagtcgccaccctcatcgcacagatcgcgtgccacgaaaatgcgcttccccagggttccccatgtagcccggtgatctccaatctaattggaaatatcctcgacagcaggctcttggccttagcaagagacgcgcactgtacttatacaaggtacgctgatgacctgacattctcgactaacgaaacactattccccacggagattgctgtgaacgtgcacggggcagattgggaggtcggcgtgaaactgcgtaaaacgatagaaggcaccggatttttcatcaatctggccaaaacccggatgagtttacggcaatcccggcagacagtgactgggctggtcgtgaacgccaaggccaacatcaatcaggattattacagagccgcccgagctatgtgcaacagcctttttcagactgggtattatttcaggcccggagacaaccccgcctcagctacagataagttgggcccactagacggtactctttcccacatacacttcgttaaggcacgccgggaccgccaccctaaagtcaataaactggccaaagccgcgggggaatttcatccccctagggccccagaggagctgtaccgaaagttcttgttttacaagtactttgcagcgccaacagctcctctgattgttacagagggcgtgagcgatataacctaccttcaatgtgcaattcgtgccctcgttaaaaagttcccgttgctggccgaggaagtcgacggcaaggccgttaggctcgtgcattttctgaaaagctcaggcaccagcagagaattgctgaatttgggccatggagctgctggacagggagccctgattagccgatatgagaacatgctcgaggattttaagcacaaacctatggcccaccctgttattatactctgcgacaatgacgacgggctgaaatcggtgattaagaacgccaagagtaagatctcaaagattgtctctacgacgaccaccgatcccttttaccacctcgggcttaatctgtacctggtaaaggtgcccgaaggcgcaccgcccgttgataaggatattgagtcactgtttgatcccgcactgctcgccacactgctcgacggtaagaaattcaaccctaaaaaggagcatgctgaccataccgaatatggcaaagtaatctttgcagaagccgtagtgagagccaacgccggcaccgtggacttctctggttttgaggggctgctgactcgaattgaagatgtgcttcggcactatgctgccttgatgaccgctgctgcaatacctgcagcagctgcaccaggagctgctgccgctccttga

SEQ ID NO: 8084 - RNA, 1770 nt, synthetic construct
  source 1..1770: mol_type = other RNA
atgagcagcttggaaaaactgcagaaggccaagagtctaaccgaccttgctaagctgctcggctttactcccaagggagtgagttacgtgttgtacaaaatggatgcagccaaaaagtaccgttcattcgacattcccaaaaaatccgggggtgtccggactatccatgcacctgagccgcaactcgctttgttgcagaccaggctggcggaactgctgtatgcctgcgtgcacgagaaaaagaagacagacagacggttttggttcgcttctcacggctttcatcagggacgaacaattgttagcaacgccgaggtgcatcggagaaggcgattcgtattcaatcttgatctggagaatttctttggcaccatcaatttcggaagagtacgcggcttcttcattcacgactcaatgttttctctagaacctaaggttgcgacaatcatcgcccagattgcctgccatgataacgcactgcctcagggttcaccctgtagccccgtcatttctaatctgatcgggaacattcttgattcgcgattgcttgcactggccagggatgctagatgcacttacactcgctatgccgatgacctgacctttagcacaaacgagaaactcttccctaccgagatagccgtgaatgtgcacggggccgactgggaagtagggaaaaagctccgcaaggaaattgagaaatccggcttcttcatcaacccagctaagactagaatgtccctgcgccggtctagacagacggtcaccggccttgtcgtcaacgaaaaagccaatatcaaccaggattattacagggccgccagggccatgtgtaattccctgttccagacagggttttatttcaagccaggagacgatcctgcggacgccaccgacaacctaaatccattggagggtacactcagccacatctactttgttaaagctcgtcgtgataggaagccccgcgtgaataagttagcaagagctgccggggaattcaatcctccacgagcaccagaggacctgtaccggaagtttctcttctacaaatattttgcagcccctaaagccccgctcatcgtaactgaggggatttccgatatcacatatctccagtgtgccatccgggctctggttaagaaatttcccctactgggtaaggaggaagatggaaaggtgattagactggtgcacttcttaaagcccaccggcacctcgagggacatattgaacctgggacatggtgctgccggtcaagccagtctgatatcctcttacaccaacaacctgaagaactacgcgcataaaccaatggccaatccagttataatcctgtgcgacaacgacgacggacccaagacagtctttaaaaacgctgagaagaagggcggaaccaaaattactactacgacaatcgatcccttctactatctcggcgagaacctctacttagtgaaagtccctgaaggagcaactccacacccccgggaaatagaagagctctttcaaccggccctgcttgcgaccaaattaaatggcaagtcattcgacccgaaaaaagaccacggcgatgatacgcattatgggaaggtggcgtttgccgagagtgttgtgagggcgaatgctagcacggtggacttttctgggtttgagaagctgctcgaacgcatcgaggctgtgcttaagcactatgccgctctgttagctgctccagccgcaccagctgcagcacctgcagctcctgcagcaggcacagcaaccccctga

SEQ ID NO: 8085 - RNA, 1758 nt, synthetic construct
  source 1..1758: mol_type = other RNA
atgtcccagctcgaacggctgaagcaggcgaagaacctgacagatttggccaaactgctggggttcacccccaccggagtgtcgtttatactctacaagatggatcccgccaagaaatatcggagcttcgacatcccaaaaaaatcaggcggtgtgagaacgattcatgcccccgaggcacagctggcccttcttcagtccaggctagccgacctcctgtatgcatgtgtcagaatcagaaagaaagaaaacgcgcgcttctggtgcgcttctcacgggtttcatcagggcaggaccatagtgagcaacgctgaggctcatcgcaggaagcggttcgtattcaatctggacctgatggatttcttcggcaccataaattttggtcgggtaagaggcttttttatacatgactccatgttcgggctggaaccgtccatcgccacattgattgcccagattgcctgccacgataatgccctgccccaaggcagtccttgttcacctgttatctccaacctgattggcaacattctagacgctcggttattggcccttgccagggacgctcgatgcacttacacccgctacgccgatgatttgacattctcaactaacgagaaattgttccccagcgagatcgcagtgaatgtgcacggggcagagtgggaggttagcgccaaactcaagaaggccattgaaaaaactggtttcttcatcaatcctgttaaaacccggatgagtcttagacgttctcggcagacagtcaccggactggtggtgaatgacaaggtgaatgtctcacaggactattacagggccgcacgcgccatctgcaacgctctatttcagacagggaagtaccataaacccggagacgacctcgccgacgcttctgacaatctgaatccggtggagggaatgttgagccacatctactttgttaaggccagaagggatagactgcccaaggttaacaaactggcgaccgtggctggcgaatttcgctctcctagggctccagaagagctttaccgaaagttcctgttctataagtactttgcagcccctaaggccccactcatcgtgactgagggggtttcagacataacatacctgcaatgtgccatccgtgcactcgtgcaaaagttcccgctgttagcaaaagaggaaaatggcaaagtagtgcgtctcgtccactttctgaaaagttctggaacgagtcgagatatccttaacctaggtcatggtgctgcggggcaaggcgcgttaattagccagtatgaaaacgctctcaaaaagtatccccacaagccaatgagcaacccagttattattctttgtgacaacgatgacggcctgaagtccgtcatcaaaaacgccaagagtaagattggaaagatcgtgtcgactacaactacagattccttttatcacctcggcctgaatctctaccttgtaaaagtgcctgagggagtgccccctgcagataaggatatcgagtctttgttcgatccagcattactgaccactctgttagacggaaagagctttaatccaaagaaagaacatgccgaccacaccgaatacgggaaggtggtgtttgcagaggcggttgtccgctctaacgctggcgctgtcgatttttcagggttcgaaggtctgctgacccgagtcgaggatgtcctcaaacactatgccgcgttgagcgccgctacggtagctgcacctgctgcaggagctgcatccgccgcaaattga

SEQ ID NO: 8086 - RNA, 1236 nt, synthetic construct
  source 1..1236: mol_type = other RNA
atgagctcccttacccagctgcaacgagctaaggatctggcagacctcgccaaactactcggcttcacacccaaaggggttagcttcgtgctttataagatgggggagactaagaagtataggtcattcgagattcctaaaaaatccggtggctttcgaattattcatgcccctgagccccagctcgcattgctgcagcgtcgtctcgcaaagtttctctatgactgcgtacaagagaggaaaaagaaatacccaaggttttggttcgccagtcatggatttcatcaaggaagaaccatagtgtctaatgcggaagttcataagaggcggagattcgtgttcaatatcgacctggaaaactttttcggaatgatcaacttcggacgcgtgagggggttttttctgcacgactccatgttcgtcctagaacccaagatcgccaccattatagctcagatagcctgccacgagaacgtcctcccgcagggatcgccttgttcaccagtgatttctaacctgatcggtaacatcttagactcaagacttctggccctggctcgcgatgctagatgcacatacactaggtatgcggacgacctgacattttcaacaaacgaaaagtttttcccaaccgagattgccgtaaacgtccacggggccgattggcaggttgctagcaaacttaaaaagaccatcgaaaaaaccggctttttaatcaatcctgcaaagactagaatgtccctgagaagaagccgccagacggtcacaggcctggtggtgaacgataaggtaaatatcaatcaggactactaccggaccgcccgggcaatgtgtcacaacttgtttcatactgggttgtatttcaaacctggccacggtcccgcagatgcgaccgataatctgaatcctctggagggcacgttgagtcacatctacttcattaagaaacgccgcgatcgttgccagcgagtgaacaagctcgccgaaaatgcgcgcgagttttatccacccaaggccccggaagcactgtatcggaagttcctgttctacaaatacttcgccgctcccgcagccccccttctcataacagagggcgtctccgacattatctacctgcagtgtgctatccgagccctggctcaaaaatttccactacttgggaaagaggaagctggtaaggttaagtctctcgtgaggttcttacggccaagtagcacttctcgggatgtgttgtga

SEQ ID NO: 8087 - RNA, 1773 nt, synthetic construct
  source 1..1773: mol_type = other RNA
atgagcagtttggagaatctaaggaaggcaaagtccctaaccgatttagccaaactgctgggattcactccaaagggggtatcctatgtgctgtataagatagatgccgccgaaaagtaccgttcatttgagattcccaagaaatctggaggcaccagggtaatccacgccccggagccacagcttgcattgctccaatctaggctggcagagatgctctatgcatgcgttcaggaacgtcagaaggtgaacaggaggttttggttcgccagtcacggcttccatcagggccggaccattatttcaaacgctgaggtgcataaacgccgacgcttcgttttcaatctggaccttgaggactttttcggcacaataaattttggccgggtgcgggggttctttatcaatgaccaaatgttttccctggagccaaaggtggctactattatcgcacagatcgcctgtcatgacaacgccctgccgcagggatcaccatgttctcccgttatcagcaatctgatcggtaatattttggacagcagattgctcgctctcgcccgcgatgcgcattgcacctatacccggtacgcagatgatctgacattctctactaatgagaaactctttcccacagaagtggctgttaatctccatggtgccgaatggcaggtaggggttaaacttaagaaggcaatcgaaaaaaccggcttttctataaaccctaccaagacgcgcatgtccttcagacgaagtcgccagaccgtgacagggctggtggtgaatgacaaggcgaatatcaatcaggactactaccgcgccgcaagagccatgtgccacagcctgtttagaaccggatgttattttaagcccggcgacgacgccgcaaatcccacagataacttaaacccccttgaaggcgctctgagccacatatacttcgtcaaatccagacgagatcggaaacctaaagtgaacaaggtcgccaaggccgcgggtgaattcaacccccctagggctcccgaaaacctgtaccgtaagtttctgttttataagtacttcgccgcccccactgcccctattattgtgactgagggaatttcggatatcacttatcttcagtgcgcgattcgggcacttggaaagaaattcccactactggctaaagagcagggcggcaaaataacaagacaggtgcacttcctgaagccctctggaacgtcccgagaaatcctgaacttaggccatggcgctgctggccaagcgagtctcgtttcttcctatacttccaacctaaaacactacactcataaaccaatggctaatcctgtgatcatcctctgtgataacgacgacggtcctaagacggtattcaaaaacgctaagaccaaggctggggtcgccatttcgaccaccaccgcggatccattttactacttgggggacaatctgtacttggtcaaagtgcctgaaaaactggccgctatccctagggagatcgaagatctcttccaaccagcactcttggggacaacgcttaacggtaagacattcgatccaaaaaaggaccacggagatgccaagcactacggaaaagtggcctttgccgagagcgtggtcagaccgaacgccggaaccgtcgacttcagcgggtttgaggacctcttaactcggattgaggacgtcctgaagcactatgctgggctgagtgcagctagcgcgatgactacactgaacacatcagccgtcgccgctggtacatcagcagcaccttga

SEQ ID NO: 8088 - RNA, 1725 nt, synthetic construct
  source 1..1725: mol_type = other RNA
atgtcccggctgcagagcttgcagcaggccgaaaacctcgatgatcttgcgaagctactgggtttcagtcccactgggttaagctatgtgttataccgcataccagaggacaaaaaatacagggtctttgatgtgccaaagaaaggcggaggtgtgaggattatcaaagccccgaacgaccgtcttggcctcctgcagcttcgccttgcagagctcctcagcgactgcggagaagagatccgcaagaagaaacaaaaccactggcattctagccatggtttccgaaaaggccgaaatataattagtaacgctgatgcccatcgccgtcggcgcttcgtgttcaacctggacctcgaggattttttcggaaccataaactttggacgggtaagagggctgttcattgccgataaagctatggccctgaggcccaatatagccaccttaatcgcaaaaatcgcttgtcacgacaatgccctacctcagggctctccttgcagtcctgtcatatccaactttgtcggcaacattctggactcgcggatgcttgctttggccagagacggccggtgcacctatactcggtacgccgacgaccttacgttctctacaaacgagaagatctttcccaaggagatcgcagttaacctgtttggcgcagactggggaatcggggaaaggctgagaaaggaagtggagggcgccgggtttcagatcaaccacgggaagacccgcatgttcttgcgccaatcaaggcagactgtgactggcctggtagtaaatgcgaagaccaacattaatcaggattattaccgtaccgttagagctatgtgtcactctgtgtttaagtcagggacatatcatcgagagacacctgccggagcaaaaacaaccacgaacttagcccccctggaaggcatgctgtcccacatttacttcgtgaaggcaaggcgggacaggacatacaagaataactcggccgctagggacgctggagaattccgaccacccgaggctcccgtgcgtctatacgataagtttctcttctacagacggtttgtcgccttgcctgcccctctgatcgttcctgagggcaaaacagataatgtctacgtgcattccgcaattagaaatctcgtatctagtttcccaaggttgggcacgatgtctgggactaagttcgaatgcctggttgacttcctgaaaccaacacctatcactaaagacgtcatgaatatcggacatggggcctccggtcagaacgcgctgattagcaaatatgcgaagcaagtgaaaagatatccgcacaagcccctcgatcaccctgtgattatcctgtgtgataatgacgacgggcccagagcggttttctcatccgccggtagactggcagggaagacaattactaagcagaccaccgatccattttactatctcggcgataatttgtatctcgtcaaagtgccagaaggaactccggctaccgaccgagatatggaggatctgtttgatccggtgttgcttgcacaaaaagtcggaggtaaaccatttgacaagaagaaggagcacggtgacggcaccgcttacggaaaggaaattttcgctaatcagatcgttagaccaaattggcagacagtgaattttgagaacttccgcgagctgctggaaaggatcgaccaatgtatcacggattattcaagccggaagcccgcagggagcccctga

SEQ ID NO: 8089 - RNA, 1734 nt, synthetic construct
  source 1..1734: mol_type = other RNA
atgaaaaggctgaaagccgctaagtcccttgatgacctggcactgatgctgggatttacgccgaagggactggcatacattttgtatgtaatggccgatgctgccaaatacagtacgttcgaaatccccaaaaaaaccggcggtagccgtacgatcagtgcacctattccccatctgaaactcctgcagggcagactggccgatctgttgacaaagtgcgtgactgagataagcaaggaaaagaagaattattggagggcctcacatggcttccaaccaggcaagactgtggtgtctaacgctgaggtgcacaagctgagacggttcgtgtttaatctggacctaagcgattttttcgggaccatcaactttggtagggttcgaggattcttcatccgggacaagacatttgagctggatccagctgttgccacggttattgcacaaatcgcgtgccatgataacgctcttccacagggctcgccttgctccccggtcataagcaacttgatcggtaatattctagacgtcagattattggccctagccagagattgcgggtgtacatataccagatatgccgacgatatgactttctctacaaacgaagtccttttcccaacagagatagcagttaatattttgggggcagaatggaccatcggaaagcgcctcgacggggaaattaagcgagcgggctttgccgttaaccccgccaaaaccaggatgagtctacgccgttcccggcaaaccgtgaccggcttagtggtcaatgccaaagccaacattaacatagactattaccgcacagccaggtccatgtgtcacagcctcttcaaaacaggtcagtatttcagacgggatggcgaacaaatcgaaagtctcgggccactcgagggcatcctgtctcacatatactttgtcaagacaaggcgtgacaggggagcgcggatcaacaaacttgctaaggaggctaatgagttccggcctcctgaagccgctgtagcactctacagaaaattccttgcctacaaatactttgtcaaccctgcagcccccgtgattgtgaccgagggcatctcagatatcacttatattaagtgcgccatcagaagcctggggaaagattttcccctgcttgaggagtccaaggacggaacatctaaacgactcgtgaatttcctgcgctcaactcccaccaccagggacgtgttaaatctcgggaatggcactgccggtcaggctagccttgtgtctcagtacgctaagacggtcgctgcctttccttcacgcccgatgaagcaccctgtgatcatcctgtgtgataatgacgacggacccaaaaatgtgtttaagaacgcgaaaactaaggcacacgtggaaatatcccataccacaacagagcagttttattacttgggggaaaacctctacctggtcaaggtacctgagggcgtcccacccgagatgcgagagattgaaaaactgtttactgctgaactgttggcgacccagattgacggtaagtctttcgatatgaagaaagaccatggaaacgaaaatgcatacggaaaggtggtatttgcagagaagatcgttcgcttacagtggaagaccactgacttctcagggttcgctccactgctgagtcggctcgaggcctgtattacccactatcaggcgctcacatccgcccaggtggagactgaggctgttgccgcaaccgctgcatga

SEQ ID NO: 8090 - RNA, 1752 nt, synthetic construct
  source 1..1752: mol_type = other RNA
atggacactctggagcgcctacaaggcgccaagaacctcacagatttcgccaagctgctcggcttcactccaaaaggaatgagctacgtgctgtatcaactcccgaacgacacgaaatatagaacttttgagatccctaagaaggcaggtgggaccaggaccataagggcccctgaacatcgactcgccctgctccagacacggttaggcgagatgctggatgaatgcgtgggcgagctgaagcagcgcaacaggaaattttggagagctagtcatggtttccagaaaggaagaaccattgtgagcaatgctgaagtacacagaagaaggcgcttcgttttcaatgtagatttggaagacttctttgggactatcaatttcgggagagtgcgggggtttttcatcaacgacaagtctttttcgttacacccaagcatcgccacgctcattgctcagatcgcgtgccacgaaaacgtgttgccccagggaagcccttgctcccctgtgatctccaatctcataggaaatattctcgacgctaggctgctagctcttgcacgggacgagcattgtacctacacaaggtacgcagatgatctgacattctcatctaacgagggtttatttccaacccgtattgcagtaaacgtgcacggcgccgaatggaaagtgggtaggaaacttcggcaggagatcgagggtgctggcttcaaactgaatgaaacgaagacccggatgagcctgcggtgtagccgtcagactgtgaccggattggtcgtcaacgcgaaacctaacattaagcaggattattacagaggcgtgcgcagtatgtgccattccctgttccgcaacggagagtatcaccggcgggttgctgagcgcgaagacacaaccaatgcgttgaccccattggaggggatgctttcccacatttactttgtgaaagcccgacgggatcgagcctacaaggtcaacaaactcgccatcgaggcagccgaattcagacctcccagggcgccagttgagctttaccgaaagtttcttaagtataagcactttgtggcccccccagcacctctgattgtcactgaaggaatatcagacataacctacttggagtgcgccatccgcgcccttgctgcatcatttccggtcctggcaaaaaatgatggcggcaaaatcgtgcgccttgtgaattttctaagaccctccggcactgccagggatatactgaatctgggccatggagcgtctgggcaggctgctctgattgggcaatatcgaaatatgctgaaggagtaccgtcacatgcccatggtccatcccgtgattgtgctgtgtgataacgatgacggcccaaaggaggtttttaagagtgcagccaagcgctccggactcacgatcagtacaacaacaactcgtcccttctatcatctcggggacaatctgtatctggtgaaggttcctgagggcgccttaccacagtctaaggaaattgaagaactgtttcagcccgccctactggccacaaaagttgataacaaaccatttgacccgaagaaagaccacggtgacgaggccgcatacgggaaagtcatcttcgctgagaaggtcgtaagaccccactgggcttccatcgacttcagcaacttcacagagttattgtctaggatcgaacaatgtctgacccattacgccgcggtcaagagtgctaccactgccgcacctgctgcagccgcttcttcaccctga

SEQ ID NO: 8091 - RNA, 1773 nt, synthetic construct
  source 1..1773: mol_type = other RNA
atgacgggaattgatctgttaaagcaggcaaaatcgctcaccgatattgccaagctggtgggattcactcccgctggcctgagttatattctgtacaggatgcctgagtctgccaagtaccgggcttttgagatccccaagaggtctgggggtacaagaactatcaaagcccccatgagagagttggctcttctgcagagccggttgaataccttcctcggccagtgcgcagaagagctggcaagagacaacccgaggttctgggccgctgctcatgggtttagaaaagggcgcaccattgtaaccaatgccaatgcccacagatctagaaggtatgttttcaacgtagacatcgctaacttctttgacagcataaacttcggtagagttcgaggtgtgttcataaaggacagggcatttaatctagagccaacagtggccaccatcatcgcgcaaatcgcctgttttgagaacgccctaccgcaaggaagcccttgctcccccatcattagcaactttgtcgcagggatactggacgcccggcttctccgtctggccaaacacgccagatgtacatacacaaggtatgcagatgacctgaccttctccacaaacgagcggctgttcccaaccgaaatcgctagggagcttgctggtccagattggtgcgttggccctcgcctgtctgaagtggtcgaagctagcggctttcaactcaatcccggtaaaacgcgcatgagcctgcgacggtcacgccaaacagttaccggccttgtcgtaaacgaaaagcctaacatcaaacagaagtattacagggatactagatccatgtgctctagcctgttctcatctgggaagtggcaccacggtaccggagttgacgaacaacagacttccaatctgcgtccactggagggccgcctggcacatatatattacgtgaaagcccgccatgatcggtcccagaagcagaataagcacgcggaatacgtccccccgacagctcctgtggaactctataggaagttcctattctacaaacatttcgtggcaaatgacttgcccactgtggtgaccgagggcgtgtcagacatcacctacttgaagtgtgccattcgaagtctgtctgcaaagttcccatccctcatcgggatgtcacgcgggaaactcaaggtcgatttacagtttctcaaccctactgggactagccggtcagtactgaatcttggacatggcgcctccgggcaggcctcattaatacagcagtacagtaaccgacttaagaactataaaaaccgtccccttgcgatgccggtcatcattctctgcgacaatgacgatggccccaaggaagtcttcaagaatgcctccggaaaaacaggaaagaccattagcaaaagtacgacagaccctttttattacttgggagacaatctctacctggtgaaagttcccgagaacggcacacagtcgcgcgatatggaagatatgttcccagcctccgtgctagatgagttactggaaaataagccatttaacaagaagaaagagcacggagacggcactgcttatggcaaggtcatttttgcggagaaagtggtgcggccaaaaacgggcaccagcatctttaatgactttgaggatctgttgactcgaatcatcgcgtgtattgctcactacgcagccattcgggccaccaaagccgctgctagtagtcctgcccctgctttgtcagtgcctactgcagcagcggtggcagccccaacaacgtga

SEQ ID NO: 8092 - RNA, 1770 nt, synthetic construct
  source 1..1770: mol_type = other RNA
atgagtaagctcgaacgcctcaagaaaacaaaaaacctgtctgatctcgcaaagttactcggttttaccccaaagggcttgtcctacgtgatttaccagataccagatacaaagaagtataaggttttcgacattcccaagaagacaggtggaatcaggaccatcaaggctccggtggaccagctgtctctgcttcaatcgagattggccgaactcttgacagagtgtgtcgaagagctgattaaggacaacccacgctactggaccgccagccatggttttagaaaatccagaaccatagtttccaacgccgatgctcacagaaagcggcgatatgtgtttaacgtggatctggctgactttttcggaaccatcaatttcgggcgggtacgtgggtatttcataaaggacaactcatttggtctggaccctgcagtggcaactgttattgcccagatcgcatgtcacgagaacgcactgccccagggcagtagttgtagtcctgtgattagcaacctcgtggctaatatcttggacgcacggctactgaggctggctaaggctgccggatgtactttcactcggtacgctgatgacttgaccttctctacaaataaaagcattttcccttccgaaattgccaaagaactcgcaggggccaattgggaggtcggcaagcagctgcaggacctgattgaaaggtctggatacactctgaacatagcgaaaacccgcatgagtttgcgtcagagcagacaaaccgtcactggcttggtggtcaatgagaaaccgaatatttctaaagactactaccggtgcgtacgggctatgtgccattcggtctttaccacagggtcttggtatagacccgtccaagctgcgggagccgttcctgtcccaactgcatctctaaggcccgtcgaggggatgctctcccacatctatttcgttaaggccaggcgagatcgttcccagaggatgaacaaagacgctggttttataacgcccaaaacgtcaacgcgcctttataaggagttcctgttctataagcacttcgtggccagcccttccccaatgatcgtgacagagggcatcagcgacatcacctatataaagtgcgctatccgagccttagccgccaaatttccgctgttagccagtgttaaaggcggaaacgtgacccctgaggtggccttccttaatccaacggggacatccagatccgtgcttaatcttgggcacggagccagcgggcagggaaacttagtagatcaatacgcatcatcactaaagtgctaccgccatctgcctctcacatctcctgttattatcctctgtgataacgatgatggcccaaaagaagtgtttagcaaggcacagaaaaagagtggagtgcccattagcctgactactacaagctcattctaccatctgggccagaatctgtacctggtgaaggtgccagagggcgttccctcagccaaaagggatatcgaggacctgttccccgccgctcttcttgggcagctcgtagacggaaagccctttgataagaaaaaggcccacggcgatcatactgcttatggcaaagtgatcttcgctgaaaaagtggtccgacccaatgccgccaaaatcgactttaccgcgtttgaagagctgctggaacgcatcgagggctgcattaaacactacgctgccatcgtagcggcaaaagctctagccgcgacagcatcagcccctgcagcaaagacctccgcgaccggtccatga

SEQ ID NO: 8093 - RNA, 1755 nt, synthetic construct
  source 1..1755: mol_type = other RNA
atgtctgaacttaataagctgaaggcagctaagaatctgagcgacgtggctcagttgttgggattctcccccaaaggcctggcctatgtgctgtataaacagaaaccagagcagaaatacaaacacttcgagatacccaaaaaaacgggtggcacccgaagcatctgcgctccgacatctcagctggcacttctgcaggaacggctcggtgagcacctataccaatctgtgctcgagttgaagaaaaaggagccgtacctgtgggctgcaagccacggatttcacaaggggaggacgatcgtgtcaaatgctcaagtgcatcggagaaggcgatttgtgttcaatgttgacattgaggatttctttggtgccatcaattttggacgcgtgagaggatatttcatcaaggatcgcgcgttcgagcttgacccgaaggtcgccacaattattgcccagatcgcttgccatgaaaacgcattacctcagggctccccatgcagcccaattatttccaatctgatcgggaacatactcgatttgcggctgattgccctcgcaaagaatgcaaaatgtacttacaccaggtatgccgacgatcttactttttcgactaacctgaaacggttcccctccaagattgctatctcagttgaacaaggcaaatgggtagccggcgatcggttggtgacagaaatagggcgcgcaggatttaacctgaatagcgtgaaaacacgtatgtcgcatcgacagagtaggcagaccgtaaccggtttaatcgtaaataagaaggttaacatccggcaggaatactacagaactgtcagagtgatgtgtaactccgtgttccagaccggcgtctattaccgacctatcaaggacgaggagacagagcctatctttctgaacaatctgaatcccctggagggcatgctgtctcatatttatttcgtgaaagcacgtcgcgatagacaaccaggcgtcaataagcttgctaagtttgccaacgagctggtggttcccgaggcccctacccaattgtaccgtaagtttctatgttacaagcactttgttgcccttgcgtccccactcatagtgaccgagggcgttagtgacatcacgtacctaaagtgcgcgatcaagtctctgtctaaccagttccccaacctcgtcgaaaacaacaatggaatgcgccaggtcgcaatcaagttcctcaagcctactgggataagccgggatatactgaatttagcgcacggcgccactgggcaggctagtcttattagtaactacgcaaaccagctaaagaaatatacacataagcccatagatcatcctgtgatcattctctgtgataatgacgacgggcccaaaacagtctttaagaatgccaggtcaaagaccggtaaagatgtgagcaaaacgacaattgacagtttctatcacctcgttgaaaacctgtatctcgtcaaagtaccagagggagatccacctggaatcagagagctcgaagatctgtttcctaacgaatggttcgacgtaaaaatcaacggcaaaccattcaaccgcaagaaggaccacggggacaccacagcctatggaaaggtcatttttgccgagagcgtcgtgaggcctaacacccacaaaattgacttcgccggcttcgtgcccttgctgtcaagaattgaagggtgcatcgcccattacaagtcaaggaaactggctgaaatgactaccactgctgcctccgggttatga

SEQ ID NO: 8094 - RNA, 1743 nt, synthetic construct
  source 1..1743: mol_type = other RNA
atgagcacactggaaaggctgaagaatgctaaggacctgtccggcctagccacaatcctgggcttcacacccaagggggtgtcctatgtcctgtacaaactcaaacctgacgagaagtacagaaccttcaaaattcccaagaagactggcggcgagcgcacaattcaggcgccagagcctcggcttgctcttatgcagaaaagattggctgagcacctgtacgaatgcgtggcagaaattcaacatgagtacccccactactggcgcgccagtcacggattccagaagcggaagactatcgtaggaaacgccgccgttcacacccgcaggcgatatgtgtttaatgtggacatagaagacttcttcggctctattaattttggacgggtccggggcttctttatctctgacaaaacattcgcgcttgaaccggccgtggcaaccgttatagcccagatagcctgccatgagaatgctttgccgcagggttcaccctgtagtccgatcattagcaaccatatcggaaacatcctggatctaaggcttttagctctggctcgggatgctcactgcacctatacgcgctacgccgatgaccttacctttagcactaacctgaaagagtttcccgatgagatcgccgttgatcctgggactgggaggtgggaggaagggcatcggctgaggaaggtgatagaggattcgggcttcaggctgaatccaatcaaaacgagaatgaccttgcgtcagtcccgccagtctgtcaccggcctggtcgtaaacgctaagcccaatattgaccaagactactatagacgagtacgtgccatgtgcaactcactctttggaactggacaatatcacagggtggtgggaggtaaggatgaagtgacaagcaacctaaacccactcgagggcatgctgtcatacgtgtatttcgtcaaggcaagaagggaccgaagcctgcgggtgaataagaggagcaaaaacgaaggcgagtttaatccacctagagcaccaatagagctgtaccggaagtttctcttctacaaacacttcgtatcgcctccactgcctttgattgttacggaaggtgtcagtgacatcgtctacattgagtgcgcaattagagctcttgcaaagtcctttccacgactcgccaaagaagaagacggcaaaatcaagagacaagtgaacttcctccgcccctccgacaccacacgagatgtcctgaccttaggtcacggagccagcgggcaggccaatttaattgggcagtataccagctccctcaagaagtatgcccaccagcccatggctcatccggtcatagtgctgtgtgacaacgatgatgggcctaaaaaggtgtttaaaaatgccaaggacaagtgtgatatggcgatttccactagtactatcgaccctttctactatctcggtgacaacttgtatctcgtgaaagttcctgaaggtgcagccgcccatccccgcgaaatcgaagagctgttcaaacctgagatcctggcttacaaaatcggcggaaagccatttgatagaaaaaaggagcacggggatgagacagcctatggcaaggtgaagtttgccgaagaggtagttaaacccaatgcgagtactatcgatttttctgatttctctgagctcttgtcacgtattgaccagtgtttagcgcattacgggaccgtggttgcagcttctccagtggcagcagctgcagcctcatga

SEQ ID NO: 8095 - RNA, 1707 nt, synthetic construct
  source 1..1707: mol_type = other RNA
atgtcatatctggatcgcctaaaatccgccaagaatcttagtgatatcgctaggctgctcgggtttacgcccaaagggctctcctacgtgctgtacaagacaggagacacctcgaattaccgggaattttttataccgaaaaagaccggcggcacacgcaaaatcttagcccctgaacggcgcctggcgttactgcagtccagactcggggatcttctttatggctgtgtggaggaacttaagcgtaaggatccttatttttggcacagctcgaacggcttccagaagggtaggtctaccatcagcaatgccaaggcgcacagcaggaggcggtacgtgttcaatgttgacctcgaggacttttttggcacaatcaatttcggtagagtgagaggattcttcattcatgacaggaacttcaggattgagcctccagccgccactattatcgctcagatcgcatgtcataagaactccctgccacagggctcaccttgcagccctgtgatctctaacatgatcggaaacatcttggacgtccggttgttagctctggcacggaatacacactgtacttatacccgctacgcagacgatctcaccttttcaacaaatgaacgggtcttccctaacgagatcgctgtgacgctagagggtaaagggtgggaactgggcaacaaattgcgagaagagatagagcgagccggctttcgagtgaacgacaagaaaaccagaatgtccctgcgggattcacgtcaaacagtgaccgggcttgtcgtaaacgctaagccaaacattaatcaggattattatcgttctgctagggcgatgtgcaatgctttgtttcaaaccggtaagtatcatggagcagacaaacaggagacagcaaacttgaatagtctggagggtatgctctcctacatctatcatgtgaagattagaagagatcgcactcacaggattaataagcttgctagacaagctaatgaattcagggccccctctgcccctattgaactctatagacggttcctcttctataagtactttatcgccagctcactgcccactattgtgacagagggggtcagtgacatcacctacattcgctgcgcgattcagtcactaactccaagtttccccctgctggccgagaaagtggataaaaaaatacgcctgagtgtccgattcctgaagccgtctggcaccactcgtgatgtgctcaacctgggacatggcacgagtggacaggtcaaacttatctccgagtacaagaacaatttgaaccattacaaacacaagcccatggcacatccagttatcattctgtgtgacaatgacaaaggagcctccaacatctttaaggaggccgccagaaagtctggtacagctatacacttggaatctgaggagaatttttaccacatcagcaacaacctgtacctgatcaaagtacccgaaggggaaccaccagccgaaagagcaatagaagatctgtttatgcccgagctcctagcccaaaccctcgacggcaaacccttcgacaggaagaaggagcacggggacaaagcagcgttcggaaaggtaatgtttgctgagtacgttgttcgcccgaaccggactagcattaatttcagcaagttcagccagttactgagccgaatagaggcatgcattaaacacgattccgcccagcgcacttcttga

SEQ ID NO: 8096 - RNA, 1635 nt, synthetic construct
  source 1..1635: mol_type = other RNA
atgaaaactataactaggcttaagggagccgataagcttgatgaactggcgaaactgttgagctttaccccccggggtctgagtttcgtcgtgtacaagattgatacaatgaacaagtacagagttttcgaaatagcgaaaaaatccggcggaacaagaacgatccacgcccccgagaagcaactcgcccttctgcaaaccaggctggcgaacctactttattcttgtgtggcggagctgcagcaggaaaagccgaaactgtggcacgccagccatggcttccagaaacagaagaccacaatctctaacgcaaatccacatcgacggcgcaggttcgtgtttaacctcgacctcgaggacttttttggctcaatcaattttggccgggttcgtggatttttcatcaacgacaagaacttcaaacttaatccaaagatcgccactatcattgcccaaatcgcctgccatcgcaacgctctccctcaaggctcaccgtgctcccccgtcatttcgaacctgattggtaatattctcgacttacgactgatcgctctggcccgcgaaacgaaatgtacttatactcgttatgcagatgatctaaccttttccactaatgaaatgctgtttccaaccgagattgcaactaaccctcagggctccacatgggaagtgggcattaagctgcacaaggaaatcgagcagaccgggttcaagattaacccccgcaaaacacgtatgtccttgcgacggtcgaggcagacagtgaccggtttggtggtcaactcaaaagtgaacattaagaaggactactacaggtctgctagagcaatgtgcaatgccgttttcagtaccggcgaatatcatatcatcgacaaggacaagaatataagtgacctccgcagcctggagggtatcctgtcacatatatttttcgtgaaagcccggcgggacagagctccaaagaccaataagatggcaatcgaggccaatgagttcaagcttccgtccgctcccgtagagctgtacaggaagtttctgttctacagattatttgtcgcccctaaggctcctctcgttgtaacagaggggataagcgatatcacatatattcagtgtgcaatcagagcattggcaaaaagcttcccagctctcgctctcgaaaaagatggcaagcacaccagactactcagcttcctgaaccccagcggaactaccagggacgtgttaaatctgggtcatggggcctctggacaggcatccttgatcatgcagtactttggcaatctgaaaaagtacaagcacaaacccttggatcacccagtgattattctgtgcgataatgatgacggacctaaaacggtattcaaaaacgctaaatccaagtcaggattaacgatctctaccagtacaacagaccagttttatcacctaggcgaaaacctgtatattgtgaaggtccccgaggggaatcctgccaccatcaaggagattgagaaccttttcgacagtaagctcctgacagagaaattggatgggaaaagcttcgaccctaagaaggagcacggagatccaacttcttacgggaaagtggtttttgctgagaaaatagtccgccctaatgccggggaagggtga

SEQ ID NO: 8097 - RNA, 1689 nt, synthetic construct
  source 1..1689: mol_type = other RNA
atgtccagatttcagctgctgaaagacgctaccaccatcaatgatatcgctagccttctaaactataaagccaagacactttcctacatcttatacgtgttatctaaacaggatgactattacacgagttttgaagtacccaaaaagaatggcggagtccgcttgatccaagcacccaataaaaaacttaagcaggtccagaccaacctgtctggcttgttgaatgagtgcgtgaatgaaatcatcgaaaaggagcccaaatatttctatgcatcacatggatttctcgctgacaagaccataattacaaacgccaataagcataagaagaaacggtacgtgtttaacgtggacattgaaaacttttttgggtccatcaactttgggcgcgtgatgggattttttatgaatgatcgccactttcggcttgataagaaagttgccacaataatcgcacagatcgcctgtcacgagaatgcgctgccgcaaggttccccatgtagcccaataatctcaaacctcatcgggaatatcattgatatacgactcatcaccctagctaaaaagcataagtgcacgtacacacgttatgcggatgacattactttctctacgaatgtgaaacaattccctacttccatcgccaaaaagagagacgagacttgggaggtaggcactaagctcagcagggaaattcagaagctgggcttcaacattaacgaaaaaaagacacgaatgagcttcaataacagtcagcagatggttacggggatcgtcgtgaataaaaagattaatttcagccaggcctattatagggagctgcggtcacaatgtcacaacctgttcaaaaacggatcatatcatgtcaacaatgaggtatgcagcaatctcaacaaactgcagggtaagctcgcttacctgtacttcatccagaataacaagaagaacatcaagatagacaagaatgaggaggccaactttgggagtggcctcaataagctgtacagaaaattcctcttctacaaatacttcgtggcctcggagaagcctgtgattgtcacagaaggagctaccgacattgggcacctgaagctggcaattgatgccctggatgagaaagacatgaatctgaagttctttaatcctagtaagaccgggattaaactgctgaatctgggcgaaggtacaggcggccagaacaaacttatattcaattacaggtccatgatgaacaaactgggcaaaaacatgccagcgccctttagcccggttatcctactctgtgacaacgacgaaggcgcctctgacattttcaagactatcaacaacaagaagaacaagttttcctgtgagatttctctgtccactactgatcctttctataagctctgccacaatttatacttgatcaaggtgccagagtcaaagggagcagagacaagcattgaggatctgtatgaagaaaccgttttggataccaagttgggtgagaaaacattcaacaaaaccaacaagaagcttggggataacgagtatggtaaacagtactttctggactacgtggtcaggaagaataaaaatagcattgacttctctggattcactccccttttagacagaattaagttgtgcataagcaattgggaatctcaagaaaaatcctcacataacagtaccaactcgcactga

SEQ ID NO: 8098 - RNA, 1713 nt, synthetic construct
  source 1..1713: mol_type = other RNA
atgagcacactccaaaagctgaagaacgcaagaacgcgaagcgatttggctaagatattaggcgtaacaccatctgggctgacctatgcgctgttcgtgatcccccaggaagcaaaatatcacaaattccaaatccctaaacgatctggaggccatagggagatctcagctcccaattctcatatcaagctagtgcagagacgactcgccagcaagctctacgagtgtaccaaggaaattgaaaacgcccagcctaatcggaagaaagtgacacatggatttcagccaggccgcagcattatcaccaacgccgacagacacaagaaccgtcggtacgtgtttaatgtcgacgtgaaggatttctttgacagtattaatttcggccgcgtgcgcggcttttttaataaggaccgtgagtttctgttggataaggagatctgtaccgctatcgctcagattgcctgctgggagaattctttaccccaggggtcgccttgcagccctgtcatcagcaacctcatcggccacatcctcgatgtcaaaatgttgaaactagcgaaggagtccaaatgtcgctatacgcggtacgccgacgacatgacgtttagcacaaacgaacgcgaatttccctcatctatcgctatccgggatgcacaagacccaggtaaatggtccgtgagcactaaactggaaggactgattaaacaggctgggtttgaaataaatccacagaaaactcggatgcaaattgtcggctcaaggcagctagcaactggacttgttgtgaacaagaaggtaaacatcaaggaagaatactgccggcagactagagctatgtgcaatcacctcttcaaaaaggacgcatactttctgcagaacaccaaagaaggggaggcacctaagttgattaagaatctggacatcttggagggaaaattatgccacattcatgccgtaaagaccagggttgacctgacagaccagcagaaaaagtcaaggaagtttgatccgcctccgggtaccctgaggttgtataaaaagttcctcttctacaagaacttcttcgcgcaagagcgccccctgataatcacagaaggtgcctccgatattatctacctcagaaccgccattaggcactccaaaaagaagttcccactgctgtttgataaaactcttcagatcaggttcctgaaaaactccaagacagtgaaagaggttttaggcctgggagatggatgtggtggcattggtaaactggttgccacctatgccaaggagataagcgcttttggcagacccagtgccttccctattatcatccttatagacaacgatgacgggagtaagaagagtatattcaaggttgccaaggatgccgcaaaagcgactcttaagaaggacattgaaataagtatcgagtccaacgactgttggcaccatcttggggataatctctacctggtgaaagtgccacatggggggtcaaaatctcccaagagtatcgaggagctgttcccagagaagtggctgaaattttctgtggatggcaagattttcgacccctcgaaaaagcacggcgatcacacctcactgggaaaagtcgctttcgctaagaaagtcgtcgagactcatgccggtgagatagacttcggcggattcgactccctcttttcccttattgaaggggcaattgccgattatagaaaaaattga

SEQ ID NO: 8099 - RNA, 1572 nt, synthetic construct
  source 1..1572: mol_type = other RNA
atgggactggtgcaaaggcgcctcgctacacgcctgtatgagtgcgtgcttgagatagaggagaaacaaccaaataggaggcgagtaacacatggctttcaaaaggggcgtagcattattactaacgctgaccgccatcactcccggcggtacgtgtttaatatcgatattcaggacttcttccagagtatcaacttcgggcgcgtacgaggattcttccagaaggattcaaccttcgcattgaatgatgaggtggcaactactattgcgcagattgcctgctggcagaacggactcccgcagggatctccttgtagtccagtgatcgcaaacttggtcggacatatcctggacgtgaaactgctcaagctggccaagcaggctaggtgtaggtatacgcgatacgccgacgatatcagtttctcgacttccgagagaaatttcccttccttaattgctgctcgcgctgacggcaagcccgcagtatgggaaccctcagagaaccttgcctctgcaattagacaagccggtttcgccataaaccctgccaaaacccgcatgcagataagaggcagccggcagatggccaccggtctgatggtgaatgaaaaggtcaatattcgtcctgagtactataacgagacaagagcaatgtgccatcggctgtttaccacggggagatatgagatcccaaggtggcctgataggcaagagactgaccagcttggagcattggaaggcaggctgtctcacatctttgcggtgaaggcaagattggatctctcttccaaacggcgtaaagaaagacacgtgaaagtcccgagcggcacaatcgaattatgtcgtcggttcctgttctacaagaacttcgtcgttaatccactacccgtgataatcacagaaggtccatccgatgttatctacctgagagccgctctcagggctaggggaaaggagtttcccaaactctatgacgcccgccaggaacagaagtttcttgttcggttcgtgaatcatagccattttatgagagagaacctcctaggccacggcgttggcggtcttggaaccctgatttctcggtatcacgccaccctgcaggaatacgcgcaggagggccaaaccgcacccgttgtgcttctggtcgacaatgatgaggagtccgacaaggcttttaaggcggccaaaaaagccatcaaggaagacggcaatggggctgcaagcatcagcgtcgagagcaatgacgcctggcaccacttgatcgataacttatacctggttaagattcctcatgggggagctgaacagaaaaaacgagtgatcgagcagctcctgccagaagagtggctaaagcacgaagtggatgggaagcggttcgacccctcaaagaagcacggcgaccacagttctctgggcaaggtcttctttgcgaaaaaggtcgtagaagccaacgccgacaagataaactttggggcctttgacgctctcttttcactgctggatggggccttgcgcgattttgaggataaacgaaaacaggaagccggtgggaaagtgatggcagcttcgtga

SEQ ID NO: 8100 - RNA, 1755 nt, synthetic construct
  source 1..1755: mol_type = other RNA
atgggacgcttagacgaattgaaggctgctaaaaccagaagtgacttggctaaactgctccactttacccctaagggtctagcctatgtgctgtacaaaactcctgctgctgataagtactcaatcttcaccattcccaagaaaggaggaggcgaacgccgcatcgaagcacccgaaccacgattaaagctgcttcagacccagctcgccgccgtgctgtatgactgccttgaggaaatcgaaagtgagacacctaatcgccggtccatctcccatggatatcacaggggcagatccatcgtcaccaatgccgttccgcatagaagacatcgttacgtcctcaatatcgatctgtcagacttctttgggactatcaatttcgggcgggtaagaggattctttatcaaagacagcaactttgctttgactgacgaggcagcgactaccattgcccaaattgcctgtcacgagggtcgcttgcctcagggcagtccatgctccccggtcattagtaatctcattgctagaatactggatgtcagactggcccgtctggccaagtctaccgggtgtacctatacccgttatgtggatgatttaacatttagcacagcccagcggacattcccccctaagctagctaaaaagattgcaactagcccccacaaatggaggctgatgcggtccctgcgtgacgagataaaaaatgcggggttcaaaatcaacaccgccaagacacgcatgcagatttgtgggtcccggcaggaagcaacagggctggtaataaacgagaagatcaacattagtcagccagcctacaggactattcggagcatgactcacactttattcagtacggggaaatacttcgttcctggcggagagcttgacccatcaggcgcccctaagtggatttctgaactggcaccactcgagggtaggctggcccacctgtattttgtgaaggcacgacgagacagatccgagcagcttaacaagcgggagaattttaaaacaccccgcgctgtaaaagagctgtaccgcaggttcctgttctacaaatactgcgtggccccagaggccccccttattgtgaccgaaggtaagacggacgtcatgtatttaaagtccgcactgaaagccaggggtgcactccacccccaactcgcatctgaggaaaagggaaaatcgaagaggcaaattaggttccttccggcaagctacatgaataacacggtgctcgaactcggctctagcgcttcacagctgacaaagctgatagaatcctactcaaaccgacttaaactgtaccggcatagacccttgtcagccccagtgatagtgatcgctgataacgatgacggcgtggacaggatcttgaaggctgccaataagcggtctgagctggaggtcaaggctgggacaccccagtgcatgtttcacatcgttgacaacttgtatctggtgaagacacctcatgtgggcgagaaagcaaagacttgtatcgaggacctcttttcggatcgcctgaagagccagaaagtcaaaggcaaacccttcgatattaagaaggatcatggagacgagacgtcttatggcaaatctaggtttgcggaggaggttgttgcgaagctagcgcaagcccctgattttgctgggttcgaaccactcctaaacgcaatcgaaggcgccatctctgattacagcagccgaatgatgaacaaggaaagaagcgccgcgctcataggcacctga

SEQ ID NO: 8101 - RNA, 1698 nt, synthetic construct
  source 1..1698: mol_type = other RNA
atgaaacaccttcaggcactgagagacgccaagaacatccaagatttggcgaacatcttagggtacaaagcaaaaggcctttcttacgtactctacaagtacccagaagacaagaagtacacaagattcactattcctaagagaagcggtgaaccccgagtcatttctgccccatgtaagccattaaaactcttgcagagacgcctagctgactatctttatatttgcgaaaaggagatcgaagaggcgcagccccaccggaaaaggctgtcacatggttttcacaaggggcgatctatcattagtaacgccgacctgcataggaaccggcggtacgtcttgaacgtcgatatagaagacttctttggcacgattaattttggacgtgtccgtggcttcttcatcaaggataagaattttctgctcaacgataaggtagctacaatcctagcccagattgcatgccatgccaacgctctgccgcaaggaagtccttgttcccccgtcattagcaacctggtgggaagaatcatggacgttcgcctcgctcagctggcaaagtcatgctattgtacttatagtcgctatgcagacgaccttacattctcaactaataagtccggctttccggagcagctcgctatcatgaaagcagattccgacggttcatggggggtcggaaaagcgctgcagaatgaggttgagcgggccggcttcaaggtaaacaattccaaaactaggttacagttccgctcttcccgacagtctgttaccgggctcgttaccaataagaaagtgaatgtgagcaaggaattttggaggaacgcccggtcaatgagcttccaactcttcagcaccggcaaatacaattgccagcacaagcagccaaacgtgccaaccacttccctcgctccgcttactggtgtgctggctcatatctatcaagtgaagtcaaggagggatctggatgaaacccagatagaggaaaggagctttagtgcccctaaaggacacgagacactgtaccgaaagttccttgactttaagtatttcgtggcgctggacaagcccgtgttactgaccgaaggccctacggatatcgtgtatttgcgggaagccattaaaagtcgggcagccaagttcccttcgctgtacagcggaggggagcaccaactgaaatttctcagacctacggacacagtgaaagagctactgtctgtgggaaccgggtttggggacttgctgggcctgatgtctgagtacgaggagagggttgccaaatttccttattgtcccttgtcccaccccgtaataatgctacttgataacgatgatgctacaagtgctctctcgaagatgaaatacctgaagcgcaagaaaattgtgataaaaacctccagtaccgccgattattaccatatcgcaaagaacctgtatgtggtgaagacgcccgaaggctctcccacaaatgagacttgcatcgaggactgtttcgatgctgccaccagaggtgttactattgacggcaaaccctttgacccaaataagaaacatggtgaccacagctccttcgggaaacaggtcttcgccgagcgtgtcgtcaagcctaattccagcacaatcgattttaccggcttcgaccctctgttggatcgcataacaaaagtggtgagcggatacgtgccacccgccccatga

SEQ ID NO: 8102 - RNA, 1755 nt, synthetic construct
  source 1..1755: mol_type = other RNA
atgtcagaacttaacaatcttaaggctgctaaaacactcccccagttcgcacatctgctgaaactgaaatcagagacggtcagctatgccctgtactggtacaggcgcagaagtccgtattcccacttcacgatcagcaagaagaatggtggcaggcggcatattgctgcaccaaactctcggctcaaactggtgcagagccgactcgccgaactgttggggcgtatcgagacagagatggagatgaagcgcaccacaaaggtgcgagtgctgtcccacggatttaagaagggcttctccatcatcacgaatgccaatcagcacagaaacaaacggtgggtgtttaacgtggacatcagggatttttttccatccatcaacttcggcagggtgtatggtttctttgtcaaggaccgtaactttcagctcgatcctaagatcgctacaattatcgctcagattgcctgctaccaaaatagactgccccagggatcaccttgctcccccgttgtgagtaacctgattacacacatactggatattaagctcaacaagctcgctaacgacctgcattgtacctacaccagatatgctgatgacctcacattctctaccaatgagaaagaattccccgaacagatcgccaggttagttcgagggaacgatgataagtgggtcgcaggcgacgggctgctttacctggtgtatagagccgggtttcaactcaatcacgagaagaccaggatgcagcgtagggatagtcgccaagacaccaccggcctgattgtgaaccagaaacttaacgttagacatgagtactacaaacaggtgcgcgcaatgtgtcatcatttgttcaatcacggattcgctttttctgaccccggaaaggtccctgtatcaaatcacacagtcgaggggatgttgagctttatataccaaatccggcgcatacggagtcaaaatcttgttgtggaaaaggaaccagaaagaaactcttttttccagaccgaccaggccggtttcactgaactttacagaaggttcctaaattaccgcagcttttatggaatgatcaagcccactattatttgcgaggggaaaactgacaacatttacctcctcgccgcgatccgaaagctggcaccgaaattccctaaattaatcgatcctgctcagaaactaccattgaaagtccagtttttcaactattcacatcggtctgccctgttccagggattaagcggaggtggcgacgagatgtataagctgattaaggactttcgcgagcgaatgaaattctttaaacacgtccctacacaacccgtgattatgatcatcgacaatgatgccgcatccactggtatttttacttatgtggggaccgtacatggcactggcccggtgagtggcttggacccattttaccacgtgttcgaaaacctgtacatcgtccccgtccctacaactgcaggagtcaaggctgtgatagaggatctgttcgaccctgtagtaaagaagcccatatccgggcggaccttcaattcgtctaataaaagcttcgaccagaccaagttctatggcaagaatgaatttgcgactaaaatagttgccccagagcgggccacgattgattttacaaagttcgagcccctattgcaggccatctgtgatgttatggatcactttgcagccaccctggctgccaaaagcatcgttttacctgcaccagtggtggtagcggaagccgcgccatga

SEQ ID NO: 8103 - RNA, 1080 nt, synthetic construct
  source 1..1080: mol_type = other RNA
atgtccgagttgtccaatctgaaagccaccaaaacattgccccagtttgcaaggatccttgacctggacggacagaccgtgagctacgctttatattggtacaagcggcggaatccttatgaacatttcacgatccctaagaagaacggaggagtccgccacattgccgcgccgaattcaagattaaaggtggtgcagtcacgactcgcggagctgctgggcaggatagagtctgaaatggagctcaagaggaccactaaagcccgcgtgctgagtcacggcttcaagaaggggttcagtataattacgaacgccaatcagcacagaaacaagcgctgggtgtttaatgttgacattcgcgacttctttccttcaattaacttcggtagagtttacggcttctttctgaaagatcgcaacttccaactggatccaaaaatcgccaccatcattgctcagatagcttgctatcagaacgaactccctcaaggcagcccctgtagccccgtgatcagcaacctgatcacccatattcttgacatcaagctaaataaactcgccaatgagcttcattgcacttatacaagatacgcagatgatttaaccttttcgactaacgaaaaggagtttcccgagcgaatagcacggctggtacggggctctgacgacaaatgggtcgctggggatggcctgtcctatctaatttatcgcgcaggatttcaactcaaccacgaaaagacacggatgcaacgtcgagacagtaggcaggataccactggtcttatcgtaaaccagaaactgaacgtgcggcacgagtactacaagcaggtccgtgccatgtgccatcacttgttcaatcatggtttcgcttactccgggccatcaaaagttcccgtcagcaatcacacactggaagggatgctctccttcatttaccagatccgtaggatcaagaaaccggaattgctgtttggcgcctgcccagtgggacggagatttagaccagagcatgacagacacaagttttctaagtgtaggaggattttcgggtctgatgagatcaaatgtcagcgaacatga

SEQ ID NO: 8104 - RNA, 1749 nt, synthetic construct
  source 1..1749: mol_type = other RNA
atgagtgaattaagcaacctaagagacgtgacaactctgccacagctggcccggcttttggactttcccgcagagaacctgtccttcgccttgtattggcaccggcgaagacgcccttaccaccattttaccatcgccaagaagaatgggggtcgtcgcgttatcgctgcccccaatggtaagctgaaattcgttcagggcaggctagctgacctcctcggccgaattgagagtgagatggaattgaagcgtaccactagatccagggtgttgtcacatgggttcaagaaaacttttagcatcatcaccaatgctaaccagcataggaatcggcgctgggtgtttaacgcggatataaaggattttttccccagcataaactttgggcgggtgtacggcttcttcctcaaagacaacaatttcgaactccacccaaaaatagccactatcatcgctcagattgcttgctaccaaaatcagctgccacagggatccccttgctcaccagtcatctccaatctgattacccacattctcgatattaagctgaatcgcctggcaaacgatcttcattgtacatacaccaggtatgccgatgacatcacgttctctacgaatgagaaggagttccctgaacgaatcgcgagactggtgagaggctcagacgacaagtgggtcgccggtgatggattgttacacctgctctaccgggcaggcttccagattaaccacgataaaacaagaatgcagaggcgggatagccgccaagatactaccggtctgatcgtgaaccagaaacttaatgtccgacatgagtactataagcaggttagggcgatgtgtcaccacctgtttaaggagggattcgcttattctgagccttctcggatccccgtgagtaaccatactctggagggcatgctgtccttcatataccaaattcgcagactgaggtcacttagtatagtggtcgaggacgaaatcgagcgcaataccttctttaaaagagatcagccaggctttacagaactgtatggaagattcctcaattaccgttcattttatggcatgattaagcccaccattatttgtgaggggaagactgacaatatttatctccttgcagcaattaagaagctagcccccaaattcttaaagctgatcgatccaatacagaaggtaccgatgaaagtccagttcttcaattactctcaccaatccgccctgtttcaatccctcagcggaggaggtgacgaaatgtacaagctgatgaaagagttcaaggagcggatcgaattctttaaacatggactcagtcacccggtgattatggtgattgacaacgataaagcatctaaagggatcttctcttacatcggcacggttcacgggaccgggcctgtaagcggcttagacccgttctattacgtgtatgaaaacctgtatgtcgtgcctgttccaaccactgctgatgtaaccgctattatcgaggacttgttcgaccccagcgtgaagaggcctatcaacggccgaacatttagcgactcgaacaaaaagtttgatcttaccaagcactacggaaaaaacgaatttgccacaacaatcgtcgcacctgagagggacacaattgactttacgaaatttgaacccatgctgcaggcaatatgcgacgtgatggatcattttgctgccatccttgccgccaaacccgaagctgccgtaccacctttggccgcgacagggacatga

SEQ ID NO: 8105 - RNA, 1740 nt, synthetic construct
  source 1..1740: mol_type = other RNA
atgtccgaactttcgaacttgaaagccgctaaaacgctccctcagctcgctcgtcttctgaacctgaacggcgaaacattgagctatgcactctattggtatcgccgctccgcgccctacacctactttaccgttgcgaagaagtccggaggaagaagggctatagccgcacctaacagccgtcttaagcttgtgcagtcccggctaggtcaattgctcgctagaatcgagactgatatggaattgaagcgaacgacaaagtccagggttctatcacacggtttcaaagccgggtttagcatcgtcacaaatgccaaacaccacagaaataaacggtgggtgtttaatgtagacctgaaagagttcttcccatcaattaattttggccgcgtgtacggcttcttcctgaaagaccggaacttcgagcttgatcccaagattgctaccatcattgcacagatcgcgtgtcatgataataagcttccgcaaggtagcccctgcagtcctgtgatcagtaacctgattgcgcatattctcgacataaagctgaataagcttgcgaatgacctgcattgtacatatactaggtatgccgatgacctcactttttcaaccaacgaaaaacacttcccagaagccatcgccaggctagtgaggggctcagatgacaagtgggttgccggagatgggttactgaatctgatttacagggccgggtttcagctgaaccacgagaagaccagaatgcagcatcgagattctaggcaagacgcaacgggcttggtcgtgaatcagaaagtcaacgtgagacacgagtattacaaacaggctcgagccatgtgccaccatttgttcacaaatggttatgcatactccagaaccgaatttgcacccgtgagcaacgacgcagtggagggaatgatgaatttcatctatcagattagagccgtgcgatctcctgacttcaccgctacagaccctagaggtttcttcaagtctgaccagcctggcttttctgaattgtacggacggctgctcaactattgcagcttttacgggatgctccgcccaaccatcatctgtgagggcaagaccgataacatttatctcctggccgctatcaaacaactggcagcgaaatttccacaactcatagaccccgcccagaaggttccaatgaaagtccagttctttaactactctgaacggactgctctgttccagggcctgagtggggggggtgatgagatgtacaagctgatgaaagagtttagggagcgcatgcgctttttcaaacacggcccctctaagccggtgataatggtggtcgataatgacgacgcctcaaagggaattttttcctacattggaactgtcatgggcacaggacccgtgagtggcctggatccattctattacgtatttgagaacctgtacgtggtgccagttcccaaagtcgccggaacatccgcaataatcgaagatctgtttgatgccgccgtaaaaaagcctatcaatgggcggatcttcaattctagcaacaagaaattcgacttaactaagtactacgggaagaacgaattagctaccaagattgtagcccccgagcgtagcagtatcgattttactaagttcgagcctatgttacagtcgttcgccgacatcattatggactatggggcccggctggctgctaagccagcaatggttccggtcaagaatgcagtggctggcccttga

SEQ ID NO: 8106 - RNA, 1716 nt, synthetic construct
  source 1..1716: mol_type = other RNA
atgtcagacttgactgccctgaggaacgcccgaaacttaccacaactggcccggctgttaaaactcaagggcgaatatgtaagccactccctgtattggtaccagcagcaaaagccttactcccacttcactattccgaagaaaggggggggaaagcgatctattgaagccccaaacagcaggcttaaactccttcaaagacgtctagccgagctgctaatgcggatcgaagctgaaatggagggacagcggactaccaaggccagagttctggcccatggcttcaagcccaatttctctataatgactaatgccgcgttgcaccggaataagcgctgggtgtttaacatggacttgaaagacttcttccatacgattaactttgggcgagtatatggcttcctgttgaaaaatagaaacttcgctcttgcgcccaagactgctgcggttatctcccagatagcatgttatagaaatcatctgccacaggggagtccttgttcccccgtaatttcaaatttcattgcacacgtgcttgacatcaaactgaataaactagcaaacaaactccgctgcacatacacccgctatgctgacgatatcacattctctacgaacgaaaaggagtttccggaagatattgcacgtttagtcagaggctccgatgacaaatgggtcgtgggagacaaggtgctgagggaagtgtatagggctggatttaagatcaatcacgacaagaccagaatgcagcgtcgagacagtcgccaggacactacggggctgatcgtcaaccagaaactcaacgtccgccacgaatattataagcaagctcgcgccatgtgccaccacctctttgtccacggttacgcgcattccggtaccgataggggctcggttccaatcaagaatgaggtggttgagggcatgctgggatttattcatcagataagaagcctgaagaacgccgagttttttaaagctgaccaacccggattcagttctctctacggaaaattcctcgactatcagtctttctacggcatcctcagaccaaggattattggggagggtaagaccgacaatatctacataaagagcgcaatcaaaagccttgccgccaaatttcccgccctggttgatgccacagagcctcttaccaccgcagtcgatttcttcaggtataacaagcggagttccatctttcaggatctgtcaggaggcaccggggaaatgaataaattactggcctcttacagacataggatggcctccttcaaacacatcgcacggcaccccgtgataatggtggtcgataatgacagcggctcggcttcactcttcaattacgtgtcaaaggtgctggggacccctattggcggtctggatccttactaccatgtgtttgagaatttgtatcttgtccccatccctaaaacaagcggtcatgtggctattgaagacctgtttgatgcagccctgttggcggagacaatcgacagccgaacttttgagaggcgcaacaacaagttcgattctaccaagttttacggcaagaacgagttcgccacaaagatcgtagcacccaagcgggccacaattgattttagtaaattcgagccactcttgcaggcctttgtggatatcatggcagattacgagaagcgccacgctgcagctatagtggctgcacggcctccagttgtggctgctgcctga

SEQ ID NO: 8107 - RNA, 1716 nt, synthetic construct
  source 1..1716: mol_type = other RNA
atgagcgacttgtccgcacttcggaacgctacaacccttcctcggttagccaggctgttaaagctgaagggagagtacctgagccattccctgtattggtataggcagagtaacccttacgctacgttctctatcttgaaaaaaggcggggggagacgcttgattgaagccccaaattcccgcttgaagctcgtgcagtcaagactcgcagacctcctgatgcggatcgaggccgagatggagaacaaaaggaccaccaaagcgagggtgctggctcacggcttcaaaccaggttattccatcatgaccaacgcagcccttcatagaaataaacgctgggttttcaacatcgaccttaaggactttttccactcgataaatttcggcagagtatatggctttctgcttaaggaccggaactttgaattggctcctaaaaccgctgcagtgattgcacagatagcctgccataataaccgcctgccacaaggcagcccgtgttctcccgtcattagtaatctgattgctcacgtgctcgacctgaaactgaacaaactggccaacgcgcaccgatgcacttacacccgatatgccgacgacatcacattttccaccaacgagaaggagtttccagaggccgtggctaggctcatccgagggtctgaggataaatgggtggccggcgacaagatcttgagagaggtatacagggccggattcaagatcaatcatgacaagtcaaggatgcagagacgtgactcccggcaggacactacggggcttatcgtgaatcagaaactgaatgttcgccacgaatattacaagcaggttcgcgctatgtgtcatcatctatttgtacatggatacgcgcatagcggtctgggtgctggcagagatcccgtgaagaacgagagcgtcgatggtatgctcggtttcatacaccaggtccggagtctcaaaaacgctggattctttaagactgaccaacccggattcagcagcctgtatggcaaattcctagattaccaagccttttatgggattctccgtcctcggataatcggcgagggaaagactgataacatttacatccgatctgctattaagagactggcggggaaatttccctctctcattgaaccgtcttccccactagccgaagccgtcgatttcttccactacaatactcgatcagcactatttcaggacctgagtggcgggacggatgaaatgcacaagttactctcaagctatcgtgcaagaaccagttcgtttaaacacatcgcccgccaccccgtcatcatggtggtagataatgacgccgcctccgccaagattttcgcacacctcagcaatatcctgggtactgctgttgggggcatggacccattttaccacgtgtatgagaatctgtatcttgctcccattcctaagaccacaggacatgtggccgtggaggatctgtttgatgccaccgtcttagcacagacaattaacgggaggacatttaatccttcaaacaagaagttcgatcagtctgtgtactacggcaagaatgaatttgccacaaaaattgttgctccgcaaagggctactatagatttcacaaagttcgaacccctgctggcagcattcgtcgatatcatggccgattacgaaaaacggtacgctggagccttggcggccttgaagggaggcatagccgcagcagcgtga

SEQ ID NO: 8108 - RNA, 1716 nt, synthetic construct
  source 1..1716: mol_type = other RNA
atgagcgatctgagtgctctgcgcaataccaagaaccttccccagttggccagactgctcaagttgaaaggagaattcgtgtcccacacgctgtattggtaccggcccaacactccctactcttgcttcacaattccaaagaagaatggcggtcggcgcttgatcgaagcccctaattctagacttaagctgctccagtcccggttagctaacctcctgatgaggattgagagcgaaatggagggaaagcgaaccaccaaagcaagagtcctagcccacggctttaagcctggcttttccattataactaacgcagccctccacagaaataaaaggtgggtgtttaacatcgatctgaaggacttcttccattccattaacttcggtcgtgtatacggttttctgataaaggatcgcaacttcgagctggctccaaaaaccgccgcaatcattgcacaaattgcgtgtcataaaaatcatctgccccaagggagtccttgcagtcctgttatttcaaatctcatcacacatctcctggacataaagctgaataaactggcaaacaaactccactgcacctatactcgctatgcagatgacatcacctttagcacgaatgaaaaggagttcccggcagccatcgcaagactggtcagaggatctcacgacaagtgggtggccggagacgccgtgttacgtgaggtgtatagggcgggctttaaggtgaaccatgataagtcacgaatgcagagacgagactcccgacaggacactacagggctaatcgtgaatcagaaacttaacgttaggcatgagtactatcggcaagctcgggctatgtgtcaccatctcttcgtgcatggctacgcctacaatggcgcagacacacgtaataaccccatcaaaaacgagactttggatggaatgctgggctttatccaccaggtaaggtcccttaagaatgctgagtttttcaaagaggaccaacccggatttagcagcctgtatggaaagttcctagattaccaggccttctatgggatcctccgccctaggataattggggaaggcaagaccgataacatttacatccgatctgctatcaagagtttggccgcgaaatttccttcactggtcaacccaagcatccccgcgacagcggccttggatttttttcattacaatacccggtcggctctgtttcaggggttgtctggcggtacagatgaaatgcacaaacttctgtccagctaccgctcacggatcagctcttttaagcacatagctagacatccggtgattatggttgttgataacgacgccgcttccacaaaaatcttcgctcacttaagtaacatactggggtatccggtgaatggtatggaaccattttaccacgtatacgaaaacctttatcttgcccccgtcccaaagactacgggacacgtcgcaatcgaggatctgttcgacgcttcagttcgcgcccagcagattgatgggaggagcttcaacccatcaaacaagaaattcgacctgtccatttattacggcaaaaatgagttcgcaaccaaagtcgtgtcgccacacagggccaccatcgacttcagtcagtttgaacctctcctcactgccttcgtcgagattattgctgactataataaacggtacgccgccatcttaggggctgccaagggcgacgtgctttctgccgcatga

SEQ ID NO: 8109 - RNA, 1719 nt, synthetic construct
  source 1..1719: mol_type = other RNA
atgtctgagctgtcggaactgaaatctgccactactcttcctcaactggctaggctgctcaagctaaagggggaaactgtgagttatgctctctactggtatcgaagagcgaatccttacgactattttgaaattcccaagaagaatggcggacggagattgatcgcagccccaaattcgcggctcaagttagtccagacccggctggccggtctgcttggaagaatcgaggcagaactggaaggtaagagggccacgaaagcaagggttgtgtcccacggttttaagacaggattcagcatcgtcacaaacgccgctcatcaccggaacagacgctgggtcttcaatgccgaccttcaggatttttttccttctatcaatttcgggagggtgtatggctttttcattaaggaccgaaattttcagctggacccaaagatcgccactattatcgcccagattgcgtgtcacaacaacaagctcccccagggaagtccctgctcccctgtgatttcaaatttgatcgcgcacattctcgacatacaactaaacaaaatggccagcaaacatcattgcacctatacccgctacgctgatgatctgaccttctcaacaaacgagaaagagttcccagaagcggttgccaggctggtcagagggagtcgggataaatggaccgcaggcgatgggatcttgcgcctggtgtacagagccgggttcaaagtaaaccatgagaagagtcgtatgcagaaaagggattctagacaagacactacgggccttattgtgaaccagaagttgaatgtgcgccacgagtattataaacaatcccgcgcaatgtgccgacacctgtttcagcacggctgggcccataccggcaccaaacgaggggagaggccagtttctaatgactcattagacggcatgctgagctttatctaccagatacgtcggatcaagaacgacgctttcttcaccgatgatcagccaggcttttccaagctgttcggatactttctggattaccagagcttttacgggattgttagaccccggataatttgtgagggcaagaccgacaatatctacttaagggctgcaattaagagccttcaccttaaattcccccgcctggtcgatgcaactccgaaattcagcctgctggtggatttttttcattataacagccggaccgccagatttcaggacttatcagggggcggtgatgagatgaacaaactactcagctcatatcgtcagaggatgaaaccctttaagcatggagccagccagcctgtgatcatggtggtggacaacgattccggctcaacgaagatcttcaatcacctcacaaacatcctgggcaaacctattgacggatctgacccgttttactatgtctacgagaatctctatgtcgtaccaattcgaaaggttgcgggagcctctacagctatagaagatctcttcgacgggagtgttctcgccgaaaaaataggagtgcgtgaatttaaccgctccaataagaagttcgaccaaacaaaattctacggtaagaacgagttcgctacagagatcattgctcctaagcgcgccacaatcgacttctcccggttcgagcccttgcagaaggcttgttgcgacgtggtagatcactaccaggtgttgtccaaagcagcaccaatacccactccggtacaagtggctgcactgccttga

SEQ ID NO: 8110 - RNA, 1743 nt, synthetic construct
  source 1..1743: mol_type = other RNA
atggcaaatgaatacccgcaggccacaagtcctatctcagagctggcacaattaaggagtgtcaacactttgacccatttagctcaccttatgggactggaagggtggaccttgtctcacgcgctttatcagcagggtcagaaacggggttacacctatttttccatccccaagaaacgagggggcttcagacagatcgcagccccaaattctcgcctgaagatggtccaatccaaattagccggcctcctgagccgaattgaggccgagatggaggggaaaagggcccgtcagcagtgtatcctgtcccacgggttcaagccaggctactctattattactaatgcagcccagcaccggaacaaacgctatgtctttaatgccgatctcaaagagtttttcccttccatcaacttcggccgggtgcgcggcttcttcatccacgataagaattttcaactgaaccacaagatcgctacaatcatcgcccagatcgcctgccacaacaaccagctgccccagggcagtccgtgttctcccgttatttctaatttaattgcccacatgctggacgtgaagctgaataaagtggcccgaaggagcagatgcacttacacccgttatgccgatgatcttaccttcagcacgaatgaaaaggagttccctacagagatagctcggctggtacgcggagcacatgataaatgggtacctggcaacagcgtggttcgcagtgtgtacaaggccggattcacgctaaacgagttgaaaaccagaatgcagtatagggactcacggcaggatgcaactggactcattgtgaacgagaagcttaacgtgcctcatgaatactataagctcgctcgggcccgatgccgacatctcttccggaatggctacgcctatgaccaacacagcgggactgaaatttccgatgaagctgtggagggcatgatgtcttatatttaccagattcgcagggctcggacagaggacttttggaaggagcagtcaggcttcgcaaaactctacaaacagctgctagatcacaggtccttttggggaattacgaaaccaagaatcgtgtgcgaggggaagaccgacaacatctatctgagagctgctctccaaagcctggcggcaaagtttccagaactgtatgaggctggtgctgaaccccaggacagacttaaggtttgttttttcaaccataccaagagggccgaaatattccaaatcgggtctggtgggtcagagctggcaaagctggttggagcctacaaaagcagaactaaatcattcgaggcgggaatgccacctcatcccgtcattgtggttgcagacaatgacagtggctccaccggactattttccgctatgagcaaaatactcggaacatcggtagggggcgaaaatctgagatactacctgggtgacaacttgtatgtcgtgcccatcccaaagaagaacggtcatacagctattgaagatctcttcgataatcaagtcctggacgaaaagatagatggtagaagctttgaccgcaaggggaaacaggccgacaagaccaagtggtacggcaagaatgagttcgccactaaaatagtccatgcaaagcgtcacgagttggactttgccggatttgaagctgtacttacagccttttcggaggtgatagtggattacgaaaggaagaaaaaggagatcgcgggcgcaaaagcggcgttgaaagtggccgcttga

SEQ ID NO: 8111 - RNA, 1725 nt, synthetic construct
  source 1..1725: mol_type = other RNA
atgtccgaactggagaaacttaaatcatgtagcacactcccacaattagcacacctgctgggcatcaaaggggagacactgtccagcgtcctttactggctcaagccatcacagaaatatgttcattttacggtgcccaaaaaaaacggaacaagaagactgatagctgcaccaacagaccggctgaagtatgttcaagggcagttggctgagttattgtctaagatcgaagccgagctcgaaggtaggagaactaccaagtactgcgtcctgtctcacggttttaagaaaggattctccatcgtgactaatgcggatgtccaccgcaaccgccgacacgtgttcaacgctgatcttcgtgatttctttccctctatcaatttcggccgagtctatggcttcttccagaaggaccgtaatttccatctcagtcccaagatagcgaccatcatcgcccagattgcttgtcatgacaaccagctaccccaagggagcccttgcagccctgtaatctccaatcttattgcacacgtcctggacatcaagctcaataagattgcgtccgccggacgatgcagctatacccgctatgctgacgacctgactttttcaactaatgaacgcgagttcccagcatctattgccaggctcgttcggggcagccacgataagtgggtggccggagatttgctcctcgagagggtgtacagatctggcttttcgctgaacgaggctaagacccggatgcagcatagggattcacggcaggacgccaccggcttaattgtaaatcagaaactgaacgtgcctaatgagtattacaagcttgccaggtccatgtgtcatcagctatttaccgacgggtattgctacgtggggccagatagagcctacgtgcccgacgcgaagctggaagggatgcttgccttcatttatcagatccgtaagatcaagatcgaaaacttcaaggccgaccaagctggcttcagcaaattatatgggcggttcctggactaccgatcattttacggtctggcacagccaagaataatctgtgaaggcaagaccgataatgtttacattaggagtgcactgaaggccttagcagtcaaatacccttctcttattgatccaggaaaaaagccccctctgaaagtcgacctgttcaattatactaagcgcgccgccaccttccaagacttgtccggcggcagtgatgagctgaaaaagttgatcaacaactacgcaaccaggacagctcggtttaagcacggggcccctcaccccgtcctcgtaatagtggataacgatgcgggaagtgtgggcatctttcagatgttgacgaaactcctgggtaagcctataggaggactggaccccttctatcacgtgatcgagaatctgtacgtggtccccattccaaaagttgccacgccggtggctattgaagatctgtttgaccctgccctactggctcggaaaatcgacggtaaagattttgacagaacagggaaggagaaggacggaagtaagtggtacggtaagaacgaattcgcaacaaagattgttgccccggaacgcgggactataaaatttgatggctttgagcccctactcaacgccgtggtggatgctattcagcattacgagggcgtgaaagcagccgcagccgctaaagccgctgctttgaaagccgcgaaacctgcagtggtagctattccgtga

SEQ ID NO: 8112 - RNA, 1704 nt, synthetic construct
  source 1..1704: mol_type = other RNA
atgacaaagctctcccagctcagaggggctaagacccttccccagctcgcgagggtcattggcgtgcaaccacacggcctgtcctacgcgctgtactggctgacagaggaccagaaatacgaaagctttactatacccaaacgaggagggggacgacgtatcattacggcgccaaaaaactacctgaaggtgattcaaacaaagctggcaaagctcctgttggacatccacattgagctggagggctccaggagcaaaagccagtgtagactgtcacacgggttcaagcggggatactctatcgtgactaacgccgctgctcaccggaataagcgatacgtcttcaacgccgatctcaaggactttttcccctctatcaactttggaagagtactgggtttccttactagggatcgcaacttcgccttagagcccaaagtggccactataatagcccagatagcctgtcataataatcaactcccacaggggtccccttgctcacctgtgatctcaaacctgatcgcccacgtcttggacatccatctaaataggatcgctcggaatgctaattgcacctacacccgatatgttgatgatctcacatttagcacaaatgaaaaggagttcccgcctagcattgcccggctggtcagtgggaacacatcagcatgggtccccggcgactctcttattcgctatgtgtaccgtagcggtttcaagctaaatcatgacaagacccgcatgcagaggcgcgatagtcgtcaggacgccaccggcttgatcgtgaacaaaaaagtgaacgttaggaacgagtactataaagccgctagggcaaaatgtcaccatctttttcaacatggcttctgctattctgatcacgacaagacggcactgtcggatgccgctttagaaggcaccatgtcattcatctatcacattcggcgcttaaagaccgtagactggaagttggaacagaagtctttttatcagctgtatagacagttcctggattatagagccttctacggactgactagaccccggatcatttgtgagggaaagacagacaatatatatctcagatgcgcaattggagcgctgagtgcgaagtttccacagtttattcatccagatcccaaagcagggctgaatatcgacttcttttattataccgacacgagcgctacttttcaggacttgagtggtggcaccggtgagttaaacaagctacttgggtcctacagggcacgcgcgtcgagcttcaaacacggcccaacccagccggtgttcatggtggtcgataacgactccgggtctaatggcctcttcaggcacctggccggcattcttgggaaacccgtgggaggtatggatccattttaccatgtttttgacaacctgtacgttgtacctattcctaaagccggggttgccgccgccatcgaagatctcttcgaagccgtgttgctgactcgcacaatcaatggccgggcctttgatcggactggaaaacaaaaggacttgtccaaatggtacagcaagtttgacttcgcaacccaaatcgtgaaacctgaaagagctaagataaactttgcaggtttcgagcctctgcttcaggcaatctccgatgcccgaaaagattttgcttctagagtaagtgctggcgctgcagcagcagctgtcaaggctgctgccgcctga

SEQ ID NO: 8113 - RNA, 1695 nt, synthetic construct
  source 1..1695: mol_type = other RNA
atgaccaagttgagccaattaagaggggctcggaccctgccacagcttgctcgagtgttaggtgtaaaacctgccagcttgtcatttgtgctctattggttagccgatgatcagaagtatgaaacctttaccattccgaagaaaggcggcgggcgacggctaattactgcaccaaagccccgccttaagatgattcagaccaaactagctgacctgttattggatatacacgtggagctagagagtgctagaagtagagttcagtgccaactggcccacgggtttaaacctgacttttccattgtcacgaatgcgaccgcacacaggaataagcggtatgtgttcaatgccgatcttaaagacttcttcccgagcatcaatttcggcagagtgctcggattcttcacaaaggatcataacttctccctggagcctaaagtcgcgactgtgatagcccaaatcgcctgccacaacaaccagttgccccagggaagcccctgtagccccgtgatctccaatctgatcgcccatgtgctggatattcatctctcaaaagttgcgcgagcgggtcgttgtacgtacaccagatatgtagacgatctgacattttccactaatgagaaggagttcccagctagcgtggcaaggctggtatctggaagatcagacgcttgggttccgggcgattccctggttaaacatgtgtaccgttctggctttaagctgaactacgataaaacaaggatgcagaggcgcggctctcggcaggatgcaactggtctgatagtcaacaagaaagtgaacgtgcggaacgaatattacaagattgcacgcgccaagtgtcaccacctgtttttgaacgggttcagttactctgataaggacaagaaagcaatcagcgataatgcccttgaagggacaatgtcgttcatctaccatatccgtcgcctgaagacagtcgattggcagagggaacagcagtcgttctataagctgtaccggcaatttctggactatcgagccttccacggcctcttgcgacctcggatcatctgcgaaggcaagacagataatatttacatccgcagcgccattaaagcccttggggcaaagttcccagagttcattcactcagaccccagtaaaggtctgacggttgatttctttaactacaccgaggccgcagtgatctttcaggacctgagtggaggcaccggcgaacttaaaaaactgctaacttcatacaggccaagactgtcttccttcaagcacgccgctccacagcctgtcataatgatcgtagacaatgacaaaggaagcactggactcttccatcaactcgctcatattatcggaaagcctgtagggggcgtggatcccttctaccacgttctcgataacttgtatgtcgtgcccgtgccaaaaaccggtactgaagccgccatcgaggacctgtttgactctgctctgctcaagaagacaatcaaaggtcgctcttttgaccgcacagggaaggcaaaagactttacgaaatggtattccaaggtcgactttgccacccagattgtgaagcccgagagaagtactatagacttctcaggatttgaaccccttctcaaggctattctcgacgttaggaaggacttttccctcaggcctcctgtcgctacagctgtcgcacgggctgccgagtga

SEQ ID NO: 8114 - RNA, 1719 nt, synthetic construct
  source 1..1719: mol_type = other RNA
atgacccaattagctagactacgcggggtcaagactctgcctcaattggcacgggttcttggcgtccagcctgctagtctcagtttcgtgctgtactggctgccagaccagcagaagtatgagcagtttaccatacctaaaaagggcggggggtggagacttattacggcgcctaaaccaaggttgaaaatgatccagacaaagctggcagaccttctgctggatatccatgtcgagctcgaacagtctcgcagcagaagtcagtgccaactggcccatggttttaagcggggactaagtattgtaacaaacgccacagcacacaggaataagcgatttgtgttcaatgccgatctgaaagatttctttccctccatcaacttcggccgagtgagaggtttttttcagtgggataacaacttctcattggatcccaaggtagctaccattatagctcagatagcttgtcgggacaatcagttgccccagggcagcccgtgttcacccgtgatcagcaacctgatcgctcacatcctcgacatccatctgaacagattggcccgcgccggccgctgtacttacactagatacgtcgatgacatcacattctctacaaatgagaaggaatttccatcatctatcgcaaggctggtgagagggagcacggacaagtgggtccccggagacagtctggttaaaagggtatattcctcaggctacagcctgaactacgacaaaacgcgtatgcagaggcgagactctagacaggatacaaccgggctgattgttaataagaaggtgaatgtgaggaatgagtactacaaaaccgcacgcgcaaagtgcgatcacctgttcaagaacggtttttgtttctccgataaggatcggaagccgattttcgacgatgcactagatggaaccatgggttttatccgccaaattcgggggttgaagaccaaagattggcagagcgagcaaaattcgttcttcaagctttatcgacaatttctggactaccgcgccttccacgggatcacccgtcccaaaattatttgcgagggcaaaaccgataatatctacctgcgatgtgccttccagaggctccgggccagattccctgcctttatccacccagatcccctcgttggcctgactgttgacctgtttaactacacagaagcggctgccacgttccaggacttaagcggcggaactaacgatctttccaagcttttatcacattatgccgcgagagtgtctccattcaaactcagccccgaccagcctgtaatcatgatagtggacaacgacaaaggttcggctgatctctttcgtaaactgaccaagatgttgggccgtgttgtgggcgggcttgacccgttctattatgtgtgcgccaacctgtatgtggtcccagtgccaaaagggataactactctcgaagctgcgattgaggatctctttgaacccgccctcctggctcggaccattaagggaaagaattttgacaggaccggaaaggaaaaagaccggtcaaaatggtatagcaaagtggaattcgccacagaggtcgtgaaaccagagagggcaacaatcaatttttccggattcgagccactccttcaggcaatttccgacgcctgcaaggactttactggacggcgcgccgcgccttctaagcctttacccagtgcctccgcttccgcaggctctccttga

SEQ ID NO: 8115 - RNA, 1476 nt, synthetic construct
  source 1..1476: mol_type = other RNA
atgggtaggcagtggctaaagtcctaccggtacctaactatcgccaatgagtatcctagagctcttcctcccatcgtgacgcagagcgccagtcggttgagcaacgttaagagcttggatcagttagctgcggtgctggaggaacagacaaaagtgctcagctattggctgtacaaggctgagccatcaaagaaatatctcgagtactccatccccaaaaagaacgggggctggaggcacataactgcgcccaaagatgggctgaaaaggatccagggaaaacttgcccggctgctcgctgaaatttacaatgatattgaacaacggaggtccaacgggtcgttcgactcatccagagccagcgagtctgtgctcgcacatggcttcaaagacaagtactcgataatcaccaatgcacgagttcacgtgggtaaacgctacgtgttcaatacagatctcgaggacttttttccatcaattacatttggcagagtacgggcattcttcattgcagataataactttcggctgtccccacccgtcgcgaccatgatcgctcagctggcctgctataggaatcaattacctcagggcgccccgactagtccaattatctctaatttcatcgcccacatactggacattaagcttaacaagatggcgcgcgcagggaattgcagctatacccgttatgcagatgacctcacattttccactaacgaggcacgttttccttctgccattgctagactcgtggccggaactacagatcggtgggtggcaggcgacggtttgctgggaagggtctacgcctcaggcttccgagtcaatcacgacaagtctcgcatgcagttgccgaagagccgccaagaggctaccggtttgaccgtgaaccagaacgttaacgtcgcaagcacatactataaattagcaaggagtatgtgcgaccacctttttacgggaggcacctgttttgaaacgatcgacggaaagtgggtagagttcccagcccataaactgcaaggccgcatggatttcatttatagcgtgaggagaagtagaatcggaatttcccttgaccatgtgtcaaagaagcaacatcccatagcttatcgtgaacgagaagccgagttttgtaagcgccagtcttcttttacaaaactgtatcgcaacctgctcaactaccagtccttccacggtatggagaagcctgtcattgtgggcgaagggatcaccgatggactgtacatccgagctgccatccagtccaccggtgggctgtttcctaagctgtatgaccccactggcgatggcgaagtcctagttagtttctaccgacactcagacaaaaaaaacctgagtaattgggggggaagattcgccacccaggccgtacatcacagagtctacgaggttgatggggctgtgcagaacaaggccaaggccgctcggaattcttacagacgccagaggtga

SEQ ID NO: 8116 - RNA, 1713 nt, synthetic construct
  source 1..1713: mol_type = other RNA
atgcttgaggaacaaactaaagtgctgtcgtattggttatacaaagccgagccttccaaaaaatacttcgaatactcaatcccaaagcgcaatggtggttggcggcagatcactgccccaaaggatggcctcaaacgcattcagggaaaacttgctagactgctggcagagatatacaacgatctggaacagagaaggctgaacgcagagtttgattcctccagggtttctgattgcgtgcttagccacgggttcaaagacaagtactctattattaccaacgcgcgagttcacgtcggcaaacggtatgtgttcaacgccgacctggaggatttttttccttccataacctttggtagagtgcgtgcattcttcatcgcggataacaacttcaggttgaacccgtccgtcgccaccatgattgctcagttggtgtgccaccgcaatcagttaccccagggtgctccctcgagccccataattagcaatttcattggacacatgctggatattaaactgaataagatggccaaggtgggaaattgtagctatactcggtatgcagatgatcttactttttctacgaacgaaacacgatttcctagtgcgatcgctcgcttagtggtgggcactgccgataggtgggtagcaggagacggcctactcgccagggtgtacgcaagtggtttcagggttaaccacgataaaacgcgaatgcaactgccaaagagtcgacaggaggccaccggcctcactgtgaaccagaatgtcaacgtggcttcaacttattacaaacgcgcccggtctatgtgtgaccatttgttcaccggggggacatgtttcgagatgatcgacgggaagtggattgaatttccagtgtctaagcttcagggcagaatggacttcatttactctgtcagaagatccaggctccgcatgagtctggaccatgtgtctaaaaagcaacatgccatcgcttatcgcgaacgagagacagaattctgcaagcagcagagaagcttcacaacactgtaccggaatctgctcaactatcagagctttcatggaatggagaagcccattattgttggcgaaggcatcaccgacggtctgtacattcgtgcagcaataaagaccataggggcttcatttcctaagctttatgatgctacaggtgacggcggagtgctggtgtcattttacaagcactcagacaaaaggaagttttaccagataggggaaggcgcgagtcagctgaagccctttatcaccgagtacacaaagttgatggatgccttcaagactcggccgaagcaaccagtaatcctcatcgtcgataatgacgacgagggacaatcagtcctcaatgtagctggcaaccggtggaagaaagatgttaagacggccacccccttctatcacttagtatccaatctgtatatcatccctattcccgctaaaaccggcctaatcagcaccgctatcgaagacctctttgacgcggcatggctagctgcccaagacatcgggggacgtaagttcaccaaagacaatgacttcaacagcgccacacattttggcaaggcagagttgctggggcagattgtccggccaagcagagccacaatcaattggacaaattttcagacgctgctccaggggatccagggagccatcttggactatgaggttaaactggccgtctccccttga

SEQ ID NO: 8117 - RNA, 1884 nt, synthetic construct
  source 1..1884: mol_type = other RNA
atggtagattatgcagtgactgtgaacgctgaatacagcactgaccggtacacagtcaaatcatatagacacctcaccgtcgccaatgagtaccctcgggccctgcctccaatagtgacacaaagcgtcagccgcctccgtaatgttaagtcattagaccaactggccgcggtgctgaaggagcagacaaaggtgctctctttttggctctataaggcagctccccaccagaaatacgtggactatcagatcccaaagaaaaacgggggctggcgccacattactgcacctaaggatggcctgaagaggatccagggtaaactggccaggcttctgagtgagatttataacgacctcgaacaaagacgcatcgaccctgcctttgacgggtcacatccatcatcctgtgtattggcccacgggttcaaagacaagtattcgatcaccacaaatgctacagtgcacgtaaaaaaaaggtacgtctttaatgctgacctggaggatttcttcccctccatctctttcggcagagtgagagcatttttcgtggctgaccagaacttcaaactggaccctgctattgccaccatgatcgcacagttggtgtgctttcggaatcagttgcctcagggggcgccgacgtcacctgtcattagcaatttcattggacatatcctggacgtgcagctgaataagttagcggcgaacggcaactgttcttacactcggtacgccgatgatctcacattctccactaatgagaaggccttctctcccgctatcgcacgactggtgtccggcactaccgatcgatgggtggcaggagacggtctggtcggtagagtgtacgccagcggattccgaataaaccatgacaagtctcgtatgcagctacccaagtctcgccaggacgtgacggggcttacagttaatcaggccgttaatgtctcagcaacctactacaagctagctcgcagcatgtgcgatcacttatttaccggaggcacctgccatgaaaaaattaacggcgaatggcacaggtttccggcctataaacttcaaggtagaatggacttcatctactctattcgtcgcagcagactaaaggtttccatcgactatctgcccaaaaaacagcagccggttgcctttcgcgaaagggaggccgagttttgtaagcaacagaagagcttcacgactctttacaggcatttgcttaactataggagtttccatggcatggaaaaaccagtcatcgtgggggaggggataaccgatggactgtacatttccgctgcgattaagagtttgggagccctctttcccaccctgttcgatgccggcggtgatggggaggtcaaggcatcgttttataaacacaccgataagcggaaattttaccaaattggagaaggggccagtaaccttaagccatttattacggagtatactaagatcatggaaccattcaagaccattccacggcaccctgtgataatcgtggtagataatgacgatgaaggccgggcagttttaagcgttgcaggtaaccggtggaaaaaggatctgaaaaccacagcagccttttatcacctcgtaagcaacttgtacatcatcaaaatacccttcggcagttccgcctcttcctccgctattgaggacctgtttgactctgcttggctgagtgctcaggacataggcgggaggaagttcagcaaagataatgatttcgacagtgctacacattttggaaaggccgacctggttggacagatagtgcgacccaaaagaactacaatcgattgggctggcttcgtcccactcctcgcggctattgagggagccatcatcgattacgattccaagctgaactcagtgccctga

SEQ ID NO: 8118 - RNA, 1779 nt, synthetic construct
  source 1..1779: mol_type = other RNA
atgcccccaatagtgacccagagctccagtagactgtcgaacgtgaagtcattagaccagctcgccgccgttctgggagagcagaccaaggtgctgtcttattggctctataaagccgaacccgcgcggaaatacgagcagtattcgattcctaagaaaagtggcggctggcggcatatttccgcacctcgcgacggtcttaaacgaattcagggtaagctgagcagactgttggcggagatttataatgatagggagcagaggcgcgtgaacggctcatttgacgggtcccgcacaagcccttacgtacttgctcacgggttcaaggacaaatatagcatcattacgaacgctcagatgcacgtaggcaagcgctttgtctttaacaccgatctcgaagacttctttcccagtatctcctttggtcgagtgaggtctttttttcgcctggatactgacttccggttagatccagctgtggcaacaatgatagcccagctgacatgttttagaaaccaactcccgcaaggcgccccgactagtcctattatctctaatttcatcggtcacatgctggatatcaaactgaataagatggctagaaaaggcaattgttcttacacaagatatgccgacgatctgacattctctacaaatgaagaaagttttccaccagcaatcgctcgcttggttgcagggaccacggatgaatgggtcgccggggatggactactggctcgagtctacgcctcagggttcagggtgaatcatgacaagtctagaatgcaggtggcctccagtcgccaagacgctaccgggctcaccgtcaaccgtaccgtgaatgtcagcgccacgtattataaattggcacgggccatgtgcgatcacctgtttaccgggggtacctgtcatgagatgaaaggcggaaaatggactgtcctcccgcctcatcgtttacaggggaggctcgacttcatttattcagtacgaaggtcccggctgaagatccccctggaccacgtcgcaaagaagcaattcccaatcgaatacatgaagagggaagcccttttctgcgatcagcagaaagcgttctctaccctctacaagaatatgatgaactacatgaccttccatggtatcgagaagccaatgatcgtgggagagggcataactgacggcctgtacatcagagcagctattaagactgtgggacctgcctacccgaagctataccacccttcaggcgacggggaagttcttgtgaatttctacaaacacacagataagcgaaagttttaccagatcggagagggagcggcacccctgagatcattcattgccgagtatcctaaattgatgggcaggttcaagacgaaaccaaagcagcccgtgattttgattgtggataacgacaaagagggaagggatgtgcttaaagctgctggtagccggtggcagaaagatacatccgtgcctagccccttctaccacctcgtctccaacctgtacatcatccccttgccaaagcctggcgccaccgatgtatgcatagaggacctttttgaccagacatggctcgcagctcaaaacattggggcacgtaagttcactaagaagaacgattttgattctgccacatacttcggcaaggcggacctggtcggccagatagttcggccccaacgggctactatcgactggtccggatttgttcccctgctagaggccgtgcagggagccataagcgactatgaagttaaactgagcttaactccatga

SEQ ID NO: 8119 - RNA, 1803 nt, synthetic construct
  source 1..1803: mol_type = other RNA
atggcttatgagtatccccgggcgctccctccaatcaccacacaatccgtcagcaggctgagaaacgcacatagtcgcgctcagctagccgccattctcggcgaacagtccaaggtcctgagttattggctgtataaggccgatctatctaccaagtacactcagtactcaatcccaaaaaagaatggcggctggaggtatatcaccgctcctcaaaacggcctgaagaggatccagactaagcttgcccgcttacttgcggacatctataatgacattgaacagcgccgactgaatgagagcttcgacggggtcactgtgtcagagtgtgtcctgtcccacgggtttaaggactcttacagtattatcaccaacgccaaagtgcatgtgggaaagaactttgtgttcaactcagatttggagaactttttcccatccataagctttggcagggtcagaggcttttttatcaacgaccggaactttagacttcacgaggacgtggccacggccattgctcagatcgcttgctatcagaaccagttgcctcagggggcaccatgtagtccgattatcagcaattttattgcccacatgctggatatcaagcttaataagatggccaaaaaaggtaattgctcatacacgcgttacgctgacgatctcaccttcagtactaatgaaaaacatttcccggctgagattgcacgcctggtggcagggacaaccgatcggtgggtagcgggaaacggcctgatctcaagggtgtatgcaagtggctttcgaattaatcacgataaatcccgaatgcagctgcctatgtctcggcaggaaacaacaggcctgactgtaaaccagaaggttaatgtacccgccacctattataaagccgcaagatccatgtgtgaccgcctgtttaaggagggatactgctttgaaatagtgtcaggaaaatgggtggaggtgccgtctgtcaaattacaaggtcgaatggacttcatacactctgtgcggatgggtcgcctcggaatatcgttagatcacctgcctaaaaaacgttttccaacagcgtacagggacagggaaaacatcttccgtggtcagcaaaaggccttctcaagtatttacgagaagttgctgaactacagatcttttcatgagatggtgaagccaataatagtgggtgagggcatcacagatgggctgtacattaatgctgccatcagaacaatcggcggactttaccccagactatttgaccctgccggcaacggaacattgctcgtggacttctacaaacacagcgacaagaggaagatctaccagattggcgaaggagctaaacccctgggcgcattcgtaaaagactacgctaagctgatggagcccttcaaggcaaagccctccaatcccgtcatagtggtcattgacaatgataaagaaggacgcgaagtgcttaccgcaattggtaagcggtgggggaagactatcgacgggaaatctagcttctatcacttggttagcaacttgtacgtcgttccagttcccgcaacggggggggttctcactagcatcgaggatctgttcgattcgacctggctcgccgctcaagatatctccggaagaaagttcacgaaagataatgactttgacagctccacccatttcggaaagacacagttcgccgggcaaattgttcggcctaaacgggcctccattaaatgggatgggttcaagcccctgctccagggtattcaggatactatcctcgatttcgaattacagagctctcctggcacctga

SEQ ID NO: 8120 - RNA, 1701 nt, synthetic construct
  source 1..1701: mol_type = other RNA
atgtccaagctcgacgcgctgaaacaggctaaaagcctgtcggatttggcctacatactcggggagcagccaaaagtcctcagctacgtcctctacatgatcccctcgaccctcaagtacactccatttctgatccccaagaaaagcggtgggacccgtaccatccaagcccccatcgaccgcttgaagcgaatacagagggctctcgcagacctattgcaggacatacaggaggagattagtacaaagcgcaaagtggacaaaagacatgccgtgagccatggattcaagcggaagctttctattatcactaacgccagaaatcacaggaacaagacatacgttttcaactctgatctggagaattttttcccatccattaacttcgggagggtatacgggtttttcgttcacaatgagacatttagtctggaccctaaagtggccactgtgatcgcgcaaatcgcctgtcatgataatagtctacctcaggggagcccctgctctccgatcatttcagactacataggccacatcctggatatgcggctctcaagactagcttcccgccaccgttgtacctatacccggtacgtcgacgatctgtctttctccacctcacaacctaattttccaaaggagattgcataccagcacgagggagatcacaaatggctcgctggcgatgcactcgtgaaaaacgtgtttaagacgggttttaagttgaatcatgccaagacgcgagttcaatataaactttctagacaagaagccacaggcctgatcgtcaatagaaaggtgggtgtgccgactgaattttatcatctcaccagggcaatgtgccactccctgtttaaccaggggttcgccttcgttgtcaaagacgggattgcccagcccgtctcagatgccgttgtgcgtggccgactgtcatatattcaccacgtacggagtatgcagaatacactggaaaagggccctagcttacagggtacggccccttttcggttgtaccagaggtatctcaatttcaaaagcttctacggcatctcccaaccagtcattatcggagagggcgtcacagacactatttatctgaaggctgcgcttaaccagctggccggcaaattccccaacttaatcgacgtgggccatgggaccaaggagcacaaactgactttttttaagtatgggaagtcttcccgggaactgatgggattaagcggaggcaccggcgagctgaaaaacttactgggggattaccgcaagaggatatcaggattcaagttcggaggggcaaacccggttataatcctggtggacaatgatgacggcgcagaaaagtttttcaagactctgggaagcatgacaaagaccaaggtgacgggaaccgatcccttttattatgtatatgccaacctgtatgctgtgcctattcctcccacaggtggaccagtggctgccattgaaggcctgtttgatccatccctacttaatatccctcatgagggaaaaaagttggacctgactaacaaagaaacagatggcactaagttctacagtaaacatacattcgccaaatctgtggtaagaccaaaccaggataaaattgacttcaccggctttgaaccccttttgcttgctatcgagcaggtgattgcggacttcgcaggtcgccttgctgcaggtaccgctccttga

SEQ ID NO: 8121 - RNA, 1704 nt, synthetic construct
  source 1..1704: mol_type = other RNA
atgagcaaactcgaagccttaaagaaagctaaatccctcagcgatctggcaagtatcttgggagaacaaccgcgggtcctgtcctttattctgtacaaaatcccgagcaatctgaaatataagagcttcgaaattacgaagaagtccggaggaaagcggacaattcatgcccctgtcgcgagattgaagcggatccagaggtcgctggccgaccttctgcaggatatccaggatgagattaagattcagcgcaaagtgaatgataactgcgtagtctcccacggatttaagaggaaactgagtatcatcactaacgccaggaatcaccggaataaaacatatgtgttcaactcagacctgaaagacttctttccctctatcaactttggtcgtgtatatgggttcttcgtacgaaaccaagagttcgcgttggaccccaaggtcgccacagtgatagcccagattgcctgccagggcaactcattgccccagggctctccttgctccccaatcatctctgattttatcggacatatcctggatatgcggctgtcgaggatggccgcaaggcatagatgtacctacactcgctatgtcgatgatctcagcttttccactaataagagatctttcccgaaggctatagcataccaaaatgaggataattctcatgagtggttagctggcgacgccctgttgaaaaacgtgtttaagagtgggtttaaactaaacaatgccaagacacgcgtgcagtataagtccagcagacaggaggcgactggtctgatagtgaataagaaagttgctgtgcccaccgaattttatcacacaacacgcgcgatgtgtcacaacctctttaaagatggctttgctttcatcgttaaggacgggacacctaagcccatatcagacgctgtgctcagaggtcggctaagttacattcatcacgtacgaagtacccagaacaagttagagaacggtcctcctcttaaaactacggccccttttaagctgtatcagcagtacctcaactacatttcctttttcggcagcagtatgccagtgatcataggtgaaggagttaccgataccatctacctgaaagccgctctcaatcagctggcggcaaagtaccccaacctcatcacagttgtggacaaaaagaaggagcacaaacttcagttcttcaagtacagcaactcatctcgagaactgatgggccttagcgggggcacaggggaactaaagaatcttctcggagagtataggaagcgcatttctggcttcaagttcggaggaacccaacctgtcatcattttggtcgacaacgacgacggcgccaaagccttcttcagcacgttgggctcaattaccaaaactaaggtgtcaggcactgacccattctactacgtttatgctaatctgtacgctgtcccaattccacccactgggaatcccgtgaccgcaatagagggcttatttgaacccgcacttcttaataccatctacgacgggaaaaaactggatctcaccaataaagagccagacgggtctaagttttattccaaacacaccttcgccaagaacgtggtgcgtccaaaccaagataagatcgatttcaagggttttgagccactgctgacggcaattgaccacgtgatggccgactatgcagcaagactggttgctgggaccgctccttga

SEQ ID NO: 8122 - RNA, 1704 nt, synthetic construct
  source 1..1704: mol_type = other RNA
atgagcaaactcgaggctctaaagaaggcccaatcgttgtccgacttagcgtgcatattggaggagcagcccaaggtcctgtcatacgtcctctacaaaattcctacgaactctaagtacaaagccttccagatccctaaaaagtcgggcggcacaagaactattcaggctccagtggacaggctcaagcgcatccaaaagtccctggcatcactactgcaggatatccatcttgaaatccagaaaaaacgaggggttaaggctaactgtattgtgagccacgggttcaaaccgaaactgagcataataacgaacgctaggaaccataggaataagacgtacgtgttcaactcagaccttaaggacttttttcctagcattaactttggccgcgtgtatggattcttcgttaaaaatgaggatttcgccctggatccaaaagtagcaaccgtcattgcccagcttgcatgtcacggtaattccctgccccaagggagcccttgctctccgatcatctccgacttaatagggcacattctggatatgagactctccaaggtggctactcgttatcgctgtacctacacaaggtacgtcgatgatctgacctttagtacaaacgaaagcacatttcctaaggccatagcgtatgaagacaaggataaccagcacaagtgggtggccggagatgcccttcttaagtctgtatttaaaagcggcttcaagctgaatgatgctaagacccgagtgcagtatcagtcctcacggcaggaagcgacagggctcattgtgaatcgcaaggttgcagtgcccaccgagtattatcacgccacaagggccatgtgccacaatctatttaaagagggatttgccttcaccgtcaaagacggcgtggctaagcccgttagtgatgccgtgttacggggtcggctgagctacattcatcatgttagatctatgcagaataagctggaaaacggccccagtctgaagctgactgccccattcaagctataccagcaatatctgaactatgtatcctttttcgggatcagtaaacctgtcatcattggagagggcatcaccgacacaatctacctgaaggcagcactcaatcagttggccggtaaattccccagtctggtggaagtggccggcggagagaacgtccacaagctgggattcttcaagtatggaaatagctctcgggagctgatgggcctgagtggtgggaccggcgagttgaagaatttgttgggggaataccgcaaaagaatctctggcttcaaattcggcggtgcacatccagttattatcctcgtcgacaatgatgatggcgccaaagcctttttttctaccctcggaactatcactaaaactaaagtctcaggaaccgacgcattctactatgtgtacgcaaacctttatgctgttccaatcccaccaactggtaattctgtggccgcgatagaggggctctttgaccctacactgcttaaaaccatttacgatggccggcagctggacttaactaacaaagagccggacggatcaaagttttacagcaagcacatcttcgccaagtccgtggtacgtcccaaccaggacaaaattgattttaaggggtttgaacctctcttgacagctattgaccaagtgatcacggactacgctgctaggcgagctgcgagatccgcaccctga

SEQ ID NO: 8123 - RNA, 1710 nt, synthetic construct
  source 1..1710: mol_type = other RNA
atgagtttcgaacttgttgccctgaagaatgctgtcgatctgactgatgttgccgtgctgcttggggtcaagccaaaagatctgtcatacgctctatacatccaaccaagcagcgccaagtatagggcttttgagattcctaagaagggaggcggtttccgcctcattactgcccctgaacccagattgaggagtatacaacgccgtcttgccgatctgcttctgacgattcagcaggaattagaggttcagcggacaaaaagcaagggtattgtggcggcccatggctttaagaagtcccttagcatcatcactaatgcacggtgtcataggggcaaatcatttgtgtttaatggcgacctcaaggactttttcccatcgatgaactttggaagagtgtatggctttttcctcaagaaccgggattttgagctgcacccaaaagtcgctaccgtgttggcccagatcgcctgctttgagaatcgcctaccccaggggtcaccttgctctccggtgattagcaatttcatcgccggaattctcgacaggcacctctccaagttagccgcagagaaccggtgcacttatacccgctacgcagatgacctgacattttctacaaatgaggcaatattccccgagcaagtcgctcgcttagttagaggcgccaatgataagtgggtggccggttatgaacttgccgggcgcgtggcacgatccggatttcagatcaacgagctgaaaacaagactccaataccggaattcaaggcaggacgtcactgggctagttgtgaatgagaagctgaatgtgcctagtgagtattacaagttggctcgggccatgtgtcatcacctgtttaaagacggaactgctttccgtacgatcgacggaattaagatccctgtatccgacgaaagagtgaggggcatcctgtctcacatccaccatgtgagaacttcccagggcggtcctaaacacccacctggtgacccaaaagcaccagggcatcagaaactgtaccgacggttcctggattatgtctcattctttggacatcagcagccgaccattatctgcgagggcaaaacagacaatgtgtacataaagacagcgatgcaaatgctggcgccaaagtttcccgacctggtagaggtagcggggaacaagttcgatctcaaagtcaagttcttcaaatatggccgagctagtgcccagattcagaacctgggtggagggagcggggcacttaaaaccctcttgatggaatatgaaaaacgtttgaaagggttcgcaggcaccgcttctcagcctgtgataatggtgctggacgtagacaagggtaccacccaaatctggagtgaaatctctaagattctgggaaccgcagttgcaggccacggacccgatcccttctaccacgtcagaaacaacctctacgtagtcccgattcccgctaaacctggggtggaaacgtgtatcgaggatctgtttgacgccaaaaccttggcaataccccatgacggcaaagtgttcgacaaggagagcgataaggataagcccggcacctacagcaagaacacattcgccaaccaggttgtcagggaaaaccgacactccattgatttctctggattcgagcccttactcgaagctatcaacgctgcgataaaaaactactccaccaaggtggccgctatgacagcctga

SEQ ID NO: 8124 - RNA, 1683 nt, synthetic construct
  source 1..1683: mol_type = other RNA
atgtcccccgaactcaaactgctcaaggctgctaatggcctgagtgatgtagccagtctgttaaatgtgcggcctgcggacctttcctacgcactctatattctccccaacgaggtcaagtacagaaccttccagatacctaagaaaggtggagggttccgcgttattgcggcacccgagtctcggctccgatacatccagaaacagcttgcggatttgctggtcgctatcgaattggggctggaggcagggcgaactcagaggaagtttatcgtctctcacggctttaagaagaaaatgtccatcgtcacgaatgcaaagaaccaccgcaataaggaattcgtgttcaatagcgacttgaaagacttcttcccatctatcaacttcgggcgcgtgatcgggttttttgtgaaaaatcgagattttgggctgaagccgaaagttgctactgtgctggcccagatcgcctgttttaacaacaagcttcctcagggaagcccttgctctccagttattagcaacttgatagcagggattctggatagacatctctcaaaaatggccgtccagcacaggtgcacgtatactcgttacgctgacgatctgacattttccaccaacgagagagtgtttcccgaagctattgcccggagggtgagaggcgccgaagataaatgggttgctggtcacgagttagtgggaagggtggctcggtctggctttcaagtcaacgagcttaaaacacggctgcagtacaggagcagcagacaggataccacgggactggtcgtgaatgagaagctcaacgttcccgccgaatattataagctgacacgggccatgtgtttccacctcttccgcgatggcaccgcatttgcggtcgatgataatgccaggatgcccattagtgatgagcgtttgcgcgggagactggctcatctgtaccacatccgggggctggaaaacggtcacaaaaagtatccccaaaagaaaggtcctgcttatgtcaaactttatggcaagttcctagactacatcgccttttacggacatcaacgaccaaccatcatctgcgaaggcaagacagataatatctacatcaagaccgccattcaaatgctggccccaaaatttccagagctggtagacgtggtgggtgcagagtacaagttgaaggttaagttctttaagtacggcaaagccagctcaaatctgcaagacttgtccggaggcgcaggccagctaaaaacacttataatggactacggtaacaggctaagtggattcacttcaggagcaaagaaccctgtgataatggtgctggatgtggacaaaggcacaacacagatttgggccgagctttccaagattctgggaaagagtgtggcgggacatgacccatactatcatgtgagggacaacctatatgtagtgcctgttcccgtatcgtcaggcgccgaaggggacatggaggacctcttcgacaagaaaactctggagctcgagtatgaccagaagaaattcgataaaaagagcgacaaggacatgccaggcacctactccaagaatacttttgctaatcacgtcattagagacaaccgtgctaccatcgatttctcaggcttcgaaccgttattaaaatctattcgcgacgtaatagccgattatgcagccaaaatctga

SEQ ID NO: 8125 - RNA, 1728 nt, synthetic construct
  source 1..1728: mol_type = other RNA
atgagcgtggagagtctgctcctcttaagattgagagcttgtacagatctgtcttccgtggctcgtgtgctgggcttgactcccgctgtgctttccttcgtcctatataaaatccccacccaggccagatatcggacctttagcattgccaagcgggccggaggaagtcgcgcaatcatggcgcccaacgagagattaaaaatggttcagcgtcgactggcctctgtgctgttacagatccagaccgaacaggaacggtccaggacgaagaaagcctgtatactgtcccatggatttaagcgggagcttagcattctgactaatgcccggaaccaccgcaacaagaggttcgtgtttaacctagacctggaagactttttccctacctttaattttgggcgcgttcggggttttttcatgagggaccagaacttccaacttcatcctgccgccgccacagtgttagcgcagattgcatgtcacaataatcacctaccccaaggctcgccatgctcaccggtcatttccaatctactggcacatatgctcgacctcaggctgaataagatagcacgaagacacaaatgcacttacactcgctatgccgacgacctgaccttttctaccaacaagaaggatttccctgaagtcataggcgctaccagtcctggagatccaaataaatggagcgcagggaacgatctcctcgcgtccgtctacctgtctgggcataagattaaccatagcaaaacacgtatgcagtatagagatagtaggcaggagactaccggcctggtcgttaacaggaagatcaatgtgtcagtcgactactacaaattagttcgggccatgtgcgatcgactttttgcatctggtattgctttcagacaggacaaaaacaagattgagccagtgtcccggagccacttgcagggcaaacttgcgttcatctaccatatccgcggtcaggagacgagccaccgcaaactgcagaaaaaagaccagccaggctattatcgcttgtactcacaattcctggactattgtaatctttacgatgtcgaccggccaacaatcatttgcgagggcaagaccgacaatgtatacattaggtctgccatagaagccctctcaagcaaggtacccggattgctcgattcagagaagaaactcactgtcagactgttcaagtacactaaaatcacgtctaccatccaagacctggctgggggcacggaccagctcaagaagctggtgagagagtacgcaaaccgtactcaaatgtttaagacgacacccagccaccctctgatcctcgtgacagatgtggataagggcagtacagagtttttcaaggccgtaagcgctatcttggggacaaccgttgctggagcagacccgttttatcaccttatcaagaacctgtatgtcgtacctgttcctaagattaaacatccagaaacagccatcgaagatcttttcgacgataccctcttgaatgagaaggtggatgggaaatccttcgataggaccaacaaagagaaggatggtacaaagttctacgggaagcacgtgtttgctaccagggtggtgtggcccaatcgatctacaataaacttcgcccgctttgaaccgctgctgcgagccttcgaagacgtgaaatcccactacaaaactctgactagtacctcggttaagtcaccagctcccatcgcggcagcagcttga

SEQ ID NO: 8126 - RNA, 1722 nt, synthetic construct
  source 1..1722: mol_type = other RNA
atgcctgcagcgagccctgaactgcaacgtcttaagaaggcgaccgaccttcacggggtagctgccctcctaaacgtaaagccttctagactgtcctatgccttgtattatatgcccccagcgaccaaataccggtcatttacagtgcccaagaaaaggggcggcacacgaacaatcagtgccccgcacggaggcctcaaatacatccagaagcaattggcaaccctgctactgagtattgagaaggagctagagggcgatagacggaagaactccatactggcgcacggctttaagaaggagctcagcattattacgaacgccatccgccacaggaacaagagatgggtgtttaatattgacctccgagacttcttcccctctataaatttcggccgagtcagaggcttttttattgctaacaaccagtttgctttgacccccaaaacatcaacaatactcgcacagctggcatgccatgataatgttttgccccaaggctccccgtgctcccctccaatctccaatcttattgctcgctctctggattatcggttgaatcggctcgctcgggaatgcaactgcacctacactcgatacgctgatgacattacttttagcaccaacgagccagagttccctgaaagaatcgcagtactcgcagggcctcatgcttggcagccaagtgaggagctcgcatcaaggattgtgtcgagcggattcgaaattaacccagacaaaacccgcatgcagtatagggacagtcgccaggacaccaccggcttgatcgtgaatagacacctgaatgtgcctgtggagtactggaaacaaactcgtgcaatgtgtcatcgcttatttgtcgatgggcaggcctatagggtgttcgatggcgagaaggaaccgatctccctcgactctcttaggggaaggttaaatttcatctactacatccgttctctgactctgggcaaggcgaatcttgagaaacccaaagggatccccggatatcggaaaattttcgccaggttcttgaattataacgccttttggagcatcgaaaagccagtcatcgtctgtgaaggcaaaacggacggaatctacctccggagtgcaatacgatctctgcatgccaaatttcccgatttcttcgaaactgtggatggaaaggtgaagatccgccccaccttctttaaatacaccacaaacacgcgggaggttcaggacttaagcggggggaatggtcagctgaaaaatctggttgcccagtacgctcacagaacaaagggtttcaaagggactccaaaggccccagttataattgtgaccgactgtgacaagggagccgtacatctgtttgaagaggtgagcaaaatcctggggagaactgtcgccggagctgacccgttctattaccttcacacaaacctgtacgtcgttcccatacccaaactggggcttcctgaaaccgccatcgaagacttatttgataagacactgctggatactaagattgatggtaaaactttcgacaagacaaaccacgagaaggacggtgctaagttctactccaaatttactttcgccacaaaggtgattgctgcctcaaaggtgcctgtggattattcaggtttcgagccactgctacaggcaatgctggatgtcgaggccgattttgccgcacgcctcgctaccgttccacctacggtgctgcccgcccattga

SEQ ID NO: 8127 - RNA, 1749 nt, synthetic construct
  source 1..1749: mol_type = other RNA
atgtctgtgagttcccttgacctggggcgactcaagcgtgccgctacactgacagatttggccgcagtgctcggtgtggaggctagtacactgtccttcgctctgtacattatgcctgtgcatgagcgttatcacacctttactgtacccaaaaaacgcggaggcgaaagaatcattaatgccccaaacgagagactaaagtttatccagaagaagctcgccgatattctgttgcgcatcgagcgcgacttagaagcacctttgagagaggcagctaacaacggagccaaaaagcttcctatcttgtcacacggctttaagaaggagctttctatcgtgactaatgcccataagcacaaaaatcggcggttcgtttttaatctcgacttggcagatttttttccctcactgaatttcggcagagtgaggggattttttctccacaataatcacttccagcttccagagaaagtggctactcttctcgcacagatcgcctgcttccagaacgagctgcctcaaggaagcccctgttctcccccaatcgctaatctgatagctaatatcctggacgtgcgcttaaacgcactggcgaggagctgtcagtgtagctacacacgctatgcagacgacattaccttctccactaataataaggagtttcccagccatatcgccgcccagaactccgacggccattgggtgccatcggacaagctgattagcaggatttcggccagcgggttccgcataaatgagtctaaaacacggatgcagttccgggattctaggcaggaagccacaggtctgattgtcaaccgcaaactgaacgtgccggtggaatattataaggagactcgagcactgtgccattacctgtttcacgggagagtccctgtgttaaagatcgaaggcggtagcatcccagtgacaacctcatccttaaggggccgactgaatcacattttccacattcgtggcatagaaacggggcacaaaaaaccagagaaaagtaagtacccgggctatttcaagctgtacgcccaatttctcgactacgtctcattctggggtattgagcagcctacgatcatctgcgaagggaaaaccgataacatctacctaaagaatgctatgagagctcttaagcccaccttcccccatttttggaagttcgtagacggcaaagaacagcagaccattaacttcttcaagtacaccaaatgctcaaacatcatacaggacctgtccggcggtaacggacaactcaagaaccttgttcacgagtttgaaaaaaggacccggaagtttcgaagcctccctaaggctccggtgatcatcatcactgacgtcgataaaggggcaaccgacctgttcaaagcgatgaaaaagattctggggtataccgtcgacggcgataagagttggtactatttgcgggataacctatacattgtaccagtccctaaggggggaagagcggaagtcgctatagaagacctgttcgatcccgccttgctcgaggttgagttagagggaaagaagttcgatcggactaaccatgaaagtgatggagaaaaagtttattccaagtttaccttcgctacgaaagttgttgccgcaaggagggatgagatagattttggtagatttcaacccctactccaagccattctggatgtgcaggccgactacgctcagaaaatagcccatgccgtaccatctcctgcgcaggccacagcggcatga

SEQ ID NO: 8128 - RNA, 1734 nt, synthetic construct
  source 1..1734: mol_type = other RNA
atgaccgttaaatcattaacgcttgaaaggcttaagaaatctacagacttgacagaagtggccatactgttgggcgttaaaccatctgctttgtcccacgccctatacatcacccccactgcaaagaagtatcatacattcagtatacccaagaagagaggaggagagcgtattatcacggcgcctaacgaaaggctgaaactgatacaggctcgtctggccgccctactgcttcagattgagcaggatctggaggccacacagtccaagagttgtatcctggcgcacggcttcaagaacgagttatccatcattacgaacgccgccaagcatcggaacagaaggtttgtgtttaacgtggacctcaaggactttttccccagtattaacttcggaagggtacgagggttttttatggctaatcgcgatttccaattgtcagaaaaggctgcgacaatactggcacagattgcttgccaccagaataagctccctcaaggctctccttgcagtcctcccattagcaatcttatcggacagattctcgatgtgcacctaaacaagcttgcaaaggagtgtagatgcacctatactcgatacgctgatgatatcaccttctcaacgaaccagaagaaatttccggaaaaaattgccgtactccaggccggctctgagcatacttgggtgccatccgatgaattaagctttaggatcatccgtgcagggttcgagctcaataaacagaagaccaacatgcaatatcgcgatagcagacagacgaccaccggtctgatcgtaaatcagaaactgaatgtgcctgtggaatattacaaaactgtgcgcgcgacctgtcacaaactgtttactaccggcactgccttccgcaaactcggctcaaaactgatcccaactaccccccctaaaatccgcggtcagctgagcttcctgttccatataaaggggctcgagactgggcatcggaaattgcccaagcccgagatgcctaacttttacaaactgtacgcgcaattcctcaactttatgtctttctgggctatctctcagccaacactggtctgcgagggcaagaccgacaatatctacatccggtccgccatacgggcactctcggccaagtttccagacctggtggaaaagaaggacggcaaggaacggattaagttgaccttttttaagtacacagggattgccaaaacaattcaggacctcagtgggggaaatggacagcttaagaatttagtccgagaatacccgggcaggactgagaaattcaaagtccaacccgcccaccccgtcatcgtggtcaccgatgtggataagggggccgtagacttatttaaggcagtcagcgacgaggtgggaaaaactattttgggtcacgagcaaccatggtattttctccgggacaatctgtatgttgtgccggttccaaaaggtgcaggtgccgagacagccatcgaggacctattcgattcagctctgctgacaaccgaaatcgatggcaaaaagttcgacagaaccaaccacgaaaaagacggtgacaagttctatagcaagttcacttttgccaccaaagtgattagcgcatccaagacacctattgattacgggggattcgagccccttctgcaggccatcctggacgttcaggctgattacgcagctagaatagcagccccacctgtcggcacagctgctgcagctgcgtcctga

SEQ ID NO: 8129 - RNA, 1773 nt, synthetic construct
  source 1..1773: mol_type = other RNA
atgacagttgtttccctcaggttggagctgtttaaaaaggcaaaggaccttacagatgtggcaaagatcctggatctcatgcccgctcatatttcattcgccttatataagctggatagacctggcttcgaaccgaagtacgaggaatttactgttcccaagaagacagggggtattcgtacgattaaagcccctcatagggcccttaaagcagtgcagaagcgactcgccaaagatctgctggagattgagcaggccctggaaaccactcgggtgaaaaaggtggactgtattctggcccacggcttcaagaagcggttatccataatgactaatggagaaaatcaccgcaaacgccgctacgtgttcaacgtcgacctcaaggacttcttccccaccctcaactttggtcgcgtgaggggctttttcatgaagcacaaggacttccagctgaacaaggacgtggcaacaattcttgcccaaatcgcctgccatgacaatcacttgccccaagggagcccatctagccccgtgatatcaaacttgatcgccggcgtcttagatatccggctcaatgagctggcacagcaatataactgtacatatacccgttatgcggatgatattaccttctccacctctgaaaagctatttccttcggcaataggccggccagaaccggggagtatcaacctgtgggaggcgggccctaagttactcaaggctattacaagagccggattcgagctaaaccccgtgaagacccggatgttgctcgattggtcacgacaggaggtaacaggggtcgtagtcaaccagaaagtgaacgtgcctgccgattattatgcactcgctgctgccatgtgccaccacctgtttatggacggagcctgttttacaaccgtaggcggtgtgaaaaaaccctatccgcttactaagctccgcggtaggctggcgtacatctaccaggtgagaggaaggggccctaaacctaaaccagctgtggatgacgcagaagataagcctaaattgggcaagccctgggctagcacaaacctttttcagaaatttctggactacgccgacctgtacggaatcgaaaagccagtgctgctgtgcgagggcgtcactgataatatctatctgaaagcagctattcagtccctggcgccaaagtacccaaccttgactacagccgcaggggagctcaaggtaaaacttttcaagtacaccagaagtagtgctgctctgcaacaactgtctggtggggggggaggactcggagtcctagcttatgcatacccccagagagtccgaaagtttaaaagcgggggtaagcatccactgatcctaattggagataatgacgaaggatctgagaagctgttcggggcgattaaggcaaaaactggcaaaaaagtggatgggagcgagccctggtattacttgggccagaatatgtacgttgttccaatcccgaaagttggaggcatagatacccctatcgaaaggctttttgagcctagcctgttagccactcagtatgagggcaaaacctttaataaaacgaacgcttccaaagaccctgccaagtactacgacaaaaaagtctttgcgacgcaggtcgtggccaaagacaaggccaatgtgaatttcgacggtttcgagcccttccttgacgctatcgtctccgttatcaaccatcacaaggctaaggtggggtcaatcccagtaccagctgccgccgttaccatagctacggcagccccctga

SEQ ID NO: 8130 - RNA, 1770 nt, synthetic construct
  source 1..1770: mol_type = other RNA
atgaccctcccactaaaactgagtctctaccggaaggctagagatctgacagacgttgcaaaaatccttgatttaaaacccgcacatttgtcatacgccctgtacaagttggacaagcccggctttcccccgaaatataaggagtttaccgtccctaaaaaagcaggcggagtaaggacgatcatggctcctcacaaggttttgaaggccgtccagaaaaggctggctaacgacctgttggagattgaacaggtgttagagaagacgcgggtcaaaaaagcggactgtatcctcgcacatgggttcaaaaagaacctcagcatcatgaccaacggtgagaatcatcgcaaaaggaggtacgtttttaacgtggacctgaaagactttttcccaagcctaaacttcgggagagtgcgcggcttctttatgaagcacaatgacttcgaactcgatactgacgtcgctacaattctggcgcagatcgcctgccacgaaaaccagctcccccaaggatccccctgcagtccagtggtgagtaatctaatcgcctccgtgctcgatatcaggttaaatgagcttgcaaggcagcacaactgcacttatacacggtacgcagacgatattacattcagcactaatgaaaagctgtttccaactgcaattggccgcagagagcatggatcactgaatctgtgggaggccggatcgaagctggtaaaagtgattgaacgagctgggttcgaactgaacccagcgaagacccgtatgttgcttgattggtcccgccaggaggtgacaggcgtagttgtgaatcaaaaagtgaatattcccgccgactactatgctactgctgcagcaatgtgtcaccaccttttcatggatggggcctgcttcacaatggtgggaggggtgaaacagcctttctccttgactaaattacgcggacggctggcttatatctaccaggtgcgaggcagaggccccaagactaaacccgccgccgatggtaccgaggataagcccaaatctggaaagttgtgggccagcaccgatctgtttcagaagtttgtggactatgccgacctctatgggatagagcgtcccgtacttctctgtgaaggggtaaccgataacatatacctaaaggctgccatccaggccctggctcctaaataccctgccctggccactgctgccggtgaactgaacgttaagctgttcaagtatacgaagacctccgccgctctgcagcatctcggtggtggagggggtgatcttggaaagctcgccaatgtgtacgcccaacgaacccggaagtttaaatctggaggcaagtaccctttaatccttataggagacaatgacgaggggtctgaaaagctcttcggggcggtcaaagctaaaacaggtaagaaggtggatgggtcagatccttggtattatctgggccagaacatgtacgtcgttccgattcctaaagtgggcggcatcgacacccctatcgagagactgtttgagccgaagcttctggcaacccaatatgagggcaagacctttaacaagacaaacgcttctaaggacccaacgaagttttacgataagaaagtgttcgcgacaaaggtcgtcgcaaaagacaaggcaaatgtcaatttcgacggcttcgaacccctgttgaatgcaatagtgagcattatcaaccaccacaaagccaagattgcgccgattccagccccagctccagccgttctggttgctgccgtcggcccttga

SEQ ID NO: 8131 - RNA, 1767 nt, synthetic construct
  source 1..1767: mol_type = other RNA
atgacggtggtgtcactgaaacttgaactgtaccgcaaagcggaggacatcaccgacctggccaagatcttgggtctgaaacctgcacatatctcttatgcgttataccacctgcccctgggcgataggtacgaggagttcacagtgccaaagaaaactggcggtgtgaggactattaaggctccccatcggaccctcaaagcgattcagaagagattagcaaaagacctacttgagatagaacaggcccttgagcagtcaagagtgaagaagaccaattgtatcctggcccacggcttcaagaaaaaactctctattatgaccaacggagaaaatcaccgaaaaagaagatacgtgtttaacgtcgatctcaaggactttttccctacaattaatttcggcagggtgcggggcttcttcatgaaacataacgacttcgagttgaaacccgcagttgcgacggtgttagctcagatcgcttgccacgacaacgaactgccccaggggagtccatgctctcctgttatctccaatctcatcgcttccgttatggacattcgtctgaatgaactagctcaccggcacaattgtacctatactagatatgcagacgacattacatttagctcttccgagaaaatattcgctccagcaatcggacgacgcaacgtctccagcattaatctttgggaagctggcatctctctgagccgcgtgatcaaaaaagccggattcaaggtgaacgcagctaagacccgtatgcagctcgattatagtaggcaggaagtcacaggtgtcgttgtcaatcagaaggtgaacgtgcccgctaactactacgctgaggcagccgcaatgtgccatcatctctttatggatggggagtgctttgtaaagatagccggcgtaaagcagccactccctaggcgcaagctgaggggacggcttgcatatatttatcaagtgcgaggacggggtccgctaatcaaggctgcaccagaggaccaggaggaaagacccaaaggaggtaagttgtgggccagctccaagctctttgaacgcttcgtggattacgtggatttatacggcattgagaggcccgtcgtgctttgtgagggcgtcaccgataatatctatataaaaagcgccattcaggccctggcacctatttacccaactctcaccaatcctgccggcgaactgaagatcaagctgttcaagtataccaagaccagtgcagctttgcaacagttgtcggggggtgccggagagttggggaagttggctaacacttatccgtccagaatccggaaatttaagtctggcggacaacacccactgattatcattggggatagcgacgacggctccaagaaactctttgccgctgttgagagtaagacggggaaaaaggtagatgggagtcaaacttggtaccatatgggcgctaacctgtacgtcgtgccgatccccaaaataggtaataaggatacagacatagagcgccttttcgatgtggcactgctgaaaactaattacgatggcaagacattcgacaagaccaacgccgaaaaggacggaaccaagttttatgggaaaaaagtgtttgccacaaaagtagttgcggccaacaaggccacagtgaacttcgacgggtttaaacccctgctggccactatcgcggaagtcatcgatcaccacaagacaacggtcgtctcacctacagttgccgccgtaagctcatcagccgttgccgccgggggaccttga

SEQ ID NO: 8132 - RNA, 1776 nt, synthetic construct
  source 1..1776: mol_type = other RNA
atgaccgttgtttctctgaagctggagcaatatcgcaaggcagaggatattacggatctggcaaagatctttgactctaagcctgcacatatctcatatgccctctacaaattagaccaggcgcccgccccatcgaaatacacagaattcactgtccccaaaaagagcggcggagtgagaaccatcaaggcccctcacccagctcttaaagccatccagaaaaaccttgcaaaagacctgttggagattgagcaggtactcgaagagacaagagtcaaaaagccagattgcatcctagcccacggctttaagaagaagctcagcataatgaccaatggcgagaatcaccgcaagaggaggtacgtattcaatgttgacctgaaagatttcttccccacaattaactttggtcgtgtgcgagggtttttcatgaagcacaaggattttgagctgaagcccgccgtcgctaccgtgctagcccagattgcatgtcatgataatcaactaccccaggggagcccttgttcgccggtgatcagtaacctgatcgcctcagttctggacatcaggctcaatgagctggcacatcagtacaattgtacatacacacggtacgccgatgacataaccttcagtacaagcgaaaagaattttcctactgcaattggcaggcgctatgtcggatcaattaacctgtgggaagcgggcccgaagcttctgaaagccatctcccgtgccggattcgaactaaacccagctaagactagaatgcagctggactattcccggcaagaagtcacaggtgtcgtggtaaatcagaaagttaacattcccgcggattactgcgccaccgtggctgctatgtgccaccacctctttatggacggggaatgtttcatccaggtggccggggctaaacagccattccctcttaagaagcttagaggtcgcttagcgtacatctatcaagttaggggaaaggggccgaaagtgagaataaccccagaggatgctgaagaaaaacctaagaccccgaaaccttgggcttctactaagttgttcgagaaatttgcagactatgctgatctttatgggattgagcggcctgttttgctctgcgagggcgtcactgacaacatatacatcaaggccgccatccaggccctggccctgaaattcccatctctgactaatgctgcgggggacttgaagatcaagctcttcaaatacaccaagacgagtgccgccttgcagcaactgtccggaggtgccggcgaactcggaaaactcgcgttcacctatgctagtcggatacgaaagttcaaaagcggcgcaaaacatccactgatcctgattggtgactcagattccggctctcagaagctgttcgacgctgtggagaaaaaaaccgggaagaaagtggacggcagccaggcttggtatcatttaggatccaacttgtacgtcgtgcctattccaaaagtaggaaacaaagatacccccatagagcggttatttgaccaggccctcctggatactccctatgagagcaagaaattcgacaaaacaaacgctgagaaggatggcaataagttttacggcaaaaaggtgtttgcgacaaaggtggtcgccgcaaacaagggcactgtgaattttggtgggtttgagccccttctgacggccattgcagaagtaatcgaatttcacaagacgaaggtggctcccccagcaaactccgtgcaagcaattgcacctgtggccgctgccggaccctga

SEQ ID NO: 8133 - RNA, 1764 nt, synthetic construct
  source 1..1764: mol_type = other RNA
atgaatattgtctcattgaagctagagcagtatagaaaggccacctccctgatcgatatcagccatgtactggctctagagccagcacacatttccttcgccctgtacaagttggacaagccaggatttgcacctaagtatactgaattttctgtggcgaaaaaagcaggaggcgagcgtactatcaaggcccctcacaaagcactgaaagccgtccaaaaaaggctcgctcaggacttattgatgatcgaacaacagctggaggccacgcgcgtgaaacgatctgattgtatcctggcgcacggcttcaaaaagaagctttctatcatgaccaacggcgaaaaccaccgacataggcgctacgtgttcaatattgacctgaaggacttcttcccaactatcaattttgggagagtgagaggcttcttcatgaagcacaagagctttgagctgcaggagagcgtcgccaccattttggcacagatcgcctgtcacaataatcagctgcctcagggaagtccctgctcccccgtgatctcaaacctgattgctagtgttctggacatccgtctgaacgagctcgcacatcagtacaactgtacatatacacgatacgctgatgacatcacattctctacaagtgagcagaattttccaaccgctataggtaggagggatgtcgggtccgtgaacctctgggaagcgggtccgaaactcctgaaaacaatccagcgggcgggctttgagcttaatcccactaagaccaggatgcaacacagctattcccggcaagaagttacgggagttgtggtgaatcagaaagtgaacatagccgccgattattatgacgaagtcgccgccatgtgccatcatctgttcatggatggcgaatgctttattaaaatctcgggtgctaagcagccgtttccgattaaaaagctgcgcgggcggctcgcttatatctaccaagtgagagggaaaggccctaaagtaatacagaagggagaggacggtgagtctaaaggcacccagaagttctgggcctctttcaatttattcgaacggttcctgaactacgcagatctctacgcggttgatagacctcttgttttgtgcgagggtgttacagacaacatatacattaagagtgcaatccaggcgcttgctgtcgcttacccaaccctgacaagcccctcaggcgaacttaaggtgaagttgttcaagtataccaagacaagcactgctgtgcaacagctgggcggagggtccggagaactcttgaagctgattaccaagtaccatctccgcactaataagtttaaagccgggggcaagcaccccctcattgtgatagtggacctggacgaggggtccaagacgatctttaaagaagtggagaaaaagaccggaaaaaaaatcggaacccagccctggttccactgggacaagaacctttacatcgtacccattcccaaggtaggcggcgccgatacgcccattgaacggttattccctcaggctctcctagaagccacctatgacgggaaaacatttgatctcactaactcagagaaagatgggtcaaaattttttggcaagaaagtgtttgccactaaggtcgtcgccgccgataaaggggccattaacttcggtggatttgccccactactggcagctatagtggaggtcattgagcatcacaagacaaagatgagccttcctttagcagctgccgccgctccagttgcagcagctgcaccttga

SEQ ID NO: 8134 - RNA, 1776 nt, synthetic construct
  source 1..1776: mol_type = other RNA
atgacgaccgcagccgccctaaaactggatctgtacaggaaggctgaggacatccgggatttagcagccatactgggccttgccccagcccacattagctatgcacttttcaagatgcccgacgctaacaaatacaaagttttcactgtgccgaagaaaaccggcggcgtgcgcactattaaagcacctcataagacactaaaggctatacagaagcggctcgcccaagatctgatgggcatcgaagcccaccttgaggccgtgcgagtcaagaaacgagactgcatcctcgcccacgggttcaaaaagaagctgtctatcatgaccaacggcgagaatcataggcatagaaggtacgtgttcaatgttgacctcaaggacttcttcccttcgatcaactttggaagggtttacggctttttccagaaaaatcaaagcttcaatctcaagcctaaagtcgcagctgcgattgcccagctggcctgtttcgagaaccagctcccacagggctcaccttgctccccagtcatctccaatcttattgccgggattctggatgttcgcttgaacgaactcgcccagcagtataactgcagctacacgaggtatgctgacgatattacattctcaacttccgaacagaattttccctctgctatcgggcagcgacacccagggagcatcaacttatgggaagccggcccaaaattgttgaaggctattaaacgggcgggctttgagctgaatgccactaagacaaggatgcaacttagttattcaagacaagacgtaaccggaataatagtaaaccagaaagttaacatccctgtcgactactatgagacagtggctgccatgtgccaccacctgttcatggacggcgcttgtttcaccaaggttggtggtgtcagacatccgttcccccttaagcggctccgtggtcgcttggcgtacatctatcaagtgagagggaaaggacctaagcccaagacggtcgatgaggcaggggagcccaaaggcggagcaaaattttgggcgagcaccaatctgttcgaaagattcctgaattacgctgacctgtacggcgctgaacgcccggtgctgctgtgtgagggggtcacagacaacatttatatccggagtgcccttcacgctctcgcagccaaatatcccacaatgatcactcccgcctctgagctcaaggtaaaattgtttaagtacaccaagactagcgcagcaatccagcagttaggtggaggatcaggagagctagtcaaactgctgcgtgagtacagaaaaagaacggcgaaatttaagagtggtgcgaagcatccattgatactgatcgctgattctgacgaagggtccaaggaattatttaaggaggtgactaagcggaccgggcacaaggtggatggtacccatgcctggtataggatcatgaccaacttgtacgtagtgcccattcctaaggtgggagcagccgatacccccatcgaacgcctgtttgagcaggtggtgctggacaaaacatatgatggcaagaaatttgacatgacaaattccgaaaccgatggaagtaaattttacgggaagaaggtctttgccactaaagtggtggccgcgaaccgcggcgctataaagtttgatggattcgaaccgctgctaacagccattgccgaggttattgaggactataaaacaaaggtggcacctgtgctcgctctgattcctgcagcagctgccccagctccacctgcaccagtacccgcttga

SEQ ID NO: 8135 - RNA, 1788 nt, synthetic construct
  source 1..1788: mol_type = other RNA
atgacaattgtctctctgaaactcgagcagtataagaaagctgatacattgacagacgtcgctaggattttggacctgaaacccgcccacatttcttacgccctctacaaactatctaacactagcaagtatgatgagtttaccgtacctaagaagtccggaggggatcgcattatccgcgctcctcacaaaacactcaaggctgtgcaaaaaagactagcgaaggacctccttctgatagagcaggaattggaggcaagcagagtgaaaaagaggaactgcatcctggcccacggattcaagaagaagctgtcaatcatcaccaacggggaaaatcatcgtgatcagaggtacgtattcaatgtggacttgaaagatttcttccctgcaatcaattttggccgggtgtttggctttttcacgaaacataaagacttcgccattaaacggaaggtggcagccgtgttgactcagatcgcttctttcgaaaaccagctgccccaaggttccccctgctctcccgtgatctccaatctgatcgctagcgtgatggatatcagactgaacgaacttgcccggcaaaatcactgcacttatacacgatatgcggacgacattacctttagcactagcgagcagcttttccccagtccgatcggtaggagagtcaacggttcaattaatctgtgggaggccggccctaaattagtgaagatgatagcccgggccggttttgagttaaaccacgcaaaaacaaggatgcagtactattacagcagacaggacgtcaccggagtggtcgttaaccagaaggttaatatcgcgtccgactactacgctacagttgcggccatgtgccaccatctgttcatggatgggtcctgtcatgtgaaggtcaacgggactaaacagccatttagtctagccaagttacgcgggcggctggcctttattcaccaggttcgagggcggggcccaaagctttgtcaagtgcccgatgaaaaggacgaacagaccaaagcaccaccacaaaaggtgtgggcttcgttcaaactcttcgagcgatttcttaattacgccgatctctatggtgccgatcgtccggtcgtcctctgtgagggggtaaccgataacatctatattaagtccgcactgcacaacttggccgcgaagtaccctgctttgacctctccagccggcgaactgaagatcaagctcttcaagtataccagaagtagtgcagcagtccagcagctcggcggcggatgtggtgaccttacgaaactggcaaggatgtactcagctcgcataaaaggctttaagtcagggggaaagcatcccgtgattatggtggtggatagtgacgagggcagcaaggatctgttcaagcatgttcaacacgtcactaaaaagaaggtggacggcaccgactcgtggtactttctcgagagcaatctgtatgtgatccctattccgaagatcggcggcgcagatactccaatagaaaagttatttgagcaggccctgctggacaaaccttacgaaggaaaaaagttcgatatgaaactgaaggaaaccgacggagcaacacatatttccaaaaagacgttcgcgtccaaagtcgttgctgttaacaaggccactataaatttcggaggatttgaaccagtacttaatgctgtagtggaggtgatcgaggactataaaaaacgcgtggggtcagtgattccctctgcccctaccgcagccgtagttgctctggccataatcgctgggggcccccagtga

SEQ ID NO: 8136 - RNA, 1758 nt, synthetic construct
  source 1..1758: mol_type = other RNA
atgaccgttgtttccctgaagctagaacagtatagagatgccgaagacttatctgacattgcccacatcctggatctgaaacccgcccacatatcctacgctctgtataaactccccacccaccaaaagtaccgggagttcactgttcccaagaagagtggcggagtccgcaccatcaaagccccccacaatactctcaaagtaatacaaaaacggctggcacaggatctccttttaattgaacagcagctagagcaagcacgggtgaaggaacgcgactgcatcttagcacatggctttaaaaagaaactctcgataatgaccaacggggaaaatcaccgcggccgtaggtatgtatgtaacgtcgacctccaggatttcttcccatccataaatttcggccgcgtgttcggctacttttcaaagaacaatgactttgcacttaagcctaaggttgcgaccgtgttggcccagattgcttgccatgagaatcagctgccccagggaagcccttgttcacccgtgatttccaatctcatcggcaggatccttgatatcagactcaacgagctggctagaaggtatcattgtaggtataccagatacgccgacgacatcacattttcaacgagcgagaaacattttcctatagcgatcgggatgagggaattgggcagcattaatctttgggctgccggtcctaagctgctggacgcaatcgcccgaaccggatttgagattaacccaaaaaaaacgaggatgcagtatcactacagtcgacaggaggtcacaggcgtggtggtaaaccaaaaggtgaacatctctgcggattattatgccaccgtgtctgccatgtgcgaccatctgtttaagaagggggagtgccatattgacgtgggaggaacaaagcaaccattcagtatcagaaaacttcgaggccgcctggcatacatctatcaggtgcgggggaaagggcccaagcacagacagacagccgatgacaaggatgaccaggtgaaggggtcccagcagcggctctggagttccttcaaactttttgagcgattcctgaactacgctgatctgtatggcgtcgatcggcccgttattttgtgtgaaggtgttaccgacaacatctacattaagagcgcaatccaagctctggctgctaagtacccgacgctcacaaacgcggtcggggatttgaaagtcaagctcttcaagtacactaagacttccgcttcagtgcagcagctgggtgggggttctggagaactcctgaaattggtgaatacgtatagcagcagaactaggaagttcaaaattgcaccgaagaaccctctgattctggtggctgactcggacgatggctctaagcctctttttaaggttatcgagaatcgtactggaaagaaagtagatggtagccacgcatggtaccacctggaaagtaacttgtacgtcgtgcctatcccaaaggtcggtgccgccgatacaccaatcgagggactgttcgaacagattctactggacaccacttacgaggggaagaaattcgaccgtacaaatagcgaaaaagacggaacaaagttttacggcaagaaaacctttgcgacaaaagtcgtggcagccaacaaaggatctatcaatttcggccgctttgagcctctgttgactgctataaccgaggtgattgaggattacaaaccaaaaattgctccatcaccggttccagccttagcccccgccctagtgtga

SEQ ID NO: 8137 - RNA, 1755 nt, synthetic construct
  source 1..1755: mol_type = other RNA
atggcccacctaaccaagttgcgggcagcatcttccttgaacgatctcgccttcctgctgggagtgaagccctcttccctggcctacgtgctatacaaaattcctgatgagaagaagtacacccagttccccatctccaaaaagaccgggggcgaaagaatcattagtgcccccgatccaaggttgaaaatgatccagcgcaggctggcaaagctcttagcaaaatgtcagattgaggttgaggaaaagctgaaagtgaaaccccagtgcactctggcgcacggctttaaaagcgggttttccattcagacaaacgctgctaatcaccgtggtcaacggtgggtcttcaatgccgacctccacgactttttcccttcgatcaattttgggcgagtaaacggcttttttgtgaagaaccagtactactccctgaattcaaagatcgcacttctcatagcacagatcgcatgtcatgaaaaaactcttccgcagggtagtccgtgcagccccatcataagcaatattattgctcatctgctcgatatcagactgaacgaattagcctctgcgaatggctgcacttatacccggtacgctgacgatctgacatttagcactaatgaaaagaccttccctacgagcttggctaaaagggaccctgctaatcttaacaaatggactgtgggctctgggttagctaaacgtattgccaaggccggatttatcatcaacagcaagaagaccagaatgcagtatagagattctaggcaggaggcgaccgggctcgtggttaacgagaaggtaaacgtcaaatccgactattataagcttgcccgctccatctgctggcagttgatgaaagaggggaaagccttcacgaaagtcaatggagatagtgtcccactgaaactcaaatcagttcgaggaatgatagcgttcatttaccatgttaaacgatgggacgacgagcgcaagcaggttccaatcgatgaaatcgaaaagcgggcatacttcaggctgtatgccgaattcctgaattacatgtggttctttggacaatcccgcccaactatcgtgtgcgagggaaagactgataacatctatattaagtgtgccatcaggtccctggcacagtcataccccagcctggttaagtctagtggggagaagcggggcctgcttgtgcagctctttggatttacgaaaacagctgaccaggtgcaaaaactttctggcggtgcaccacagctgaatatactgttaagagactaccgcaaaaagacagccaactgtaagggcatgccccagcaaccaaccattctcgtggtggacaacgactcaggccctcaaagcttgtatagtcacctgggcaacatactaaagaccaaggtcgacggtagcgaacctttctattgggcctatgggaatctgtatgtcgtacccgtgcctaagattggaggcgctccgacagcaatggaggaactatttgagcaagaggtgctggccacaaagctgaatgggagaaccctcgatctttcaaacaaagaggccgacggcacaaagttctacagtaaaaacgagttctcaattcaggtcgtccagaaaaagcagaaaagcataaagttcgatggtttcaagcccttgcttgataatctcgtggctgtgcaaaaagactacgcttctaaggtggaggctgcgaagaagctgtcggccgccaaaaaggtagctgccgctccaacagccgcaatgccttga

SEQ ID NO: 8138 - RNA, 1752 nt, synthetic construct
  source 1..1752: mol_type = other RNA
atgactcatttggccaagcttaaggctgcgagctccctgaacgatttagctctgctgctcggagtgaagccctccggcttggcctatgtcctttacaagatccccgatgagaacaaatatactcgctttactgtcccaaaaaaaaccgggggagagaggaccatttctgcccctgatccaagactgaagatgatccagcggagactggccaaactcctggctaagtgccaggtagaagttgaagagaaacttaaagtcaagcccagatgtaccctggcccacggcttcaaaagtgggttctccatccaaaccaacgctgccaatcatagagggcaacgttgggtgttcaacgtggacctgcacgatttctttcctagcatcaacttcggccgcgtccgtggattcttcatcaagaacaaatactacgcactgaattcgagggtggccctgctcattgcccaaattgcctgccatgaaaagaagcttccgcagggctcccccgtgtcaccaatcatatccaatatcatagcgcacttgttggacattagactgaacgaactggcctcagccaatggttgtacttatacccgctacgcagacgatctcaccttctctacctctgagaaatcgttccctacatccctcgctaaaagggacccagcgaatctgaataagtggacagtggggtccgggctagccaagcgaatctctaaggcaggctttgctatcaactcacagaagacccggatgcagtacagagatagccggcaggaagccacaggcctagttatcaatgagaaagttaatgtgcggtcagactactataagctcgcacgctccatttgctggcatctgatgaaagaagggaaggcatttaagaagatagatggggacagtaagccattatcacttaaaagcgtacggggcatgatggcttttgtgtaccatgtcaaacgatgggacgatgagcgaaaacaggtgtccgtggctgaaattgagaagagggcctatttcaggttatatgcggattttctgcactatatgtggtttttcggacagacgaggcccacaatcgtgtgtgagggtaaaacggacaatgtgtacatcaaatgtgctctcagaagcctcgcacagtcatacccgaccctcgttaagactgccggcaagaaaacatctttcctggtccagttgttcggatttactaagactgccacccaagtgctcaaactgagcggaggtgcacctcagttgaataacttactgcgggactatcgccgtaatactgccaattgcaagggcatgcctcaacaacccacgatgctgatcgtggataacgattctgggagccagagtctctattctcacctaggccgaattttaaaaacagatgtagacggatctgaaccgttttattgggtttacggaaacctttacgtcgtgcccctgcctaagattggcagcgggccaacagcaattgagcagctgtttgagaaggaggttctcgacaccgaactggaaggcaggacactagatctgaccaacaaggagacagacggtaccaaattctacagcaagcacgagttcagtatacacgtcgtgcagaagaagcagaaaagcattacttttgacggttttaggccacttttggacaacatggtggctgtacagaaagactacgcatcacgggttgctgctgcagccaaacctcgcacggccagtaaggtcttggccgcggcaacagctagtccctga

SEQ ID NO: 8139 - RNA, 1749 nt, synthetic construct
  source 1..1749: mol_type = other RNA
atggctcacctgacgaaactgaaaagcgccgcgacactaaacgatgtcgccctcctgttgggtgtccagcccgcttcgctggcctttattctatacaaaatacccgagcaccaaaagtatactaagttcccagtacctaaaaaatccggaggggaacgcatcatcagtgccccggatccacggttgaagatggtgcaaaaacggctggcaaaattgctcaaaaactgtcagctggaagttgaggccattctgaaggtaaaatctcagtgcgtcctcgcgcatgggtttaagcctggactgagcatccagactaatgccgccaatcaccgtggacagcggtgggtgctgaacgccgaccttcaggactttttcccttcaatcaatttcggacgagtttatggtttcttcataaagaaccagcattacatgcttaataagaaagtcgccacgattatatcccaaatcgcatgccatgaaaacactttgccccagggatctccatgctcacccgtgctatccaatatgattgctcatatgctagacattcgcctcaacgaactggcatcatccaatcgttgcacatatacccgctatgccgatgacttgacctttagtacaagtgagagagtcttcccctccagaatcgccaaacgcgatccgagcagcctgcacaagtgggtggctggagcaggcctgtcaaagagagtggaaaaggctggctttgccatcaatgggaagaaaacaaggctccagtaccgggacagcaggcaggacgctacaggcttagtggtgaacgagaaagtgaatgtcaagtccgagtactacaagctcgctcgggccatgtgttggcatttaatgacaaagggcagcgctcacctgaaggtgggctctatcccagtccctgtggatgcaaaaaaagttcgcgggatgctggccttcatctaccacgttaaaaggtgggatgacgacaggaccaaggtgccgaaagaggaaatcgaaaagagagcctattatcgagtctacgccgacttccttaattacattagtttcttcggccagccccatatgaccattgtgtgtgaggggaagaccgataatgtctatctgagatgtgcggtgagatcacttgctgctttatatccatctctcatccaagtgaagggaaaaaaaaggaacttccttttgcagctcttcaagttcacgaaaactgccgatgcagtgcagcacctgtcagggggtgccagtcagctgtctaatctgttgagcgagtacaggaagcggatcaaaaactgcaaggggaccccccaacacccaactgtactggtggttgacaacgatagcggtcccgaaaagctgtttaagcatctctcctctcttctcaaaaaggacgtggatggctctgaccccttttacttcgtctacgagaacctttatgtggtgcctgtgccaaagattggaggcgcatttaccgcaatggagcaactcttcgaatcgcacgttcttaaagagaagttaaacggccgaatactggatctgaccaacaaggagcctgacgggactaagttttactccaagaacgaatttagcgttgagatcattcagaaaaagcaggctagtatcaagtttgatggttttaaaccactgctgaatgctttggtagcagtacagaatgactatgccggcaagattgcagcgaaaaaggccgcaatacctgcccctgctccagttcctgctctcgcagcgccctga

SEQ ID NO: 8140 - RNA, 1836 nt, synthetic construct
  source 1..1836: mol_type = other RNA
atgttgggttggattgcccatctgcgttttctgcagtttattgacgtgtcatcttgcctgggagtcagtgcctctagactgccatctggagtttcagtcactgggagcacactgaagaccctccaggccatccagaatctgcacggatttgccgccttcctgggagtgacaccaaaggccctaggacatgccatccatggtatccccgaggtgagcaagtatacaaaattcgagattgccaaaaagtctggcggcaaacgcgagatttgtgccccagtgccacacttgaaaaggatccagcgccgcctggcaaacaaactcaaagaaatcgagatgagcttggagggtgagctcaccactaatgaacacgtacttagtcatggctttaaacccaacctaagcattgctaccaatgctcgcgcacaccggggaagaaggtgggtgttcaatatcgacctggccgatttttttccatccattaattttggccgcgtctatgggtttttcttgaaaaattcccgatatggcgtcagcaaaaccgtcgctacgttaatcgcacaaatagcctgctacgagaatcagttaccacaggggagccccagttctccggtgatttccaatatcgtagctcatattttggacatacggctccacgagctagcggccagtctgaactgtacctacactaggtacgcagacgacctcaccttctctacgaatgaaaagggttttcctggcgccatcgctaaacggtcacaggatgaggacgacgtttggaagatcggaaagaaggtcaagagcattattaagcagagcggctttgagattaaccccaaaaagaccagaatgcaatatcggataagtaggcaggatgtgacaggcttggtggtgaacgaaaaggtgaatgttagagccgaatattcacgaaccgccagagcaatgtgtcaccaactgtggacgaaaggcgctgcttttcagaaagacgggaagctgaaactggctaagactcccgaacaagtgagaggcataatgaacttcgtgtaccatatcaaagagtgcgaggaagtgcggcaatctgatggggccgaattcgatccgtccgcacctcttcctggctatgcgagaatatacgctaagcttctggattacctgtccttctgggggacagataagcctgtgctcctgtgtgagggaaagaccgacaacatctatattaagtgcgctattgagaacttagccgcctcattcccaacactcatcgagtcgtcaggcggagtaattgaacctgctgtgcgcttctttaaccgttcagatgttaaagacactaaagatagcctgacctggaaactgcagaaactcgcagggggcgttacagaactgacatcctttctgggagagtatagggaacgtataaaagactttaagcacgggggcaagtacccgcttgtaatcgttgtggacaatgatcaggaatcgaaaggtatgttcagccacattaagaacatcatcaagtccgcagcccctgtagacgggagtgctcctttctattacatctatgctaacctatacgtggtcgcaatccccaaaataggttccaaggacacatacattgagaggctcttctccgataaggttcttaagaaaactctcgatgggaagacgttcgacgtgaccggtaaaaagaacaacaaaacccactacttcaagtctgactttgccaagaaagtcataaagaagaacaaggcgaatatcgatttcaagcggttcaagccccttttagaacgaatcgcggcagtcaaagcagattacgcgactaggatcaagacaactccctga

SEQ ID NO: 8141 - RNA, 1713 nt, synthetic construct
  source 1..1713: mol_type = other RNA
atgctcttgggcatgaaacccgcagccctggcctatattctgtataaacttcccgcaggagcaaaatacaaaagctttgagatcgagaagaagtcaggcggcgtcaggaagatcatggctccagagccaaggcttaagatgctgcagagacgcttagccgatctgctgctagcctgccagtccgagattgaagcgtccatgaagatcaaagacgattgcgctctggcacacggtttcaagcctagactttccatcttcacgaatgccgagaagcaccgtaaccgtcgatgggtgtttaatgcagacattgaagatttcttccccacaattaatttcggccgagtttatgggttctttcagaaaaatcaccactttgcccttccaaagccagttgctacaattatcgcccaaatagcttgccacgagaaccaattaccccaggggtcaccatgttctccggtgatatctaacatcattgcccacatcttggacattcacttgaatgacctcgcttatagacacaattgtacctatacccgctacgcggacgacttgactttttctaccaacgagaaacagtttcctcgggccattgcaaagcggcaagtcggagatatccatgagtggataccgggaagtggcttgaagaaagccctaaagtctaatgggttcaaactgaacgggagcaaaaccaggatgcagtattgtgactcccgccaggaagtaaccggcctggtcaccaatgaaaaagtgaacgtgaaacaacagtactataagcaggcccgggcaatgactcgcgaactggttaccggaaagaaacctttcgttaccgtagcaggcaaaaaagtcgaggtggccagggatcatctccgggggatgctgaacttcatctacttcattaagagcaaggaaaacaagcgcataggattcacatttgacaaggaaaacgataaactccccactttccacgcaatctacaagcagtttctggattacatttggttttacggaatcgacgagcctactattatctgcgagggcaaaaccgacaacatctacctgaaggccgccattaaggcccgggctgcccattttccagaattagtaaagacagtggaaggtgtcaccaaaatacgacccaggtttttcaaatattcagacacagctgcggagcttcaagacctctccgggggcacaggtgagctcaataatttgctggcgcattaccggaataggattactactttcagagggggcgctaaccagcctgtaatcattattgtggataacgacagcggggctaccgctatattctcgcatatctacaacatactgaatccgaagatcaagagcacgggtggaaaaaaaggaggcgctactcctgctgcccctgtcgatggaagtgaacagttctactacctgtacgaaaacctttatatcgtgcccgttcctaaggtggctggggctgagacacccatcgagagattatttgaccccaaactgctgaagacagtgtggaatgggaagcagctagatctgacgggcgacaaggacccagccaagtactattttaagaacgatttcgcggttcatgtcgtgaaggagggtggcgcaggtgtgaagtttgatgactttgatccactcctcagtgccatcgtggctgtcaaagccgattatgccaaaagagtggcactgctcgcggcagtggcctga

SEQ ID NO: 8142 - RNA, 939 nt, synthetic construct
  source 1..939: mol_type = other RNA
atgaacaccccactctctaaaattaagagctgtacaaaccgatcagacctggccttactgctaggtgtaaaacccgccgcactgtcctacatcctttacaagattcccgatgaaaataagtactactccttctctattccaaaaagaaatggagatcagcgccagatctcagctccaatcccagccttaaagatgctgcagaggcgcttgagtgagcacctgtacgaatgcctgaatgaaatcgagtatctcgaggcggtggatccgcagtgcgtcgtagctcatggcttcaaaaagcacctgtccatcgcaacaaatggatcacatcaccggtccaaaaggtgggtgttcaactgcgacatcgaggaattttttagctccatcaacttcgggagggtgaaggggtactttgaaagaaacagacactttcaactgcaacctgaggttgcccttgtcgtggctcagatttgttgtcacgagggagttttgcctcagggcgcccccacgagtcctataatcagcaatcttattggctctattctcgacgataggatcagtcggctggcgaatgagctgcggtgtacctatacacgttatgctgatgatttgacttttagcaccaacatggcacacttcccccggcagatagctgttgccgacgaaaagtctcctagccgctggaggattggggacaagctccttagtcgcgtcgcacaggccggtttcagaataaatcatgagaaatctcggatggcaatgccgaactcacgacaaacagtgacagggctaacggtgaataagaccgtcaacgtggccactacctattacaagatgactcgagctatgtgccatcatctctttactaccggctcctattcgagcggtggcttgaacgacgcccccaaaggaagagagctcgcggccctggaaggccgttga

SEQ ID NO: 8143 - RNA, 1740 nt, synthetic construct
  source 1..1740: mol_type = other RNA
atgaaggtggagatctacaaatttgggctaaaggagctgaaagcatgcgtggatctgagcgacgtggcatttctccttgacgttgaacccaagttcctgtccaaacagatctacaaaacagacgccgctgttaagtaccacagcttcaccttgcctaaaaaagacggaagctcaaggctgataaacgccccgaacaagaaccttaagtttatccagagccggctgagtaggttgctataccagtgttatttcgacattcatgggaagccagagttcccgggacgggtcattagtcacggctttcagaaacaacgggacctttcaatatataccaacgccattagacatatcgggaagagacacgtattcaatgtcgatctggaggacttttttccgtcttttaatttcggcagagttagggggtatttcatcaaaaatgagcgctttgctctgaaccccaccgtcgccactgtgttggctcagactgcgtgccacgacaatgtactgcctcagggagcccccacgtcacctattatttccgagctcatttctcaggtcttagactatcgtctgcaggccgtggcctccaagtacagatgcacctactctagatatgctgatgatatcaccttctcgacaaacctccccgagtttccacaccagatcggcagtcaggatgccggtgtctggaccgcaggactgtctatcgaaaaggcagtatcctcctgtggtctgaagctcaatgcagataagacccggatgcagctcggccagcagcgacaagctacaactggcctcaccgtgaatcgaaaagtcaacgtgggacggcactactacaaaggggttaggttctgtgctcatgccatgatgacgaccggcaaagcagacgccccttcctatctcaaaatccccgagaagcagctgaacagtcatcaaatttggggtatgctgtgccacatcgatgatataaaagggcgcgaaaacaaccatgcacccattagacacttttcttccagccatccagcgccacattacctgcgactgatgcgcgatttcttccacttccatcgcatccacactaatcctaaacccgtaatcatctgcgaaggtaaaactgactacatctacctcaaggaagcgattcgctggaacgttggggatcctatggtggctacattgcttgatgtcgtcccacatacaaaaaagagcaagggcgatcactggaatgtcgatttcgtgaggcattcggacactgctggtgacctgcttgaactggctggcggcgggggagacttacccaaatttgccgagtaccacctcggacgtgtggacaagctgtataatggtgaagccgccaaacctgtgatcataatagtggataacgatgggggctctgacggaatgtggacatggattaagcgggttactgagtcagcgacaaagattgacggctcaaaaccatattaccacattggcaaaaatctctatgtggtgcctattccctccggaggccaagcagatttttatatcgagaagttattcccacaaccatggctaaatgccaagcttgggaccaagacattgaagctgatacagaagaagggggacaagttgagtcctaatgaatatggtaaaggcgaattcgctacgaaagtgattcgtgccaacaggggaaaggtggactgtagcagcttccttcccttgttacataccctgtttgagatcatccacctgaagtga

SEQ ID NO: 8144 - RNA, 1557 nt, synthetic construct
  source 1..1557: mol_type = other RNA
atgaaggaaaagatctacaagttcggattaaaggaactgaaatcctgtatcgacctgtccgacgtagcggttctcctcgacgtggaacccaagttcctttcaaagcagatctacaaaaccgatgccgctgtgaaatatcacagttttgccctgcctaaaaaggacgggtcgtcacgattgataaatgctcccaataagaacctaaagttcatccagtcccgcctgtcacgcctcttgtaccagtgctacttcgatattcacgggaagcctgagtttcccgggagagtgataagtcatggatttcaaaaacaacgcgatctctccatttatacgaatgccatccgacataccgggaaacgccatgtgttcaatctggatcttgaggactttttcccaagctttaacttcggccgcgtccggggttactttattaaaaacgagcggttcgccctaaatccgactgtagccaccgttctcgcacaaaccgcctgccatgacaatgtacttcctcagggcgctccaacttcgccagtcgtttctgagctgatctctcaagtgctggactataggctgcaggctgtcgctagcaagtacagatgtacatactctaggtatgcggacgacattacattttctacaaacctgccagagtttccgagccagattggctcccaggatgccggtgtctggaccgcaggaccttccatagagaaagcaattagcagctgcggtttgaagctgaacgcagccaaaactcggatgcagcttggccagcaaagacaggccacaaccggcttaacggtgaacagaaaagttaacgtcggcaggcactattataagggcgtgcggttctgcgcccacgcaatgatgaccactggcaaggctgaagccccaaaatacctgaaaatcccagagaaacagctgaatagccaccagatatggggaatgctatgtcacatccacgacatcaagggtagagagaataaccacgcccccatcaggcacttcaataacgggcatagtgcaccccattacctgaagttaatgagggacttttttcatttccaccgtatacacactaaccccaaaccggtcattatttgtgaaggcaagacagactatatttaccttaaggaggctattaggtggaacattggcgatcctatggccgcacccctcttggatgtggtgcctcacacaaagaaatctaaaggagatcactggaacgtggatttcgttcggcataccgataccgcgggggatcttctggaattggcgggcggaggagggatctgcagatccctgcgaaatacaatctgggctgatctcaagtcttcaacaatggcaatgcagcagtcacagagcagtctcagctctatcactatcgtgggagtgaaggcctgtggggtgggctccaggtcaagtagaaacccccggcgcagatcaatggacaggtcccgtactaccactctggctaagacatccaccctgttccctagccgtgtccggggtaaagctacctttacgtctcgaagcagttttccacataatgggtga

SEQ ID NO: 8145 - RNA, 1740 nt, synthetic construct
  source 1..1740: mol_type = other RNA
atgactaagaagatttatcggtacggactgaaagaactgaaaagttgtatcgatctgtctggggtcgcttttctcctcgatgtggaacccaagttcttaagtaagcagatctacaaaaccgatcctggggtgaaatatcatatattccaggtgcccaagaaagatggttcttctcgtcttattaacgcaccgaacaaaaatctcaagttcatacagtcacgcctctcaaggctcctgtaccagtgttattttgacatccacggaaagcctgaatttcctgcaagagccatcagccacggatttcagaagaaacgagacttgtcgatttacactaacgcattcaggcacaccgggaagcgtcatgtctttaacgctgatttggaggacttctttccttctttcaattttggacgtgttcggggctactttgtcaagaacaagcatttcgcgctcaacgacaccgtcgccaccgtattggctcagacagcttgtttcgacaatgcactgccgcaaggggccccgagttctccaatcattagcgaactgatctcccaggcattagattatcgcctgcaagcgattgcacggaaacatagatgcacatattcgagatatgcagacgacattaccttctccaccaacctaccagagtttcccgagcagatcgggcttgctgatgccggtggatggatagccgggagtagccttgagaaggccgtcacatccagcggcttcaagctcaatgccaaaaaggttaggatgcagttcggagatcagcggcagtcaactacaggtctgacagtgaatagaaaggttaatgttgggagacactactataaaggcgtgcgcttttgcgctcatgccatgatgacggccggaaaagccgaggctccagcaattctgaagctgccagagaaggagctgtctagccatcaaatatgggggatgttgtgccacgtgcacgacatcaagggtaggcagtccgatcacgccgcgatccgatcctttacaaaatcccatccagctccccactatctaagactcatgagggatttctttcactatcatcggatccacacgaatcccaaaccccttgtgatttgtgaaggcaagacagattacatttacctgaaagaagccatccgctggaatatcactgatcccaaggtcgcgaagttgctgaacgtaagccctctgaccaaaactagtaagggagatcattggcacgttgatttcctgcggcacactgatatggctggcgacctcttagaccttgcgggcggaggcggcgatttaccaaagttcgccgcataccatctggaccgattcgagaaactgcacaaggctgaggccaccaagcccgtgatcattatagtggacaacgacaatcagtccgccggtatgtggagctacattaaagaagccattggctctaagggtgtaatcgacgggtcacaaccttattaccacgtgggcaagaacctgtacgtggtgcctatcccatcagcaggcaaaaaagacttctacatcgagaagctgtttccccctaagtggatgaaggagaaacttgggaccaaatcctttaagatcatgcagaagaaaggagagaaactaggcccagacgaatatggcaagggcgagttcgctaccaaagtcattcgcgccaacaggggtaaagtggactgcagcaattttttgcctttgctgcaaactctcagcgacatcacggacatagaatga

SEQ ID NO: 8146 - RNA, 1755 nt, synthetic construct
  source 1..1755: mol_type = other RNA
atgactaaacagatctacgagtatggtctggcagacctaaagctttgcaacgaccttggtgacttggcacgactgctgcatgtgcgcccgaaattcctgagcaagcagatctaccacacacccgatagcgtgaaatattccgagtttgaattgccaaagaaagatggctccaagcgctccatatctgcgcccaacaagaacctgaaatttatccagagcaggctttccagactcctttaccagtgctacttcgatatccatggagtgccagagaatacagggcgggtgctgagtcacggattccaaaagggtcgggatctctcgatttataccaatgcaaagaagcacattaaccgcaggtacgtgtttaacaccgacatcgaaaatttcttcccctcatttaacttcggcagagtaaggggctattttatcaagaatcagcacttcgacctgaaacctaccgtcgccactgtcattgctcaaacggcctgtttccagaatgcattacctcagggcgctcccagttctcctgtaatcacggagttaattacccaaactctggactacagattgcaggcgctggcccgcaaataccggtgtacatatagtcgttatgctgacgatatcaccttttccaccaatttgaaagagttccccgcagccattgccttcagacctgaaggagaaaacacatggcgggaaggaccttcactgatcaaagccgttgagtctagcgatttaaagattaaggtcacgaaatcccgcatgcaacagagctatcagaggcaggccacaacagggctgactgtcaatgacaaggttaatatcgctgtctactactacaaaggggttcggttctgtgcttacgctatgatgacaaaaggcaaggccgtcgcaactaacaaactactggtgtcgaagaacggagatctctccaaacagcagatctgggggatgatgtgccacgtgaacgacattaagcgacgagaactgccttatgaggccctgagggccttcaaacccgccccaataccatcctacctcaagctcatgaaggacttctaccatttttacagaattcacaccgcggaaaagcccctcattatctgtgagggcaagacagattacatctatctcaaggaagctatccggtggaatgtgagcgacacccgtgtcgccaaaaccctcctaaacggtcccccattacagaatgtaacaagcgataagggagatcattgggcggttgactttgtaaaccacagtgaaatggcaggcaatctgttggatcttgctggaggcgggggcgacctaccgaagtttgctacctatcatctggagcgtgtgcagaaactgttttctgagaagccacccgtgccagttattatcatcgtggataacgatagccaatcagccggtatgtggacgactataaagaaactgactgaggcctcaaagccaatagacggatctgcaccttattatcacgtggggaaaaatctctacgtggtgccaatcccttcaaacggcgctaaggacttttatatagagaaactgatacccaagaactggctcgatcagaaattggacgggaaaactcttaagctcaatcagcaaaaggatgaaaagctgaagcctagtgagtacgggaaaatggactttgcaaccaaagttattagggccaatagaggcaaggtggatttgagctctttcctgccgcttctgcataacatttgcgacatcattgactctgcctga

SEQ ID NO: 8147 - RNA, 1755 nt, synthetic construct
  source 1..1755: mol_type = other RNA
atgaccaagaagatatatcacttcgggcttgccgagctcaccagctgcgtcgatcttggggatctggctcgacttttggaaatccagcccaagtttctgagtaagcaaatttaccacactccatacggccagaagtatacacacttccctatgcccaaaaaagacggtagcaccagaaacatctctgcacccaataagaacctgaaattcatccagagtcggctgagtcgacttctgtaccagtgttattttgacatccacggagctcccgaatttccaggtcgcgccctgtcccacggttttcagaagggccgcgacttatccatttttaccaatgccaagaggcacacaaatagacgttttgtgttcaacaccgatatagagaactttttcccaagctttaactttggcagagtgcggggttacttcattaagaatcagcatttccagctgaaacccactgtggcaaccgtgatcgcccagaccgcatgttttatgaacatcctccctcaaggagctccctcttcacccattatatcagaactgattagccaaactctagattataggctgcaagccctggctcggaagtacagatgctcatactccaggtacgcggatgatatcacattttctaccaacctcaaggagttcccaagcgctatagccttttgtccccctggagaggtgaactggagagaaggacctagcctggagaaagcggtactttcatccaatctcaaattgaacagcaagaaagctaggatgcagcaatcctaccagcggcaggcaaccaccggcctcacagtgaatgataaggtcaatatttccacctattactacaagggagtccgcttctgcgcgcatgcaatgatgacaaaagggaaagccgttgctaataataaattgtcagtagccccaaatggcaagttaagtaaataccagctatggggtatgctctgccacatcaacgatatcaaagggcgcgagttaccgcataaagctctcagggccttcaagtcttctcctgtgccatcgtacctcaagctcatgaaagacttctaccattactatcgaatccacactgcagaaaagcctctcatcatctgcgaaggcaagacggactatatttaccttaaggaggcaattaggtggaatgtgtccgacgcccgggttgttaaaaacctgattagcggacctgccctgataaatttcacgtccgataagggggaccactggggcgtggatttcgtaaaccattctaatatggccggaaatctgttagatctggctggcggaggcggggacctaccaaagttcgctacatatcatgtggagcgcgttaaaaaactgtttgcggagaaacctcccatgcctgtgataattgttgtcgataacgacaaacagtcggaaggtatgtggacaacgatcaagagtctgacaggcagcccgacacctattgacggatctgccccatattatcatgtcggggaaaatctgtacgtcgtacccatcccctccgccgggaaaaaggacttctatatcgagaagctgatcccatcaaagtggttgaagaagactttgaacgggaaaaccctaaaactgaaccagaagaaggacgagaagttgaagccgactgagtatggcaaaatggactttgccaacaaagtgattcgtgcaaatagaggcaacgtggacttgactagtttccttccgctgctgcacactatctgtgacatcattgaactcccatga

SEQ ID NO: 8148 - RNA, 1761 nt, synthetic construct
  source 1..1761: mol_type = other RNA
atgaccaatgcgatctataagtacggaattaaagaactcaagacctgtgtggacttgtccgacatcgcttttttactggaagtcgagcctaaattcctcagtaagcagatttacaagacgtccgatgaaatcaaatattacagctttgagatccccaaaaaagatggaagcaagcgggctatctacgcgcctaacaaaaatctgaagttcatccagtccagactgtccagactgttgtaccagtgctactttgatctgcacggagaacccaagtttcctgctaggtctatcagccacgggttccaaaagggacgtgggctgagtatatacaccaacgctattaggcacaccgggcggaaatatgttttcaatgccgatatagaggacttctttccaacttttaacttcggacgagtcagaggctactttatcaaaaataaacacttcgagctcaacgagacagccgccaccgtcattgctcagatcggttgcttccagaatatgctcccgcaaggcgcaccctcctctcccattatttctgagttcattacccagcatctggactataggctccaggcattggcaaaaaagcaccgctgtacctacagccgatacgccgacgacataacatttagcacgaatctgacggaattcccagcccaaattggcgtgctgtcaaccgatcaagaggcctggaccgcaggcgctggtttcgaaaaggccatcagcagctgcggcttcaaacttaatgtgaagaaaatccgcatgcagcagggttaccagcgccaagcaacaacaaacctcacagttaatcgcaaagtcaacatagggagccactattataaaggagtgcggctctgcgcacatgccatgatgacaaaggggaaggctaccgctcctggcaaagtgtctactccccctggggatgaattaaacagtcaccggatttggggaatgttatgtcacattcacgacatcaagggcaggggactgccacatagagccctgagaaattactcacctactcatccagctccccactaccttaggctcatgcgagacttctttcattatcatcggatacatacctcgcccaaaccgctggtgatctgtgaaggtaaaactgactatatctatctgaaggaggccattagatggaacatggccgatgagcgcgtgggaaagctacttgtgaaggccgatcagcttccgcacttgaagaaatcatccaaaggtgaccactggttagtcgacttcgtgaaccattcggacatggccggagatctgcttggcctagcaggcggtggtggcgacttgcctaagtttgcagactatcacctggataggattgggaaactgcatgccgacgccccaccaggaccagtaattataatagtggacaacgattcccagagtgaggggatgtggacatttatcaagaaagcgactggctcaactactaaggtcgatggctctaagccctactaccacgttgggaagaacctatatgtagtaccaatccccagtggcggagcaaaggatttctatatcgagaagctgtttcccgacaactggctcaaagaaaagctcgcggggaaatcatttaagatcattcagaaaaagggcgagaagttggggcctaacgattacggcaaaggtgatttcgctacaaagatcattaaggccaatcgtgggaaggttgattgctctaattttctgcctctgctgcatactctttgtgacgtgatccagggcaagtga

SEQ ID NO: 8149 - RNA, 1755 nt, synthetic construct
  source 1..1755: mol_type = other RNA
atgacaaaacgcatctatgactacggactggaggagctgaaggcatgcggtaacctctctcaccttgcatttctgctgggcgtcgaaccaaaattcctgagccggcagatttacaaaaccgacgatcagttgaagtaccattccttcgagatcgccaagaagaatggcaccaaacgtaccattaacgctcccaataagaacctgaaattcattcagtcaagattgtccaggctgctctaccagtgctacttcgacattcacgggaagccagactttccagcaagagctacatcacatgggtttcaaaagaaccgcgatcttagcatctataccaatgcagtgagacacatcggtaggaagtatgtgctgaatgccgacatcgagaattttttccctacgtttaacttcggcagggtccggtgctactttatcaagaacaaacatttcaccctaagtgagacagtcgccaccgtaatcgcccagacagcttgtttccagaatgctttgccccaaggggcaccttccagccctattatatccgaattcatcacccaggctctggactacaaactacagtctttagcgaaaaagtatcggtgcacctactcacgctatgccgatgacataacattttcgaccaacttaagtgaattcccctctcatatcggattcctgagtcccgatacggagaattggtcagtgggcaagagcttcgaaaagtccgtcctcagctctgggtttaaattaaacgctacgaaaatccgaatgcaacaacagaatcagcgtcaggccacaacaaacctgactgtgaatcgaaaagtcaacatcggctcatattattacaaaggagtgcgctttgccgcttatagtatgatgaagaacggtaaggccattgccactggaaaactctctctcactgccaaagagttgaatagccatcagatatggggcatgctctgtcacgtgcacgatataaagggcaggggccttcaccacactgcgttgcgcaactatactaatgcgcatcccgccccacactacctgagacttatcaaagatttcttccactaccacagaatccacacatccgccaaacctatcgtgatctgtgaaggtaagacagattacatatacctcaaggaggccattaggtggaatgtggcaaaccagcggattggaaaactgctcgttaagtctggaaagctgtccgaccttaagaacactaagggcgaccactggctagtagattttgttaatcatagtgacatggctggagatctgctggatttggccgggggtgggggagatctcccaaaatttatgacctaccatctggacaggttcgataaactgcacagtgatgcgccgcccaagccagtgattatcattgtcgacaatgactcccaaagcgatggaatgtggtcgacaatcaaacggatcactggcagcaaggcagccgttgacggaacgaaaccttattatcacgtggggaagaatctgtatgtggtacccatacctgccgggggtgcaaaggacttttacattgagaagctttttccggaccattggcttaaggaaaaattgggcgggaaaagcctcaagatcatacagaagaagggcgaaaagcttaccgctgatcattacgggaagactgacttcgctaacaaagttattaaggcaaaccgaggcaaggtggactgttcagcttttctgccgttactcctgaccctgtgcgatattattgagtctaaatga

SEQ ID NO: 8150 - RNA, 1743 nt, synthetic construct
  source 1..1743: mol_type = other RNA
atgtctatttaccgctatggcattaaggatttgaaaggctgcgcagatctcggtgacctcgcaaggctgctagaagtgcaaccgaagtttttgagtaagcagatttaccatgtggatgatgcggacaagtaccacgtattcccgatccccaagaagaatggttccctgcggcaaatccatgcccctaactcaaatctgaagttcatacagtctagattatcacgactcttatatcagtgctatttcgacctccatggaaagcccaaaaacctgagcaaggtgctctcccatggcttccagagagacagggaccttagcatctttacaaatgcaaacaggcacaccaataaacgctacgtgttcaacgccgatatagataatttcttccccagcttcaactttggccgggtacgtggctactttatcaagaacgaacacttcaagcttactgaaactgtcgccaccgttattgcccagacagcctgttttcagaactcgctgccacagggtgcaccttcttcccccatcatcacagaatttattacccaagtgctcgattataggctgcagagcattgcgaaacgaaatcggtgtacctactctaggtacgccgacgacctcacgttttccactaatctgggggagtttccatctaagattgggtatccattccccttacccgaggtatgggttgcagggcccggattggaaagagcgatcgccaaaagtggcttcaaattgaacgagaaaaagattcgaatgcaacacgcccagcagagacaagccactactaatcttaccgtgaaccagaaagttaacgtggggtcatattactacaagggcgtccgcttgtgtgctaatgctatgatgaggcacggtgctgccgtccggccgaaaaaagcaattgagcctggaaccccactgacggcgaatcagattcttggaatgctagcccatgtgcacgatatcaagggcagagagttggagcacaaggctctccgtaagtacggcaagtttcagcccgctccccattatctgaggctcatgggggacttttatcactacaaacgcatccacatcaatcctcgacctatcgttatctgcgagggtaagaccgattacatttatctgaaggaggccattcggtggaatgtggctgacccaagggtgtcaagccgcctggtggatcctgtccgtctgctggcacccaccggtaaaggggaccagtggctgatagactttctgaaacacacgaagacagctgataatttcctaggacttgccgggggcggaggggatctgaaaaacttcgtgaacattcatctggggcggatcaagatctttcatgataatcctctgttgcagccagtcatcatcgtcgtagataatgactctcagtccactgagatgtggagcacaataaaaaaagcctcaggctccaccaacaagatagacgggagcgagcctttctatcacgttgctaagaacctttacgttgtgcctataccatccggaggcaaaagcaacttctatatcgaaaagcttttcgacgatagttggctaaaagaggacctgaacggcagaacatttaaagtgctgcaacggaaagacgaaaaactcaaggacacagagtacggaaagggagaattcgctgacaaggtgatcagagcaaaccgcggaaaggtcgattgtagtagttttctcccattactgcacactatatgcgatatcattgacaaatga

SEQ ID NO: 8151 - RNA, 1767 nt, synthetic construct
  source 1..1767: mol_type = other RNA
atgacaaaaatctataattacgggttggctgagcttcagcagtgctctgatttgagcgacatcgcccatttgctgggggtcaagcctaagtttttaagcaagtccatctacaagacacccggagagaataagtaccaggcctttaagattaagaaaaaaaacgggaccgatagggaaattctggcccccaaccccgatctcaagttcatccagtcccgcctgtcaaggctgctgtaccaatgctacttcgatatatatggggccccaaagaaccccatgcgggtgctgtctcatggtttccagaagaaacgcgacctttccatttacacgaatgcttgccgacacactagtcgaagatttgtgttcaacaccgacctggaggatttcttcccatcttttaattttggcagagtgcgaggatttttcttgaagcacaacaagttcaagcttggcgaaaaagcagccaccacaatttcacaattagcttgctttgagaatagtctcccccagggagctccaagtagccctataatctccgagttcctggcccagccattagacgtggcactacaaaagctagcaaaagatcatcggtgtacttatagcaggtatgtcgatgacatttccttttctacaaatctcagagagttccccagcaaaattgcttttcctttccccattcctgaaaagtggattgtggggccaaagctcgagcatgagatcaatcggtgtgggtttaaaatcaatacatcaaaaacccgcatgcaagcccgtactcactggcagagtgtgacaaacctgaccgtgaaccagggcgtgaatatcaaaaagcactactataagggagcacggttttgtgcgcacgcgatgatgactaacggcaaagcatacgccggtaacaaactgaacatagcatacaatgagttgtcgtccgatcaaatctgggggaaactgagacatatttgcgacgtgaaggatagatctggcgccgtccagcccctaaggaactacaatggtagtaacccggcgccgcattacttaagactgagcggcgattatttccactatcacaggatccatatctcgccaaagccacttgtcatatgtgaaggcaaaactgactatacttatctcaaggaagccatcctgtggcacaagggagacgctcgtgtggccgccaacctcgtggacatttcccggttccctacaaaatggaagaaaaccaaaggcgaccactggggtgtggatttcgtaaaacactcaaaatccgctgaccgctttctggacatcagcggcgggggaggcaacctcgtaaaattttgcaagcttcacattgagcggactaagaaatttcattcagttacgggacagaatccagtaattgtcatcgtcgacaatgacaaccagagcgaaggaatgtggtctttcataaaggatgagacgaattcatctaccaaagttgatggctctaagccctactacaaggtgagtaataacctgtatgtggttcctataccgaagccaaagggcttcgcgggcgacgtttacatcgaaatgttgttccctgatccctggctcaaatacgaaatcgacggacgcaaactgaagatcaagcagaagaaaggggaaaaacttaagcctagcgagtatggtaaaggcgagtttgctgacaaggtaattcgcgccaacaggggttccgtcgattgtagcgcattcgcacctctgctggggaccctctgtgatatcgttgacggaaccgctacctga

SEQ ID NO: 8152 - RNA, 1884 nt, synthetic construct
  source 1..1884: mol_type = other RNA
atgttcatagtgatggtgggcaggaacgcaggacagatctgctcgtcctcttcgttcgcagtcctcagaattgtcgaaatcctggcctgcgttcgcgtccctgagggctacttcctggaggtggagctagtgaacaagctcgtccagctgcaggctacaaaaagcagaagcgatctggcacggctcatcggagtgaagccaaagcacctttcattcacactatataagattcccgagaacagtcgctacacccagttcaccatcccaaaggcctctggcggaacgcgagacatccatgctcccaattctcacctgaaggctattcaaagtaggacatctggcctcctgtacgaatgctaccacattatttaccctaagaatgacatagcaaacttggagcttagccacgcattccaaaaaaatagaggcctgagtattgctagcaacgggtccaaacaccggaataagcgatttgttttcaatatggacctcaaggatttctttggtagctttaacttcggcagagtgaggggctttttgctgtcaaacaatcagtttggactgaacgctgaagtcgccacaactgttgcgcagatttgttgtcacgagaataagctaccgcagggagcacccacgtctcctatcgtgaccgaattcattacccgcattttggacatcaggctgtctaaaatcgctaagaggaatgggtgtacttattcccggtacgctgatgatctgaccttctcgaccaataaacgcgagtttccagtggaggtcgcttttctcgggcttgatggccaatggactgctggttcagccatcgccaataaaatacatacctccgggttcgagattaatcctaacaagtatcgaatgcaattcgccgacagccgccaggagacaaccggtttagtggtcaacaagaaggtgaacgtatccaaaaactacaccaagcaggtgcggtatatggcccactccctgtttcagaaaggcgagtgttttatccaggaaccccagacaaagttgcctattatggtgtctaaccatgttctgggagggaagcttgcccaccagttccatatcaaatcccaagaatacttagattccaaggggaaagcctttccagtcgctaggtttgaaaaggaagggaaaaaggcccccgcatactatcgtaaatacgcagatttcatctacttccagaacttctttcatagcagcaaaccaacgatcctctgtgagggcgtgactgataatatctatatcaagtgcgcgattaagagcctttacagtaaggtgccctcccttggatatgcatcaaaagccgcctctaagatacaactcttgtgcggcttttataattattctcccactgctcaagccgttaccaagttgactggaggggccaaccccttaaaaaccttcattgaaacgtatggtatcacttttgcgcggtttaaggcggctagcatcgaagtaccagtgattgtagtcgttgataacgatgcagctaataatggtctgtggaaaatgctgcaggaaaagttcggtatagccggcgccgacggatcccatgacttctaccacgtgactaaaaacctctatgtggtaccaattcctaagataggaggcgcagacacattcatcgagcatctgtttgacgccaaaacactggcaagtcagctcaagggtaaatcatttgactttgggcagaaggggaaaaaaatcgctccgaacaagtacgggaaaatggccttcgcgaaagacgtagtcagaaagaaacgtgccagtatagacttctcaggctttttacctgttctggtgaatgtggagaaagccctgagcgagcacaagaaaatgctgtcaacccagaaggccacaagttga

SEQ ID NO: 8153 - RNA, 1728 nt, synthetic construct
  source 1..1728: mol_type = other RNA
atgagtaaactagccagtctgaaatcagtgcgcacccgcggcgaacttgccgacttgctcaactactccaggtcagcactggcctatgccgtgtacaaggtaccggaggaacagcggtataaggagttcaaggtggccaagagatctggcggggagagaattatacacgctccttgtcccgaactgaaaggtctgcagaagcgacttagtaactacctttatgattgccatcgtgaaatctggccacctcttgaatttccacggcacagttacagccatggctttcagaagaaccgtgggctgtcgatcttctccaacgcatggaagcaccgcaacaagaggttcgtgttcaacgtagatttgaaggattattttccatccttcaacttcggccgagtcaggggctattttcaaaagaaccggtcttttgaactgcatcaggatattgctacgctgattgcacagattgtgtgttacgacaacagcctccctcagggagctcctacttctcctattgtttcagaactcattacctccattctggatcagagattaggtaggctgtctaaaaaacatcattgcacctatagtcggtacgccgacgacataactttttctaccaatcaggccgggtttcccgaacccatcgcagacttttccccccaggcagatggagcctggaaggctggatccgagctggtcggactggtggaacgcagcggcttcgaaataaaccccaataagacaagaatgcaactcgcaacatccagacagtctgccaccggcttagtcgtcaaccgcaaagttaatatccccaagcagtattatgacgacgtacgcgcgatgagcaacagcttattcaaaacaggtgtctgccatcaccctgacactaaggaggccgctagcctggccgttcttaaagggaagttggagtttgttcttgcggctaagacgtaccccaaagggctagtgtcctttagtgacctggagctcgccagcaaggcacctggaggtacaccggtgcctagccactacaagctctaccgacgtttcctggcttatgagaagtttcatgcaaatgcccggcctctcgtaatctgcgaaggcaaaactgataatacctacatcaggtgtgcgatcgcaagcctgaatagcaaattcccattgctccagccaactaccgatgccgagggctctgttcggcaagctttatcattcttcaaacacagcgacaaacacgctaagttgttgtctataagcggtggtgccggcgagctgcacaagtttgtgggaaaatatgggtcgctgctgaaagattttcactccggaggcgagcagcaaccagtgatcgtcatcgtcgacaatgataatgccgccaagcccatgtggtcagtgattaaggagaagatgggatcagaggacaaagtggacgggtctgcgaacttctaccacgtgaaaagaaatctattcgtcgtcccaatccccattaaatccggcaaattcgcaagtattgaggatctgtttgataaaaagaccctagcgacagttaataaggggaaaaagttcaatccacatttgaagtcgcaccagactacaaatcaatacggcaaggaaatcttcgctaaatgggtgatcgaggctaacgctgaaaatatcgacttttcagggttcgagccgcttctgggaaggctcgaggaggtgctgaaggtggagctccaggggtcctga

SEQ ID NO: 8154 - RNA, 1725 nt, synthetic construct
  source 1..1725: mol_type = other RNA
atgacactatcctcttttcgggcctgtaaagacctggccgaccttgcccacctcttgcgagtctcgccaaaaggcttgagctacatcctgtacaaaattccgtcacacctgaaatatacccacttcgagatccccaaaaaatcaggcggagtcagaaccatttcctcccccgaccgccgtctcaagttcgtacagtctcgcctcgcagaattattatacacctgccagcgcgagattctgcctgtggaaaagaacatcaaaaaggtgctgagccatgggtttcagaaaaatcgagatctgagtatccataccaacgcatataagcacacaaacagacgtttcgtcctaaatctggatcttgaagacttcttcccttctcttaattttgggcgagtgagggggttcttcctgaaaaaccgcgattttcagttgaaagaggctctggccaccgtggttgcacagatcgtatgtcacgggaacgaactgccacaaggcgcccctacctcccctataatttcagacctcatggcacgcgtgatggacgtgcacctctctaaaatggcggctagctacgggtgtacgtatagcagatacgtggacgatctgacttttagcacaaaccttgccgagtttccaccggcgctggcgactgaagatccagcaaccggtgcttggagtgccggagctgagctgaggagtagaatttggaggcaaggctttgccttgaacaataagaaaaccagaatgcaggccagaaccagccggcaggaagtgacgggactggtcgtaaacaagtttgtcaacgtccgcactgaggtggaggcttccaataggatactcgtccacactcttgtgaagaaagggaactgcttccaaaaggatccagtgtctggtacgaccaaggccctctccttggagcagatcggaggcaggctgtcttaccagttccagactaaagccgcaagacattctttccgaagtgcgagggagtttgaaaaagcgggggagcccatcccccgtttctatcgcgattacgcaagctatatcaattactgcagtttccacgccaatgacttaccaacaatcgtctgcgagggcaagactgacgtgatttacctgaagaccgctattagagttctatacgctaagttccccaaactggcaggcatctccgctggagagtatgcctcagacgtgcggttttttggccattccaggcatcatacggccgctacaaagctctctggcggcgctggagacattcagcaattcgtgagagaatactcaaagattgtgcacccgttccaccctgggggtcagcttaggcccgttatagttttcgtagacaatgataaggcaacaaatggaatctggagttttattaaggaacggacaggttcaaagacactgatagacggcagcgcacctttttatcatatcgagcggaacctctatgtagtggctgtgccaggaaaggttggcactacagaacggattgttgaggacctctttgacgccaagacaaaaagcatgacctggaatgggaagactgtggatttgaagcaaaaacggggtcatcctcccggaaagggtaagatgtcgaaggagcggtttgccaccaaagtcataagggatcagcgagataacatcgatttttcaggcttcgaacctgttttacaggctttcagcgacattatcgatatcaagctgcccgcctccacttga

SEQ ID NO: 8155 - RNA, 1725 nt, synthetic construct
  source 1..1725: mol_type = other RNA
atgacattgaagacctttcgggcttgcaagaatctgtccgatcttgcccatcttctgcgtgtctctcccaagggcctgagctacattctgtacaaaataccctcacacctgaagtataccaagtttgacgtcccaaagaaatcaggcggcactcgcacgatctcatcgcctgatcggagacttaaattcgtgcagacacgactcgctaaactgttgtacgcctgccaaagggagatcgtgcccgtggagaacaatacgaaaaaggtgctctcacacggatttcagaagaaacgcgggctctctattcacactaatgctaacaagcacaccagccgacggtttgtcctgaacgtggacctggaaggcttcttcccatctgtaaacttcggcagggttagagggtttttcatgaaaaaccgggactttcagctgtccgaagcctgtgctactgtagtcgctcaaattgtgtgccatgataacgagttacctcagggagcccccacgagtcccatagtctctgacctgatggcacgagttatggatgtgcatctgagtaagatggccgctagctacggctgcaagtattccaggtacgttgacgacttgacattcagtacgaatttggctgaattcccaaccgccctcgcagtggaagaacccaggaccggaacctggtccgctggttcagagctaagagggcggatctggcgtcaggggtttgcccttaatgaccagaagactagaatgcggcgccgaacttctcggcaggaggtgaccggcctggtggtgaataagttcgtaaacgtgcgagctgaggtagaggcgagtaatcgcgttctagtgcatacccaagtaaaaaaagggagttgttttctgaaagatcctaaaagcggagcaacaaccccactctctctcgaacaactcggtggtcgcctgagccatcagttcgaaaccaaggccgcgaggcacaacttcatgtccgcccgtgagtttgagaaagctcgcgaagccatcccaaagttttatcgggattactctgcgtatatttactacagaaacttccacgtgaatgacctacccactatagtttgtgagggtatcacagatgctatctatttgaaaacagccatcagggtcctccacgcgaaattcccgaatctggccggaacatcagccgggaagtacgtatcggatgtgagattttttggatattccagacaccataccgcagccaccaagctgagcggaggagcaggggacgttcagcattttgtcaaggaatatggtaagattgtgcatcctttccacgccgggggccagctcaagcctgttatcgtgttcgttgataacgacaaagcaactaacgggatttggagctacatcaaagaaaagactgggtccaagactcctattgacggcagtgacccattttaccacatagagaggaatctttatgtggtcgccgtgccaggaaaagtgggaggcgccgagagggtcgtcgaggatttattcgacgcagcaacaaagtccatggcatgggagggtaagacagtggatctgaagcagaagaggggccaccctcccgcgaaaggcaagatgtctaaagagcgcttcgcaacaaaagtgatcagagatcagagagacaagattgatttctccggctttgaaccggtcttagaagccttcagcgagatcatcgacattaaattggctggcagcaaatga

SEQ ID NO: 8156 - RNA, 1725 nt, synthetic construct
  source 1..1725: mol_type = other RNA
atgacactgaagaatctgagagcatgcaaggatctgtctgacctagcacaccttctttcggctagccccaaggggttgtcttatatcctgtacaagatcccccctcacctgaagtacaccaggttcgaagtgccaaaaaagagtggcggaactaggacaatctcctccccagagagacgtctgaagttcgtccaatcccgtttgaccgaattactttacgcatgtcagcgcgagatcgtccctgttgaggagaatattaagaaagtcctgagtcacgggtttcagaagaagcggggtctgtccattcaaactaacgcgggaaagcataccaaccgaagatttgtgctgaacgtggatctcgaggacttcttcccctcactgaatttcggccgggtgcggggtagcttcctcaaaaatcgcgattttcagctgcccgaacctgtggccacagtcattgctcaaatagtgtgtcatgataacgaattacctcagggggcccctacgagccctattgtctccgacttaatggcccgagtcatggatgtgcacctatctaagatggcggcagcgcacggctgtacctatagccgctacgttgatgatctgacattttcgaccaatttggcagaatttcccccagctcttgccctggaaaacccacttaccggaaagtgggatgccggccatgagcttagaggacggatctggcgacagggttttaccattaacgatcaaaagacgagaatgcagactcgggccagtaggcaagaagtgactggtttgatagtgaacgagtttgtaaatgtgagaaccgaaatcgaggcacgaaatagagtgctcgtccatgccctaatgaagaagggtacttgcttccagaaggacccaaaaagtggcgctgctactccaatgtctttggaggaggtgggaggccgcctgtcacatcagtttcagatcaaagctgccagacacggcttcaagagcgccagggaatttgagaaggccggagacgacatccctaaattttaccgtgactatgcacattacatcaactactgctctttccacgtgaatcccgttcccacaattgtgtgcgaagggaagacggacgttatctatctcaaaacagccatccaggtgctccacgcaaaattccctaagctgggcgggttaagcggggggaagtatgcctccgatgttaggttctttggccagtcccgacaccacacagccgcgacaaggctgagtggtggagctggcgatgtacaacattttgtacgcgactataacaaaattgtgctcccctttcatgctggtggccagttgtcacctgttatagtcttcgtggacaacgacaaggccaccaatggaatttggagcttcataaaagagcgcacaggctcagccaccccgattgacgggagcgacccgttttaccacatagagcggaacctcttcgttgttgccgtacccgggaaagtcggaaatactgaacgcatcgtggaggacctgttcgacgcagctactaaagctatgacatgggatggaaaaaccgtagacctgaaacagaaaagggggcagccacccgccaaaggcaaaatgtccaaagagaggttcgctacgaagattgtccgggatcagcggtcaaaaatcgacttctctggcttcgagccagtgctcaaggcatttagcgatatcattgatactaaactcaccccgtctaagtga

SEQ ID NO: 8157 - RNA, 1716 nt, synthetic construct
  source 1..1716: mol_type = other RNA
atgctggacgatctgaaatcatgcaccagcaggtctggcttagcagtgctactcggcgtgaaaccttcagagctgagttatacgctctacaagatcccggatgccgccaaatatactagtttctgcatcagcaaaaagtcagggggaacaagacagattcaggctccctgtccacctctgaaatggctgcagggcagattgctggacctcctgtaccagtgtgaagatgatatcagtgccgcttctgggctgaagcggaatctgcactctggatttaggcgtggcgtaaatatttatgagaatgcaaacgcccataggggaaagaggtttgtgttcaacatagacattgagagctttttcgaccagtacaactttggacgcgtgcgggcttttttcattaatgaccgagacttcgcgttgcaacccgcagttgcaaccacgatcgctcaaattgtgtgtttcaataatgtcctccctcagggttctcccacatcgccccacatcgcgaaccttctgacccagtttttcgataaccgaatggctcgatttcttcgcccccggcgttgcggatacacacgctatgccgacgacataactatctccaccaatgtaagagaatttcccgctgatgtggctattatgacaccagctgacccccagggctggtctatcgcaccagaattggctgccatatttggccgagcaaatttgccgcctaacccctcaaaaacaagaatgagcgcgtactccagccggcagactgtgactgggctggttgtcaaccaacggcctaacgtgaccagagagtactatctccacacacgggccatgtgcgatcgcttattcaagactggcaccattcagattccagatataacgagtagctacggaaagaactgtccagtatcagacgatgctgagcctgaagccgatgtggacccactcaaggtccttgagggcaggctgtcccatatccaccatatcagagagaaaagtgaccttcgtaatattcaggagaaacaggacaatcccacacaattctggaacatgttgcaggatttctttctgttcaaatacttcgtcgcaaactcgaagcctttaatattaaccgaaggccctagcgatatcttttatcttcggtctgcaatcattaataacaccaccctgctggtgccggagctcaagaaggtcgtgagtgggaaaccagagattcttcccacgtttttcaggttcaatacagtcgctgccaaggtgattggcctgactgggggggcgggaaacattaagcgctttctgtacctctaccataagcaggaaaagaggttcaatcgctccctaagacacaaacctgtaatcattatcatcgacaacgattccggcggtgcggacgtgataaacatggttaacggaatctataagaccaatatttctctcagcgatccgataatggcccacaagatcacagacggtctgatcctcgttaaaacaccacatgtggggtccaagactcacaccgccatcgaagatctgctgccagcctccgttaaggccgttaagctaaatgggaaatcatttagcgccgcaaagaaattcgacgctaccaaacactttggtaagatagcattgggttcctatgtgcaagccaatgcctccagcatctctttccaggggttcgatgactttatcgtcgccatcaacggcgccattactatgtga

SEQ ID NO: 8158 - RNA, 1710 nt, synthetic construct
  source 1..1710: mol_type = other RNA
atgctcgacgatttgaaggcctgtcggaaccgatcagatctggcacatcttctaggggtcaaaccgagcagtctggcctatacactatttaagatcccagatgtcagcaagtacagtaaattttgcatctccaaaaagcgaggaggcacccgacagattatggctccttgcgtgcgcttaaaaaatctgcaaactagattgttagcgatattgtatcagtgcgaggatgacatagagaaagcatccggcatccaccgctccctccatctcgggtttaggagggaggtgaatatttacgacaacgcacgtctgcaccgcaagaggaggtatgtgttcaacattgacattgagaagttctttgacaactacaatttcggccgagtgagatcgtttttcatcaaggatcatgatttttctctgcacccagacgtggctactacaatcgctcagatcgcctgcttcaataatgtacttcctcagggatctccaacatcacctcacattgctaatttactgtcccagttttttgacaatcggatgagtaggtttctggggcacagacgttgtgcttatagccgctatgcagatgatatcacaatcagcaccaacttgaaagaattccccagcgatattgccagcgttacgaccaccgttccccagggctgggtgattgccccagaactgctgtcaatactgactcggagtgggctccctccgaatcttgccaaaactcggatgtccctcaggtccagcaggcaaatggttacggggctcgtggtcaataaacacccttcagtgcctagggagtattacctgcaaacacgcgccatgtgtgactatcttttcaagggtaagattcctcacatcccggacatcacaagtgactacggcgaaaactgcccaagtagcctcggccataagaagaagaagcccgattacatgagagtcatcgagggacgtctgtcttacatctcttacattcgcaaacggagcgcaaagttttccaccgaatacaaaaatgacaagaactcccagttcaacaatctgttcatcgacttcttgatcttcaagaacttctacatgaacgaaaaacccataattctgaccgagggtccatccgatatcctctacatcaaatcagccattagaagcagtactctttcgttgccccacctcaaaagaatcaattccggaaaattggagattataccccggttcttccggtttcacagtgcttcttctaaaaccctaggcttaacaggaggaaccggcaacctaaaaaacttcctgaatctgtacaagaagagatcaagcaaatttagagtgagccccaacgagaataagatcattattgtcgtggacaacgactctgggggaaaagacactatctgtgcaattaacagcctctataagaagaacattcagatctctgatccaaccataatccataagataactgagaagctgaccctggtaaagacaccccatgtggggattaaaaaagaaaccactatcgaggatctccttcctgacgatgttaagtccgtcactattaacggcaagacattctcagccgaaaaaatactggacgaaaccaagaatttcggtaaaataaagcttgcttcctatgtgcatgataacgcctctgtaatcgactttacagcgtttaatgatttcctgtctgagctggactcaggttttacgacgtga

SEQ ID NO: 8159 - RNA, 1710 nt, synthetic construct
  source 1..1710: mol_type = other RNA
atgctttccgacctcaaagcatgtcaggaccgtaagggtttggccatcttactgggagtttctcccaaggagtttgcttataccctgttccatattccaggagatcagaagtatgagagcttttgtgtatctaagaaaaacgggggcactaggaatattctggcacccgttccaagactcaagtggctgcagaggcgtctgctagagatactataccaatgcgccgaggacatctcagtgagtgctggagagtcccccaacctgcattttgggttcagaccccaattcaatatatacgaaaacgcattcgtccataggcggagacggtttgtgctgaacttagatatcgtcgattatttcgaccagtttaactttggtcgggtccaaggctttttcctgaaggacaaaaatttcgagcttgtgccggctgtagcaacagccattgcccaaatcgcatgctttgataataaactcccccagggatccccatgttctccccacatagccaatcttgtctcccagttttttgacaatcgcatggccagattcctacgatcacgtcggtgctcttactcaagatatgccgatgatattaccatcagcactaatctgagagtcttccctagtgacgtggcggaggcgtcagattccccacagggctggcagatttcaccaatcttgacagacattttccagcggtccggattcgctataaatgatacaaaagtgcgcatgggagtgttccactcaagacagacagttacgggcctgaccgtcaataaacaccccaacatttcacgagacttttacctgaattccagggctatgtgcaatagtcttatcaagagcggcagtttcatcgttcaggatattagcggctccttcgggaacagctgtaacccagatctccctcctcccatcaaaagtccattaatggtgctggaaggtcgactgagccatatccacaatatcaaggaaaaaaacgatgggcgcgacctcaagtacaaacaggccagccctacccagttttggaagttgctgcgcaagttctaccaatacaagtacttcgtcattaacgactatcctttgatcatcactgaaggcccatccgacatattttatttaaagtctgcgattcggaacaccaaactcctggtacctaacttgtatgctgacgaaaaagggggaaggaggattctcccgcaattctttaacctgtcgaacctacccagtaaagtgctggccttgaacgggggggcaggcaacatcaagaagtttatccaccagtacagtattgagatgcgcaacttcttcacactgaatcggactaatcccgtggttatggtcgtggacaatgactctggcggcgaggatgtgttcggacagatcaaaaaatctttcggactgtctgttaagacgtccgataaggattgcatggtgaaggtgtcagactacctctaccttatcaagaccccgcacattgggcctcaggacaaaacaagcgtggaagatatgctccctagcgctgtaaggggcgtggcgctgaatggtaaaaccttctctactgcttccaaatttgacacctcgaagcactttgggaaggtggctttggccagctatgtgcatgccaacagcggcagtgtcgacttttctggttttgatcctctgcttcttgcactcgaccgcgccatagccgattcgaagagctga

SEQ ID NO: 8160 - RNA, 1710 nt, synthetic construct
  source 1..1710: mol_type = other RNA
atgctgacagacttgaaagactgtaccaccagagctgcgcttgcctccatcctgggggttgaggcaaaggaactggcctatgtgctttacaaaatcgaccagggctcgaagtacacttctttctgcatatcaaaaaagaacgggggtacccggcagatccaggcaccaattcccaagctgaggttcatccaatcacgcctgcaacaaatcagtatggcttgctgtgatgatattgccgacctgggaatctacaagggaaagctcagttttgcttttcaaaaggaccgtaacatatttgagaacgctagaccacatgtaggcaaacgatttattctgaaccttgacatccgggatttctttcaccagtgcaactttgggagggtcagagggtattttattcacagcaaggaatggaagctggatcccgcagttgcgaccgtgatcgcacagatagcatgtgttgatgagggtttaccccagggctcgccttcctcacccattattgctaatttattggggcaaatcctggatgtccgcctcacaaggttcctccatcctcggcgatgcacctatacgaggtactgtgacgatattactattagcacagacatgcgcgtctttccgcgggacgtggctgtccaggatgactcttggccatctggttgggccctggctgcaccactggaggatatctttgtaagagccgacttccccatcaactataacaagctaaggatgagttttgactgtagtaagaaggtggtgacaggtctgacggtaaataggttcccaaacattgaccgtaaattttatagagacacccgattgctgctggacaggtacgcccagaccagcagctgtaaatacatcgaattcactggaaatttcggcaacaattgcgataacactgagacaaaaaataagaacccgattcttcggctcgggggccggttagcgttcatccaccacattaaaagccgaacctccttgataggatacccgggcatcgtgcaccctcagaacccccagttttacggcatggtgcagacttatgcgttcgccaaagactttgtgtttaattctattcctaccgtcgtgacagaggggccctcagacatcatccatctcaaagccgccattcgtgcaaacccagcctgggcccctcacatatttgactccaaggaaaatcgcttcctggtcaaattcgcccgccatgatggcctcttcgcaacagtgttgggcatgagcggcggtacaggaaatatcggcagatttttggacctatactatagcaggttcaaacggatcaattacaagattcgcacacagccatcagtcatcgttgttgataatgataagggcagccacggaatactcaagagactctctaacatacataagatgaaactgagtaccggagatggtctggtggtgaagaagctacagccttttttctacatctgcaaaacccctcaattagctggcaaagctgaaactgccatagaggatctgctcccttccgcaatcacagggatggtggtgggagggaaaacgttcgagcccgataccaaaaagttcgaatcctccaaaaatttcggaaagattttccttgctaagatggtagctacgcagcactctgcaactgcgtatgccaatttccagcagttcattactgggcttgatgacgccgtggccggagttgccaagtga

SEQ ID NO: 8161 - RNA, 1335 nt, synthetic construct
  source 1..1335: mol_type = other RNA
atgctcattgatctcaaggcatgcaaggataagagagacttggcgcacctgttaggatttcagcttaagaccataacataccagatcaatatcgccccagacgccgagaagtacaagaagatttgcatcagcaaaaaaaacggcaacagcagaaccgttttttcccccaacccgattcttaaaagtatccagaattccctactggagataattacctcttgctacgaccagatccacggaggcatgaactatccggtgagtttcggcttcatacccaatttgaacatctacgacaatgcaaagcgccatattggaaagaggtgggtcttcaacgtagatataaaggactattttgactcgatcaactatggacgagtgtggcgttacctgcagaaaaacaaaaacttcctgctcaatgccgaaattgccaccatgatctcacagatcgtttgttttgatggtcgactgcctcaaggggcacccacgagccctatgatggctaatttggtcagcgggagtctcgactatagattaagatcacttgcctctgaacataaatgtacctatagtaggtatgccgatgacattactttctctaccaacctccgggatttcccagaggaagtcgctcgatacgatgagccttccggttcctggcttcccggcaaaggcctgttatcttgcgtgagccgcgcgtggtttagtttaaatgatggcaaaacacgaatgagctacaggaggtcaaagcaagtagtgactggtctgatagtgaataagaaggtgaatgttgatagagaatacttcaagctggtacgtgcaaacattcaccatctactgacaggcaggccagtcatactccaggagttttgtgatccatacggagagaattgcgacgggaaggaggtgaaaaataagaacgggatgtcactcattgagggccgcattaacttctgttttgaaatcaacgaccaaggggatgaacggacggacaatgccaagttttttaaaccatcttcagtcagaaagacataccgcgacttcctgatctataaatatttcatccacggggatcggcccatcctgatcaccgaaggtgagtctgacattgtctacatggctgcttacttgaaagcacggagcctgcctcttgctaatttggtggatgtgtccccccccgacaaccggaagatcctgattgacttctatcagtttccaaaacggccttccaaaatcattggcatgactggtggcacttccggggtggctttcgccctgaagtgggttggagagatcctccctcgtctgggaaaaaatgtgagcaggcgcaagttttga

SEQ ID NO: 8162 - RNA, 1842 nt, synthetic construct
  source 1..1842: mol_type = other RNA
atgacggagccaaagaacttagaaaagctgaagagcatcacaaaacgggaggaattggctgaccttctgggcctctcccgtcgcagattattctgtactttgtatatggaacccatgtcctcaaagtataacactttcagcatcccgaaaaaaagtggctcggacttgagaataattaaggcacccaatagtcacctgaaattcattcagtggaggttagccaagtacctgagtgaatgtctggaggagattaaaaaaaaggaaaagtttccacacctctcttttgcctttcagaagaaactgtcaattaaggacaacgcgctaaaacatatcaacaagcggtgggttttgaatctggacatcagcgatttcttctctagcatatcatttaatcgggtgaacaggttctttctcaagaataagttctttcagctgaacgatgagatagctaccacaattgcccagatcgcctgcgacgaacaggcactacctcagggatcaccgtgcagcccaattatctccgagttcatcacccaaagcttagatgttagactcctgaagctggccaagcaataccacctgacgtactctcgatatgcagatgatattaccctatccacaaatcagaaggtcttccctcgcgaggttgcttatcccgatagctccgccgagaatggatggcaggtcagtgaaaccctgagatcaatcattcaacggtccggatttaagatcaacgaagagaaaacgcgtatgcagaaaaattgcgtccggcaagtggccaccggtcttgtaattaataaaaaacccaatgtcgccgataattactaccgcacggtgcgctccatgtgccatcacgtgttcgaaaaaggggcctactataggagtccagaggacaaagacaatcctacctgtgaccttaatcccctagcgggcaaacttaacttcattcacgacatcaagaagaatagcgatgagactaatagttcctctctccgcggcggaaacaacctgaccctgagcgggttcgatggcctctacaagaagttccttttctatcgtctgtttctttgtctgaacaagcctatgatcgtgacagaggggaaaactgaccctatatacttgcgctgtgctattaaacatgggaacaaaatcaagaatgcttatgggaagaccgtcggcaggtacatcacacagtcgattctgttcttttcaagggagcggtcttatgcagaggcgtttaacttcaaggaaggtgggtcgaataatctcctcgatatcataaagctgtacaaagaatacctgcatagctctaaaaaacgacaaatccagtccagaccctgcgcttttcctgtgattttacttttcgataacgatgacggtataaaaaccactagcagctacgtgaaaaagaactttgacattatcttgaccacagaaacaactgacgatttctactacctgttcgataatctctatatcgtaaaaaccgtggagaagaaatataacaccgagtatgagaagaatgacgataaaaaccaccagtatgacaatatcaagaacaaggtgaagaacaagaagaacctcatcaaaaattctgagtcttgcattgaggactgtttttttaagaagacactcgaaaagacactgcatggcaaaaaatttaccaagaacaacaacggacattccaacacagaatactctaaggataaatttgcaactgagattgtttccgccgagccctggtcaatcgacttcagtggctttgacggactgttggataggataagaaaggtgatcgaagactacaaaaagctgcacaatcacccaactataaaccgatga

SEQ ID NO: 8163 - RNA, 1707 nt, synthetic construct
  source 1..1707: mol_type = other RNA
atggctctgaaggctgctacgaaccgacacgatctggcggcactgctccggttccagacaaaaatgatgacaagcattgtatacgcgactcatgagtctttaaagtataagaccttcaaggtcccgaagaaatccggtggagacaggacgatagcagcccccatacctcagcttaagctcctgcagcggagattagccgacctgttgatggattgccatgccgccatcatggatacgcaccctcataggaaaggacttcaattcgggtacctgccagagctctccgtggtggataacgcttatcgccaccgccgacggagaatggtacttaacgtggaccttgcagatttcttttcgagcattaactttgggcgcgttcgtgggttttttttatctgacgcagcctttcagctgcacccagtagtggctacaactattgctcaaatcgcatgttggaataatgagctgccccagggtagcccctgttctcccataattagtgggctaataggaggaatcctggatcgaaggctcggcgcccttgcgagagagcacggatgtacttattcccgctacgttgatgacctgacctttagcaccaatgcggatactttccccaacgaattagccgcacttgacccagctacaggaaggtgggcagtcggtggcaagttgagccacgccgtcggcaaggccggatttttggtcaatcctgacaaaaccaggctgttcggcatgacaggacggcagacagttaccggcttagtcgtaaacgacaaggtgaatattaatagagactacgaaatgcggaccagggctgccgtccatcattttatccgtaaaggtgtttacaccgtgccagccagtctggaaagtgtggctgccggcaagccgccagagaaggaaacctctccccaccgcctggaaggcatgctgcagtggatttactccgtgagagacttttcagacgaccggaaagatggctccaagagacatcacccaaccagtttctccaaggtgtatcgagaatttctctttgctaaacacttcctgttcatggataaacctttgatcctatgcgaagggaaaactgataacgtgtacctaaactcagcactgaaacgccttgctgcctcttacccttccctcggatcatgggtgggtgccgatttcaaaagcaacctcagactgttcaggtacactagtaaatctctccaaatcctccatctcggcgggggatgtggcgatattgtgcagctagtccgggactatcgtcggctgtggactagattggtgcatcgccagatcgcccaaccagtggtgctggttgtcgacaacgacgagggtggggctagcgtgtttaaagccatcaaggaagttgggggccctgatattaagattgccgagcctaagatcctcttccacgtgttccacaatctgtatatcatcaagaccccctgcgggagcgggacaccgaaatcatgcgtagaggatttgtttgacgcggcaactttgggccagaccctgggtggcaaaacattcaatcccgcctgcgatgaggagacggccaagcactatggcaagaaaatcttcgcagagggcgtcatcaggcccaattggaagacaatcgacttcgcagggtttcattcgatactggcctcactcgaggacgctattaagggatactatggcatgctggttccttga

SEQ ID NO: 8164 - RNA, 1941 nt, synthetic construct
  source 1..1941: mol_type = other RNA
atgtcccagcttcagcagctcaaaaactgcaagtccctaagtgactttgcccttctgttaggttacaatgctaaaggcctgtcttatatcttgtacaaaattgacgacagcgctaagtacactagtttccagattgataagaagtccggtggcaagaggactatatctaagccgtgcctgaagctgaaaatgttgcagagaaaactcgcgaatctgctttatgattgcatagaggagaagaagcctaatggggaacgcttgactgattttaaagggtctgacaagaccctgcccaagcggaaacgcgctgccaaatcgatcagccacgggtacgaaaagggattaagtattgcaacgaacgctgaaatgcacatcaaaaaacggtacgtatacaatatcgacctggagagtttctttccctcctttaactttggccgcgtacggggctttttcattaagaacaagcagttcaaactccacccgaaagtcgcaactatcatagcccagatcgcctgccatcaaaaccaactcccacaagggagtccttgctcacccgtaatatctaacatgatctgtaagaaccttgactactacctgctgggaatagccaaagagaacggatgtgtgtacacacgatatgtagatgacttaacattcagcactaataagaagaagttccctgttgccattgctgagaataggctcaagttttttgggaaacagtcctggtcactaggaaaagaggttgaagaagcaatcctgaaggccggtttcaaggtgaaccgaaagaagtgccggatgcagacctcttattcaaggcaggaagtgacaggactgactgtgaacaggaaggtgaacaccagcagcgcctactatcgcaatgtgagagcaatgtgtcacagtgtgttcaagcacggatactacacactccctcaacagaaggaaccaccaaagaagcagggctggctctcaaaactgacttccatattcggcctgaaaattggggtcaatgaacctaacatcgcccagctggagaagcagacatcattggaaagccttcagggtaagctggcacacatctacaacattaagtcctataggaataagttctcccgccgtggctataggccgaccaaacatgatggaatcagaaccaataattcgaaaaacccatttcctcccctggacagatctgagacatataccgatgacaatcatatcgtcgctctggacgggattaaaaacctgtatggcaagttcctatttttcaagcacttctacgccaataagaaaccaactattatctgtgaaggcaaaaccgacaatatctacctcaaatgtgcactggagtcacttgttgctaagtatccccgtctaagcaaagataagaacgggaattttcaagtgcacttcttcaatcgtacggaaacgtccagtgaaatgctcaaattggtggagggatctcccggtctggtctatttggtggagatctataaacgattcaccaaactctttaactcaaatggtcaagagtatcctgtcattattgtcgtggataatgatgatgcgggacggggcgtgatcaaaaaggccgacaaaatacgccaggaaaatagaaacgcaaagagcatcaagaaagtcagaaggagcgactacttcttcgagaacttatacattgttaaggttccctctacagcgggcgagaaggataaggagattgaggatctgtttgatcctatcttattgcagaccaaactcaatggcaagacctttcatcggaataacaccggcctggaccccaacaaacattttgggaaagctcattttagcgagtatgttgtgacacccaataaaggatccattgattttagagggttcgagccactccttgatatcattaacgacatcgtgaacaatttcaacccaaacgacctggactga

SEQ ID NO: 8165 - RNA, 1962 nt, synthetic construct
  source 1..1962: mol_type = other RNA
atgagccagcttgaagctttgcgcaaatccaaatccattaacgacttagcccctatcctgggttataaaccaaagagtctcgccttcatcttattcaaaattcccgatcaggacaagtatacgtgttttaacgtggctaagaagtccgggggaaaacggaccatctctaagccctgcgacaagctgaaggcactgcagagaaaactggctgacctgctttacagttgtagcgacgaactaaagccgatcaatcaaagcatcaagagctttaaaggcggaaacaaacagatacctctgtccgagagagctaaaaaaagcatttcccacggttatgagaaaggcctgagcattgcctcgaatgcttccatgcatacaaataagaggtatgtctacaacattgacatcaagtcttttttcccgtcgtttaatttcggacgagtgcggggcttcttcataaagaacaagaactttaggctgcaccccaaagtcgcaacattaatagcccaaatcgcctgctttgagaatgagttgccccagggatcacccgcttctccagtgatcagcaatctgatctgtaagagtctagacattgaacttttgagtatcgctaaacgttatagctgcatttacacaaggtacgtcgatgatctcacatttagtaccaaccagaaactttttcccaaggaaatcgccataaaacctagattcggcttcggacgggaaaattggagactgggcaaagaggttgaggctaccatcatcaaatcagggttccagatcaacactaaaaaatgccgcatgcagtataagacgtcatcacaggaagtgaccggcctaacagtcaacaagaaggtgaatgttagaaatctgtactacaggaatgtccgagcaatggccaactcactctttaagtacggtttttactacagacccgcaccatcaactagcaagatccgcgacgaatccaagaaatccctctatcagaggatatactctattttcttccggcgcgttgtgcgtgctgccccaaccaagaagaaggtaaaacagattgaaagtgcggacccactcatcggaatgctcgcctacatattcaacattaagagctatcgaaacaagttcgtgcggcgcgggtttcggccagacatacataatggcattcggaccaaaagcaatgggtccatcacatttccaaccgtagataggtcagagagttacgaagatgataatcacgtcatagccctcgacggcattaagaacctgtatggcaaggtgcttttctacaagtatttctatgccttggagaagcctctgatcattggagagggcaagactgataatatttatctcaaatgcgcgatagaaggccttgctaacactttcccacaactcgcaaaaaactcctccggatcacaacaggtttctttttttaatcgcacacccaccaatacggatatgctgagactggccgaagggacccctgggctggagtatctgatatctatctataagaggttcatgtctttctacaaatgtgagggtaagcagcaccctgttatttttattgtggacaatgatgacgcgggtcgcgggtttatcaataaagcaagcaaaatccgagatcagattcgtagcgcgaaaaaggtgaagactcaaaggcataagtactattacttcgaaaacgtctacatcgtgcctatccccaaacagaaattcaacggcaataaagtgaaggatattgaggacttgtttgacgattctgtattagcagagaagctggaggggaagagtttttacaataacaacaagggattggatacttctaagcactatgggaaagcatacctctccgagtacgtgatcaaaccgaacaagaacaagattaacttcaatgagttccaacctattctggccgatatcgccgacatcatcaagtcttacgataataacaacctggactga

SEQ ID NO: 8166 - RNA, 1956 nt, synthetic construct
  source 1..1956: mol_type = other RNA
atgtctaagttaacacaattgaaacagtcctccagtctgagtgatgtcgctagcttgctggggtacaaaccctcggcactggcttttattctgtaccgcatggacgacgttgacaagtatttcactttcgatgttcctaaaaagtccggcggtcatagggtaatttgcgctccatgtgataagctcaagaagttgcagcggaaactcgccgacctgttatacgactgtatcgaggaagataagccatctgaggagacactgggcgagtttcgaggcgagaatagtgacctgccactccgaaaaagggctcgtaaatccatgtcccatggctatgagaaggggctgagcattgcaacaaatgcagaaatgcatgtggggaaaaggtttgtgtataatatcgacctcacctcttttttcgactgctttaactttggcagggtgagaggatatttcttaaagaactctaggtttcgtcttaattctaaggtggctacgatcctagcacagatcgcctgcttccagaataagctccctcaaggatcaccctgctcccctgtgattagcaacctgatcagcaaacacctcgattatcatctgctttccatagctaaaaaccatagttgcacctacacacggtatgtcgacgatctgactttttctaccaaccagaaagcctttccaaaggccatcgccaagcggcgcttcctaactctagagaaagggagctggagactcggtagtgccgtgaagggcgcaatcgagaatgcaggatttagcgtgaacgagaacaagtcaagaatgcaatatagggattccagacaagaagtcacgggactaaccgttaataaaagggttaacgtgtcgtcatctagctatcgccagatacgcagcatgtgtcactcaatgttcaagttcggatattactttaagagttcagcccgcaccgtgagcaagcctaaaactaactccatactcacacggctgtacaataaattcgccctgaagtacttcagggtgcacacccaggatgacgaattaggagacactcaggggcaggaatgtactagcctggcctctctcgacggcatgctggctcacatttatcacatcaaatcctaccagaacagattctccagaaaggggcaccggccgtctagccacgatggcataagaaccaagttcaatgaatcttcctcttatcctccgatcgtccggggcgacacttacgcgtctgacaaccaccgtgtcgcgcttgacggtatcaagaatctgtaccgcaagttcatgtttttccggtacttttactataacgagaagcccttgataatatgtgaaggcaagaccgacaacatttacttaaaagccgccattagtcgactcggtaatgcctaccccgagctgtatgatgcaacgaccaaacgctgtagaatttccttcttctctaagagcgatcggaacttggaaatcctgaaaatggctgaagggacaagcgggctgtcatatctgattaagagctacaagcgcctgtgcagcaaatacaaaattaaagggggctcgcatcccgttatcgtaatcgtcgataatgatgatgctggaagaggtgtcatcaagaaagctgagaagattaagaatgacacaatcaagagcaaggggatcgccgcaaactataggcttgattactttttcgagaatctttacatccttgccgtgccatcaggcgctggcgatgcagatatagaggacctgttcgactcatcagtattgaaccgagagctgtcaggaaagaagttcagtcgaaagaataaaaagtccgacggtagtacctacggaaaagcctggtttgcagaacgggtgattaaagcggagagggaaaaaattaactttgccaaatttgccccccttttggaccaggtgcgtgacattatcaaagcgcacgatagtagaaatctcatctga

SEQ ID NO: 8167 - RNA, 1944 nt, synthetic construct
  source 1..1944: mol_type = other RNA
atgaccacgtcgctcaatagcctgaaaaagtgtagttccctgaatgatttcgcgctgctgctgggataccagccgaagtccctcgcatatgtgctgtataagatcgaagacaagaagaaatacacttcctttgagatacctaagaaatctggtggagtcagggtgattcaaaaacccaatgtgaagctgaagttgctccagaaaaagctggcggtcttactgtatgaatgcattgaggagttaaagcctgaaggtgagaagcttgttgactttaatggagggaaaaacaaactgcctattcgtaaaagagcaaaaaaggccctcagtcacggctatgaaaagggcctatcaatttccaccaatgctgaacaacatatcaacaagaagtacgtctacaatattgacatcgagagtttctttccaagctttaacttcggccgggtgcggggtttttttcttaaaaacaagaacttccggctgaaccccaaggtggctaccgtcattgcccaaatcgcgtgcttcgagaattgtctgccacaaggctccccgtgttcacccgtaattagcaatctaatcgccaaaaaccttgattatatgctccttagcattgctagacgcaattcatgcacctactctagatacgtggacgacttgactttcagtactaatatgcgagagttccctaaatccattgcctatcagaggatcctgacactgcggaagaatccatggatcctaggccacgaggttgagaatgccatcaaagatgccggctttaagattaaccccaagaagtcacgcatgcaaatgaaccattctaggcaggaggtgacggggctgacggtcaataaaaaagtcaatatcagctctggatactataaaatggttcgagccatgtgtcatcagttttttatggaggggtacttttacaaacctcagaaagagaaaaagaacatctctaaaagctacttcaacaaactcatcgacatcttcaagaaagagaggtttgaggttatcaatgatgagtccattgaacgcgtaaaactggactcacccgacatcttacagggcatgctcgctcacatatataacgtgaagtcttatcgtaaccgtttcgcacgcaggggctatcggcctactagacacgatggaatattcaccaaacataagaatccctccccattccccccattagaccggtgcgatagctacacagatatcaatcacattgtggcccttgacgggatcaggaacctttatggacgatttttgttcttcaagtacttctacctcctaaaaaaacctctcatactgtgtgaaggaaaaacagacatcacctatttgcggtgcgcaatagaccagttggcaacatcatatccctaccttagaaatgataagggcaacaaccaggtaagtttctttaacaagaccaagattaacgttgaaatgctcaaactggctgaaggcacaagtgggttgacctacttgatcgatatatataaacgcttcagctcgcagtacaaatgcgagggtcagctgcaccctgtgattctgctggtggattgtgatgctgccgggaacggggtgttgaacaaagctgccgctataagggattccaatagaaaggcgaaaaagatcgaaaagcagcgccatgccgactactactttgagaacctgtacattgtaaagatcccagcaaagaataagggcaagactgacattgagaatctgtttccagatgaggtgctgaacatggaactcaacaagaagaagttcaaccccaagaacaagggtgccgactctgatactgaatacgggaaagcctatttcgcagaatacgtggtcagagctaacaagaacaagattgactttagcggatttaagccgctgctcgataatatccaggacatcataacaacatatgaccacaatgaacttgattga

SEQ ID NO: 8168 - RNA, 1944 nt, synthetic construct
  source 1..1944: mol_type = other RNA
atgacaacatccctacatagcctgaagaagtgctcttcattcaatgattttgcgatccttttgggctaccagccatccagcctcgcctatgtcctatacaagatccaggagaaggacaagtatacgacttttgaaattccaaagaagtcagggggagtccgcacaatccaaaaacccaaccccaagctcaaactgttgcagaaaaaactcgccaatctactgtatggatgtatagaagaactgaagccccagggtgagaaactggaagaatttaaggggagttttaagtcccctcctctccgcaaaagggctaagaacgcattgagccatggatatgagaaaggtcttagtatttcaaccaatgctgagagacacgtgaacaaacggtacgtttataacattgatatcgagagcttctttcctagtttcaacttcggacgcgtaagagggttcttcctgaagaataaaaactttcggatccacccaaaggtggcgaccgtcattgcacagatcgcatgtcacgataatcaactgccccagggatcaccatgctcacccgtcatcagcaatctcatcgcaaaaaatctggattacatgctgctgagtatagctaagaataatagctgtacctactcccgatacgtggacgacttaacttttagtaccaacctcaacgaatttcccaaagccatcgccagcaagtctgtgctgactctgagacaaaacccgtggttactggggaaagaagtagaaaaagctatctctgacgcaggcttcaaaatcaatcctaaaaaatcccgaatgcagcttaacaactctcggcaagaagtgactggcctggtggttaatcgtaaagtgaatgtcagctctggctactataaaatggtgcgggccatgtgtcatcagttgtttaccgaggggtatttttacaaaccaaaggaagaggttaagctgacaaaaaaaacgctcttttcccgcctgatcaggattctgaagacgtctaccgcagagaaggtgaaggaggagatcgaaaccgtgaaactggactcgccggatatgctgcaagggatgctggcgcatatttataacgtacgttcgtacaggaatagattcgcccgaaaaggctaccgtccaacacagcatgacgggataaacaccaagcacaacaataacaataagtttcctccacttgacagatgcgatagttatactgacgttaaccacgtgctcgccttggatggtattagaaatttatacggtcgcttcctcttcttcaagtacttttatttcctcaagaagcccctaattgtatgcgaggggaaaaccgataatatctacttgaagtgtgcgattgatagccttgctaaggattacccaatcctctgcaagagcaaggaaaacgataaccaggtttccttcttcaacaaaacaaagactaactctgagatgcttaaactggccgaaggcactcctggccttacctacttaatagagatctacaaaaggttttcctctcagtacaagtgcgagggacagcactttcccgtgataatcctggtcgactgtgataaggccggactgggagttttgaggaaggctgcctccattcgggataataatcggaaggcaaaaaacatcacacaggccaggcacaaggactattatttcgagaacctttacattgtgaaggtgccttcagaggacgagaagaaagtggacatagagtatctcttcccggacgaagtgctcaaaaaagaactgaacggtaagaagttcaatcctaataacacaggcggcgacaatgagcacgagtatggcaaggcttacttcgccgagtatattgtcaaggctaacaagaaagacattgatttttcaggcttcaaacctttgctggacaatattcaggatatcataacttcctacgaccccaccaagttagactga

SEQ ID NO: 8169 - RNA, 1764 nt, synthetic construct
  source 1..1764: mol_type = other RNA
atgagctccctgtcccgcctaaaatcgtgtaagtctctttccaacctggcccatctggtcgggtacgaacctaagaagctctcctacatactgtacaagattcccgatgaagccaaatatacagagttcgaaattccaaaggctacgaagggggttaggaaaatctctgcgccgatccccgaattaaagctggcccagtcccgcctggccaaggtgttacagaactgcctcaccgagatcgaaaaagagcaggctaatggagagaattgtattctgagtcatggtttcaagccgcatctctccatttctaccaatggtgcccagcacgtcgaccgcaagtgggtcctcaatttcgacctgaaggatttttttccaagcatcaactttggccgggtacgtggtttcttcatgaagaacaagcactttatgttggaggagaaagtcgcaactattatcgcacagttggcctgtcacaacggcagccttcctcaaggggccccaacctctcccgtgatttcaaatcttgtcgctaatcacctcgatattcgactgagcaggatttctggcaagaataggtgcacttacaccagatatgcagacgacataactttttcaactaacaaaagcgagttccctgagggaatagccgcaaacagggatgatgaaaacagcgcgggcgattggaagctctcaaaacgcatcagaaccgaggtcaaacgctcagggtttgaaataaatcctgacaaaacacggatgcaatatagaaggtctaggcaggatgtaaccggcctcgtggtgaataaaaaggtaaacgtgaagagagaactgtataagcaggtacgggcacaggtgcaaaatttcattaagaatgacacttgctccaaaaaggttaaaattgggggtgtggagagcgaggttgaagttacagaagctgccctgcaaggatttttgagtcacatattctgggtcaaaggagccgagtttgaatacaagcggcttaacaaggcaacaggacccgccgagccaggcttctataaggagtacaggagattccttgattataagaccttcgttgcttctcagcagcctgtggtgctgtgcgaaggggtgacggacaacatctacctgcagtgtgccatcaaacgtagcaaaaccgctcgacccaaacttcaagattcaggcagttccaacgggctggctgtcaagctgttccagtaccctaagattggaagcaagctccgagtgccgtcaagtgtgcagcacctaaacgggggcacaggagacttaaaggagctcatccataaatataaggtaagaaccgccgacctgggaaaacgcggatttatctctcccgtgatcctcctagtggataatgaccaaggtagtcgggacggattatggggcgccattaaaacaacttccggctccaagaaaaacgttgacgggaaaaagaagttttaccacgtgaccaagaatctgtatgtcataccaacaccaaagctggctggcggcaaagatagcatgatcgaagactttttgccacctgcagtggtgagtcaggtcctggggggtaaaacgtttaatcctgacgagaaaactttcgataaaaagaagcactacggcaaaagaatcttggcagagaaagtgagtaaggatcaggcgacaatcaacttcgatgcgttttcgcccatcttggacatcatggaggagattcttgaccatttctcagctctgcccaagaaacagggccgggtggttttctga

SEQ ID NO: 8170 - RNA, 1764 nt, synthetic construct
  source 1..1764: mol_type = other RNA
atgtcctccctgagcaggtttcgctcctgtaagaacgtctctgacctggcttacttggtcgggtaccagcccaaaaagctgagctacatcttgtacaaaatccctgacgaatcaaagtatatggagttcgaaatacccaaggcaaccaagggagtgcgaaagatctcagcccctattccagaattaaaacttgctcagagccgccttgcccacgtcttgcaggattgcctagccgaaatcgagaagggccaagccagtggggagaattgtattatatcgcacgggtttaagagacatctcagcatctctactaacggggcacgccacgtgaataggaaatgggtgttaaactttgatctgaaggactttttcccatctattaactttgggagagtcagaggattcttcatgaagaacaagcatttcctcctcgacgagaaagtggctactattgttgcccagctggcctgccacaagggagcgttgcctcaaggtgcccccacaagtcccgttatttcaaacctgattgccaaccaccttgatatcagactgtctcgagttgctaccaaaaatagatgtacttatacccggtatgcagatgacattaccttctctaccaataaaaaggatttcccaaagggcatagcagccaatagagacgatggatccccctcaggcgactgggaactgagtaagcggatcagaagcgaagtgcggcggtccgggtttgaaataaacgccaagaaaaccagaatgctcttcaggaggtcacggcaggacgtgactggactcgtggtgaacactaaggtcaatgttaaacgcgagctctacaaacaggtgagggcccaggtccatagttttatcaaggacgacgtgtgctttaaaaaggttaagatcggaggcgtaaaacgtgaggtgaaggtgagcgaggctgccctagaggggatgctgagtcacatcttttgggtgaaaggcgcagaatttaactataagcgactgaatcggcccacaggccccaatgaaccaggtttttatcgggagtaccgtcgatttctggactacaaaaccttcgtagcatcgccgcagcctgtggtaatttgcgagggcattacggatagcatctacatcaaatgtgccatcaagcgctctaaagcagccagacccaaattgcaagacgcgaaatctctctctggcctagctattaaactgttccagtatccgaaaatcggttccaaattgcgagtccctagcagtgtccagcaccttaatgggggcactggcgacttaaaggagcttatacacaagtataaggtcaggaccaacagcctggccaacaggggattcgtgtcaccagtgattctgctggttgacaatgatcaaggatcacgcgagggcctgtggggagctgttaaaacggcttcgggcgctaccaaaaaagtagacggaacaaagggctactatcacgttacaaagaacctgtacgtggtgccaacaccgaagctgacaggtggtaaggattccatgatcgaggattttcttccttccagcgtggtcacacagaagctggggggtaaattcttcaatccagatgagaagacgttcgatcggaagaaacattacggcaaacgcatcttagcagaaaaggtaagtcgtgatcatgctagcatagactttgcgtccttctcccctgtactcgacaggattgaggaagtgctcgatcatttttctgcgttccctatggtccaggggagggtgaagttctga

SEQ ID NO: 8171 - RNA, 1707 nt, synthetic construct
  source 1..1707: mol_type = other RNA
atgaagtctatcgagcagctcaaggcagctgcaggactgagtgacatcgcacacatcatcggcttcaaaccaaagagtctggcctatgttctgtacgtgttaccaccggcctccagatacgcccaattttccatacctaagagctccggtgggaccagagatattctggcgcccgtcccacagctgaagttggctcaacgccgactgtgtgaacacctccagaattgccttcacgatatcgaggctcagttaaccgtaaagagcgattgcatcctggcccacggtttcaaacgtgacttgtccatcgtgaccaatgcctcgattcacgtgggccgtagatgggtcctgaatctggatctcaaagacttcttcccatccatcaactttgggcgcgtccgggggtttttcatcaagaacaaacacttctgcttgcagcccgatgcggccaccgtgttggctcagattatctgtcatgataaccagctgcctcagggagctcctacctctcctgtggtcagtaatttgatcgcaggccttctggacatacgcctcaataaaatggctacgcagaatagatgttcttatactcggtatgccgacgacatcaccttttctactaatactagggatttcccacagtcactcgccaagattgatcaggacggtgtgtggacacttggaaatcggctgcataaacggattaagcagtccgggtatgcaatcaacagcaagaaaacacgcatgcagttcaggcgaagccgtcaagaagtcacaggcttgaccgtgaacactgaggtaggtatcaagcgcgagagactgaaaaacactagggcacaggttgataatctggtgcggaacggcgtctgtcatgcgcgaggtaacccaatgcagcccgtaggatctgtttcactccagggccaccttgcccatatagcgtgggtaaaaggccgctatgttgaccacagccgctccgatgggcattggaagagagaacctgcatacgtgcaaacatacagaaaattccttgaccatcagacatttgtcgctagtccgcaacccgtgatcatttgcgagggcaaaacagataacacatactttcggtgcagcattaaccggatagcgggggccccagcaaatctcaccgataaagccaatcccaccggactggccgtcaggctgtttcaatttacaagaacgacgagttgggtgcagaggctaaatgggggcacaggcgacattaaaaacttcattgagtggtacgccgaaaggatgagggttttatcagctactaagttcatttctcctgtggttctcgtggtagataacgactcaggcgtgaaaaagggaggactgaactctttggtgaagagcaagaccaagagcgccgtcgctattgacggcagctccgatttttaccacgtggggcaaaacctgtacctggtgcacacccctaaatcagccactgggggcgacacaatgatagaggacttcttaccggccgccgttaaagggcaaacgctcggaggtaagactctagagctggacgaatcgaagttcgaccccaagaagaactatggaaaggtcccccttgctgaaaccattgtgaaaaggcagcaggataagataaattttgacgcttttctgcccctccttatgcgagtgagtaaggcactagaccattttgataagtcagctttcaaagcatga

SEQ ID NO: 8172 - RNA, 1692 nt, synthetic construct
  source 1..1692: mol_type = other RNA
atgtcttcactggctaagctgaaaagttgtagcagccggagcgatttggccaagttgctggaaatcgaactgaagcattttacatacctcctgtacggactgagcgatagtgagaagtactttgaattctcaatacccaagaagaccgggggactccgagaaattgtcgctccaatcgatgagctgaaagatctgcaaaagaagctcagcaatatcctccaggagtgcctgtctgaaattgaggccaagagctcacggaaaagccccagccacggtttcaagaaagaaagaagcatcattaccaatgctaaaagccacacccgtaagcggtacgtaattaacattgacttagagaacttcttccatacctttaatttcgggcgcgttaggggctttttcttaaccaataaacacttcgaactgaatgaagaggttagtacgtctatagctcaaatcgcatgttataagcggcacttgccacagggcgcaccgtcttcccccgtgatcacgaacctcatttgcaacatccttgacgtgcgccttagtaacctagctaagaagaataaatgcaagtactccaggtatgctgacgatatcactttttcttctcgttcaaaagtgatcagcaaagagttggtgagacaagagaatcacaaatggtccgtatccgggaaactgaaaaaggagattaaacgggccgattttatagtgaatgataaaaagactcgggttcagtacaaaaattctaaacaggacgttaccggccttgtcgtgaacgagaaaatcagtattccttctaagtattggagaacggtaagggctatggtggataatcttctgtattgcggccactttactataactaagagagttctggaagaagaggagttaaaggaggtcaagatcgaaggcaaaattgagcagctcaacggtatgttatcatacattgacagcgtcgacctgcacaacgcgaaaaagggttcagtccaggtggacctgaaccaacgcgagagaacctaccgcgactttctctattttaacaagttctacgccaataacaagcctacaatcatatgtgaagggaagactgatcatgtgtatctaagatgcgcccttaagaagcagtaccaggatcataatatcttgattgagaagtcaggcgacgatttggtgagtaaggtgagtttctacaagtatacagagctcgagactcgtctgctgggggtgacagggggatcttcgcttctgaaagcctttatagcaaactatcctaaggtcattcgaaagttttccgtgccagccagcaacaaccctgtaatcattttgatagataacgacaagggagccaaagagatcttttcccagatcaaatccatcacagattccaggtccaccatcgacggatctgaactcttttacaaactgtacgacaacttctatgtcatcgcaacacccgcagagaagggtaagatgtccatgatagaaaatttcttcccaaaatcactgcttaagacagagctcggcggcaaaaccctggagctagacgaaaaaaaattcgacaagtcgaaacattacggaaaagcctatttcgcggatcgcgtgatcgcaccgaattacaagaagattgactgttccgaattctccaaaattttctatcgcattgaggccgccatcagggacagtaggcgatga

SEQ ID NO: 8173 - RNA, 1689 nt, synthetic construct
  source 1..1689: mol_type = other RNA
atgtccgatctagccactttaaaggaatgtcaaaccaagttcgacctggcaaagctgctgcagattgaacctcagaacctcacatatctcatctatggcctcagcgatgaggaaaagtacaatgagtttaccattccgaagaaaactggaggggtccggcgcattcatgctccaattaaggaactgaaagacctacagaggaggttgtcaaacatcttacaaagctgcctaatcgaaattgagtctgaatctaaacggagccccccatcccacgcatacaaaaaagaatgcagcataatcacgaatgctaagtctcatacgagaatgaagtgggtgcttaacctggatttggaggacttttttccttctctgcattttggcagagtgcggggatatttcattactaacaaacacttcgagctcacagaagaggtgtccaccattatagcccagatcgcctgttatgacaaaaagttgcctcagggggctccctgctctcccgtgattacaaacctgatctgcaatatccttgacgtgcggctgagcaagcttgccagggaaaataagtgcaagtattcccgttacgcggacgacatcacttttagtagtcgcagtggcgatatcagtaagaacatagtgaagaataacgatcacctgtgggagattagcggcaaactgaagaaggagatagtccgagccgggttctcgataaataagaaaaaaacgagggtccaatacaagaactcacgccaggacgtgacaggtttagtggtcaatgagaaagtcagcattccaagcaagtattggcggactgtgcgggctatggtagataacctcctgtactgtggattcttcaccataaacaaaatcgttgaggaggagggagagagaaaggaggtaaagatcatggggaaactgtcacagctggaagggatgctgtcacacatcgaaagcattgactcttacaacaagaagatcaaccctacaaaaacacttaatcaacgcgagaaaacttaccgagatttcttatactacaagaagttttacgccaatgacaaaccagtgattatttgtgaaggtaagaccgaccatgtatatctgagatgcgccctgaagaatttgtctctcgatttcccaaagctcattgagaaagttgacggaaagctgagatcaaatctgtcgttttacaagtactccgacctggagatgaaactcctgggaataaccgggggctccgatttgcttagggcctttattagcaattatcctaaggtcatcaagaagttcagtgcaaaagcatcctccaacccggttataattgttatcgacaacgataaaggcgctaaagaaatcttctctcagatcaagtcaatcacccgatctgcatcacccattgatggcagcagtaacttttaccagctctatgatcgcttttatgtgatagccacccccgcagctaagaaatccatgtccatgatcgaggatttctttcccaaagctttgctcagaaccaaacttaatggtaaaacattcgagcctgacgaaaagaagttcaacaaagacattcactactccaaagcttatttcgccgatcacgttgtggccaggacctacaaaacaatcgactgtagcggctttaaagcgatcttcaatcgtatcgaggcggcaatcgaacatagtaagacttga

SEQ ID NO: 8174 - RNA, 1809 nt, synthetic construct
  source 1..1809: mol_type = other RNA
atgtctaagctcgctgcgcttaagtctgccaatagcgtgagtgatctcgcgaggttactgaaaagtaagcctgatacctttgcatacttcttatacaaagtacctgagaagaacaaatacacaagcttctcaatccccaagaaaaccggaggcgagcgaaagattgacgctccttcagatcagctgagttatattcagaaacaactcgccaaatacctgcaggattgcattgaagaaataggagaactcgagaaacaaaagctcgggaagaagaagtttagctctgcggcacacggcttcactaaggatcgttctataatcacaaatgctcgcccacacagacggaaaagatgggtgctgaatcttgatttgaaggactttttccccagcattaatttcggcagaatacgcgggttcttcatcaagaacaagaacttcaatctggatccagacgtcgcctctgctatagctcacatatgctgttacgagggtaagttgcctcagggatccccttgctcgcccatcatctccaatctgattggtcacttacttgacgtgcggctaatcaaaattgccaagaagtatagctgcacatataccagatatgcagacgacatcactttttccagcgatctgcggaagttccccaaagagattgcacataagaagctcttttcaaaaaagtcctgggaactgtccaacagcatcaaacaggaaatagagaaatcaggttttttcgtcaacgaaaaaaagacgagaatgcagtatcaagagtcccgacaggatgtgacttcactcgtggtcaataaaaaagtgaacgttaagcgggagctgtacaagaccctgcgtgcccagtgtcatacactatttaggactggcgggtgttatgagattgcctaccagaggccagaaaacgaaaagatcagctacctccaacggatcttggataagatattctaccgacctaagaaaatcaaggaaaagaaagaggatcgtaaatacaaaactctggatcagatccagggcatgctgaactttgtttaccaggtcagacacgacagagacaagaagctgggcatcgccgagcgcaaggagattgaatcctctattaagtcactctatcgcaaattcctcttcttcatcaacttctactatatagaccgcccgttgatcatttgcgaaggcaagaccgatcccatctaccttaaatgtgctttaaagagtctgcacctaaagtaccctgggttgatcgagaaaacctccgagggctttgactttaggattaagtttttcacctacagtgacacaaccctggatatcttgaatcttggaggtgggtgcggggatctagccaagctgatcagggagtataatgagtcttgtactccatacaaatgcagtggtcttctgcacccagttatcatcattgtagacaacgacaatgaaccaaccgaaaagctgtttcccgcaattaagggcataacccatagtaagactcccattctgggcgacaaaccattctatacagtgacacggaatctgtatgtcattcccattccccaaaaaaatggaaaaagcacgtgtattgaacactattttgaggagtccgtgtttgataaagacatcaacgggaggaaatttcatcctgacaaaggaccggccgacgggttctcttgctctaaaaacgatttcgccgagaaaattatctgtaagcagcagggatccatcaactttagcatgttctcggacatttttgacaagatcgtggacgttacgatccattataggacccgccgaagctcaccgtga

SEQ ID NO: 8175 - RNA, 1713 nt, synthetic construct
  source 1..1713: mol_type = other RNA
atgaacgaaaagaagattgagcagctaaaagcctgcgttgaccggaaggacctggctcggctgctgggatttaaacccaaagcattatcctacattctgtaccagcgtactccatgccaaaattacaggacttttaaaattcccaagcgaaaggggggggagagagttattgatgccccgaatccagaactgctttttctgcagaagcgggcatctaatctgctccaggattgcttggatgagattgtccaggacgaagggcacaagcgcaccatacatcacggttttcagcgtaagaaatcgattatcaccaacgcaagggtacatagagctcggaagtttgtgttcaatgtggacctgactgatttcttcccctctgtgaactttggacggatcctgggattcttccagaagaaccgacactttacccttgaaagagaagtcgcggttaccttggcccaaatctgctgttacgacggacaactgccacaaggcgcgccgacttcccctgtcgtgagcaatctgatatgtcagcctctggacatccgtctgtctcggttagccgaaaagtttggctgctcctattctagatacgccgatgatatcacatttagtacctccacaaggaagtttccccgagctatcagcagaaagtctctcatctcatcaaaatggtactcagggcgcatactcaaaaaggagattaagtctgccggcttcgctataaatcccaaaaaaacacgcatgcagtacgctcagagtaggcaaactgtaaccggcctcatcgttaatgataagattaatgtgcctgctgattatacaagactgtgtcgggctatggtcgacgcttatgtaaagtccggcacatatttcatccggaaggagaaattatcgaaaagcggaaaggtgaaagtgaccaaagaacccggtaccgacctgcagctgattggtcgctatagcttcatccacaacgtgaagtcaagcaacttttcaaaggaaaaccccaggcctaaggatttgtttagctatgagaaggactacaggagactccttctcttcagcaagtttcacttcagtaaaatcccactcattctgactgaagggaagacggatacgatttacattaaggcagccttaaggcgccttcataaaagttatccgaccttgatcacaaaaaaagggaggtcctttgagtataacttcgacttcttcaaattctctcctacaaatcgccgcatactaggcattgacggaggcacatcccacctagcaggctttctatctacttatagaaaagaggccaagagtttctgtcctatactgaatcagaagcctgtgatctgtatcatcgacaatgacaacggggccaagaaattcttcaaatggaccgactccagcgggaacaagatcaatcgagatggcgaggtgtaccacctgtttgagaatgtgtacctccttctcaccccattgaagaacggtacagaggattccaagattgaagatttcttcacgaaacatacattgaatgagaagatcggtggaaagagttttaacccagagaacgtcggcgtgactgaagcagagtacggaaaagcctggttcgcgagcaaagtcgtttggcctaagaaatcaaccatcaacttcaacaactttaagccactgcttgacctcatagagaatacggccatgaaagtccataaccccaaaaaatga

SEQ ID NO: 8176 - RNA, 1671 nt, synthetic construct
  source 1..1671: mol_type = other RNA
atgacctccaagcttacaagcctacgctcagcaaaaaccgtttacgacctcgcctcacttctcggattttccccctcgtcaatcacgtttatcctctataatctgcctccagctactaagtacaagacctttagtatcgcgaaacgatccggcgggacacggttaatatctgctcccgagccccgcctgaaaagtctgcagcgccgccttgccgacttgttgcaggaatgtcgcgatgagattaatgcactgccggaaaataagaaatcccggagccatggtttcgaaaggcaacggtctatcctcactaacgctaatattcacaaacggaagaggtatgtgttcaatattgacctggagaactttttcccctctttcaatttcggtagagtgaggggctttttcatcaagaacaagaaattccagctcgaaccaaaaatcgccacgttgatcgctcagatagccatccacaataatgaattgccccagggaagcccttgctctccggtcatctccaacctggtggctgacgcgctggaccgtagactcgacagactcgcgaggcaaaacaggtgccggtactcacgctatgctgatgacattacctttagcgccagggtcagagacttccccgcagatattgctgtgcccaccggcgctaacttcgatccatctgctgtcttacagtctatcattgctagtagtgggttcgcaataaatcctaacaagactcgcatgcaatacagcatgtcacgtcagatagtgaccgggcttgtggtgaacgagaaacctaacatccgaaaggaatacagacggactctgagagcccaggtcgatagctacgcgaagactggcagctttacttatgttgattcctccgggacaccaatccctggaagagccaggcaactcgaagggaaaatatcccatgcctgtgccgtgaaaatgcataacgcaggcccattgaacgacagcatgcgagtaggagagatctttaaaatcgcccgtaagttctggctttcccacttgtttgcgagaagacttaagccagttatactatgtgagggcaaaacggacaatgcttatctgcgagccgcactcaagtcgctggccctgcagtatccctctatggtcgatagcagtgcacgtaacgccacctttaaggtcgagttcgttaacctgaatagcctagccgccgaggtgattggactggggggaacagccaatctgtgcaagctgattcataattacgacaaggaggtactcaagttctctaggagtcggcctctgcacccactgatcattgttgtagacaatgattcaggcgcaaagggcgtgtttggtaagattaaagaggcaaccggcaaaactgtggatatcaacacaaaggaacatttctaccgcattaaggacaatatgtacgtagtgaaagtccctgaagggcggcttaacgaggaaagggccattgagcacttattcgacccacctgttctgaacacacccctgcacggtaagattttccaccccggcgataaaaactttgatcctaccaagcactatggtaaagaggcatttgcccagaacgtggtgcggccgcaggctaacacattaaattttcgaggattcgtcccactgctggacaggatcgaagaggtgttgaaagattactga

SEQ ID NO: 8177 - RNA, 1524 nt, synthetic construct
  source 1..1524: mol_type = other RNA
atgctgggcagaaacaacggcgactcagcatccgataatcaggcgaaaaccttttcccaagtctcacacggttttaagcgaaagctctccatccgtacgaacgctagaaaacacaggaatcggagatacgtctttaacattgaccttactgacttctttggatccatcaattttggcagggtaagaggtttcttcatcaaagataagcggttccgccttaacagcaaagtcgcaaccattttcgcgcagatcgcttgtttcaaaaagtctctcccccaagggtcaccatgctcccccgtgatctctaatctcatcggcaatatcctcgacacacacctcgtccggctcgctgctcgaacagggtgtacctacacacgctatgctgatgatcttaccttttctaccaataaacggtgcttccccaggtctatcgccatccaatcagacgatgacaaccatgtctggattcctgggccagaactgttgagattagtgaaccagagtggcttcgaaattaaccctaagaaaacacggatgcagtatcacagcagccgacaagaggtgaccgggctggtggttaataagaaggtcaatattaggcgtgaataccgacataacgttagggcaatggcgcaccgactgtttaccaaagggtctttcttgctcccaatatacgagaaggatgagaacggggattatcttctggagatgaagcccggtagcctgaaccagttacacgggagactgggttttattgacggcatcgacaggtacaacattgagattttgtcagcatctaaagaatcgcagattaagagcaaggagactatctatcggcggttcctgttttacaaagaattttacgccgcttcaaaacccgtgctgatttgcgagggatggacagattacgtgtacattgaaaacgcattgctgaagctggcccctaattatccaagtcttgtgagcttagatgacaatggaaaaggcagttttctgatcaagcgcttcaaatatagccggagtcatactactaagattctgggcatcaaaggaggagtaggagatttcatcaatttcatcaacagctacaagagagagttcgagagattctccgtgccgggcatgagggagccggtcatactattgattgacaatgatgacggcggtaaaaaggtgtttaactgtatacgtagcattctaggaaccgacctagaagagatgcgcaaggccccttatatacacgttcatcgcaacctgtacctgatatctacacctctgcagggcaatcagcagaagtcccagatcgaagatctcttcgacttctctacgctggaggttaaaatcgatggaaagtcgtttgaccgcagtgacgaaaaggtaactgagacgacttattccaaggccgtgtttgcccaaaaggttgtgaaagagatggccagcagtatcaattttcaggggttcatgccactccttgacaggatagccaaggtgatagaatcccattatgcccagcgcaaagaatga

SEQ ID NO: 8178 - RNA, 915 nt, synthetic construct
  source 1..915: mol_type = other RNA
atgagcgctctcaaaaaactccgggatgccgaatctatcgcagacgttgcttctatcctggggttcagaactaaggcactttcctacatcctgtatgtgcagcccgacagtctgaaatataaagagttcgacatccccaagaagtcaggaggggtaaggagaatcgccgcaccccagagtcgtctaaaattgctgcagaagaggcttgcagatctcctgcaggattgtcttgatgagattaatggagacagcgcttcagacaaccaagcgaaaacattttcccaggtgtcccacggcttcaaacgaaagctgtctatcaggacgaacgcgcgcaaacaccgcaacagacggtatgttttcaacatcgacttgactgattttttcgggagcatcaattttgggagagtcaggggtttttttatcaaagacaagcgctttcgtctgaatagtaaagttgccaccatattcgcacaaattgcctgcttcaagaagagcctcccacagggtagcccatgctctccggtgatttccaatctgattggcaatattctggacacacatctcgtgcgcttagctgcccggaccggctgtacatatacacgttacgccgatgatttgacgttctcaaccaataagcggtgctttccaagaagtattgctatacaatctgacgacgataaccacgtgtggatccctggacccgagctactgcgattagtgaaccagtcaggatttgaaataaaccctaaaaagacccggatgcagtaccattcgtccagacaggaggtcactggcttggtcgtcaacaagaaggtaaatatacggagggaataccgccataatgtgagggccatggcccaccgactgttcaccaagggcagcttccttctccctatttacgagaagatgaagtga

SEQ ID NO: 8179 - RNA, 1758 nt, synthetic construct
  source 1..1758: mol_type = other RNA
atgagcgcgctgaaaaagctcaaggacgctaccactatcgcggagatcgccgatatactgggatttaaaactaaagctctcgcctacatcttataccggcaacctgatagcctgaagtataaggagtttgacatcccgaagaagtctggcggcgttcgacatatagccgctccacaaggagggctgaaactgctccagaggcaactggctgatgtattgcaggaatgtctcgacgagatcaataatgccacggtcggggatcaagcgaggccattcgtggacattagccacggcttcaagcgcaaactttccatccgtaccaacgccaagaaacaccggaacagacgatacgtctttaatgtggatctcatcgactttttcggcagcattaacttcgggcgggtcagggggttctttatgaaggacgcacggttctgcctgtccccaaagatcgccacaatcctggcacagatagcatgctttaagcagagtcaccctcagggttctccctgctcaccggtgatttcaaatcttattgggaacgtgttggacatgcatctcgttaaactcgccgctcgccgcggctgtatttatacaagatacgcagacgatcttaccttctcgactaataagagatgctttcccaaatctattgcagtacagagcgatgacgataatcatgtgtggatacctggttctgaacttttccggttggtgaaacactccggctttgaaatcaatcccaagaagacaagaatgcagtatcattgttcacgtcaggaggtaactggacttgtggtgaacaagaaagtgaatatcaggagagagtatcgccacaatgttagggctatggcctaccgcttgttcaccaagggaagcttcttgctgcccgtctacgaaaagaacgccaatggtgactactctctggaaatgaaacctggcaacctgaaccaactgcacggtagactcggatttatcgacgggatagatcgctataacattgagcgggtcagtactgctaaggagagccagattaagagcaaagagacaatttatcggcgatttctgttctataaagaattctacgccgcttctaagcccgtgctgatctgtgagggatggactgactacgtctatattgagaacgccttgcgaagccttgcctccaactacccatcactaatctccctcaatgacaacgaaaaggtgaacttcctgattaaatgcttcaagtactccaaatcacatacaaccgagattttaggcatgaatggtggcgttggcgacctgaaaagatttattcccctgtataagtccgagtttgaaaggttcagtgccccagggatggaacagccgatcatcttgctggtcgataatgaccgggcagggaatgaggtgctgggcgtcgttaacaacatggtgaaagggaacaaaaggacaaagaccaaggtcgataacaatgagccctacgtacacatccatcacaacttatacctaatcctgacccctttacagccaggacagagtgaatcccagattgaggatctgtttgatgcttcgacgctcgcgataaaaatcgacggcaaaagtttcaataggagcgacgagtctgtgacggaaaccacatattccaaggccgtgttcgcacgtaaagtggtggaggaacgcgcatcaagtatcaactttgagggatttgcccctctacttgatagaatagctcaggttattgaatctcactatgcaaagggaaaaaagtga

SEQ ID NO: 8180 - RNA, 1740 nt, synthetic construct
  source 1..1740: mol_type = other RNA
atgttcttcctgcatagcctgaaatccgcgactagcctcaaagatgtcgccgaccttctgggttttaaagccagcgcgctagcgtatattctgtacaagaaggatggggcttcaaaatacaagagcttcgaaattcccaaaaagcacggtggaatacgcaagattttggcaccttccgatgagctcaaactcatgcagcgtcgccttagcgatcttctgctggattacaacagtgagatcaaagcacatgacggtctgaagaatcaaatctctcatggcttcgaaccggacaagtccattgtgaccaacgccgagtgccatcgcaatagaaggtacgtcttcaatgccgatataaaggactttttcggcaccattaactttggccgagtacggggattttttctgaaggacaagaatttcgaactccacgagacagttgccaccattctcgctcaaatcgtctgtcacgacaactccctgccacagggctcgccgtgtagtccagtgatttcaaatctcatcgggcacgtcctggacgtccatttcgtgaagctggcagcgagaagtggttgctactataccagatatgcagatgatcttacttttagcacaaacctgaagactttccccaaggccatcgctaccaatgtggatggggagaatcactcctggatacccggcaaagagttagctagactgattaagcactgtggattcgaattaaaccctcagaagacgcgaatgcagtaccgcgattctcgccaagaggtgacaggactggtggtaaataggaaggtgaacatccgaaatgaatacagacatcatgtgagggccatggtgcaccgtctcttttcaaccgggaacttcgactttgaacagacagtggtcgacgaaaaagggaatagtacaaaaacgaaaacccccggtacgctgagtcagttgcacggcatgctgggctttatacatggcattgatgtctacaacaaagatagactacacaccccccattacgaccaccagcatagtaagctgcctagatcaaaagagacgatctaccgtaggttcttactttttaaggagttctatgccgctagcgctccagtgatcatctgcgaaggcaagacagacaatgtctatcttgtacacgctattcggcggcttgcttccgactttcctaaattagcagcaatcgagaaagacggtgccatcaaactgatgacacggatctttaggtattccgacacttccactggaaaaatcctgggcattaccggcggaggcccatgcttgaaaaacttcataaacttgtatcgggccgaaatcaagcagttcaccgcacccggacggtttcacccggtgatactcctggtggacaatgattcaggagccaatgagatttatagcaccttgaagcaaatagtgaagccccccccatctcgcaacgaccccttcgttcacgttttcggaaacttgtatgtcgtgcctactccattgctacctggggggggacagtctatgattgaagacttttttgattctgggatcaagtcgtctgttgtttctgggaagacatttcaccctgattccgacgccgatacagagactcattacggcaaggttattttcgcacacaaagtgatcaggactaacgccgacaccatcgacttcagcgggtttaaggagatcctcgctaacctcacagccgtaattgatgagcacgctaaaaggttcccatcatga

SEQ ID NO: 8181 - RNA, 1761 nt, synthetic construct
  source 1..1761: mol_type = other RNA
atgactcacctggatgggctgcgcagtgctaagtcttttcacgacatcgcctccttactcgggttcaaaccccgcgctctggcctatatcatctacaaaattccagtcgaccaacggtatgagagcttcgacataccaaaaaagcgcggtggatacagaaagatctcagcccccaatagcaaactaaaacttgtccaacagcgacttgctaacatcttgcagaattgtgttgaagaactcaacaaatcaaagcggattaacgatcatataagccatggcctgaaaaggaagcgaagtatcctgaccaatgctaagaaacaccgaaatagacgctatgtctttaacatagacctcaacgattttttcgggtccattaactttggcagggttagggggttcttcataaaagacaccaatttcaaactcgagcctaacattgccactattctggcgcagatctgctgccacgatcatagcttaccccaaggagcgcccacgagtccagtgattagtaacctaattggacatatcttggacattcacctcgtgaagctcgcaagtaccaatgggtgttcatacactcgctatgctgacgacatcacattttctaccaacaagagaaacttccccgaaaacatagccaaacaggagaatatcaatatacatgattgggcacccggccatgacctcgaccaacttatcaaaatctcagggttcacagtaaatcctacaaagacacgcatgcagtactgcgacagccggcaggaggttaccgggctgatcgtcaataaaaagattaacgtgaggagcgattacagacataccgtcagagcgatggtgcaccacctgttcactcacgggttttactatctgccccagaataagccgccgaaggagacggaaattagcgaagagaataagggcaccatggatcagctccatggtatgctgggattcatcgactcagtagatctgtacaacaaaaagaacgctagttccgcagtggtgcctcggaccgaaaaacagaagctgacatctaaagagtccatctataggaggtttttgcttttcaagttgttctataaggctaaggcaccagtgatcatctgtgaaggcaagaccgataatatttacattactcatgccatccgttctcttgccaagaatcaccctaatctggcatctattaacaatgatggctctatacagctgaaagtgaggctatttaagtattccgagacatcgacaggccgtattctcggaattaacggaggaactggcgagttaactaagttcatccctttgtaccacaatgagactaagaaattcaaggccctgggctgcgatcagcctattattatcatcgttgacaacgattcgggctctaatggcaatggaagaacgtttaacgctgtgcgggccataaagaaagatgcagacccaaaacacgccccattcacacacatcacccaaaacctgtacctgatagcgactcctctttcattggatgggagcgactccatgatagaggatttttttaccccagagacgctgtctatcgaggtgggaggcaagacatttaaccggggtaacggtatcaacctgaataaagagtacggtaagaacatctttgcccagcatgtggtcaagacaatggccgactccattgactttagaggtttcaatcccatcttaagcacaatcgaaaccgtaattacgacccacgcaaaaaccattacttccgaatccgaagaaacctga

SEQ ID NO: 8182 - RNA, 1719 nt, synthetic construct
  source 1..1719: mol_type = other RNA
atgtctctgctagcagaattaaaggaagctacaactatccacgatatcgcatcactgttaggcttcaagaccgccgctttgtcctacatactttatgtaaaatcggatgccagcaaatacaagacatttgacattccaaaacgtagtgggggcgtcagacagatttctgcaccctactcagacttgaagttactgcagcgaagactggccgacctgctccagaactgcgccgatgaaatcaccaagaatcaagggaggggtgacgaggggaaaaaccccgacaggatttcccacggatttcgccgacggcgcagtattatcactaacgccaagcagcattgtaagcgccggcatgtctttaacattgatatcgagaacttcttcgggagcatcaattttgggcgggtaagggggtttttcattaaggacaacaactttgaccttaatcccaaaatcgctactatcttggctcagatcgcctgcacaaacggcagcatacctcaagggtccccctgttcaccggtgatctctaatttaatcggacatattctcgatacccatctcgtgaggctggcaaaaagggccggatgcacctatagcagatacgctgacgacctgacattctccaccagcctccgggacttcccagacacgattgcaacgaggtgtccagtgaatgagcacgattggcagccgagtcacgagctggaaaggatcataacacagtgcggattcagcctcaacaatagtaagacacgtatgcaataccaggaggctagacaagaggtgactgggctcgtagtgaataaaaaagtgaatgtgaggtcagcataccggcgcaccgttcgggcaatggtccaccagctgttcaccactggtaagtttcacatccccggaacccctgagactcaaggttctctgaatcagttgcacggcatgctaggcttcgtcgatggcatagatctgtacaacaggagcctgcgagcgaaaaactccggctcgctcggagacaaggaaaaaatgtacagacagttccttctgttcaaagagttttatagtgcggacgtcccagtgttgctgtgtgaaggtaaaaccgataatgtctatattacgcatgcgataagatctctggccgataagtaccctaaacttgccacaaagaagaccgacggctctgtaaccatcgatttccgcagatttcgcttcaccggcacttcaacgggacgaatactccggctacagggcgggacccctgacttgaaggcgttcgctgaactgtatcgcgaggagtccgttagatttaaggctccaggaatgaagcatcccgtgattcttctcattgataacgatgatggagcccgtcgaatctatggtttcattcagggcatcaccggtaagcggcctgacggatccgagagcttcgttcacgtctttaagaatttttatgtgtgcgcaacacctctgctggcgggcgcaaaggaatccaaaatagaggacttctttgatccaaagacactggatactaagattggggccaaaacatttaactctaagaatgagatcgacacagccatgcactacggcaaggccgtttttgcctacaaagtggtggaagctcatgcagacaaaattgactttagcgccttcgctgctatcttcgataacctcgttaaaatccttgactatcacgccgccaagtttgtgactgaaactgcttga

SEQ ID NO: 8183 - RNA, 1818 nt, synthetic construct
  source 1..1818: mol_type = other RNA
atgagtcagctgacagctctgaagtctgcttcgacgcttcacgatgttgccgctatattggggtttaagcccagtgcactctcttatctgctgtatgtgtgttccgaagccaccaaatacaggacattcgacattcctaagagatccggcggcacaagacagatcgcagcaccagtcggtcctctcaaactccttcagcgtaggctggccgacgtactccagaattgcgtggacgaaatcaaccgaactaataaacgctcagatgacgacaaacaacccgattgcatagcccatgggtttaagagaaagcggtccatcatcacaaatgcacgtcaacaccgtaacaagaggttcgtctttaacctcgacctggaggatttcttcggcaccattaattttggccgagtgcggggtttctttttgaaagacaaaaactttgccctgcaacccaaagtggcgacaattctcgcccagatagcgtgctatcagagagcgttgcctcagggcagcccctgttctcctgtgatcagcaacctaatcggccatgtcttggatattcatttggtgcgcctggcaacactgaccggttgcacatataccagatacgccgacgatctgaccttctcaactaataaacaggccttccctagtatggtggccaggagcgctgtcggcaacgagcatgtctgggagccaggaaaggagctaggcaggctggtcactaagtcgggattcgctattaatacaaataagactcggatgcagtatcgggatagcaggcaggaagtaacaggcctggtggttaactccaaggtaaatgtgaggcaagagtacagacacacggtgcgagctatggtccatcgcctgctttcaaccggtagcttcgatttcgagtataccactacggatagtgccggagttaagtccactattaaaaccctgggtcgccttacgcagttacacgggatgctcgcattcatcgatggagttgacctttctaacaagtccgtgcttcctaaagcttctgggatcagcctcactagcaaagaactgatgtaccggcggttcctcttatataaggacttctatgccgcgaccacccccattgtcatgtgtgagggaaagactgacaatgtatacatcgcacacgcaatccgatccctggctactctataccccaaactggccaccgtggggagttccggtaaaatcacactgaccatcagacgcttcaaatatccaggcaaaaaaactagaaagcatcagtctcgcaatgccgggaactcaacagggaggattttgggagtgaacggagggtctaacgatgttggcaacttcatgcggacctacgctgctgagattggacgatttagggcccccgggaagcttcacccgatcatagtgctgatcgacaatgactccggtgccgccccggtgtacaatacgattcagagattaaccgggacaaagccaaccggcactgaacctttcatccacattataggcaatctgtacgtagtgcccaccccgctgttaaccacaaaggccagcatgattgaagacttttttgactcagccacacgggcgattcaatacaagggaaagccctttgatccatcaaacaagtttgatagcaagacccactacggaaaagctgatttcgcatacaaagtggttcagccaaacgcagacaagatcgattttaatggctttaaggcgatcctcgatcgctttagtgacgtcatcgaccagcacgccaagactcataacgctgtgccattgtctatacctgctgttgcagccgccgcagctccatga

SEQ ID NO: 8184 - RNA, 1809 nt, synthetic construct
  source 1..1809: mol_type = other RNA
atgagtcagttaaatgccctaaaaaccgctaccactttagccgacatcgcaaaattgctcaacagtgaagcctctggcttagcatacgtgctgtataaggtcccagaagctctaaaatacaaagagttcgacgtgcctaagagatatggcggaactcgcaagatctcagcgccttctgacgcactgcggctgctgcagcaacggctgtctaaccttctccagaattgcctgaaggagatcgaggagtcgggaggccggagacatgatgtttcccatggtttcaagcggggcaggagcataatgtcaaacggggagtcccataggaggaagcgctacgtattcaatgtagacctcaaagacttttttcctagcatcaatttcggaagagtgagaggattctttattaaggacaagaacttcttgctgtcgcccaaggccgcaacatttctggcccagatagcttgttacaaaaacgccctccctcaaggatcaccgtgtagccctgtcatctctaatctggtgagccacgtgttagatacccacctagtacgtttggccgctaaggaagggtgtcggtacactaggtacgcggatgacttaacgttctccaccaataaaacagaatttcccaagagcattgctaaaagaactgatggcgcaccacacgattggattccaggagccgctctggtgaagctcgtggaaaaatctggtttcgcgatcaatccttccaagacaaggatgcagtatcacgactcacggcaggaagttacggggctggtcgtgaaccgtaaggtgaacgtacgctccgactacagacgcaccgtgagacagatgacgcataggttgatgaccaaagggaactttgagagtgtccacaaaatggtgaactcagacggcacaaagagcgtcaccaaaatccctggaactgtgccaggtctgcacgggatgctggcctttatagatcagatcgacttgtataacctgaaacaggttgaaaagggcctggctgatagtgataaggtgaaggagagaattaagcttgcaacaaaagagtccgtgtatcgaaggtttcttctgttctcacagttctacgccgcccccaagccaatcgttctgtgcgagggttcaaccgataatgtctacctggttcatgcaattcgatctttggtggcggacctgcctacactagctaccaaacttccctctggggagattgagatcaacgtccggttctaccgatattttaagcgtcgcaagaagaaactcgcgaacgagcacagtaaggcaattagcagtaccggtcgcatcctggatttgaaaggcggaagcggcgaactgctcaaattcgccaaggtgtacaagacccatctggctaaaatcacagctcccggggcataccaacccgttatacttctcattgacaatgataaaggggccaacgatatgttcggctatattaaaggcgtgacacagatcaaggagcccaagaatgaaccatttgtacaccttcttcgcaacctctatgtcgttcctactccactcacgcccgacaagcccaatgccaccatgatagaggactttttctccgatgattggaagaaaactctcgtggaaggaaagccgtttaatccagagaaggaccatgaagatcacacatgctatggcaaggttatttttgctcacagggtcgtgcgaccaaacgccgaaaagatcgacttctcccagttcaaacaactcctgcttaatatctccagcgtcattgagagccaccggaaaactcatcccccgccggggaaagcctcttga

SEQ ID NO: 8185 - RNA, 1035 nt, synthetic construct
  source 1..1035: mol_type = other RNA
atgtcccagctgaaggccatcaagactgcaaccagcctggccgaaattgccaagctcctggagtttgagacatcttctttagcctttatactgtacaaactcccagatgcactcaaatataaggagtttgatgtgccgaagcggtacggcggaactcgcacgatctccgccccagtagacaggctgcggctagtccagcagcggctgagcaacttgttacagaactgcctttctgagatcgagaataatggagggagaaaacatgatgtgtcacacggattcaaacgttggagatccatcatgagcaacggtgagaaccaccgcaaacagagatacgtgttcaacgttgatctgcaagacttcttccacagcatcaactttggccgtgtgagggggttcttcatcaaggataagaacttcttactcaatgtaaaggttgcaacatttctcgctcaaattgcttgctataaaaatgttctgcctcaaggttcaccatgtagtcccgttatctccaatctcgtgtctcatatactggacacacacgtggttcgcctggcatctaaggagggatgtagatacacaaggtacgccgacgatctgaccttttcaaccaacaagaccaaatttcctgctagtattgcaattcgagctggctcagccccccacaactggattcctggcactactctggtcaagcttgtggaaaaatcgggcttcgccatcaatcagagtaagacaaggatgcagtactgcgacagccgccaagaggtcaccggccttgtggtaaatcgaaaagtgaatgtcaggaatgactatcggagaaccgtccgggccatgactcatcgcttgatgacgaagggggattttgaattcgtgcacaaaacagtgagcggggacgggaccgaatccgtcagtaagattcccggagcggctacccgactacatggcatgcttgcgttcatagaccagttggacttgtataacatgaaccaggtcaagaaaggtctgattgacactgataaagtgacggaatga

SEQ ID NO: 8186 - RNA, 1770 nt, synthetic construct
  source 1..1770: mol_type = other RNA
atgccaaggctggcaattctgaaaggtgctgctaatctgtccgacgtggcacacctgcttgggtttaaaccaagctcgttgtcatatctactgtacaaactgccagcccctttgaagtacaccgagtttgacatccccaaacggcatggaggcttgcggaagatttcagcacccattgactcactcaagaatttgcagcagcacctgtctcagttactgcaggactgtctcgatgagcttgaggaggcgggtctgcgcaaaaacaactccgcccatggcttcacaagacacaggaccatcatgacaaatgcaatggagcataggaaccgcagattcgtctttaacgccgatatcaaggacttcttcccttctattaattttggacgcgtgcgtggatttctgatcaaagataaacacttcgccctgaatccagctgtcgccactgtgattgcccagattgcatgccacaataacgcactgccacaagggagcccaagttccccagtgatatctaacctcattgcatacgtgctggatacgcatctggtaagtctcgcgcaacatacgggatgtcactatacaagatatgcagacgatctcaccttcagtacaaatatgccaaattttcccaacgccatcgctgtgtgcgtgggaggcaatgcccataactgggcggctggccagagcctgacagcaatcgtgagcaagagcggtttctccttaaactccgctaaaacccggatgcagtacagagattctagacaggaggtgaccggactcgtcgtaaacgaaaagatcaacgtgcggagtgagtatcgccacaaactgcgcgctttgacttttaggcttattaacaagggggaattttcaattatccataaaagcgtggacatactagggaatattaccactaatgtcatcccagccacccccgctcaattaaaaggaatgttggcctttgtggacgcagtcgacatagcgcaacgggacgacgccatccggcagtttcatgacaagcaccaggatgggcagatcaaatacgagcgttacaagctggtccgaaaagaaaacacctacaggcgtttcctaatgttcaatgagttctttgccactcccaaacctgtcgtactctgcgaaggcccgaccgatcgagtgtatctgagatgtgccgttaagaggctagctgctgatttccccaccttagctacgattaatgccgcgggcgaagtcagtctgaacttcaggcggtacaagtacgccgattccaatactaaccgaatactcaagattcacggtggcgccagccagcttatgggctttatctctgagtataggtccgcggcagaaaagtttctcgcccccgggccgtttgagccggtaatcgttcttgttgacaatgacgatggtcctgaagagttgttcaagtatcttgccaaagtgaacaaagtcaaggccccgcgcactgaacctttcgttcacgtttgcgccaacatatatgtggttcccacaccccttgggcctaatggcgaacctacctgtatcgaggactttttccctagccacctcttcaaggaagaagtggctggaaagacattcaaccctaagaaaaagcacggcgacaatgagaagttctactctaaggagatattcgctgagaaggtgattgccaagaaggctgggactatcgattttgatgcctttaagcccctgctgtcaaatatcgaaagagcaatcaacacacatcgaaaaaaccaccctaagcccaaatga

SEQ ID NO: 8187 - RNA, 1773 nt, synthetic construct
  source 1..1773: mol_type = other RNA
atgatactgctggctaaactcaggagtgcgaaaacaattcatcacctggccgcaatccttggttttaaggccagcgcactcgcctacattctgtacggcaaaggaggtgcaagtaactacaagaagttcgatatcccaaagagatatggaggagctcgccatattagtgcccctatgcccgaactgaaactgctgcagagccgtctctcagacgtgttacagaattgtctcgcagaaatcaatgaggccgccggcagaagcgacaaaattttcgatcgagtaaattctagggctgaccggatctcccatggctttaggcggcatagaagcatcattaccaatgctcgcgagcacagaaatcgcaagttcgttctgaatgtcgatctgaaagacttcttcggttctattaatttcggcagggtgagagggtacttcatcaaggataagaagtttttgctatccccagaaatcgccacaatgatagcgcagattgcctgctatgaaaacacccttccccagggcagtccctgtagccctatactcagcaatctaatcgggcatgttctagatgtgcacctggtggggctcgctgctaaaaaaggctgcgtgtactcacggtatgcagatgaccttactttttcaacatccaaaccggtgttcccaagttccattgccagctcagacccgactaacgagcacctctggcttcctggcaaggaactggtgaggttagtcgaaaaatctggcttcgaaattaaccctagcaagactcgtatgcaataccggaactctcgacaagaggtcaccggcctgatcgtgaacaagaaagttaatgtgcgttccgaatacagaaacacggttcgcgctatggtacaccacttatttaccaccggcacgtttgagattctgcagcgggtgtctgacggaaaagggggggttactatatctcaggtgcccggcaaggttaaccagctgcacggaatgctggggtttattgatggagtcgacttgtacaacaaaaagctgatcggagtggctaagggagcgtccaatttgccatcaaaggagacaatgtataggcgattcctgttgtacaaagaattttatgccaccaccagccccgtcattgtatgcgagggtaaaaccgataacatctacatactccatgccattcgcagccttgctgccacttatcctaaacttgcaacaacaaacgctgatgggacgatcaagctcaacgtgcgaattttcaagtactcgggcacttcaactggtaggatcctgaagatgcatggagggaccggagacttggggaatttcatgcttgattatcgcacagagtgcgctcggtttaaggcaccaggtcaacagtccccggtcatctttttggtggataacgacagtggtgcgtcttccatctataatattgtcaagcagatcaccaaaaagaaggtaaccgggacagagcccttcgttcatgtcacagggaacctgtatctctgtgctacgccattgatcgcaggcgccacagaatcaatgattgaggacttctttgactcggcaactaaggccataaccatcggcggaaaaacctttgaccccgatttagacgatgagactgccaaacactacggcaaggtggtgttcgcacacaaggtcatcagagccaacgcaaataagatagactttaaggagttcaaccctatactgtccaatatcgtggcggccatcgacgcccactctgagaaagtcgtatccgccggcgtgccttga

SEQ ID NO: 8188 - RNA, 1731 nt, synthetic construct
  source 1..1731: mol_type = other RNA
atgtgggccactcatcccccaccgtttatgacccaattaaagaagttaaaggcagcgaaagatatctacgacataagtacccttttgaattacaaagccggtaaactgtcttacattctgtatgtgatcgacgaaagcgacaagtacagttctttcgaaataccaaaaaagggaggcggaactcggacaataaaatctcctatccccaaactgaaacggctacagaaaaacctgagcaatctactgcagaattgccttgatgagttaaggtcagagaattcttacgttgatcctatgtcacacggcttcgagaagaaacgtaacattatcacaaatgcagaagtccacagggccaagcgatacatcttcaacatcgacatcaaggatttctttggctcgattaatttcgggcgcgtcagaggattcttcattaaggacaatagattcgagctggatcccaagatagcaaccattatcgcccagatttgctgtcacgagaattccctccctcagggatccccgtgttctcccgtcatctccaacattattgggcatatcctggacgttaggctacttagtctcgctatcaaaaatgggtgttcctatactagatatgccgatgacatcacattctccacaaataagaagaaattcccaagctcaatcgcggctaaagacgatgacggacatggatggtctgtaggtaaggagttaagcgatatccttaagactaacaaattctccgagaacaaaaacaagacccgcatgcagtataaaacatcccggcaatccgtcaccggcctggtggtgaacaagaagattaacgtgagatctgagtatcgaaaacaagttagggccatggtgcactcactgtttagtaaggggacctttttcataccaaaagctggggtggccccaatggatgaatttcccgaagggaccctgaaccaactgcacggtatgcttggctttattgacagcatcgatcagaataatgtcttgagacaggggctggaggcggcaagcatcacgcagaaagaaaagacctaccgcaagttcctgctctacaaagatttttacctttctaccaggccaattattctgtgcgaaggcaagactgacaacatttatttgaagtgcgctattaagagcttggccggtcagcatcagttgctcggagaacgtgtaggcgtggattcatttaagatgaaggttcggttttacaagtatgcagagacatccacagggcgaatcctcggcctgagcggtggcactggagacttccctaagtttatcaactcttacctctccggaatctcgaaatttacggctttggagctgaatcatcccgtgattatgatcattgataacgattccggagctaagggcatttacagtaaactccgggagatcctgaatcgccagatcagccccgctgaagagtatatttatgctggcgagaatctctacatagtgcctacccctatagccaagcacggccaacactcaatgatcgaggactgtttcgacaaagacacgaaaaagattctggtggacgggaagaaatttaaccccgacgacaaagccagtatcgatatgttttatggcaagagcgtctttgccactcaggtgattgaaagattcagcgagaagataaactttaacgggttttcagtattcctcagccgcatcgaaagtgcaataaatcatttccacaacatgaagggttga

SEQ ID NO: 8189 - RNA, 1677 nt, synthetic construct
  source 1..1677: mol_type = other RNA
atggcaaccattctaagctttcaaccaaaaacactgtcttatctcctgtatgtcgcctctgatactcagaaatataggagcttcgagctgccaaagaagacgggaggaactagaaccatttctgctcctaccgataaacttaaacgccttcagtcaaatctagcagatttgttacagagatgcttggacgacctgaagatcagtgcggaatactcggattcagccagccacggattccaacgcggcaagagcatcatcagtaatgctgcacaacatcgggctaagcggtacgtgttcaacattgacatcgccaacttttttggagcaatcaacttcgggaggatccgaggcttcctgattaaagacacccggtttgccctgcatccaacaatagccaccattattgcccagatcgcttgccgagaaaacagcctccctcaaggctctccttgtagtcctattatcgccaacttggtcggaaacatcctcgacaggcgattaattgcactggccgcaaagtatggctgcacctatacacgttatgcggatgatttgacgttcagcaccaacaagaaagtttttccaccgcggatcgcctcacgcacgactgatcacacatgggctgccggggaggagctgttagccgttctgcaagcatccagattctcccctaacccccaaaagactcgtatgcagtataaaacatccaggcaggaggtaacaggactgatagccaataagaaggtcaatgtgaggagtgactataggaagagggtgcgcgcaatggttcacagactattcagcacaggcagcttcaatctccctgaaaacccaactcctggcgccggtagaacccgggatgcagagccaggtacgttgaatcagcttcacggtatgctttcctttatcgactctgtggaccagtacaatatccagcgatccaagctcaagctcgatcagctcagtcagaaagaaaaaacataccggaagttcctcctttacaaggacttctatctggccgagcaggccattatcctttgtgaggggaaaaccgacaacatatacttgagaaacgctattaaagggctccccaacgattttcccctgctggggtctaatgatagtccggaccagttcaaaattaatgtccgtttctaccggtatgccgaaagctctactggcaggattctggggttatccgggggcactggagactttcctaactttatcaacgcttacctgacagctttggcccagtttcccgctctgaagatcaggcatcccgtgataattctaatagacaatgactctggtgcgcgccccctgtacagttcactggctcagcgcctgcaccggaagattgacccccgcgaatcctttatacacgtggaatccaatctgtacgtggtagcaaccccgatcatagagcccgcgtccgaaagcatgatcgaggacttttttgatgagactaccaaaaagcttgtggttaagaatcgacactttgatcccagagatgacgcagatcagcggtacttctacggcaaaaataccttcgcgaccgaggtggtcgaacgcttctctgatagcatcgacttttcaggcttctcagagctcctgtgtagaattgagatggctatcagacatttccactcggcccattccccagctaactcatga

SEQ ID NO: 8190 - RNA, 1734 nt, synthetic construct
  source 1..1734: mol_type = other RNA
atgactcagctgcagaagctgaaagaggcaaaaaacttacatgatgtggctacgttgctaaatttcaagcctaacaagctttcttaccttttatacatagccgaagacgaggagaaatataagacctttgaaatcgccaaacgtagtggaggcaccagatctatcgccgcaccagatcctaggctgaaacaattacagagaaacctcagcgtgcttctgctgaattgtttagacgagctccgggagaagaagttgtataaggatgacatggctcatggatttctgagaaagaaaggtattgtcaccaacgccgtcacccacagagctaaacggttcgtgttcaatattgacatctcagacttctttggttcaattaatttcggacgactgcgcggcttcctcattaaagacgaccgctttgagctcaaccctaatgttgcaacaatcctggcgcaaatagcttgccgaaaccatactctgccacaggggtcgccatgttcacccgttatcagtaatcttatcggacatatcctggacgtgaggctcgccggacttgctgcaaaaaatggctgtcggtattcccgctacgcagatgacataacctttagtactaacaagaaggaattcccccaagctattgcaatgcgcgaaccagacagccatgcttgggttgtcggcgccgaactcgaggtggtcctttccgcgaataattactctctgaacaccaagaaaactaggatgcagtactgcgactcccggcagacagtcaccggattggtggtaaataggaaagtcaacgtacgatccgagtataggcggcgggtgcgtgccatggttcaccgtttgtttacgaccggccagtttgcagtgccctcaactaaagtagctgccacagctgccggagcggtatctagcgaggagcctggcagccttccgcaactgcacggtatgctagggttcatagatggcgttgaccagtacaacattcgcaagcatggtctgagactcgaggagctgtccgaaaaggagaagacctaccgcaaatttctgctatataaggatttcttcctggccgagaggcccgtcgttctgtgcgaaggaaagactgacattatctacctgaagaatgctgtgcgccagctggcggctaaatatcccaagctcggggaacaaacaggcgagaacaaatttcagcacaatgtgaggttctacaagtttgcagatagtagcacaggaagaatactcgggttaagcggggggggcggtgatttccagaaatttgcccatgcctatttgtctgaagtggggcagtttcccacacaccctattgctggactcaagcacccagtgattatcatgatggataatgattccggcgccaacgcagtctgcagctacgccttgaaaaggacgaagatctctgtggatcgaggcggcgatttttttcgactcggggaaaacctatatctggtgttgacaccgtttcttcacggcgagaaaccttccactatcgaagacttcttcgatgacgcagtgaagctccggaccgtggagggtaaagccttcgatccaggagacgagcacgacacagggacccactacggcaaggccatcttcgcgaaggaagttgtcgagaagtatgcagatgaaatcgatttcaacgccttcagaggtatcctgagtagaattgaaggggtgatgtcagactattacgccagccggctggccctgtga

SEQ ID NO: 8191 - RNA, 1719 nt, synthetic construct
  source 1..1719: mol_type = other RNA
atgtccaaactggaatctctacggaaggccagtactctgcacgatctagctcgcctgctgggctttaaggcgaaagctctcgcctatgtgctctacgtaatccccgaggcgaagaagtacacagaatacaagattcctaaacgatctggcggagcaaggacaatccaggcacccgtagcagagcttaaactgttgcaacggagaaccagtaatctgctccaagactgcatcggggagctcgctgacaagggtcagcgcagcgatccatttgtgcatggattcagacgacatcgtagcatcatcactaacgcctcaaggcaccgaaaccggcggctggttgtcaatctggatatatccgatttcttcggttcaattaacttcggcagggtgagaggcctgctcattaaggacgatgcctttagccttaatccatccgtggccaccgtgatcgcccagattgcgtgccatgagaacgcactgccacaggggagcccatgttcacccgttctagccaacctcgtggctcgcccccttgatctccgccttctggctcatgccaagcgccgagggttcgtctacactaggtacgccgacgacatcacgttctctacaagactgaaaaatcctcccgctgccattgttcagcacaaacctgggacaggacttcacgcttgggaagcagccccaacccttgtgcgggctatcgaaaaatcgggtttttctgttaatgccagtaagaccagggcccagtaccgtgacagtcggcaggacgttactggcttggtggtgaatagaagggtaaacgtcccacgcgagtataggcggcaggtccgtgcaatggtacacagactcacaaccacaggcgcgtttgaaatccggaaaaatgtgttagccgccggatccaccaccttgcgcgcaataccggggaactttgaggagctgcaaggaatgctgggctatattgcttccatcgatgctgctgcagagcacaaccgtaaagacaatgctattgccgcaagaagccagagagaaacgtaccgacgcttcctgttctacagggagttcttctgtgtggatagacccgtgatcgtgtgcgaagggaagactgacaacgtgtatctcaggtctgcccttcgcaagctcgccccgctgtttcctagtctggcgtcagtcacagcatctggcgaattacggatgaatgtgaggctgtataaggctgacggaaagaagacttccagcttgatgggtctgacgggaggtgccgcccccttattggcgtttctgcgagaatacagaaaggctagcgagacattcgtttcgaaaggaaacaggttccctctaatcgtcgtagtcgataatgacggcgcatcaaaggacatattctcctttatcaagaagatcactggcagtcataagatgattgacggcagcgaaccttactatcggttaatgccaatggtcttcgtggtccctatacccaaacccccttcctctaccaccgctgccattgagtctctctttgattcaagcctgttgagtaccattcataaagggaagatttttcacgggtccgacaaagggttcgatgaggacaagcactataccaaaagcgtgtttgccaaagaggttgtggaaccgcacttcgacaagatcaactttgatggctttaaacctttgctggatgcaatatccgaggtggtcggattaagctcaccatga

SEQ ID NO: 8192 - RNA, 1740 nt, synthetic construct
  source 1..1740: mol_type = other RNA
atgtccaggcttgccgaactaaaggcctcaaccactctgagcgacgtggcgcacctgctcgggtataagcccaaggccgtttcatacattctgtacatgctgccaacagaccagaaatataccacattcgagatttcaaaacgaaatgggggacagcgcacgataaatgcaccagttgagaagttgaaagtactgcagagacggctggccgacctgttgcaggattgcctggacgagataaacaacgctaaaggacttaaagacagggcagctcatggcttcaaacgcaagctttctatcatcacaaatgcccggcagcacagacatcggcgctgggttttcaacgtcgacttagagaacttcttcccatctatcaactttggaagaatcagggggttcttcattaaaaatagagacttccaactccatgagaaagtcgctacagtgttggcacagatcgcatgccatgatcactccttacctcagggcagcccgtgctctcccgtaatcagcaacctagtcgctcatctcctggacatgcggttggtgaagctggcccagatcgctggctgtacgtattctcgatatgccgacgatctcaccttcagtacgaataagaaacaattccccctcgaaattggttggcccgccaccgatcaggggcctgattctcacatctggttacccggcgacgcgctgcgcaaaacaattaacagggcgggtttcactataaaccccaataagacccacctgatgtatcggaccagtcgacagcgagtgactggtctggtggtgaacaagaaaattaacatccgttgggaatacaggcacaatgtgcgggccatggtcaacaagctcgtgaatacgggtgagttcgaactcaacggcatagtgcacaaggatggcaatgtctcaatcgagaaacgccctgggagactgaatgaactgcacgggatgctcggctttgttaatgacattgacgtgtacaactccagacaaaccaatgataagcctcctggatttagttcaaccgaaagagtctatcgtgagtttctcatctatagcatcttctatgctgcacagatgccagtgatcttatgtgaaggtgatactgataacgtgtacattacccatgctatccgctcgctggctcgtgaatttccagatctagcagaggtacgggctgacgacaagattgtgctgaaggttaggttgtataaataccccaaaagttccacatcccatcttctcgggctgggcgatgggggatcctccgtattgagcaaatttatctcggagtacaagaaggagatttctaggtttaaggccccaggacttgctcaccctgttatcattgtttacgacaacgatgatggagccaggagtatccgcaatacaattaagcagatcacaaagagcactcctaaggtcaccaatccatttgaccacgtgactaagaacatgtacgcagtgcctacaccgataccagaaggcgaggcagccagcaagattgaggacttttttggcgaaatgattaaatccaccgtcgtgaacggaaagatctttaacgacggcaataatatagatgccactcaacattacgggaaacgggtgtttgcccacaaggttgtacgacctaaggcccagatgatcgatttcactggcttcagacaactgcttagcaacattgtggaggtcataaaataccacaaagcagcggtcgtgatgcccccgccctga

SEQ ID NO: 8193 - RNA, 1749 nt, synthetic construct
  source 1..1749: mol_type = other RNA
atgtctcgcttggcatccctcaaggcagcaacttcactgtccgatgtggctaaactcctggcattcaaaccaaaagcggtgagttatattctgtacaagcaaccggccgccactaaatatagaacctttcagatccctaaacgtaatggaggcgaaagaaccattaaggcccccgatgaagccctgaaattgcttcaaaggagactgtccgagttgctgcaggattgcgtcgacgaaataaacacagtgaagcagcgaaaggatagaacagcccacggttttaagcggaaacgctccatcataaccaatgcacggcagcaccgccatagaaggtgggtgtttaatgtcgatcttgaggatttcttccccagtatcaacttcggtagggtacgaggtttcttcctgaagaaccgtgactttgagctgcacgaagacgtcgcaaccgtgattgcgcagattgcatgccacgagaatgctctcccacagggtagcccctgctcccctgtaatcagcaatctggtggcacacctcctggatatgcgactcgtacggcttgctagcgacgccggctgtacatattctcggtacgccgacgaccttacctttagtacaaacaagagggagttccccgcaaacatagctgttagctctgggaatgagggagatgcctctcacttgtggttaccaggggaagcgctgcgaaaggtgataaagagaacgggattcaggatcaacgctaagaaaactcatcaaatgtacagggctagtcgccagaacgttactggactggtcgttaataagaagatcaatgtgcggtgggaataccggcataacgtaagggctatggtgcactcactcgtccgcaccggggcgtttcagatacttggggtaacgtctaaggatggccacgctgtgctggagaagaggcctggcgatttaaacgagctgcacggcatgctgggattcatttatagcatcgacgtgtacaacaagacacatccgtcggacgcctttgccgagggtatgtcagccagcgaaaaagtgtaccgcgagtttctcatttactcaaccttttacgccgctgaggcccctattgttatctgtgaaggcgagactgacaatgtctatctgacacatgcaatcaggtcacttgctgccgaattcccaagcctggccgaagtgagatccgatggaaaaatccacttgcgcgtccggttatataaatatccccattccagcaccgcccgattactcgggctgaatgacgggggatccggggttctaagtaaattcatcgctgcctacaaaaaagagacaaagcattttacggcacctgggttgaccgatgccgtcgtgatcctatatgataatgatgcgggagcaaaaggcattagacaggccattaaaaacgtctctggcgtgaaagcgactggggacgaaccgttcgttcacgtcatcaagaatctgtacgccgtttcaacccctgtggaggctcccgctactcagagtaagattgaggacttcttcgacgctacaatcaaggctactgtcatagacggcaagatgtttaacgagggcgacggctttaacgccgatcagcattacggaaagaaggtgttcgcccagcaagttgtgcggagcaaggctgacattatcgacttcacgggctttcgtgccctcctaacaaatctcaccgaggcaattaactcgcacaaagcctctgtggtgccacaaccacccgaaccttga

SEQ ID NO: 8194 - RNA, 1731 nt, synthetic construct
  source 1..1731: mol_type = other RNA
atgtctagactggccgccttaaaggcctcaacaagtctgtcggatttggccaggctgctggattttaagccacaagcgctggcctacatcctgtacaagcagccggaagctaaaaagtacactaccttccaaatccccaagagaaatggtgggcagcggaccatcaaagctcctgtcgacgcactgaaacttgctcagcggagactgtctcatctactgcaggactgcctcgaagagatcaatactaatcaaaaccgcaaggataggactgcccatggtttcaagcggaaacgcagcattatcaccaatgcccgtcagcatagacaccgacgctacgttttcaatttagatctcgaggacttctttcctagtattaatttcggtcgcgtgcgggggtttcttattaaaaatcgcgatttcgctctgcatgaacacgtagccaccgtgattgcccagatcgcgtgtcatgaaaatagcttaccacagggatccccctgttcaccagtcatcagtaatctggtggcacacttgttggacatgagacttgtctcccttgcctctgcggcaggctgcacttattcccggtatgctgatgatctgacgttctctacaaataagaaggagtttccgacagagatcgccgtcccgttgggaacagagggaggtgaatcccacctgtgggggcctggagacgagttacagaaagttattgaacggatgggcttcagaataagtgcagctaaaacccatttgatgtatagaacaagccggcaagacgtcaccggcctcgtcgtaaacgaaaaaatcaacgttcgatgggaataccgccataacgtgagggcaatggtgcacaggctgataacaactggggcttttgagatctatggggtgacccaacgagatggcaaggctgcattagagaaacgtcagggaccactgaacgagctccatggcatgctggggtttattgactccatcgagaattacaacaagaagaacacacacgattcgcccagcgacaggcctagcagcatggagctagtgtacaggcagttcctgatatacaggaacttttatgctgccgaatctccagttgtaatctgcgagggtgacacagataacatatatctgacccacgcaatccggaacctggcagcagagtttctcgaccttgccgaggtgaaagaggggaagattaggctcaaggttcgactctttaagtaccctcattcatctacagcgcgcatccttgatcttggcgacgggggcagtggggtactctcagactttattggcacgtataagcgggagattggccacttcactgccccctccagccagagccctgtggtaattatttatgacaatgactcaggagcgcgtggcatccgatcagccattagaagtgtgtccaaagttcagccaaccggcaccgaaccctacgtccacgttgtgaaaaacctatacgccctcgcaacgcccttggtgggaacgaccactgaatctaagatagaagactttttcgacgatgctattaaagccaccgtgattgatggaaagaccttcaacgataagaacaaaatagacgccgctaagcactattccaaaactgtgttcgcccacagggtcgtgcgccccaatgctgatacaatcaactttagcggcttcagacctctcctgactaacctggtggcagtgatcaatgcacacaaggcctccatcgctgtctga

SEQ ID NO: 8195 - RNA, 1773 nt, synthetic construct
  source 1..1773: mol_type = other RNA
atgagtcggttggctggcctgaaggctgccactagcatatccgaccttgctaccttattgggctttaagccaaaagccatttcttacctattgtacaaacaacccagcgagtataaatacacaacattccaaattcccaagagatcaggtggacagagaaccattcaggcacccgttgagcggctgaagctgctgcaacggagattgagtgatcttctccaagattgccacgacgagattaatgcctcggctaaaaggaaagaccagatcgcacatggattcaagcgggatcgctctattatcaccaacgccaaacaccatcggaacagaaggtgggtgtttaacatcgatctggaggacttcttcccaagtattaatttcgggagagtgcggggctactttcttcgcaacagggacttcatgctccaggaacgagtagcaacagtgatcgcccagatctcttgtcatgagaatagtttaccacaggggtcaccatgttctcctataatctccaacttagtgacgcacgtcctcgatatgcggttagtcaaactcgcctccgagtgcggctgcacttactcaagatacgctgatgatctgactttctccacgaataagaaagacttcccctttcaaatcgcaggaccctccgctataagcgcggaccgggctcatttgtggctccctggtgagccgctgaaacaggttatcgagcgtacaggcttccgtgttaacagcaagaagacaagaatgatgtacagagactcacgccagaatgtcaccgggctggtagtcaacaagaagattaatgttgcaagggaatataggcataacattcgagccatggtgcaccgcctggtcactacggggcagttcgaaattctcggccctgttacccgcgacaagaaggtggtgctcgagaaacgacccgggacactgaacgaactccacggcatgttgggcttcgtcgattcggttgaatgttttaatcactctaggaccgacgaatattcagcatctttgaaagccacatatcgccgattccttttttacagcaccttctatgctgcctccgcccctgtgcttatctgcgagggcgaaaccgacaatgtgtatctgacacatgcaatcgtaagcctggcgtcagagtttcctgagcttgcggagctggcaggagccggtaagactaggctcaagatcagaatatataagtacccaaggaccagcactgcccgcatcctgggtctgaaagatggcggttccgccgtcctctgcaactttatcaaggattaccccaaggaagtagccaggttcagtggcccaggcctagctcagccggtgatcgtaatctacgacaatgatgaggggtgtaaaggaatacgttccgtgattgctaatattagcaaagtgaagccaactggaactgagcctttcacgtatgtgtacaaaaacctgtacgccgtccctaccccgctacaggaaggagtcacatccagtaagatcgaagacctgttcgaagcacgcatcaaggagacaatcattgagggaaagacctttaacgaaggaaattctctggaccctcataaacattatgggaaaaaggtgttcgcgcacaaggtgatacggcccaacgccgataaggtggattttaccgggtttagaagcctgctgacttttccccgttttcaccgacacctttataaagaagaatttgacgagattggtgggcagcacgagcaccaggaccagaccgctgtttatggcagggtgtga

SEQ ID NO: 8196 - RNA, 1740 nt, synthetic construct
  source 1..1740: mol_type = other RNA
atgtcaaggcttaacaacctgaaaagtaccgcaacactgagcgatctggctcgccttctgcagtttaaaccctccgggctgtcttacatactctttaaacagccagctgccacaaagtataagacattcgagatcttaaagcgaaaaggcggcacacggactatcaaagccccctctaatcccctaaagctggtgcagcaaaggctgagtatactgttgcaggactgtgtcgacgagattaacaaggccaaaaaccggaaagaccggattgcacatggattcaagcgtaagcggagcataataactaacgccagacaacacagaaataggagatacgtgttcaacatcgatctcgaggacttttttccctcaatcaatttcggccgcgttagggggtatttcatcagggaccgatcattcgcacttaatgaagatgtggcaacagtgattgcccagatcgcttgtcacgagaatgctcttcctcaaggtagcccatgttcgccggtgatcagcaatctgattgcacacgtcctagatatgcatctagtcaggctcgcttccaaggttggatgcacctattcccgctacgcagacgacttgaccttttctaccaataagaaggacttccctgctgatatcgctaagcctagcgaaacggaaccacatttgtggctcccgggagccgaacttcagcggctcattgcccatgcgggctttagaatcaataccgccaagactcatatgaagtaccgcacttcccggcaagaggtgaccgggctagtagtcaaccagaaaataaatgtacggcgtgagtactctcacaacgtcagagcaatggtccacagcctgttgaaggagggctcatttgaattgtatgctgcaaccgagaaggcgggagctgtaacaatcgagaagcgcaggggtactgtgaacgagctgcacgggatgctcggtttcattgacagcattgacctctataataaaaagaatgctcctgagtccaaagattcaggccgtctctcatccaaggaactgatgtaccgacagtttctgatttacaaggacttctacattgccgaagcccctgttatcatctgcgagggaaagacagataacgtgtacttaacccacgcaatcaggagactggtggccgagttccctgatttagccgaaattacaacccagtctaagatccgcctgaaagtcagactgtataaataccagaggtcgagtacggcccgcattttaggcctgcgggacggaggttctagttgcttgactaaattcatcgaaacctataagaaggagacagacaaatttaccgcgcccggccagaaaaacccagtgattatcctgtatgataatgactccggggcgagcaacatacgaagcttgctcaagcaaacgttcaaacttaccgtgggaaccgaacagttcgttcgcgttgttcgaaatatgtatgtcgtgccaaccccactgctcaacggggccaatgaaagtaaaatcgaggattgctttgatgcagcgactaaagcaaccgtcatcggagggaaaactttcaacgataagaacggccttgacacggccaagcattacgggaaaaagatttttgccgaccaggtggtgcgggatagagaagattccataaactttgagggcttcagacaactgctcacaaatctggtggctgtgattcagtcccacactacagctgtatctggtgccagtgccccccagtga

SEQ ID NO: 8197 - RNA, 1737 nt, synthetic construct
  source 1..1737: mol_type = other RNA
atgcccagactggccagtcttcagagtgccgccactctgtctgaccttgcacgcctactgagattcgaaccctccggactcagctacattttgtatagaaagcccgctgcgaagaagtactcaacttttgagattcctaaacgccatggggggaccaggaccataaccgccccagacgatgacttaaagttggtgcaacagcgactgagcgatctgctgcaggactgtgtggatgagattaatacagccaagaatcggaaggacaagctcgcacacgggtttaagcgtaagagatctatcattaccaacgcgagacagcaccgcaaacgccgttgggtcttcaacctggacctagaagattttttcccttgcataaatttcggacgagtgcgcggcttctttctcagagatcacaattttcagcttcagaaacacgttgccacaactatcgctcaaatagcctgccatgctaacgggctgcctcaaggctccccctgttcacccgtgatctcgaaccttatcgcacacgttatggacatgcacctcgtgaggcttagcagcaaggtggggtgcacctactcccggtatgcagatgatttgacattttcaacgaacaagaaggagtttccccctgaaatagcaaagccaagtgcgacagatccacatctgtggttgccaggacctgatgtccaagctttagtcaaccatgcaggtttccgaattaacaactctaagaccaggatgaattaccggaccagccgccaggacgttactggcctggtagtcaatgagaagattaatgtgaggcatgactatcggcacaacgtaagagccatggtgcatcggctattctccaccggggaattcgaactgtggggcataattgacaagggcggcaccaagacactggagaagaggccaggttcactcgacgaattacacggccgattgggctttatcgattccatagaccagttcaataagaaaatcgcgagcgacgtcaactacacacgttatccggccggtagggagagcatgtacagacagtttctcatctaccgtgacttttacgctgccagtaaaccggtcattctgtgtgagggagagactgacaacgtgtacttgactcacgccattaggtccctcgctgcttcatttccagagctggccgagatcgattccaatggcaaacgccatcttaaagtgcggatctacaagtacgcccggagctctacggcaaggatcctcggcctgaaagacggaggaaccggacacctcaaacacttcatcggtacttattcgagggaaaccgatcgcttcaaagccccaggactgaagcagccggtgattgttctctatgacaatgataacggcgctaatcccattcgaagtgccatccgggaagtgtctaagaaggccgtgaaagccacagacgcatatactcatgttgtgcggaatctgtatgcggtgcctacccccctgctgaacaatgctaaagagtctaagattgaggatttctttgacgctgcaatcaaagcaacagttattggggggaaaacgttcgtcgcagccaatgattatgattccacaaaacactacggtaagaaaatcttcgcccaccaggtagtgaggcctaaagctgatactatcaacttcaaaggctttgggcctttactgacgaacatcgctagaatcgtaaaagaccatgctgccgtcgtcggagcaacagctccctga

SEQ ID NO: 8198 - RNA, 1902 nt, synthetic construct
  source 1..1902: mol_type = other RNA
atgactaaactggagcagctaagacgtgccaccacgctgagggaccttgcagagctgctgggtgtgactgctccgggtctagcgtacatcctgtaccacaagcctagggaccagctttacagagcattcgaaatacctaagcggaaaggaggaactcgcagcatttccgccccagcggacgagttgaagactattcaaaaaaagctgtcctctctgttgcaggaatgctgggccgaaataggggatggcaaaaacagtggaaggcacccaggccgcaagggtagggttgctcacggctttctgcccggccgctctatctctaccaatgcacgccaacaccgtcggaagagattcgtctttaatgttgatctagaggacttttttgggagcatcaactttgggcgggtctttggccttctccgccaggacaataattttaaactccagcctcgagtcgcagctgtgatagcaacaattgcctgctttgaaaataaattaccacaaggttccccctgttcgccaatcatctccaatctagtagcaagaatcttagacgcaaggattgccggcttggccgccaaggtaggcgtgaactatagtcgatacgctgacgacttgagtttttcctgcaatggaaggatattccccccggagatagcgaaaaagattgaaggagatgaccactcatgggtggtcggaaaggctcttaactctgtgatcgaaaaaaccgggtatcgggtgaacttgagcaagacccggatgcagtatgaggacagccgccaagaagtcacaggcctggtggttaacagacgggtgaacgttaggtcagagtaccgtcgggctgtcagggctatgggccatagactctttagcacgggagccttcgacgttcccaaggtcgccctgactaagggcaatgacttcccaatgcagtccgtgcagggcaccatcccccaattgcacggtatgatgagctttgtagcgtcaattgatcgtctgcatcgcgaggcagccctcagtagaggagatgcgatcgaggagacaagcgccgagaaactgtatagaaacttcctgtactatcggttcttctataagaacgacgcccctatcattctttgtgaaggcatcacagacaatatctatctgcgctgtgccattcgagcccttagagagagttatcccctcctcgttaagcccaaagcagagcctggggatctcctgattaaattctacaagtaccgaggggctgcagtggatactgtgttaaaactgaaggatgggggcgccgggaacttacagaacttcatggtagcttacaaaaaagcctgtcagttgttcctgggggctggcaaggagaaccctgtcatccttatcgtcgataacgatgagggtgggcggaaggtcatgggagctgcgaaggaactgtcgggcaaggcttacgatggctcccaggcttatctgcatgtgtttggaaacctctatctcattgccacccatccaacagccgtggtggatggtggtcagaaaaagatggctcagaagggcgccagaccctctgactcttgcattgaggaatacttctcttctgaggtgcgctccaccaaactgaatggaaagaccctgacgctgaagaacgattcctccggagtggctcattacggcaaaatggacttcgccaaacacattgttgagaatctcaggggtgcagactcatttagtggattcgccaggttactcgatcgaatcaatctggtggtaaccgcccacgctagcagctcaacagaagccgctgtgtcaggcgcagcggcatcacagctcagcaatggggggcttggggccgcaatacctccaacaggagaaaccattgccgggttcactgagatcgccgaagcagctgattga

SEQ ID NO: 8199 - RNA, 1782 nt, synthetic construct
  source 1..1782: mol_type = other RNA
atgacacagctcgcggcactgaaaaaagcttccagtttgaatgacgtggctgacctgctgggatataaacctgccgctcttgcttatatcctgtatcaaatcagcgacgaaaataagtacacctcattttcaatccccaaacgttccggtggagtgcgcgaaatcaaggcaccaatcgataaggtgaaggccctgcaaaaaaagctcgccaacgtgctggaccattgcctcgacgagctgaacgcggttcatcagtatcgctaccagtcttcccatgctttccgcaagaataagtctatttttaccaacgcctcgaatcacagagccaagcgatgggtctttaacatagacctggaaaacttcttcactgctattaacttcgggagagtgagaggctactttattcgggatcgacagttcgagttggcgccatctatcgccaccatcctggcccagattgcttgttcagggaacagtcttccccaaggctcaccttgctcgcccgtgatttccaatcttatcggacacatactggatgtacatcttgcaaagctggcagcccgcgtagggtgtaggtacaccagatacgcagacgatatcacgtttagcaccaatgaccctcagttccccagcgctatcgccatatgtgatgtggaggatagtcgggtttggcacattggtaacgagttgcagtgcttaatcgaaagtagcggttttgccgtgaacatcaaaaaaacccggatgcagtttaaagatagccgacaagacgtgaccggcctcattgtaaataggaagattaacgtcaagaaggaatatagacggacggtccgagcaatggtcaaccggcttctgactgttggccactttgagaggaaaaggagagtaaagaacaatgcaggcgaatgggtgctggcggatgtcgctggaacagccgaagagctgcacggcatgctaggtttcatcgagtccgttgacaagtacaacagttctctgcctttaaaaaaaggcgggaaaaggaaggaaggtgaaaaaaccggtgtcgatgagaagcggttaacggcttccacaggaaaggataatttgtacaggcgttttctcttgtacaaagagttcttcgcagccccctgccccgtgatcctctgtgaaggcgaaacagataatgtgtatctgatccacgccatacgctctagggccgcagacttcccgatgcttgccaaggtgagcgagacaaacgaaatcactatcactccccgcttatacaagtacgttaaaacaaattccgggagaatgctcgggttagggtccggaggcaccggagatctgggcaaactaataaagaattatctgagcgagctccaccggttcgttaggcctaagcagcagcatcctttcataattctgatagacaacgacgcaggggctattggcggaggaaggccactcgaggtgctgcgtaaaaaaggcgtggatattgaccggaccgcgccttacattttcgtgatggggaatctgtatttggtgccaactccgctacttggaaaggaggagagcatgattgaggatctctttggccagaatgtactagacgagtctctggacgggaaaactttttgccgcaagaacaaggcagataatggcagacacttcggaaaaactgtctttgcccataagatcgttcgaccaaatgctgaccatatcgatttttcaggtttcgacccactcttgattaacatcacagccgtcattgaggacttctataagaagcacccgagagtcgcctga

SEQ ID NO: 8200 - RNA, 1821 nt, synthetic construct
  source 1..1821: mol_type = other RNA
atgacgcagctggcagctctaaaagcatccacttctcttattgatattgctcacctcttgggctacaaaccatcagcactggcttatatcctgtacaagatcgatgacgaagtcaaatacgcgaattttgaaatccctaagcggtccggtggaaagcgcttagtgtccgcccccattccagagctgaaagccctgcaaaggaaactcgcagaattgttggaaaattgcagcatagagcttaccgaggctggaaagcacgatgataagtccagccatgggttcaagaaggggaagagcattttttcgaacgccaaggggcaccggaacaaaagatgggtgttcaatatagacctggagaacttctttggaacgatcaattttggacgggtccgtggctatttcattaaggatcggaacttccagctttctcccacagtggctacgattatagcacagatagcgtgccacaaaaattgtctcccacaaggggcgccatcttctcccgccatcagtaacttgatcgggcatatcctcgatatccatctgagtaaacttgcagcaaagttcggctgtcactacagtcgatatgctgacgacctgactttctcaaccaataaaccttcatttccccatcagatagctagccctgactctattgatcctcaagcctggacaccaggttccgaactgagcaggctgatagataactcccggttcagtatcaactcgctgaaaaccaggatgcagtatcgagattcaagacaggacgtgactggtctggtcgttaataagaagcttaacgttaaagccgagtacaggcgtttagtcagagcaatggttaatcgcctgttaaccttgggacacttcgagagagagaagcgcctgtccgacgaaaaagggaatctggtgttgaccaaggtgccaggcaaaacagatgagctgcatggcatgttaggtttcattgacagcgtggaccgctataacctcaacctatcaattccggccggcgggaaagtgcatgacgagaagaagaaagccgccgctgacgagaagaataccagacctggcctgacaggcaaggaccacctctataggcgattccttatctacaaggaattctttgccccctccaggcctgtaatcctgtgcgaaggcgatacagacaacatttacctcatccatgctattaggtcactgtctgccaagtatcctttgctcgccaaactgcagaatgagaaactagagatcctacccagaatctacaagtacgttgatacctccactggccggattctcggcctaaattctggcgggactggcgatctcggaaagctgattagaagctatcttgcagagatcaaccgatttatccgcccagccaatcagcacccgttcatcctcctggtcgataacgacaagggagcaataggtgggggacgtccccccgacgtggtcaaaaaagtggtgggaaaggagatggaccgcagtgccccattcttgtacgtagccgggaacttatacctggtgcctacacctctcctggacggaaaattggaaagcatgatcgaggacttttttgacgataagacccgctctagagacatcgatggtaaagtttttaaccccgcgaataaagccgataacagtaagtactttggcaagaaagtcttcgcccacaaagtgatccggcccaacgcggaagacattgacttttcaaggttcagctcccttctggataatattactctggctctcgaagatttttataagaagcatccgcacagcgctacagtagacaaaccagcaaagaaggctgcctga

SEQ ID NO: 8201 - RNA, 1818 nt, synthetic construct
  source 1..1818: mol_type = other RNA
atgacacagctcgcggccctgaaagcagcgagctccctccacgggattgcccacttactcggatttaagccagctgccctagcctacattttgtacaagcttaatgattcacagcgatacaagcagtttgaaatccctaaacggtcgggaggcaagagaacaataaaagctccgaccgcagagctcaagcttcttcagcggaaaatggcatctctgctcgagaactgtatttcagaaatcaacgtggccaataagagggccgacctgttcgctcatggattcaaaaaaggtcggtcgattttctccaatgcgaggccccataggaacaggcagtgggtgttcaatattgacctggagaatttcttcggcagtattaactttgggcgtgttagggggtttttcctgaaggacagagacttcgccttgcaccagggagccgccacgattatagcccaggtggcctgtgtggacaacgcactacctcaaggtagcccctgcagccccataataagtaatttgatcggccaccttctcgatgtgcacctcgccaaacttgccgcgagctgtggctgccactatagtcggtatgcagacgatctgaccttttccacaaatgccccgcaatttccatcccgcatcgctacacgaactcgcggtgccgccggtgatgaatggatgccgggcgcagagctgcaccgaattatccagcacgcccgctttgccatcaatccacaaaaaactcggatgcagttcaaggactccagacaggatgtgaccggcctagtggtgaataaaaaactcaacgtgaagacagaatacagacggtctgttagagcgatggtacaccgcctgcttacccatggacacttcgagagaactaagcgggttgatgatggtgcgggaaatcacgtgctggacgctgtcaagggcaccaccgctgaattacatggcatgctggggttcatcgacagcgtcgagcactataacaggaacctggttctgcctaagggaggtaagccaaaagtcgagaaaaaaaaaaaggggactgagcccaacaaaccccgcgtcgctttgactgggaaggaggtactgtatagacggtttctgctgtacaaagagtttttcgctacatcaaatcccgtactgatctgcgaaggcgaaactgacaatatctacctggtgcatgcaattagatccttggcaacacactttcctcttctggctaccgtggtcaagcccggcgaaatcaagattataccccgcatctttaagtatgttgaaaccagcactggccgtatcctgggtttaggcagcggagggacaggcgacctaggaaacttaattaggcagtatgacaaggagattaagcgcttcgttaggcctgccactcagcatccatttatcctcgtcgtggataatgatgcaggagctgtgggcgcagggcgacctttacaggcatctaaacaagtaacggggttggacgttaaccgtcatgctcccttcaccaacgtgtgcggaaacctgtatctcgtgccaaccccatttctggctggcgccgcccagtctatgatcgaagattttttcacgaaggaaaccttggatgagacaatcgatgggaagtctttctgtgctagtaacaaacaagactcagctaagcagtacggcaaaaaggtctttgcccataaggtcgtgaaagtcaaggctgacacaattgactttaaggggttcttcaagctcctggagaacatcacgctggccatagaggatttctacaaaaaacatccttccgcacctatcacctctgctcaagcaatctga

SEQ ID NO: 8202 - RNA, 1713 nt, synthetic construct
  source 1..1713: mol_type = other RNA
atgagccagctcatcgctctgaagagctgcataaatctgagcgatgtagcggtgctactcggatataaaccttctacactgagttacctcctatacaaaatcggcgaggaaagcaaatacagctctttcgagatccccaagaagggcggggggactagacgcattgaagccccccaaaaagaactgaagctgttgcagaggaaagtggcagatttacttcagaactgcttcgagtccgctgacttgacatccccaaagtataagagcaatcccgtctcctatggattcatcagaggcctcagcataattgacaatgctcaaaatcacagatcacaacgattcgtattcaacatagacattcaagacttctttgggtctattaatttcggcagggtgaggggttttttcataaaagatcgcgacttttcacttcagccccaggttgccaccgtcatcgcacagattgcctgttttaagaacagattgccccaaggttcaccatgttccccggtgatatccaacctggtgggacacatcctagatatgcaccttattaaactggccgcgagaacaggctgccggtatagtagatatgcagacgacctcactttcagtacatcaaagcgggactttccacggcaggtcgccttctacgacgaagagaaggggctttggcacgtaggcgacgagttaaaacgcctgctggagctgtcaggcttcacacttaacagcggcaaaactcgaatgcagaaccgggactctcgccaacaggtgactgggctggttgtgaataaacgagtgaacgtcagtaaagagtacaggaagaccacgagagcaatggttcaccgcttgtttaccaaggggagtttcttttttaccgacgaatccaatttagaagtgaaggctcagaaggaaagttccgatatcggacggctccatggaatgctgggacacatttaccacgttgacaccaaatgtaagacaaagatcgagtcttccaccaatcctcctcagaaaaacgcgagcacctatcggaggtttttgatttataaggaactgtacgcaacgaacaaaccaattatcatctgtgagggtaaaaccgatccagtctacctggtccatgctatccgaagcctgcatagggacttcccgatgctcgcttacagggatgccgagaaccagattcggctgtctgtgcgcctgctgaagtacgctgataaatcgatggcatcgatacttggtcttaacggcggggtaggagatttgcggacttttatagattcgtataggtctgacatcaagcgtttcaatgcccctgggaagtttcatcctgtgatcatcttaatcgataacgacgacggcgccaagcctatcctgtccattgtcaagtcaattaatcccaattccacgtttgatcgcgatagcttttcacatatcgtcggcaatctctacgtggttaaaactccattgctgggtagcgaaaagtcttgcatcgaggactttttcgatggcgatctgaaatcaacaatgatcgatggaaagcagttttctctcgagaaagacgccaacccggaacactatttcgggaaggttgtgttcgcccataaggtggtgcgtccccaggccgacaagatcgatttctccaactttagacacattctcaagtctatgcaggacattattaccgagttcagtagtcagaaacgtatttga

SEQ ID NO: 8203 - RNA, 1758 nt, synthetic construct
  source 1..1758: mol_type = other RNA
atgtcccagctggctttgctcacttccgccacagaactacaccaggtcgcaagtctgttgaatttcaaggccagcgcactgtcttatgtcttatataaactgcccgccgcccagaaatacacgaccttccagataccaaaaagaagtggaggaatgcgcacaatccaggcgccttgtcctcagttaaagatcctccagcataacctttccaatacactacaaaactgcctggaggagattaatgccagagaaaaacgtaagaacagctttagcaacgggtttacccgaaacagatctatcgtggacaatgccgctccacaccgcaccaaacggttcgtttttaatatcgaccttcgcaacttctttgggacaattaatttcggacgagtgcgtggtttccttatcaaagacaggaattttcggcttgagccaaagatcgcaacaatcctcgctcagattgcatgccacaacaacgaactgccccagggctcaccgtgtagtcccgtaatttccaatttaatcggtcacgtgctcgatgtgcacctggttgggcttgcaaggaggtccggctgtacctactccagatacgccgacgatatcacattctctaccaacaagccagaatttccggcagatatcgccactcggactgaaccctcccatcagtgggagataggggaggagctcaaaaggctgattaagttgagtggattcgatgtcaatagcgagaagacccggatgcaatattgtgactccaggcaagaagtcactggcctccttgtcaacaaaaaggtgaacgttagacccgagtacagacgcaccgtgcgcgccatggtgcatcgtctgttcaccactggtgagtttcacattcctgaagtggtcgacgatgggacaggcaaggcgagcatcacgatgactcccggcgaaatgtctaagctgcatggcatgctgggcttcgtagaccagatcgatctgtataacaagaagaaccggccttcaggctcaaataacgataatttgtcgagcaaggagtctatttttcgagacttcctcttctaccgagagttctactcatgcgataaaccggtactgctgtgcgaggggaagactgataatgtttacctcaaacacgcaatacatgcattggctgctcattttcctagcctggcgagcgtgaacgccaaaggagaggttacacgcaatatacggatctttaagtataccgactccagtacaggtagaattctggggatcaacggagggacagcccccctgtcaggctttatgaggacctacgcggacgcaacttctcggtttaaggccccaggcgaaaataatcccctaatcctggtgctcgacaatgacagcggcgtgaaaggaaaaggtaagatttttaatgctgtgaagcagatttgcaaagtggaaatgaccggtgctgagaagttcgtacatgttgccgggaacatgtatgtgactctgacgccattacttccaggcggagctgactctatgatggaagacctgtttgatttgaacaccaaggccacgataattgacgggaagagtttcaatcctaataacaacctcgattcagcctcacactatggaaagcacgtgttcgcccaaaaaattatcgccgcaaaccctcagtctgtcgactttggaggcttcacacaattgctggataatatctcggctgtgattgatgctcacaaaatcaaagtcagcgagaggcagaccgcgaacgctataaactga

SEQ ID NO: 8204 - RNA, 1752 nt, synthetic construct
  source 1..1752: mol_type = other RNA
atgccgaatttggcgaacctcaaagcagcagcctccaggcaagacctggccgaattattgggggtcaaggcaggaatgctgagctatgctatttacaaaatccctgaggcgaaccggtactcgagatttgagatcccgaaacgccatggggggatcagagagatccttgccccaactcccgagcttaaattaattcagcgccgtctttcagttctgctccaggactgtgccgcggaaattaacagcgcacacggccatgcggaagatggcactcggttcggcatagctcacggttttaaaaggcatcacaacattatgaccaatgggagggttcatgtcacacgaaggttcgtgtttaacgtggacctacacgattttttcggaaccatcaatttcggtagagtgcgcggcttcttcctgaaggataaaaatttcgccctgcacgcagatgtagctaccgtgatcgctcagatcgcctgcttcgataacaaactgccacagggttctccttgctctcccgtggtgtccaatcttttagcccacagcctcgatattcagctggtgaggctggccgccaagaacggagtcagttatacgcgatatgcagatgatctgacttttagtactaataagccaagcttccccgcagagatcgcggctcctggtgatacgcattcctggaaacccggagccgacctcgagaggatagtggccaattccgggttttccttcaatccctcaaaaactaggctgcaatatcgtgattcacgccaggaggtcaccggcctgaccgtcaacagaaaggtgaatgtgcctgctacttatcggtacacagtgcgggccatggttgattgtctgtttagaacaggcaagttccagttcatatacaagaagaaggatgagcagggaaaggttgttctcgagctctcacatgctggacggaacgagcagctccacggtatgctgagttatattgaccaagtggacctgtttaaccagaaggtctgtaaggaaaacggacgggagcctgaatctaccaccggacgcgtggagctttttcgtcggtttctgtacttcgacacattctatgccgctcccgagcccattgttgtatgcgaaggaaagacagacaatgtctacctgaagtgtgccatcaaaagtctcgtggctaaataccccaaattggtggccgcagggagccctccaaagctgaaactcaggttctttaagtacgcagagacacgcacgggccaagtgaccgatttgaccgggggcgtaggcgggatctgcaaactcttgaagtcttacgacgaagatgttaaagaagtctttaaggcaccagtcagtaagttccctgttatcgtgctgattgacaacgacagcggagcacatgggatataccaggtgatagctggcatcaataaaaagccaaagccacagggcctggccgatttcattcacgtaactagcaacttgtatgtcgtgcccacaccgtttggcccttccaaatctcacacagccatcgaagactttttcgacaaaccaacccttgaaacaaagttaaatgggaaaacgttcagcagagagtccaagctggacgaaacctcagagtatggcaaggctgcgtttgctcgagacgtggtggctaagaacgccggtactattgatttttctggctttcaagccattctagacagagtcatcaaggtactagacgactacgaaatccgattcaagaatgccaaaaaatga

SEQ ID NO: 8205 - RNA, 1857 nt, synthetic construct
  source 1..1857: mol_type = other RNA
atggcatgcgagatcaaggtacctggatttgcccccagaatatcttccgctctctccgaactgcgccgtttgcggaagagtatccgggagcccttgcctctcagacacatgtcttccttgcagaagctcaaggctgcggccgctagaagagatctagcgatcattttagacgtgtcacccaggaacctcgcctacattctctataagacagcccctgacacgaagtacacccggtttactatccccaagaggcacgggggcgagcgtgagatactcgctccaagcttaggacttaagctagttcagcaaaagcttgcatcagtactgcaggattgttctgatgagattgcccttagccatgtcaagcccgggaacggaaggcggcatggcattgcgcacggcttcaaacgccatcacacaataatgactaatggacgcgtacacgtgacaagacgttttgtgttcaacgcggacctccacgatttctttggcacaatcaatttcggtcgtgttcggggctttttcattaaagataggaatttcgccctgcatccggatgtcgccacggtgatagcccagatcgcctgcttcgaaaataaactgcctcagggatctccctgcagccccgtgattagtaatcttctcgcccacccaatggatattctattatcctcactcgccgctaagcacagcgcttcatacactagatacgccgacgatcttaccttcagtaccaataaccccacatttccaccggaaatcgccgcgctcaacggtgaccacacgtgggttccaggggccgagcttgaccgattggtgagccgctctggcttcgcatttaatccgagtaagaccagactgcagtacagagactcccggcaggaagtgaccgggctgactgtgaaccaaaaagtcaatgtcccagccacctacaggtatactgtacgcgctatggcccactcgctgtttacaacaggcgccttcgagtttgtgtacaaaaagagggatacaaacggtaccatcatcctggaaaatcggaaagctggcgaaaacaagcagctgctgggtatgctgagctatattgaccatgtggaccgattcaatcataagctggcaatcgagaacggacgagaatttgagtctaccgctgggagagtggccctgtttaggcgatttctgtacttcgatctgttctatggactaagagagcccattatcgtgtgtgaaggtaaaaccgacaatgtttacctgcggtgcgcaatgaaggctctgagcgccacttatccttcattggtcgaggcaggggcaccccctaagctgaaggtccgcttttacaaatatgcagaaacccgcactggggaaattacagagttgacaggcggagtcggtggcatctgtaaactcttgaaacattaccatacggatgtgcaacattgtttcaaagctcctgcaccgaggttcccagtgatcgttcttattgataacgataaaggtgctcacagtgtgtatgaggctatcgccgggatcactaaaaagaaaaagccacaaggcttggcagattttatccacgttacgagcaacctgtatgtcgtgcctacccctcgaggaccaaacaactccgagacagccatagaagatttctttgacgaggcgactctgaaggaagagttaaatgggcgcaaatttgacaggtccaaccataccgacgacaagccagggttttatggcaaaggccacttcgctagggacgtcgttgcaaagaaagctggaaccattaatttcgatggcttcactgcaatcctggaccggataattaaggtgaccgacgactaccaggcaaagctggccaaaccttga

SEQ ID NO: 8206 - RNA, 1746 nt, synthetic construct
  source 1..1746: mol_type = other RNA
atgcgtatgattaatctgactaacctcaagagcacaacctcccggcgagacttatcaaagttgctggacgtgaaacccggcatgctctccttcgcaatctacaaaaaccccgaggcggtgcggtatcgaagatttgagatcccaaaacggcacggcggcactagagagattttggcccccgccagtgagctgaagctcctgcagcagaggctctcggtgctgttgcaggattgtgttgcggagatcaccgctgcacgcggatttgctgaagacggggctcacttcggtatcgcacacggatttaagagatatcataccatcatgaccaacggcagagtgcatgtcacccgcagatttgtttttaatgtcgaccttcacgatttcttcggcaccatcaacttcgggcgcgtgaggggattttttttgaaagatcggaatttcgcgctccaccccgaagttgccactgcgatcgcacagatcgcttgctttgaaaacaagctgcctcagggctcaccgtgttcaccggtgatttctaacctgctagctcatagcctggacattcaactggccaggctcgcagcaagacatggcgcgtcctataccaggtacgctgatgatctgactttctctaccaataagcctgcattccctgccgaaatcggtgtgcttgacgatgctcataactgcagtcccggagccgagctcgagcgcattgtaacccgatccgggttcagctttaacccagccaagacaaggctgcagtatcgggattctaggcaagaagttacggggctgactgtgaatcggaaagttaatgtgccagcaagctaccggtataccgtcagagccatggtcgataggttatttaaaaccggtgccttcgagttcatttataagaaaaaagacgctcaaggcaatgtggtcctcgagcgccgagtcgcagccaaaaacggacagcttctcggaatgctgtcatacatcgaccaagtagaccggttcaatcagaagatctgcgaaaccaacggacgtgagcctgaaagcacggccgggagggtggaactgtttagacgattcctgtactttgacactttctacgccactcgccagccggttatagtctgtgaaggaaaaacggacaacgtttacttaagatgcgctattaaaagcctagctgccaagtacccaaatctggttacccccggagtgcagcctaagctcaacgtgaggtttttcaaatacacagaaacacgtactggtcaggtgatggatttgactggcggggtgggcgggatctgtaagctgctgaagagttactccgaagatatcgagggtatatttcgcgcccctgcgccaaccttcccagtaatagtgttgattgataatgacaagggtgcccatggagtgtatgaagtgattgccggcattacaaaaaagccaaagccccttgggctagctgactttatccacgtcacaagtaatctttacgtcgtgcctacacctttcggccccaagaaggcccacacagctattgaggactttttcgacgccttcacactggagacagagcttaacggcaagaaattcaacagaaacaataagctggacgactctaaggagtatgggaaggccgcattcgcccgcgatgtagtggctaagaatgcagcaacgatagactttacaaaatttcacgccatattcgatcgggtcatgaaagtattagatgattatgaggctcgtaggaaatga

SEQ ID NO: 8207 - RNA, 1743 nt, synthetic construct
  source 1..1743: mol_type = other RNA
atgtcgagtttgcaagccctgaaagcagcaagcgcccgcagagatttggccgacctgctcggcgttaaacccgggatgctgacctacgctatatacattaccccggaggctgatcgctatacaaggtctaccatccctaaaaaacatggtggggaccgcgaaatctgcgctcccaataacgaccttaagctaatccagcgacggctgagtacacttctgcaagactgcctggatgagattaatgtggcaagaggccataaagaagatcgcgtgagattcggaattgcgcatgggttcaaacggaatcataccataatgaccaatggcagagcccacattacgaggagatttgtctttaacgccgacctgcacgatttcttcggaactatcaactttgggcgcgtaaggggattcttcttgaaggataaaaatttctccctccagcctgaagtggccacaaccatcgcccaaatcgcctgttttgagaataagttgccacaaggatccccctgttcacctatcattagcaatttcttagctcacccccttgatattcgactcgtgcgactggcagcgaagcacggggtcacttacacgaggtatgccgatgacttgacttttagcaccaataaacccgcttttcccgtcgagatcgcgtctcccatcgacagtcacgggtggattccgggtccagagttagaatgtgttgttaccgagtctggcttttccttcaacccatccaaaacacgcctacagtatcgggatagccgtcaggaagtgaccggcttgacggtaaatcgaaaggttaacgtgcctgccacctaccgttacaccgtaagagcaatggtcaacactttattcaagacaggttcctttgagttcatctatcgcaagcggggggacgacggcaaggtaacaagcgagaaccgagagccgggaaccatgcctcagctgctgggcatgctgtcatacattgatcaggtggacctctttaacgagaagctctgcaaggataatgacagagagcctcagccagtggtgggaaggactgcactgtttcggaggtttctgtacttcgatactttctttagcgctcagaggccaactattgtatgcgaaggtaagacagacaatgtgtatatgaggtgcgcgatcaagtcactggccgctgcgtacccaaggctgatcggtggcgaaaaactactcgtcagattcttcaagtacaccgagtctcggaccgggcgggttatggatctcaccggtggcgtcggaggcatttgtaacctccttaaatcatatcatgaggaccttaagttctatttcaaggcccctatcagtaaattccccgtgatcgtgctgattgacaacgattctggcgctcactcaatatatgaagctgtggccggaataacaaagaagaaaaagcctcagggcgttgcagactttatttatgtgacggggaatgtgtacatagttccaacacccttcggcccaggaaagtccttcactgctatcgaggacttctttgacgcaaaaacgctcgccacagaactgaactccaaaaaattcaaccgcaagaacaagaaggaggacagtgaagacttttactctaaagcagcttttgcccgtgatgtggtggccaaaggggccagcactatagactttggaaactttaaggtcatccttgatagaattgaaaaggtcctggatgactacgcagtccggcgtaagacaatgacttga

SEQ ID NO: 8208 - RNA, 1788 nt, synthetic construct
  source 1..1788: mol_type = other RNA
atgcgtcgtagtatccgggagtcctttttgctgcccatcaaaatgagctccctcaaagatcttaaagccgcaacggctaggcgagatttggcggcactcctacacgtaaagcccggaatgctcacctacgccatctataagtctcctgaggccaatcgctaccgaaaattcgagattaaaaagcgccacggaggcgaaagggagatcctggcgcccgaaaacggcttaaaactgctccagaggcgcctctctaccctgcttcaggactgcatagccgagattaattctttgcacggccatgtggaagacgaaggacggttcgggatcgcccacggcttcaagagaaaccacacaattatgaccaacgggcgggctcatgtagcacggaggtatgttttcaacgtggacctgcacgattttttcgggacaatcaactttggcagagttcgcggcttttttctgaaagaccgaaatttcgcactgcatcctgaggtggccaccgtgatcgctcagattgcctgttttgagaacaaactaccgcaaggcagcccctgttctcccgtgatatctaatctgattgcccatagcctggatattcaccttgttcgcttagcagcaaagcatggtgccacgtatactcgatacgctgatgacctcacattcagtacaaatagacctgagttccccccagagatcgcgaccctgaaggacactcactcatggatcccaggcgtggatttggaacggatagtcacccgaaatggcttctcatttaacccttccaagacacggctgcagtacagagacagcagacaagaagttaccggtttgaccgtgaaccgcaaagtgaacgtacctgcaacatataggtatacagtgcgggccatggtcgacaagctcttcaagactggccagtttgaatttgtccacaaaaagagggatgctcagggtaatgtggtgtttgaaaataggtgcgtgggggagaacaaacagctacttggtatgctgtcgtatattgaccaggtcgatcgcttcaatcataagttatgtaccgacaatggaagggagccagcttccacggaaggacgcatcgcactctttcggagattcttatacttcgatacattctacgcagccagagaaccgataatagtctgtgaaggaaagacggacaatgtgtacctgcggtgcgctatcaagtccctggccacagaatacccaaggttgatcgataagggaacccctccaaagcttgaggtaagattctttaagcatgccgaaactagaacaggccacattgccgacctcactgggggtgtggggggtatctgcaaactgctgaaaaactaccatgaggatgtcaccgagtggttcaaggccccggtatccaagttcccagtcatcgttctgatcgataacgataatggcgcccactcaatatacgaggctattgccggcattactaaaaagcccaaacctgaagggagggctgacttcatccacgtcacctcaaatctgtatgtggttccaaccccctttgggcctaagaagaaacagactgctattgaggattttttcgacgagcataccctggcgactcaactgaacggaaaaacttttaaccgcagtaacaagagcgacgacagtgacaagttttacggaaaaggggcattcgcgcgtgacgtggtcgccaaacaggctaatacaattgacttcactaagtttcgtgctattcttgatagagttatgaaagtgctcgatcactatgaggagagccaaaagaagtga

SEQ ID NO: 8209 - RNA, 1749 nt, synthetic construct
  source 1..1749: mol_type = other RNA
atgccgtctctcaagcagctacaagccacaacatcattgcgggagttagcaccgctgctcgacataaaacctggcatgctgtcgtacctcctttacaagaagcctaaactggatctctataagaagttcaccattcccaaacgtcatggcggagtgcgtgaaatcaatgcaccagaaggggatttaaaattgctccagtaccggctgtccctccttctgcagaaatgtatcgtcgaaatcaatgcggagcacggacacgctgaagatgacgagcatttgggtattgctcacggtttcaagcgttaccacagtataatgacaaatgggcgggctcacgtcactagacggtacgtctttaacgtggacttgcacgatttctttggctccatgaattttggacgcgtccgggcgttcttcttgaaaaacaacaacttcaagctgcacgccaatgtggcaacagttatcgctcagatagcctgtcatgagaacaagctgccacagggatctccatgctcccctgtgatttcaaatctaattggccatacaatggacattcccctggctaggttagccagagacgagggcgccacctataccaggtacgccgatgatctgaccttcagcacaaacaatccttctttttcacataagatcgcagttcagggctgtgatcaaaaatggctgcccggggaaagtctgcagagaattgtaaccaagtccggattctcctttaacgcgcaaaagacccgaatgcagtacagagactctcggcaagaggtgaccgggctgactgtgaatcgcaaagtcaatgttcccgctacttaccgctataaggtaaggagcatggttgacaaactctttaaaactggggagtttgaattcatctacaagaaactggacactttgggtaaagaggtggccttcaattatcagggcaaaaggaagcagctgttagggatgctgagctacatcgaccaggtagatcgatttaacagtaaactttgcgagaagaatggcctcgaacctcaccccacaactggacgcacaactctgttcagacggttcctttattttgatgcttttttcgcaccagtcgagcccataatcgtgtgcgaaggaaagacagacaacgtgtacctgcgctgcgcaatcaaaaatcttgccgccgcctacccgaagctggttgtcgctggtacaaagcccttgcttaaagtgaggtttctaaaatatgcggagagacgaacgtcacaaataacggaactcactggtggggttggcggggtctgtaacctgctgaaacattatcatgatgacgtgagaaccaagttcaaggcaccagctcctaagcaccctgtgatcgtgttcattgacaatgatagcggcgccgactctatttacggagcaattgcagggatcacgaaacagcccaaacccgccggccgagcaagctttatccacgtaatcgctaatctctatgtagttccaactccacttggaccaaagaacaagaagaccgctatcgaggacttctttgacaagacgaccctcgcaaccaaactgagcgataagaccttcagtagggataacaagatggagaacctgaaacattatggcaaggcggccttcgccatcaacgtgattgccaagaacgccaataccgtgaactttaataaatttgcccctctcctggatcgcatggtggccgtcattgacgactatgctaagaggctaaaggtgcctttaaactga

SEQ ID NO: 8210 - RNA, 1743 nt, synthetic construct
  source 1..1743: mol_type = other RNA
atgtctaatttgaaacagctccaggatgcaacatctctcagacagctggcgaagctcttgaacatccagttcggaatgctgtcctacctcctgttcaagaaacccaaatccaagctctacaagaagtttgacatccctaagcgtcacggaggaatgcgggagattcacgcacccgagagggacttaaagctgttacagtatcgcctgagcgtgctgctgcagaagtgtgctgatgaaatcaaggcgagccatggtcatgtagaagacgaaaaacattgggggatcgcccacgggttcaaaagacaccacagtattatgaccaatggtcgggcccacaccgcacggagatttgtgtttaacgtcgacctccatgacttcttcggctcccttaatttcgggcgcgtgcgggggttcttcatcaaggacaagaacttcaagcttcacgagagcgtcgctactggcatcgcacagattgcttgttacgagaacaaactgccacaaggctcaccctgctcgccagtgatgagtaacttgatcggccacactatggatataccgcttgcgcaactggcagcctcagagggagtcacctacactagatatgctgatgatcttaccttttctacgaacaattcttcctttcctgaaaagatcgcctacaaaagcggcaatcatacatgggagctgggaagacagctgctgcgtatcgtgcaaaggtccggcttctccttcaacgataagaagacacgaatgcagttacaagacagtcgacaggaggttacaggtctgaccgtcaataggaaagtaaatgtaacagctacctataggtatacagtgcgaagtatggcaaacgccctatttaataccgggaacttcgagtttatctacaaaaaactcgacgactctggagtggagcaggtgtatcgctccaagggaaagcccaagcagctaattgggatgctgagctatattgatcaagtcgatcaatttaacaggaaattgtgggtggagaatggcctagagcctgaccccacactcggtcggataaagctgtttcgcagagttttatacttcgacaagttctacgcactaaaccagcccttgattgtgtgtgaaggtgtcaccgacaacgtatacctgcggtgcgcgataaagagtctggcagctttgtatcctaaaattgtggctgcgggcgcccccccaaaacctatggtgggatttctcaagtatgccgatagacgcacttcagagattacacagctgactggcggagttggtggcatttgcaagctgctgaaaaactatcatgaagatctcggtacccgtttcagggcacctgcccccaaacatccagtcatcgtcctgatagacaatgatggcggcgccgacagcgtgtatggagctattgccggcatcacgaaaaaaccaaagccgaataagaaagcaagctcaatccacgtgactggcaacctttacgtcgttcctaccccacagcttcctggattatctaaaacagccatcgaggactttttcgacgccccaacccttgccactgtggtgaatgggcgcactttctcaaaggaaaataattacgatgggagcaaacactacgggaaggccacgtttgctcatgaagttgttgctaaaaacgccaacgtgatcgattttaaaaattttgctccgctcctggaaaggattgttgccgtaatagatgcctacggggctaagttgaaggccaagtga

SEQ ID NO: 8211 - RNA, 1758 nt, synthetic construct
  source 1..1758: mol_type = other RNA
atgagcatcctgaaaaaactgcaggaagctaagacccggggacaagttgccgccctgctcgatgtcaagccagccatgctgagttttatcctgtacaagaaacccaaggcaactctgtatacaaagttttctatccccaaaaagcacgggggaacccgtgatattctggccccagagggaaacttgaagttgcttcaacatagactctgccaggttctccaggactcactggacgagattaatgtggccaacggccatggggaatctagagaacggcagggagttgctcatggatttaagagactgcatacgatcatgacaaacggccgaccccacgttgcaaggaggtacgtatttaatgtggatttgcatgacttcttcggcagcattaacttcggtcgtgtgagggggttcttcattaagaacaagaactttctccttcacgaggacgtggctaccgtgatcgcccaaattgcatgtcacgagaacaaacttccacagggctcgccatgttcccccgtgattagcaatctgatcagccactccctagacatgaaacttgttcagctcgcggctcgtgtgggcgcaacatacactaggtatgccgacgacttaactttctctactaacaaccccgattttccacagtatattgctttacgcaaaggaacccacgaatgggtggctggtcggggcctagagaaaatcgtgatgaaagaaggctttagcctgaatccttccaagacaaggatgcagtatcgagatagccgccaggaggttaccggtctgactgtgaatcgcaaagtgaattcccctgctgcttaccggctcaccgtgcgagccatggtgaacagcctcttcaaaacgggcctgttcgagcacgtacgcaaaaagaagggcgccgcaggggggatcagtgtcacaaaatttgctggggaaaagaagcaaatcctcgggatgctgagccacatagaccaggtagacctgttcaatcggcgacttcgggagaagaatggtttagagcctcacaacacctcaggcagggtggccctgttcagaagattcctgtacttcgagaacttttatgcgctagacgcgcctctgatcgtttgcgagggtaaaactgataatgtctatctgaagtgcgctattaagtctctggcgtcaagttaccctaaacttgccacctccgattccctgccgaaactgaagattcgcttcttcaaatactcagaaagacgcgcaggagacgtcattgggttaagtgggggcgtcgggggcatctgtaaattgctcaaaaactaccatgaggacgttagggaaaaattcaaagcaccatctcccaagcatccagtcatagtcttaatagataacgatagcggggccaattctgtgtacgaagccatagcaggaataaccaagaagcctaagccggctggtatggcagactttatccatgtgacgggaaacctttacgtggtgcctactcccttgggaagaggtggcaagaaaaccgccatcgaggatttttttgatgacaagacactcagtgtagcactcaatggcaagacattttcgcgggacaaaaatatcgatgaaacagtccactatggaaaagtcccctttgccatcaatgtggtcgccaagaatgccgataccatcgacttcactaagttcaagaagattttggatagggtagtgcgcgtcattgacgattatgcgataaagatgttggcttcctctcactccgcctcatga

SEQ ID NO: 8212 - RNA, 1749 nt, synthetic construct
  source 1..1749: mol_type = other RNA
atgtcccagctaaagcagctcaaagctgccactacactctcggacgtggccaggctcctggaggtcaaacccggaatgctgagcttcgtgctgtacaagaagccaaaagccgccctgtacagcaagttcgacattcccaaaaggcatggtggcactcgggagatttgggccccggataaggatctgaagttagtgcagcaccgtttggccaacctgttacagaactgtgtcgaagaaatcaattcctctcggggccatgtagaggacggcaaacggcatggggtggcacacggattcaagcgaaaacatacgatcatgaccaacgctcgagtgcacgtgactcgccggtatgtcttcaacgttgacctacacgatttctttggaacgatcaattttggacgggtgcgaggattttttctcaaagataagaatttcgcgcttcacgagaaggtggccaccgtgattgctcaaatcgcgtgtcatgaaaataaactgcctcagggctctccttgctccccagtgatcagtaacctgattgggcatgtcatggacattatgcttgtccgtctagcatcagccactggctgctcctatagtcgctacgccgacgatcttacattctcttctaacaagtccaagttcagcagcagggtagcaagacaggacgatgcagataaagacttgtggctgccagggcaaggtctgaagcggcttgtggcaaaagcagggttctctttcaacgataaaaagaccaggatgcagtacagggacagtagacaagacgtaaccggattagttgtgaacaggaaggttaatgtccccgctacatatagatacacagtcagagccatggtcgaccacgcactgaagactggagctttcgaacgcatctttaaaaaactggacgctgccggagtggagacaacttttaagcagccaggcaccaatcggcagctgatagggatgctcagctacattgaccaggtcgatttatacaatcgaaaactcagagaggacaacgggctggaaccacatgatacatccggtagaactgaacaatttcgcagatttctctactttgatgcattccacgctatcggatcgcctgtgattgtgtgtgaaggaccgactgacaacatatatctgagacacgctattaagcggcttgcgcccaagtatcctatgcttgcggccggcacccctcccaagttgttgctccgtctgttcaaatatggtcagcgccgaacctctgagatcacgcaactgaccgggggcgtgggtggtttgtgccatctcatgaagcactaccacagcgattttataaacaagatcaaagcctccgccccaaaatatccagtcatcgtgctcgttgacaatgatgcaggggcaaaagacatctacggggctatttcaggcattacaaagaaacctaggcccaccgggagggagcagtttatacacgtggtaggcaatatgtatgttgtacccacacctcttggcgctgggggcgcaaagacggctatcgaggattttttcgacgcgaagaccctggcagaaaccctgggtaccaaaacattttcaagggctcccaagttcgacgatacaaagcactttggcaaagccgcctttgcccgcgagatcgtggataaaaaggctgatagtatcgacttctcaggattcagcgccatattggacggcgttgtggccgtcgttgctgattacgccaagcgccatccgcctgttccctga

SEQ ID NO: 8213 - RNA, 1749 nt, synthetic construct
  source 1..1749: mol_type = other RNA
atgtcacaactgacccggttgaaagccgccacgtcactttctgatgtggcccgccttctggaggttaagcccgggatgttgagcttcctgctttataagaaaccgaaggccgctctctacgccaagttcagtattcccaaaagacacggcggtacccgagaaatctgggctcccgacaaagatctgaaactcgtgcagcataggttggccaatcttttgcagaattgtgttgacgagattaacgcggctagaggacatgctgaggacgacaaaaggcatggcatagcacacggctttaagcgtaagcacactatcatgaccaatgcacgggtgcatgtgaccaggcggtacgtgttcaatgtcgatctacatgactttttcggtaccatcaatttcgggcgtgttagggggttttttctgaaagataagaatttcaccctgcatgagcgagtggctactgtaattgcgcagattgcatgtcacgataacaaactgccccaggggagcccatgttctcctgtgatatcaaatctgataggccacatgatggatattctcctggtgaggttggcatccgctacgggatgcagttatagtcggtatgcggacgacctgactttctcatccaaccggagcaacttttccccaagggttgctcggcaagacgatgacgataaagatttatggctccctggacagggcctcaagaggctggtggctaaagccggatttagctttaacgaccgcaagactcgtatgcagtaccgcgattctcgtcaggacgtgacaggcctggttgttaaccgcaaagtgaatgtccccgccacttacagacacaccgtaagggcaatggtcgaccacgccatcaaaacaggaagcttcgagagaatctttaaaaaagtggatgccgcaggaatcgagactgcattccggcagccaggcacaaatcgccagcttattggaatgttgagttatatagatcaggtagatctgtttaaccgcaaactgagagaggaccatgggctggaaccacataacaccagcgggcgaacagaactcttcagacgattcctgtatttcgactccttccacgccatcgaatctcccgtcatcgtgtgcgaaggccctacagacaacatctatctgaggcacgcaattaaaagactagcgcccgcatacccaactctcgcttctggcacccctcctcaattatccgtgcgactttttcgctacggacaacggaggatttcccaggtcacacagctaacggggggcgttggcggtttatgccacctcatgaagcattacaactcagacttcacaacaaagattaaggccccagccccccgatacccggtgatagtcctggtagacaacgatgccggcgctaaacctatttacggtgctatctccgggattactaagaagccacggcctactggcgcggaaagatttatccacgtcgtcggtaatatgtatgtggtcccaacacctttaggtgccggggatgcagcaaccgctatcgaagactttttcgacgcaaagaccctcaacgagaagctcggaaccaagacattttcgagagccgccaagtttgacgatacgaagcactttgggaaggccgccttcgctcgcgaggtagtggagagaaaggccgacttcatcgattttagtcgcttctctgatatcctggatcgggtggtggctgtcatgagcgactacgccaagaggtatcccagcctgccgtga

SEQ ID NO: 8214 - RNA, 1443 nt, synthetic construct
  source 1..1443: mol_type = other RNA
atgtccaatgctcgggcccacgtgacgagacggtacgtatttaacgttgacctgcacgacttctttgggactataaatttcggacgtgttagaggatttttcctgaaggatcgaaattttagtcttcaacccaaagtcgctacagtgctggcccagattgcctgttatgagaacaaactgcctcaagggtccccatgcagccctgtgatcagcaacctaattgggcacatgcttgatatcgccctcgtacagcttgctgcagtcagcggctgtacctacacccggtacgccgatgacctgaccttctccagcaacaagccgactttccccatccagatcgcaagacaaattgataagtcggcggataagtgggctcctgggcgcagtctcgagcgcattgtgacaaaggcaggttttacctttaatgacaaaaagaccaggatgcagtatagggactctaggcaggaggtgacgggactggtggtgaacaggaaaataaattcgccggccatctacaggaataccgtgcgcgcgatggtcgattcagctctgaagcgcggtacctttgacttcatccacaagaaggttgacgccaaaggcgtggccacagtggtgaagcaaccaggtcgcaactcacagttgctcgggatgttggcacatatcgatcaggtagatcttttcaataaacggctgtgcgaaaaagcagacattgagccgccaagcactgccggacgtatagagttgtttagacagttcctctacttcgatgcattctacgacatctccatgcctgtgatagtttgtgagggacccacagataacacttatatccggcatgctattcgaagtctagccttcgggtaccccatgcttgtgacaggcaacgctcctccaaagctgaacgttcggttatttaagtacgcagaaaggagaacttcagaagttacccagctgacaggcggcgtgggagggttatgccacctgatcaagtcctatcacaccgacgtgactgagaagataaaggctcctccccctaaacacccaaccatcgtcctggtcgacaatgattcaggagcaaacgccatatatggtgcaatctctgggatcactaaaaaacctcgacccacaggaaaggagcccttcattcatatcgtcggcaacatgtatgtaattccaacaccattaggcctccatggtgaaaagaccgccattgaagacttcttcgacgccgccacactcgcgactaaactgggcaccaagtcttttagccgcgaaaagaaaattgatgagacgacgcagtacggcaaagctgccttcgcaagagaggtcatcgaaaaaaatgcgggctctatcgatttttccagatttagtgccattctcgacaggattgcggccgtgctggctgactattctaagaaacatcccacaagcgctgtcttgtga

SEQ ID NO: 8215 - RNA, 1743 nt, synthetic construct
  source 1..1743: mol_type = other RNA
atgagctcactggcggacttgaagaatactaagacactgagtgacttgggtgctctgctggatatcaaagctggcatgctatcattccagctgtacaagcgcccaaaagaggttctgtatactaagttcagcatccctaagaaatacgggggattacgcgaaatttctgcccccgacccaacgcttaagttgatacagcacagactatctgatctccttcaggagtgcctgctggagataaccaaaatcaacggacacgtaaatgatgctaagtcctttgggattagccacggtttcaaaccaggccacacaataatgactaatgccagagggcatgtgggcatgagatacgtgttcaacctcgacctccatgatttctttggtagcctgaatttcggccgcgtgcggggcttttttatcaaggaccgaaacttccagcttacccccgcggtggccaccgtgattgcccaaattgcatgcgccgataataagctgccacaaggctccccgtgttctcccgtgatcagtaatcttattgggcacactttggatatccccctcgtgcgcctggctgccacattaggcatgcggtatacacgttacgcagatgaccttaccttttcaaccaaccagaggatcgtccctgatgaaatcgctctcatggatccagttcataaatggattcctggtagggagctggtgcggatcattaaacggaatggatttgccatcaatgagagtaaaacccggatgcaatactgcgatagcagacaggaggtgactgggctgaccgttaaccataaagtgaacgtccctgctacatacaggtaccgtgtcagagccatggcgcataggctcttcaccactggagaattcgagttcatctacaaaaacaacgagaagacagtagtatcttctagcaaggggtcaccccagcagttgcttgggatgctgtcctatatagaccatgtcgaccagtacaacgaaaagatcaagctcgaaaataacctgcctgttacagaaacagctggacgaacagaactttttcgacagtttctgtatttcgacgcatttttcgcacccgaacgcccaatcgtggtctgtgagggcaagacagataacatatatctaaggtgcgccataaaaaagctggccgccaaatatcctgatctcgcaaccgtggccagaggagtgagcctcaatgtcagattcttcaaatatagtgagcaacgcactggatccgttattgggctgactggaggcgtgggtgggatctgtaaactgctgaagcactatcacgaagacgtatccacgcggtttaaggccccacgtccacagcaccctgtcattgtccttattgacaatgattccggcgcaaacagcatctatgaagctattgctggaatcaccaaacgcaaaaagccgttgggtcgggctcccttcattcacgtcttctcgaacctctatgtagtccccactccgttcggccccaagaatgcatacacagcaatcgaggattgttttgacgccgcaaccctcgccaggcctttagacggcaggacgttttcccgagacaataagcatgactcttcaaaacactacgggaaaaaggactttgcgaccagggtggtggccaagaatgtgaacaccctgaactttcatggctttgagcctttattggagcagatggtggcagttatcaaggactacaagacgagaattagtggagccgtggttgcttga

SEQ ID NO: 8216 - RNA, 1779 nt, synthetic construct
  source 1..1779: mol_type = other RNA
atggctttaatctacagcacacccgtcctggattccctaaaagctgccacatcactgcacgacctcgcacagctgttgaaactcaagccagcggtattggcgatgcagatttataagaaagacaaacggacagattggtatacgtcatttgagatcaagaaaaagcatgggggcgtgagaaagatcaatgcaccagaaaaacacctaaaactcatacagagtcggctcagtaagatcttgcaggattgtcagctcgaaattgccctgctgaacggacataaggaaggccctgatcggcaagggattgcccatggctttaagagacaccactctattatgactaatgggcggccgcatgtaaaccgccagttcgtttttaacgtcgatctgcaagacttcttcgagacaatcaatttcggcagagtgcgggccttctttcagaagaataaaaactttgccctgaacccaaaggtgagtgaaattctggctcacattatctgctataaaggtagcattccacagggaagtccgtgttcacccgtcgtgagcaatctaattagccattccatggacaccctgctggcaaaagccgccaagatcaatggggctacctacacacgttacgccgatgacttgactttctctactaacagaaaagtgtttcctgccctgattgccaaaaaaatctccgctaatgagtgggaaccaggtgctactctcctcggcgtcgtgacaaagtcaggattctgtttcaataagaacaagacacgtatgcagtataaagacagccgccaggaggtcaccggactgtctgtaaataaaaaggtgaacgtgaccgcagattatcgctacaccacacgagcaatggtccataagctctttaccgatgggaagttcgtgttttgctacaaggtcaaaaactcccacggtgaaaaagagatttttcaggagatcgaggggagggcatcgcagttgctgggcagattaacacacatcgaccatgtggatcagttcaacgagttgattcgcaagaaaaatggtctgccctccgctcttccagaaggccgattgaaacttttcaggaacttcctttacttctaccatttctatatgcctgaccaacctgttatcctgtgcgagggtaagaccgacaacatatatttaaaatgcgccttaaaggctaacgccgcggcgtttccgaaaatcgtcgaggtgtcgactgggagcccccctactctgaaggtgaggctctttaaatattccgagaggcgaacgggcgttgtgaccgatctttctggcggagttgggggcatctgcaaactgctgaagaattttgacagtaacctttctatgtggaattcaggacccaagcctgcacaccccgttatcattgtgatcgacaacgacagcggagctcagaagatataccaagcgatcgcaggaataaccaagaagcccaaaccttctggacgcaataagtttattcacgtcatcgagaacatttacgtggtacccaccccccctgccaaagggatcacgaataccgatatcgaatgtctttttgccgacgccactctgaatgaggagctttctggcaagaagtttaataagtccaaggaaatagaggactcatccgaatacggtaaaaccgcattcgctattaacatagtggctaagaaaagcggcgaaatagatttcactggcttcgttccactcctggagaggattcaagaagccatggaccactactataagagcatcaagaagttcaagaaatga

SEQ ID NO: 8217 - RNA, 1761 nt, synthetic construct
  source 1..1761: mol_type = other RNA
atggccaaaattttcagcactcctgcgctggattccttaaaggccgcctcatcactgcacgatcttgcccccctgctcggtctgaaacctgctgtgctggctatgcagctgtataaaaaggataaacgcacaggctggtatacaagtttcgagatcaagaagaagtacggcggcgttcgatccataaacgctcccgaaaagcatttaaagctgatccagtcccggctgtctaagattctgcaggactgcctcctggagattgccttgataaaaaaccacaaagaatctccagatcggcagggaatcgcccacggttttaagaggtaccactctatcatgactaatggccggccacatattaatcgcagattcgtgttcaataccgatctgcaggactttttcggagcaatcaactttggtcgagtgcgggcatttttcgagaaaaacaagaacttttccctcgatcccaaagttagtgagatcctggcacacatcatctgccataagggctccataccacagggttctccatgttcacctgtggtatccaacctcatcgcacattctatggacacactgttggccaaggctgctaagaaaaatggcgtcacgtatactaggtacgcagatgaccttacctttagcaccaacaagaaggagtttccactggctatcgcgaaaaagattacatcaaatgaatgggtacccggaaaagaagtttcggttattgtcgagaagtcgggattcttttttaacgaaaagaagacgaggatgcaatataaggacagtcgacaggaggtgacggggcttagcgtgaacaaaaaggtgaatgtgacctccgattatcgctacaccacacgtgccatggtgtcaagcctttttaaaaccggtaagttcaagttttgctttaaagcgaagaatctcgctggggaaaaagaggtggttcaagagtttgagggcaggcctgcccaactcttggggcgtctgactcacattgactacgttgatcagttcaacgaaagtctgagaaaaaagaacggcctaccaccagcactacccgagggcagattgaaactctttagaaacttcctgtactactatcacttttacatgcctgagcagcctgtcatcctctgtgaaggaaagaccgacaatatatacatcaagtgcgccctgaaagcacatgccaatgctttcccttctatggtcaaacccgggagtccgccagagttaaaagtgcgcctgttcaaatatagtgaaaggcggactgggatagtaacagacttgtctggaggggtgggagggatctgtaagttgctaaaaaatttccatgctaaccttagcatgtgggagtccgccccccagccaacacatcctgtcatagtggtgattgataatgatagcggcgcagacaatatttatcaggctattgccgggatcacaaagaagcctaagcccaagggatacgcaaagttcattcacgtcacccagaatatttatgtcgtgcccactcccccggtgaagggcaaaaaaaacaccgacattgagtgtttattctcagacgccaccctcaaagaagaactgaacggaaagaagttcaataaaagcaaggagatcgaagacagcagcgagtatgggaagaccgctttcgccatcaatgtcgtagccaaaaaagcgcacgaaattaactttgcaggcttcactccgctccttcaaagaatcaaggaggccatggaccactactacaaatccatcaaatga

SEQ ID NO: 8218 - RNA, 1860 nt, synthetic construct
  source 1..1860: mol_type = other RNA
atgagccgggatatgccctcagacatcttgtgctcaaaatatgtggtacaagttgctcccggcagtgtgcgagaaagctttaatcagagccgaaaatctatggtcaaaacttactcaacccctgcattagattctctaaaagcagctcggtccttgcacgacctggcccagctgcttcgcctgaaacccgaaattctagccatgcagttgtacgttaaagacaagcgcaccggatggtacacgagtttcgatattaagaagaagtatggcggggtgcggacaattaacgcgccagagaaacaccttaagtccatccagtccagactgtctaaaattctgcaggattgtctgctggaaattgcactgatcagcggccacaaagagggcccagaccggcttggtatcgcccatggattcaaacgctatcattcaatcatgactaacgcccgcccccatactaataggcgcttcgtttttaatgctgatctccaggattttttcgggactattaactttggaagagttagagccttcttttcgaagaataaaaactttgagctcgacgccaaagtgagtgagattctcgctcatatcatctgttacaggggatctctgcctcagggatctccttgcagcccggtagtctcaaacctgatagcccactcaatggacacgctgctagccaaggctgctcgaaccaatggggtgacctatacgcgttacgccgacgatctaacttttagtaccaatcaaaaggagtttccatcttccattgccgagcgcctggttggcaacgagtggggtgtaggccggactgtggtgaggatcgttgaggagtctggtttcagttttaatcagaacaagacacgaatgcaatacaaagacagtaggcaagaggtgacaggcctgtctgtcaataagaagacaaatgtgacagcagactaccggtataccacaagagcgatggtgcacagcctgttcaaaaccgggaagtttaagttctacttcaaagtgaagaacgccagcggtgctaaagtggtgattaacgaggcggagggaagccctactcagctccttggtcgtctctcccatatcgatcacgtggatcagttcaatgaatccattcggaaaatcaatggactccccgcagcattaccagcggggaggctgaagttgtttagagacttcctgtatttttaccacttctacatgcctgaaaagcccatcattttatgtgaagggaagaccgataacatctatataaaatgcgcactcaaagcaaaggctgcctctttcccttcactcgtcacacactccagcccccccgagctcaaggtaatcctgtttaaatacagtgacaggagaaccggtatcatcaccaatctgtcagggggggtcggagggatttgcaagttccttaagaacttcaattccaacttaagcatgtggatatctgctccgatccctgctcatccagtcatagtcgtgatcgattcggactccggcgcagacaagatctatcaggccattgccggcataacacgtaacaagaaaccaaaaggcagcgaaaagtatattcacgtgaccaaaaacatctatgtggtccctacgccaagaaagattaacgagcaaactactgacatagagtccttgttcacccaggagacactggacacagaactcaacggcaagaagtttaataagagcaaggaactggacgatgcttccgaatacggcaaggccgcctttgctaccaatgttgtcgcaaagagggccagtgaaatcaacttcgatggattcataccgcttttgaacaatattaacgaagcgatgacacattattacaggaccatcaaatga

SEQ ID NO: 8219 - RNA, 1767 nt, synthetic construct
  source 1..1767: mol_type = other RNA
atgaaactagaagaactgaaagcagcaacatcccttagagacgttgctactttgcttcaggtgaagcccgcaatgctctcatacatcctgtacacaaaaccgaaaccagagctttataccaaattcgaaatcccaaagaggactggcggtgtgcgcgaaatatctgcaccctactcacatctgaagttgatccaacaaaggctcgccgctatactcctggagtgtaccaaggagctgcgtgagaagaacgcatcaaagagcaaaaacaagaacttcgagattaggagcgtcgcgcacgggttcatgccaggtcacaacatcatgacaaatgggcagtcgcatattactaggcgattcgtgttcaatgtcgatcttagcgatttcttcgggtccataaatttcggacgggtgcgcggatttttcattaaggataacaacttcgctctcgacgagaaggtggctaccatcctcgctcagatcgcctgctatgaaaataagctaccccagggaagtccttgttctcccgtgatctccaatctcttaggccatatcctggacgtcgcgttgatcgacctcgcgcggaagaataaatgcacttatacacgatacgccgatgacttaaccttcagcacaaatcggcgagtgttcccacttgcgatcgcctttgcaatccaagaggacaagaatagttggctgccaggcaaagagctgatccggatcgtacagcacaacggttttgagtttaacaagaaaaagactcgcatgcagtataaggacagccggcaggaagttaccggcctttctgtgaaccggaaggtgaatgtgccggccagctacagatacaccgttagagccatggcttctaacttgtttaggacggggaaatttgagcacattgtcagatacaagaattcctcgggcgaggaggtggtatctaaagtagacggcaaaacaagtcagctgctgggtatgctgagctatattcaccaagttgacatgtataacgaagctctggccgtgaaaaataatcagcctctcgcagatacgccaggccgccttgagttgtacaggcgcgccatctacttcgatgctttttatgcacctgaaagaacagtggttgtttgtgagggaaaaacagacaacacttacattaagaacgctatctaccgcctgtttcaagggtatccgctgctgggcgagttggatgctgagggaaagccacagctaaagattcgtctgtttaagtatgccgatcgcagaaccgccagtataactaaattgtctggaggggtcgggggactctgccacctgattaaatactacaactcagacattgtgcagaaattccgagcccctcctgccaagtttcccgtgatattactaatagacaacgacagtggcgctgattccgtctacggcgccatcgccgggattctgaacatccaaaagcccaagggaaaaaagccttttatccatgtctatgagaatctgtatgtcgtacccaccccctttgggctggatggtgaaaagacctccatcgaagatttttttgaccaggctaccagagcaacgcagctgaatggcaagtccttcgaacgtaaaaatgatgccgacaaccagcaccactacggcaaagccgccttcgcaagagatgtgatttcaaagaatgcaagcaccattaactttgacggtttccggcctattttagataggattgaagcggtcatgaaagactatgtgggcaggatacatcagctcgccggatga

SEQ ID NO: 8220 - RNA, 1755 nt, synthetic construct
  source 1..1755: mol_type = other RNA
atgaagttagaggagctaaaggccgcaaccaatctccgtgatgtggcgaggctgctgcaagtaaagcccgggatgctgtcttatgtgctgtacacgaaaccgaaaagcgaactctatactaagttcgaaattccaaagcgaactggaggtgttagagaagtcagtgcgcccttttcccaccttaaactgattcagcaaaggctggctgcaatcttgttagagtgtaccaaggaactcagagaaaagcatgcttcaaagagtaagaacaaaaacttcgagttccgcggggtttcacatggcttcatgccaggccacagcattatgacaaatggccaggcgcataccacgaggaggttcgtatttaacgtagatctgtccgatttcttcggcagcatcaatttcggaagagtgcgcgggttctttatcaaggacaataatttcgcgctcgacgaaaaaacagccacaatcttggctcagatcgcttgctttgataataaactgccacaggggagcccttgctctccggttatcagcaacctgctcggccacatcctggatgtcgccctggtggagcttgctcggaaaaataagtgcacttatacccggtatgctgacgatctcacctttagtacaaacaaacgcatatttcctagcgagattgccctcgctaccgaggatgacggaaactcatggctgcccggtaatgaactgataagagtcgtgcgtcgaaacgggttcgacttcaacgaacgcaagactcggatgcagtataaagacagtcggcaagaggtgactgggctctctgtgaaccggaaggtgaatgtgcctgcctcttacaggtataccgtgagggcaatggcctcctcgttgtttagaacaggtaagttcgagcacatcataaagtataaatcagcctccggcgacgaaattgttagcaaatgcgatggcaagataaatcaattgctgggcatgctgtcctttatccatcaggtggacgtctataatgaggctttggctgttaagaacaatcaccccatcatcgaaacccccggccggctcgaattatacaggcgagtaatttactttgacgccttttacgcacctgagcgcccaataattgtgtgtgaggggaagaccgacaatacttacatcaaaaacgctatccatcgcctatcccagaactatccactgctgggaggccttgactcagaaggaaagccccagcttaaaatccgtctctttaaatacgcagatcggcgcacagcctccattacaaaattagggggcggtgtcggcgggttgtgtcaccttattaaatactacaaggctgacatcgcctctaaattctcggcccctagacctaagcatcccgtgattatgttggtcgataacgattctggagccgacgcaatatacggagccattgccggaatactaaatgtgcagaagcctaaggggaaaagaccattcatcagggtttatgagaacctttacgtggtgccaactccctttggttccaatggagagaagaccagtatcgaggatttttttgacaaagcaacactggccgtccagctgaacggaaagagcttcgaacggaaaaacgacgctgataatgagcaccactacggtaaagccgccttcgcgcgagacgtcattgccaagaacgccgcagcaatcgattttaacggcttcaagccgattctggatagaattgaggctgcaatcaaggactacgcaacgcagacccagtga

SEQ ID NO: 8221 - RNA, 1752 nt, synthetic construct
  source 1..1752: mol_type = other RNA
atgacactcgccaatctcaagggggcaactgacctacacggcgtcgctaaattgctagacgtgaaggcaggaatgttatcctacatactttacaagcaaccgaagcccgacctgtacaaaaagttcgagatcagcaagaaaacgggaggagtgagggaaatttccgcgccctgtccccatcttaagctcattcaacagcggctggcagccatcttactgggctgcagcctcgaattgaaggcaaaacacgcaacagcagtcaagaacaaaaactatgttaggagagaggtgtctcatggctttacgaaaggccgttccatcgtatcaaatggcgaggaacatataaccaggagatttgtattcaatgccgatctgtccgatttctttggaaccatcaacttcggacgggtgcgcgggttctttatcaaggacgaaaacttctctttgttccctgccgtcgcgacaatactggcccagattgcctgcagcgagaataagctgcctcagggcagcccttgttctccgattatcagcaatctgatcgggcatctcttggatatgaggctcgtggaatttgctttgcgccagggctgcacatatacccggtatgccgacgacctgacgtttagcaccaataagcccgagtttccaactgctattgctgtccagaaagagggtgatccacacaagtggattcctggagggggtcttcagaagatcgtgcaaaagtgtggctttagtcttaatgagaagaagactcgtctccagtaccgcgattcccgccaggaagttaccgggctgaccgtcaacaagaaagttaatgtccccgctacatatagatatgcggcccgagccatggccaacaatctgtttaaaacaggcaagttccagcacaccattcactttaccgacaaggacggagcagctcaggagctgagacgagatgggcacgctggcgagttgagaggcatgctctcttacgtcgatcagatcgacctttacaactcatgtagggaggaagctaacagcctggtgccattaggtgcccccggtcgactgcaactgtaccggagggtgatctactttgactcgttttacgctctgtcaaaaccaatgattgtttgcgaaggcaagacagataacacctacatcaaacacgccattctgcagctcgccggccattaccctaccctcgcgagtgcgtcgattactggtggcaaaccagagctgaaagtgaggctctataaatatgccgaccgaagaagcgccgttgtcaccgatatcgggggaggagtgggggggctgtgccatttaattaagaactaccacgcagatgtggtgaacaaattccgcgccccccggcctatgcatccagtgatcctgctcattgacaatgaccttggggctgactctatatatggtgccatatccggattactgaaaatcaagaaacccaaaggtctaagaccgttcatacacctgttctctaacctgtacgtagtgccaactcctcttggccccgggaacagtcagacaatgatcgaggacttctttgacgccgctactcaagcagtgactttgaatggaaagactttctcaaggcaggatgaagatagttcaaaacactatgggaaggctgctttcgcacgtgatgtagtggccaagaacgcagatagtattgatttcaatggcttccgctccatccttgatagactgcgggacgttctactggactatccaacacggccttga

SEQ ID NO: 8222 - RNA, 1902 nt, synthetic construct
  source 1..1902: mol_type = other RNA
atggccaaggaagggaacgtgagggacatttgccctaggcgaactcttctgttgcacaatcactcagtaatactactgaaagagtgcccacaagctctttcacccgaaatggccctcaagaagattgaagaacttaagaaggttaggaccagaattgagttggccgaacttctggaggtgaagccttccagattggcttacgaactgtacaagaaaaaagattcggatcgttaccagcacttcgagattcccaaaaaatacggagggactcgtgaaatccttgcacctaacccaacactgaagactatccagcgtcgactggccatatatctccaggactgtttagaagaagtaatcgcatccacagattccgagcgacacagaggtgggggcataaagctaggattcagtcacggctttatgcgggaccggaccattataacgaacgcaaggcctcaccgcgccaagcgcttcgtttttaactgcgacatcgtcgattttttcgggaccattaattttgggagagtgagaggattcttcattaaggacaaacagtttgcgctggctcaggaaatcgccacctttctcgcccaaatcagttgttttcagaatgtcctgccgcaggggtcgccatgttctcccgtgatcgccaatttgattgccagaaagctcgatattaagctgggtaggctggcttatcaaaccggcatgacttatacacgctatgcggacgatctcacatttagtacgaacaagaagatcttctcccatagcgtcggtgtgcaggatgcatccggtttctggcgggctggtaccgagctgacaaaaatcgtccgagccagcggcttcgagttaaatcctaataagacccggcttcagcagagggacagtcatcaagaagtaactggcttgacagtgaaccggaaagtgaacacaaattcttcttaccgctataccgccagagcaatggttaactcagtgctcaagacaggagagttctgctttagctatagcattaagaatgcacccgaatctctggaggctccggagaagaaaaaaggaaacttgaaacagctgctggggattctgtcccatatcgattacgttgacaggtttaacttcgaactgcggaaaagtaacctcgcccatctggcaaacaaaaaaaatcagaaagcggtggacgatcaactgttcccaagcttatcacgccaggagactttcaagaagtttgtgtacttctactggttctatgcctgtgacgaaccggtcatcatctgtgagggtaagacggataacatttatctcaagtgcgccatcaaagctttaaagctgcgatatcccgatctgatctctaatgacaagaacaacgaaaagctcaaaattcggttctttgagtacaaagagtctagagcaaaaagcctctctcagctttcaggcggggttggcggcttgtgccacttcctagagaattaccataagtacttgaatggcgcattttttgctccaaaacccaaacaccccgtgattgtgcttatcgacaacgataacggaggacagtccgtctactcaaaagtcgctgggataactaagaagaagaaacccaccggaaaggagtcttttattcgcatcgagaagaatctgtacataatcccaactccattaggccctgagggacagcaaaccgcgatcgaggactttttcgacaaagctgtgctcgacgagcagctgaatggcaagtccttctccagggacgacgacttcgataagagcaagttttatggcaaagccgcctttagccgggatgtagtgctaaaaaatagggagaaaatcgatttccagggcttcgatagcatactcagtcgcatcaatagcgttctgagagactatcatctgaccccttga

SEQ ID NO: 8223 - RNA, 1704 nt, synthetic construct
  source 1..1704: mol_type = other RNA
atgagtaagctccagcatctaaagtcaaccagtaacctgcactcagttgccaatctcttggggctcaaaccagcccacttagcttacaatctctacaaaaagcccgatgcggagaaatacactaaattcgagatccccaaaaggtatggaggtaagaggatcatttctgctcccaatgctgatttaaagcacattcaacgactgctggcagccgttctgatggactgcttaaacgaattgaatgccaagtacaaccgacaagctgcacacggctttattacccagaggagtatcctgaccaacgcccatcagcacagaggtcgcggccacgttctcaatcttgatcttcaggacttcttcggttccattaatttcggaagggtccgcgggtttttcattgctgataaagattttagcctgcatccagcagtggccacagtcttagcccagattgcatgtttcgagaacactctcccccagggatcccctgcttctcccgtcatcagcaacctcataggtaacgtgctggatacccacctgatcaagctggctagaaaacacgggtgcgtgtacacgcgatatgctgacgacctgacctttagcacaaacctgcccaacttcccagaagagctcgcgtactctaaatttggagtctggactacaggaacatccctgttgaaggttatcaagcagtcagggtttgacgttaacacaagcaaagtacggatgcagctggaggacagccagcagaacgtgacggggctagtagtgaatcagaaggccaacaccgccgccagctatagatcgagcattcgggctatggcaaagaatctattcaaaactggcaatttcactcacgattcattcatcaaggactccgccggcaatgtgagcaaaaattccgagctgggcactgtagcccagctgcagggtatgtttgggcatataaaacatgtcgacgaattcaaccttcagattcgtcggcaagagatcccgacgggcagagcctctctgtacaaacggttttttctgttctcgcaattcttttgttcctccaaacctgtgatactttgcgagggcaagacagacaatatctatctactgcatgccatcaggtcacgcgccaaccatttcccccaactggcagaaaccaatgcaaccggctctatttcacttctcatccgtatcttcaagtatgtggaacggaaagcaggtcgcaccctcggaatgagtggcggagacggcgaaattagcaaatttatagggacctacctgacagaggtgagtaagcactttaaggccccgggcgtgtctcagcacccagtcattcttgtggtggatcatgactctggagggaaagggccttacgagacagcgtctaaaaaggtgggcaagacgttggacatactgaatccttttgagcatgtcgctgcgaatttatatttggtagcaacacctcttccttttggagctacctccagttgtatcgaggattgcttccaacctactacattggccaagaccctcggtggcaagacctttaactacaagactaagcacttgaaaccgacagaatacggaaagtcatatttcgccgaacatgtggttcaggcagatgctgggactatcgatttctccggctttgatccactgctggacagaatcaacagcgtcattgtgcactatgcgaagctcccaaagtga

SEQ ID NO: 8224 - RNA, 1767 nt, synthetic construct
  source 1..1767: mol_type = other RNA
atgaccttgctcgctggtctaaagagtgcgaggactattcaggatgtagccaggctgctgaatactaaagcatctgctctggcgttcatgttatacaaggaatctccggatacgctctataccgagttttccataccgaaaaaatacggagggtttcgcgccatcgccgcgcctattcccaaactgaagctggtgcaacgcaagctggccgacatcttgcagatctgcctccaggaaattaacgagaaagagaactactctgacaaagtcgcccacggattcaagcgcggccgttccatcgtgaccaacgcccagtgtcataagcgtaagagactggtgtttaacctggatcttgaggactactttgggtctataaattttggccgcgtgagaggctttttcatggcagatagaaactttcaacttcatccctcaaccgctaccatactcgctcagatagcctgctataaaaatagtctgccacaggggtccccatgctcacccatcatatcaaatcttgttggcaatatcctggacgtaaggctagtgcggttggccaaggaatctgggcttacatatacacggtacgccgacgaccttaccttcagtaccaatgcccagtccttccctgaatctattgcggtaagctcagctgatagtctacattcatggatggtcggtaagggcttgaatgagttaatcgagagaagtggcttccgagtgaatagcagcaaggttcgtgtacagtaccgccactcccggcaagaggtcactgggttggtcgttaataagcgggtgaatattccatcaacgtatagaaggaaggtcagggcaatggtgtattctctggttacggaagggtacttcgagttcaaagagattggtgagaaagatgcagaaagcgcccagcctaccaaaaaaggaagtctgaaccaactgcacggcatgctgagctatatttatcagctcgattccagtaaccggaaggaactctctgccgctaacttcaaagatggagtccccgtctccgaacgcgacgtacccctcacaacaacagagaaggtgtttaggcgattcctgtttttcaagaacttttactccacccagaagccagttatcatctgtgaagggaagacagacaacatttatttacactacgcactcctttctctggcaacccgatttcctaacctggtggtgaaacaggctcagaaatattcgttcgccttctccctccataggtacagcaggagctctactgagcggattctgggtattcagggaggatcaggcgacctgaagatgtttatgttgaattacctgacctcgtacaatttcttcaaggtgaaggtgaaaaagcaacccgtcatcctgttgattgacaatgacgacggcgcaaacgatatcttctccatggcaaaaaactatctcggctacaagccaacaggacaggaaccatttctacacgtcgatggcaacctttatttaatgcctactccgctcctgaacagcagaactaaaagcactatcgaggacttctttgatgataaagtgaagagtgtgcaggtgtcagggcgatcctttgaccccaagagaaagcacaatggtagcgcttcgacatacggtaaaaacgaattcgcacgggaggtggttgctaagcaagccaatagcatcgacttctccaagtttagctacgtgttcaaaaacattgaggatatcatagccgactttcagagcaaagttgctgccggaaaaatcaagccttga

SEQ ID NO: 8225 - RNA, 1734 nt, synthetic construct
  source 1..1734: mol_type = other RNA
atgtcgaaacttagccggcttcgcgcttgcaaggacctgagagacttagcgaaactcctgggcttccgcccaagcgctgtgtcctacattctctacatggagtctgacagcgccaagtatcgggagttcgagatccctaaaacaaccggcggaacccgacagataagcgctccccatcccaaactcaagctgctccagacgaggctgagcaacctgctgcaggactgtctgggcgaactggataagctcaacgccgatgcccacagacttgactccctcgcccacggctttaaacgaggtcgcagtatagtcactaacgcacagcggcacaggaatcgaagatgggtcttcaatctcgatctggacgggttcttcaacgatatcaactttggccgagtgcgcgggtacttcattaaggatagaaatttcctcctgcagcccaaggtggccactgtgatcgcacagattgcttgtcataaggggtcccttccgcaaggatcccccagctctcccgtgatttcgaatatggtgggaaggataatcgatcttcgcctgtgcagacttgctgctcgcgctggttgccggtacaccaggtacgcagacgacctgacattttctaccaataaacgaagttttccagaagccatcgccgcccgggacagccaaaatgattctagttggtcccctggggatgaattaataaagatcatcaaggagtcagggttcagtatcaattctaagaagacaaggatgcagtatagggaatcacggcaggaggttactggtctggttgtaaacgacagagtgaacgtgcctgcaacatatcgtcacactgtccgagctatggtacaccgcctttgcatgaccggaacctttgatatacagaaagcaacaatatcttccactaaacagtccaaccaatctgatccaggcaacttgagacagctacacggcatgctggggttcattgacgcggtggacagatttcaccaaaagaataagccaaacgacgcacacgataagcagaagccaagagccagtgagttgatctacaggaggttcctgatttatcaaaatttctacgccgcagaaaagccggtgctaatctgtgaaggcaaaacggataacatctacatcacctgcgccatccgttcattagcgcaacagtttccggacctcgctcgcatcgataaaagtgggaaaatcagtctcgaaattcgtcggttccggtacgccaaaacgagcaccgggcggattttaggtttgaatgacggcggagccccagtcctgaaaaatttcatttgggagtataagaaggagatttctaaattcagagcgacaataagcaagcatcccatcatcatcctgatcgataacgattcagcttcaaagcagatcttcgcatccttgggaaaaattaccacatccaaggtctgtggtaacgaaccttttattcatgcttttgccaatctgtatgtagttgctactcctatacccgagggaaaggattcatccgacattgaagacttgtttgaccaggagactctaggcgccaccattgacggaaaaaggtttagcaggatcgttgaggacgagtcacgtcattatggcaaagccgtgtttgcatacaaggttgtgaagcctagggcagataaaatcgattttagcggtttccgcgaactgttggcccggtttgtcagagccattgaggactatcaggcgaagattcattga

SEQ ID NO: 8226 - RNA, 1683 nt, synthetic construct
  source 1..1683: mol_type = other RNA
atggctactagcctcagcgacgtcgcgctcttgctgggcttccacccaaaagctttcgcgtgggtcatctataagcaaacagccaagtacgcagtgttcgacattcctaagtcccgaggggggactagaactattaaggcgcccgaacctcgtctgaaaaacatccaagccagactcgcggaacttttgcaagactgtatcgccgacatcaacgaagccagatctcagaaagaaaaactgtctcacgggtttcgcagggggcattcaatcataactaacgcttatcagcatcgagggcgtcggtttgttctgaatgtcgacttggccgacttcttcggcacaatcaacttcggtagagtaagaggttttctgatcactaaccggcattttgcactgcatgagcgcgccgctacagtaatagcccagatcgtttgtgatgataactcattacctcagggcgcccccacatcaccagtggtgagcaatttaattgcccatatcctggatgttaggctcgccaaattggcaagaagattcggactgcactatacaaggtacgccgatgacctgacctttagcaccaattccagagattttcccgaggaggtggcagtacctaatgacgctggccagtgggttgctggtcctgcattggacacggccatccaacgtgcaggctttgcgctgaacccccagaaaacccgagtgcagatgcgtcagagtcggcaggatgtgaccggcctaattgttaatgagaaggtaaatatccgctctgagtactatcgggaggccagggctaaatgcgaccatctatttcgcaccggtgcttatcggaccaagcaattagtgcgcaaggatgacggaacagccgcagtggaagaagtcccaggaacgttagaccagatggaaggagtgctcagtttcattgatagcgtgaaacgatacaagcggccagctgatcgagatcacaagcttacaggcagcgaacagacctacagaaagttcctggtgtacaggtatttctacgcaccatcaatgccagtgatcctgtgtgagggcaaaacggacaatatttacctccgctgcgctattcaggcctttgctgacgactaccctggactcgccgaaaaacaggggtccgcagccactctcaaggtcaggctgttcaattactctgagcacaccaaacggctgctcggtatcgcgggtggaagtgggcacttcaataaccttatacgcgattatcggaaaaacttgaagccctttaccgcacctcacgctgaaaggttccccgtcattctgctggtcgataacgattccggcgccgacgggatatataaggtcgtgaaggctacaacaaagacggcctgcgatggcaaggagtccttttattacgtgggcgataacctttatgtggtaccgaccccccttggaccatcggatgcccagactatgattgaggatttcctgcccgccaaatggcgcgctgagaaactcggcggcaagacccttaacctggggaaggactgcgacattacaaaagagtacgggaaggccctattcgcagagcacgtgattaagaggaatcggaaggacgtggactttactgcaatgagggttatactggacaggatcgtcaccgttatcgacgattacgctgccatgatgggagcaggaccgtga

SEQ ID NO: 8227 - RNA, 1719 nt, synthetic construct
  source 1..1719: mol_type = other RNA
atggtgggcggcaacgtgaagaggatcgaccagctgaggctaacgaattgcctcgccgacgtagcagagctgctcggttttcaacccaaactatttgcatgggtgatttataagcagccttacaagtatgcaacttttgaaatccccaagtcccgaggcggtgtgagactcatcaaggctcctgaagaccggctcaaaaatgtccagtcaagactcgcgaagttgctacaagactgtatctccgacattaatgaaaaacgcgaacaaaccgaaaagcttagccacggtttccggaggggctacagtattataacaaatgcctatcagcataggagtcgacgatttgtcctcaacgtggatctgacggacttcttcggaagtatcaactttgggagagtccgtgggttcctgatgaccaacaagcacttcgccctgcaggagaggacggccaccgtcattgcacacatcgtgtgtgatgacaactccctaccccaaggagcaccgacatctccagtcgtgtccaacctgatcgcccatattctggacgtgcggctggctaaactggccagaaaatacggcctgcactacactaggtatgcagacgatctcacgttctctacaaacagtcgttccttcagcaccgaagtagcaaccccagatgctgctggacactgggttgccgggaaagcactggagaaagttataaccagagctggcttctcacttaataccagcaagactcggatgcagttgcagcaatcccgccaggatgttacaggcattatcgtcaacaagaaggtaaacattcggagcgaatattaccgggaagctcgggctaagtgccatcaccttttttgtacaggtacttacctcaccaaaaaagttgtccgcaaggaggatggaacctctgccgtagagtctgtgataggtacacttgaccagctggagggtattttgagctttattgattctgtgaaacgctttaagatgacttttgaccgagaatacaagctgactgggccagagcgcttataccgtaatttcctgtactacagacatttctatgcgccccccttaccgatgattctttgcgaaggcaaaaccgacaatatctacttacggtgcgcgatccagaagtttgcctccgattatggacagcttgcccaggaggagggcgatgccatcaagctgagagtcagactgttcaactactctgaccatactaaaaggctcatgagcttggggggcggaaccggacagataaaggatctgctcagcaactattgcaagataatgaaacccttcttgtcgatgggggagaggaatcctgtgatcgtgctgatcgataatgattctggagcgaagtcaattttcagctggatttcaagtactaccggccgacgctgtgatggaaaggaatcattttactacctcggcgagaatttgtacttagttcctacacctcggaccgacgaggatggggatacaatgattgaagacttcctgccactgaaatggagggaggagaaacttgggggaaaaacacttaatttggggtcgaacatcaacagagacaaagagtatggcaaggccctgttcgccgagtatgttatcaagaagaatcgcaaagatgtggactttgtccagatgaagctggtgctggaccgcatcgtggctgtgataaacgactatgctgccatgatggctacttccacatga

SEQ ID NO: 8228 - RNA, 1707 nt, synthetic construct
  source 1..1707: mol_type = other RNA
atgaaacggattgacgaccttaagatggctactagcctcaccgatgtcgccttgttactgggtttccatcccaaagcattcgcctgggtcatatacaagcagcagcctcggtatacggtattcgaaatccctaaatctaggggcggtacccgcacgattaaagcacccgagcccaagctgaagaacgttcaggctcgtctcgcagagcttctccaggattgtattgccgacataaatgaggcacgatcacagaaggaaaaactctcgcacgggtttagacgaggacactctattatcactaacgcctaccaacaccgcagcagaaggtttgtcctcaacgtggatctagccgacttcttcggcaccatcaacttcggccgcgtgagagggtttcttatgaccaacaagcatttcgctctgcacgagcgggtggccacagtgcttgctcacatcgtttgttatgagaattccttgcctcagggagccccaactagtccagtggtgtccaaccttattgcacatattttggatgtgcggctggccaaattagccaggcggtttgggctgcattacacacgatacgcggacgacctgacatttagtactaacggcagaacctttcctgaggaggttgccgccatcgacgccgatggacaatggatagccggccccacacttaagggagctattcagagagctggctttgagctcaatccagtgaagacaagaatgcagttacggcagtcccggcaagatgtcactggtttgattgtgaacgaaaaagtcaatatccggagcgagtattaccgcgatactagggccaaatgccatcgcctgtttaagaccggaaagtatcaaatcaagcagacaatcaggaaggatgacggctcaaccatcgtcgaagacgctgacggcgcactggatcagatggagggcgtactgtcattcattgatagcgtgaaacgccacaagcaggttgtcgagagggatcacaagctgtctggagtcgagcagatttaccgcgcgtttctactatataggcatttctacgcgccctcaatgccgacaatcctgtgtgaagggaagactgacaatatttatgtgcgttgcgccatccaagcattcgctgatgattatgccaagctcgcagataagaaaggcgaagctgtttccgtgaaagtgaaactgtttaattacagtgaccacacgaagcgattgctgggaatagctggtggtagcgggcacttcaataatctcatcaaagactaccgaaagaacctcaaaccttttacggccccatatgcggagaggttccctgtcatcttgctgattgacaatgatgcaggcgccgacggcatatataaggttgttagagctatcaccaaagggacttgcgacgggaaggacccgttctacttcattggagataacctctacgtagtgcccacaccactgacagacacaggggctgcgaccatgattgaagatttcttaccaagcaaatggagggacgaaaaactgggaggcaaaaccctgaatctgggaaaagacatcgatatcaccaaggaatacggtaagtctctgtttgccgagtatgtaataaagaagaaccgtaagatagtggaatttgacgcaatgagagccatcctggacagaatcgtgaccgtgatcgatgactacgctgctatgatggcagcagggtcctga

SEQ ID NO: 8229 - RNA, 1257 nt, synthetic construct
  source 1..1257: mol_type = other RNA
atgaagcgcattgacgagctaaaactcgctacgagcttgagtgatgtcgctttactgttagggtttcagcccaagccatttgcttgggtgatctataagcagccagctaaatattctgtcttcgaaatccccaaatcccggggcgggatgagagtgatcaaggccccagagccgaagctgaaagccgtgcaagcgagactcgctgaactcttgcaggattgtattgcagacattaatgaggctcgtagccagacagagaaactcagccacggcttcaggagggggcattccatcattacaaacgcataccagcatcgcagccgccgattcgtgtttaacgtggatctggccgatttctttggcaccattaacttcggcagagtcagggggtttctgatgaccaacaagcacttcgcactgcatgagcgtgcagccacagtcctggctcacatcgtttgtgacgacaattccctccctcaaggagcccctacatcccctgtggttagcaacctgatagcgcatatccttgacgtgcgactggcaaaattgtcacggcgcttcggtctttattacacaagatacgccgacgacctgaccttctctactaattctcggacttttgcgcccgagatcgccattaatgatggagccggaggatgggcagcaggaccagcattaattaaagccattcagaggagcggatttgcccttaatccgaaaaagacgagaatgcagctgaggcagtctcggcaggacgttactggtctggtagtgaacgaaaaggttaatatcaggagtgagtattacagggatgcccgtgctaaatgcgatagactcttcaagaccggtaagtatcaaacaaagcaccttttgcgcaaagaggacgggacttttgctatagaagaactcgacggcaccctagatcagctggaaggcaccctgtccttcatagactcagtcaagagacataagcagaccatcggcagggatcacaagagatctggggctgaacggctgtaccgatcgtttttgctttaccaccacttttatgcctcacaaatgcctgtaatcctctgcgagggcaagaccgacaacatctacgtccggtgtgccgtacaagcattcgtggctgattacgccaaatggccctggcgacgcaaaatgggcctgaatagtcggtatggttgcagcactatacagaccactcagtcagcgtgcagtgtgtccctggccgatcaggtgacactaatggcctga

SEQ ID NO: 8230 - RNA, 1689 nt, synthetic construct
  source 1..1689: mol_type = other RNA
atggcctatattctcggcgtcacacctaagggattagcatatactattcgtattcaacctctggctaataggtattcttctttcacgattcccaaaaagaccggagggagccgtaatatcgatgcacccgaggtcggtctaaaactggttcagtccagactcgccgatgtacttcaggattgtattagtgacatcgacaaagaaaggggatatccagagaaaataagccatggcttccggcgcggccattccataatcaccaacgccaggaatcactcgaatagacgattcgttttgaatgtagacattgctgacttcttccagaccatcaactttgggcgggtcttaggttactttctcaaaaatcgcgacttctgtcttgacaaaaacgcagccgtcactttggctcagattgcttgtcacaataatggtctgccacaaggcgcaccatcttcccccgtaatcagtaatcttatcacacatatcctggatattagattagctaagatcgccaagaattacggttgctactacacccggtatgcagacgatttgactttttcgaccaatctgcgcgatttccctgagaaacttgcgcggctcgattcagtgagtggcaaatggatcgtcggacgcagcttggaaaaggccatcacccagtccgggttcgcactaaacgcgagcaagactagagtgcaactgaaacagagtaggcaggacgtgactggaatcgtggtgaatgacggtgtgaatgtgaggagagagtattacaaaaatgcacgggcttactgcgccgaactgtttaagacagggaagttctatataaacgttaaggatatcgacgaaaacgggcaggtgagcctcaagaagatcgatgggacgagacagcagctgaagggcattctgtcatttatcgaccaggtgaaatcacaccgacccaaaattacactcgagaaaacaactcctgatcgcaagggggtgaaaggatttaacctgctgtacaagcgattcttctactttgatgctttttttgccaacgacaaacctatgatcctgtgcgaaggcaagacagacaacatctatattcaatccgcggtcgcagccatgttcaacaaatttccaacactaagcggtgagaaaaacggaaaggccgactttaagttcaagctgtttaactacaccaaaacttcccttaagatcatcggcattgggggaggcaccgggcaactgaatgccttcatctccaactataagtctaacgtaggagactttaagtacaagggagaaaagcaccccgtgataatcgtgatagacaatgactcaggcagcagttcaatttataagaccatgaagaccatcctgaacatcgatgtgaaaggcgataagccgttttacttcatgggggagaatctctacattgtgccaacgccaaggggtgttaacggcgaggagactatgatagaatctttcctcccccagaaatggatcgattacaagctgaacggcaagaaattcaacatgaacaataagggccttgataccaaagccgaaattgggaaagctctgtttgccgagtacgttgttaaaaagttcaagaaggacatttcctttgataacttctctccgctcttggacaatataacaagcgccataaacgattattacgccatggtcgctattaaaccttga

SEQ ID NO: 8231 - RNA, 1344 nt, synthetic construct
  source 1..1344: mol_type = other RNA
atgctgatcgccaaagaatgccagcctgccgcttatttcagcctccagcacggagtgatgaaccgcctagcgttgctgaggtctgccaagacgatcaacgatcttgctgacttacttggagtcaagcactccgggctgtctttcatactctacaagaagcccactgagacgaagtaccagtccttcactgtgccaaaaaaagccggcggagtaagagcgatccacgcaccaacaagtgagcttaagctgttccagcgtaggctggccgacctgctccaagagtgcctgaacgaaattgaggcaaccttcagaaaaacaagcgaggatcgacggcccgagaaaatcagtcacggctttcatcctggcagaagtatcataacaaacgccatccagcaccgtcgtcgaaggtatgtcctgaacgtggacttgaaagactttttcggaacctgtaattttgggcgcgtacgggggttgctcattaagaacgaacatttcctgctccacgacagggttgccactgtcatcgcacacctggcatgtcatgaaggggctcttcctcaaggcgcccccagtagccccgtcatttctaatctgataggtcgggtcctggatatcaggctggtgaaattagctaattcagtcgggtgctcttacagccggtatgcagacgatctgaccttcagcacaaatgacagacagtttccaccgcagctcgctgctgagattcctccatcctcaggtagatgggaaccaggtccggccctccttggggaaattgcatcgtccggattttccctgaatccaaaaaaaactcggatgcagttacatgaaagtcgacagatggtgaccggcctcgttgtgaatacgagagtgaacgtgtctagcgattatcgccacttgattcgggccatggttcaccgcctactgactaagggagagtacgaaatatcaaccgcagctggaccgatcaagggtaccaccgagcaactgcagggcatgctttcctttattgattccatcgacgaatttaataggaagagatttaaggagagggatgtgcccttccctcgccagcgcgatgaaaccttccgcgatttcgttttttatcgacatgtttaccaagcgtcccggcccactctgatctgtgagggcaagacagataacgtgtacctgacccatgctattagagccatggccaaattgtttcctgacctcgcgtctcccggcttctaccctgtatccgcagacacatcaaaaaaggccgaggacgggcataaggagtgcctatgtaggagcgagggctctacagctctttcatcgagcgtggtgttgtggagccggtga

SEQ ID NO: 8232 - RNA, 1800 nt, synthetic construct
  source 1..1800: mol_type = other RNA
atgtcagagctgtatcagctgcaaaaagctacatctctgcacgatctcgccgccatcctgaactacacacctagcgctctgagttatcttgtctacaagaggccgggcaagtatacgaagttcacgatacctaagtccaatgggtcccctagacagatctgcgctccttgtgacgaactgaaggctcttcagaaacaggttaaaactctgctcgacaaatgtcttgcgaccatcgaatccacagggaaagcacgtggtgccatttctcacggtttcaaggccggtcactcaattatcaccaatgccgagacacacaagaagcggcggtacgtgttcaacgtggatctcgaaggattttttgattctattcacatgggcagaattagggggtttcttatcaacaataaggacttccagttgaatccaaaggtggctactgtgctggcacagatcatgtgtcatgatgataagctcccacaaggaagccccacttcccccgtggcgtctaacttgatcggccatcttcttgatctgagactcgtgcaactggccaagcgtaatggctgcagttatagcaggtatgccgacgacttaaccttctccacaaacaagaaaaatttccccgaagagatagcaagctcagatgaaggcggtaattcatgggcagcagggcctagcctgactaaaattattcagaagtctggtttcgaactcaatcatagtaagacccggatgcagtaccgcaccaaccgccaatccgtcacaggactcgtggttaaccaggtcacgaacaccccagccgaggttagaaggacagcccgagcaatggccttccacttgttcaacaagggatactatttgattaagaacgaggtcgtaggcgaggagaaagcgacagctccgatgatccgggactatacacagctggcctcgctcgatggattattcagctttatatacatggtggatcaattcaatcgcaagaagctggtgaaaaattccaccgttaagatcgagagcattaagaagacagctctggagatcattcatggcgacttcctattctacaaaaacttctatgctagtcccacccccactatcatgtgtgagggaaaaaccgacaacatttacctagcttgcgcaatgaagtccctgatggaaaggtttccaagactttgcaaacccaataaagatggcaaaccggctctgcgcgttcgctttatcaactactcagaactcacacaccgggcgctagggttgaatggcggcagtgcggacttggcagcatttatcagatcatacgctaaaaactgcgggaaatataaagcccaccctcccctgagccctactataatagtcgtggacaatgactcaggatctgacccaatctttaaggccatcaaggatgtaaccgggaaccgatatgtaatagctaatgggaagggaactattctcgataaaagtcaaaccacgtactacattgcccagaatctggccgtcgtgttgactccactgaagaaggacggcaaacctaccatgatggaggacttttttccagcaaaagtgctgcagaccccttggaacaacaagacgtttgaaattttaaccaagtctcccaacaagaatacttacagcaagaacactttcgcccagaaaattgtcaaagccgatcgggcaaacatcgagtttaagggtttttcgccaatactaaagagtatctcccagatcattcgatgttatcatgtggacaaatccttaatcgacaaatctctgaggcccaaaagcatcaatgcccagtga

SEQ ID NO: 8233 - RNA, 1797 nt, synthetic construct
  source 1..1797: mol_type = other RNA
atgagtgaactccatcagctgcgaaaagctacttcgcttcacgacctggctgctattttaaattacacaccttcagctcttagttatctagtatataagaggccggcaaaatacacccagttttcaattccaaaatcaaacggttctactcggcaaatatgcgctccctgcgacgaactcaaggcactgcagagaagggtgaagatactgttggatgagtgtctagccaccatcgagaattcatccttggcgcggggagccataagccatggttttaagcaggggcactcgattatcaccaatgccgaaactcacaagaagagacgctatgtttttaacgtagatcttaagggcttttttgacagcatccacatgggacgtgtaaggggctacctcatctccaacaatgatttcaaattgaatccaaacgtggctactgtcatggcgcagattatgtgtcatgataataaactgccacagggtagccctacaagtcctgtggtttccaatcttataggccaccttctcgacttacgcctggtgcagctggcaaagagaaacggatgctcatacagccgttatgccgatgacctcaccttttccacaaacaagaaaacattcccaaaggaaatcgcattgtctgatgagaacgataattcttgggcagccggtccagcgctcacgaaagtgattcaaaagagcggcttcgaactgaaccatgataaaacccggatgcaatatcgcaccaatcgccaatccgtcaccgggttagtcgtcaaccagataactaacactccagctgaagtgcgccggactgccagggcaatggcattccatctgttcaataagggacactacctcattaagggcgaggccacaggggcggagaaagctaaagccttggaggtgaaagactatacgcagctagcatctctggatggcctcttctccttcatctacatggttaacaacttcaacagaaaaaagatcgtggagaattctagcatcaagatcgaatcctttaagaagacatccctggaaatgatacacggcgacttcctcttctataagaacttctacgcttcacccctgcctacaataatgtgtgagggaaagaccgacaacatttacctgacctgtgccatgaaatctctgattgataaattcccccagctctgcaaattgaataaagatgggaagcctgctctgaaagttaggttcatcaattactccgagctaactcaccgagtgttagacctgaacggcggaagtgctgaccttgccgcctttattaggacgtatgcaaagaattgcggcaagtacaaggcccaccccccactgaaccccacaatcatcgtggtggacaatgacagtgggtccgatccgatttttaaagccattaaggacgtgaccgggaaccggtactctatccccaatggtaagggcgccatcctcgataaaaccaagacaacatactatatcgctcagaatctttctgtcgtcctgacccctctgagaaaagacggacaacctacgatgatggaagatttttttcccgccaatgtgctgaaggccgtgtgggacaacaagactttcgagattctgagtaagagccctagcaagaacacatacaacaaaaataccttcgcccagagaatcgttaaggcggaccggcctaatatcgagtttaaacgttttgcacccattctgcgaagcattagcgaggttatcgaggggtatcatgtcgagaaaagcgtaatcgaacagaacttgcccccaaagccggccaaaccctga

SEQ ID NO: 8234 - RNA, 1791 nt, synthetic construct
  source 1..1791: mol_type = other RNA
atgagcaagctacaccagctccagaaggccacttctctccacgatctcgccgccatcctgaattacaccccctccgcactgtcatatcttgtgtacaagcggcctggcaagtatacacagtttagtattccgaagtccaatggctctccaaggttgattagcgccccttgtgacgagttgaaagccttgcagaagcaagttaaggtcctgctagacgaatgccttgctacaattgagaaggttggagctgaacgaggggccatctcccacggattcaaagatggctattcaattgtcacaaacgccgaggtgcacaaaaaacgcagattcgtgttcaatgtagacctgcagggattttttgactctatccatggcggacgcgtacgtgggttcctgatatctaacaaggacttcaagctccatcctaaagtagccaccgtgcttgcacagataatgtgtcatgacgacaaacttcctcaagggtcgccaacttcccccgtggcctccaatctgataggacacctgctggacttacggctggttcaactgagtaagaagaatgggtgcagctactcgcgttacgccgatgatctaactttctcgaccaacaaaaagattttcccagctgagattgccagcagcgataacggctccaatccatgggtggcaggaccagcgctcgcgaaaatcattaagaagtcaggtttcaaactgaaccatgataagactcgcatgcagtacaggactaatcggcaaagcgtcaccggattgaccgtcaaccagatcaccaatacacccgtggaggtccgcagaactgtgcgcgcaatggctcactgtctctttaacaatggcttttactttgtgaaggataaggccagtgtgagtgacaagaaaaacaaacccgaaatcaaggatcacacacaattggagaagatcgacggctatttttcttacatctacatggtcgatcagttcaatcggaagaaaatagttgataactcatccgtgaagatcgaaagcataaagaaggctgctctcgagaagattcacggtgattttctcttctacaaaaacttctacgcatcatcacagcccacgattctgtgcgagggcaaaacagacaatgtgtatctgacttgtgcaatgaaaagtctcatggacagatttcccagactttgcaaaccaaataaggacggcaatcctgcactgagggtaaggtttatcaactattctgaattaacccatcgagtccttgacctcaacgggggatcagctgatttagcggcttttattcggttctatgccaaaaactgcgctaaatacaaagcccacccgcctttacatcctacgatcattgtggtggataatgactctggtagtgacccaatctttaaagcaatcaaagaatctacaggctccagatacagcattgccaacggtaaaggtaccgtgctggataagagccagacaatatactatatcgctcagaacctgtatgttgttctgacccccttgaagggggggcagcctactatgatggaggacttttttcccagctccacgcttcagaaagtgtgggaggggaaaaccttcgaagttttgtccaaacccagcaagaccacatataacaagaatacgttcgctcaacgaatcgtgaaagccaatcggaccgatatcgaattcaagaggttcgcaccagtcctgaggtctattagtgaggcgattaaggactatccgagaatcaaaaagtccgtcatcgagcagaacctggcactgaagagcaaggcctga

SEQ ID NO: 8235 - RNA, 1764 nt, synthetic construct
  source 1..1764: mol_type = other RNA
atgtccactctgcacaagctccagcaggcctcatctctccatgatctcgctgccatcctaaattattctccctccagccttgcttacttgatctacaagaaaccagtgaaatacaaacagtttgagattccgaagtctaatgggtcacctagagtgatcaacgcgccttgcgacgagctgaaggccctgcagagaaaaatcaagctcctgctcgacaaatgtcttgatgccatagaacaggctcaaggcgtgcgtggtagcattagtcacggtttccggcggggtcactctatcgtgagcaacgctgacgttcataagcgcagaacgtacgtctttaacgtggaccttgaggggttctttgacagtatccacatcggaaggatccgcggctttcttattaccaacaatgattttcgcctccatcctaatgtagcaactgttctggcgcaaattatttgtcacgatgataagctgccccagggctctccaacctccccgttagcgtccaacctgatcggccatttgctggatctgcgattaatacagctcgcaaagaagacgggctgctcatactctcgttacgcagacgatttaaccttcagttccaataaatctgagtttccagccgaggtgagctacaagatcgatgatgggcacacctggattcccggctcctcacttctaaaggttatatataagtgcggctttaaactcaatcacaataaaaccaggatgcagtatgctcgcggcaggcagagcgttactggattgactgtgaatcaaactcccaacacaagtgctgaattgaggagggccgtccgggcaatgacccatagcctgttcctagatggacagtaccatactataaaacagccaggggacaacgatgactcagagaagattaccaagtcttacacccaactggctcccctggaaggatatttctcatatatctacatggtggacaacttcaacaggaaaaagatcattgagaactcctctactaagatggaaaacatcccaaaaacagcgctagaaaatttgcacggagactttctgttttatcgatacttctatgccaatagcaagcctaccatagtgtgcgagggcaaaacagacaacatctatctcacatgtgcaatcaagtccttaatggggagtttccctagactgtgcaaatccaacaaagaaggtaaggcaaacctgaaagtccgcttcattaattacagcgaattgacgcaccgcatgctggggctgaatggtggctccgccgatctggccgccttaataagagcctatgctaagaaatgtgccccctacaaagcacaccctccccttcatcctacaatcattgtggtcgataatgacgccggaagcgacccaatttttcgagccataaaggacacaacagggaatcgttacgctattcctaaagggaagggcacggtactcgaccagtcgaagaccctgtattatattgctcagaatctgtacgtcgtgcttacccccctgaagaaggacgggggaccaacaatgatggagaattttttcacaaccaaactcttggccagtcggtgggagggaaaagagttcgaagtcttcaacaagaactcgccgagcggcacctatagcaaacagatttttgcacaacggatcgtgaagagtgatcaggccaacattgacttccggaagttcaagccaattctgtcatcgatcactgaggcaatcagacattaccccgctatcaaagtacctaaaaagtga

SEQ ID NO: 8236 - RNA, 1755 nt, synthetic construct
  source 1..1755: mol_type = other RNA
atgcccactctgaaaaaacttaagagtctgacatccctccatgatctcgccgcaatgctgaactacaccccaacagccctgtcctacttggtctataagcggacgggaaaatataccagcttccagataccaaaatcaaacggctctccgcgagaaattttagccccctgcgatgagctaaaagccctgcagaggaaggttaagtctctcttggatgactgtctggattccatagaaaaatcaaagcctctgatcggctctctgtcccacggattcaagagcgggcattctattatctctaacgcagaaccacacaccaaaagattgtacgtatttaacgtggacatcaagggattctttgacgcaattcacatggggagagtgagggggttcctaattaccaatagagacttctcgctgaatcccaaaatagctacagtcctcgcgcagattatatgtcacgacgataaactaccacagggatcccccacctcaccagtggcttccaatttaatcgggcacctgattgatattcgcttggtgcagctcgctaagcgttcaggctgtacttactcccgttacgctgacgatattacattctccacaaataagagcgagttccctgcacccatcgcgtatagaatggatgatacccatagctggattcctggggactctttgctgaaaattattcaccgatgcggatttgagttgaatcacgacaagactagaatgcagtatgcacgggagagacaatccgtaacggggcttaccgtcaacaagacctcaagtgcccctgccgagtttcgaagaaccatccgggctatgacacacaaactttttatggacggtgactatttcatccccgatgaaccaaagcatcagtcgagcagtcgggtggagcttaattacactcaactgaaccggctcgagggaatgcacagttatctgcatatgatcagcaggttccaccgacaaaaaatcgtcgataataccgtgaggcgtcccgaagatatcccactcacggccatggagaagatgcatggcgacttccttttctacaagtatttttacgcctccgagctgcctactatagtgtgtgaggggaagacagacaacgtttacctgacttgcgctattaagagccttcatgccaaatacccccgcctagccaaacctgactctaagggcgttatgaggcttaggattcggtttctcaactattcaaacctgactcaccgggtcatgggcctgaatggtggctctgctgatttgggccacctcattcgcaggtacgcgaaacagtgcgcacgctataaggggcatccgcccttaaagccaactatcatagtcgtggacaatgattctggaagccaacccatcttccaagctatccgcgacacaacaggtgacaggtacctgacacctagtggtaagggcaagaccttcgacaagagcaaaacggtgtattacatcgcccagaatctgtacgttgtcttaactcctctcatcaaaggtggcgatagtatgatggaaaacttttttcctccggccgtgctcaataccatctacaacggaaagaaattcgaagtggtgcacaaaggtccgaaaggctccgcatacagcaaacatcagtttgctcagtatgtggtaaagccaaaccagaagaagattgtttttagccgctttagctcgatcctgaagtcaatcaacagtgccataaaagactatcccctgatcaagatcaccccttga

SEQ ID NO: 8237 - RNA, 1743 nt, synthetic construct
  source 1..1743: mol_type = other RNA
atgtccacgctgcacagactgcagaaggccgccaccctgcacgacttagcaattatctttaactatactccggcgtccctggcttacctgatctacaagaagaccaataagtataccgaattcgacatccctaagagcaatgggagcaaaagacgaataatggccccctgcgatgaattgaaaacactgcagcggaaaattaagaaggcacttgacgaatgtctcgagtctattgagaaaaaggcacctagccctggccctatatcacacggattcaagaagggacattcaattgcttctaacgctgacccccataaaaaacgcttgtacgtgttcaacattgatatccaggatttcttcggcacaattcatatgggcaggatcagaggcttcctgataagtaaccgggaatttaatttccacccaaagatagcaactataatcgcccagatcatctgccacgacaataaacttccccaagggtcccccacttcacctatcgccagcaacctgatcggccacctgatcgacctgaggctggtacagctcgcgaagaagacgggatgtacatacagtcgctatgcagacgacctcactttttcgactaacaaaccaaagtttccgaaggaaatcgcctatcgtctcgaggagacacaaagctggattcctggaactccactgttaaagatcatgcataaatcgggtttctctctcaaccacgagaaaacgagaatgcaatacgcctgttcccagcaggccgtgacaggcctcgtcgtgaaccagaaggctaacaccccagccatctttagaaggaatgtgagggctatgactcacaagctgtttctggacggggactacttcatccatgagaatcataaaaccaaagaaaagaaggagctcacttataagaacctgaatcagctcgagggaatgttttcatacatctacatgattgatcgcttcaaccgcgagaagatcgttaataattccaataagaggcacgaggactttcccaagaccgccattgagcggctgcatggcgattttctattttaccggtatttctatgcctctccccagccgacaatcatctgtgaaggcaaaacagataacgtgtatctaacatgcgcaattaaggctcttcacgttaatttccctcgacttgctaaaaccgaccccgagggaaaacttaagctgcgagtgcgctttctcaaatacagtaatctaacccaccatgttatggggttgtctggaggaactcccgacattggtcatttcattaggaattacgcgaagcagtgcgccaagtataaggcacatccccctttgcacccaaccattatcgtcgtcgataacgataaagggtctgatacaatattcaaggctattaaagacgtcactgggaccacctatagcatcccagcgggtaaaggcaccaccttagataaaagcaaaaccctgtacaagattgcacaaaatctttacgtggtcttgacaccactctccggtgggaacgacacaatgatggaagatttctttcaccggagtgtattatccatgccatacgaggggaagaactttgaagtgtttagaaaaggtccgccaggcaccacatacaataagaacacgtttgctctacacatcgtgaaagccaatcagaaaacgataaacttcagcaaattctcacccattctgaaaagtatcaacctggccatacgtgattatcctaagattaagttgtga

SEQ ID NO: 8238 - RNA, 1731 nt, synthetic construct
  source 1..1731: mol_type = other RNA
atgccccgattaagagcactacagaaagccacaaccctgcacgatctagcggtgatactcaattactccccgactgcacttgcctaccttttatacaaaaagacgggcaagtacagcagattccagattcctaagaaaaatggcaccccacgtgaaattctggccccctgcgacgaactgaaaagtttgcagcgcaagctaaaaaaactgttggacgaatgtcttgagagcatagagaagaaacggtcccctttggggagtttgagccatggatttaaggccaatcactctatcatcacaaatgccgagccgcatagaaagcggctttacgtctttaatgtggacataaaagggttctttgattcaatacacatggggcggatcagaggcttcttcatttctaacaaggatttcaacctcaataccaagactgccacgatcctggctcagattatctgtcacgacgataagctcccacaagggtccccagctagtccagtggcctcaaatctgattggccacctgatcgatatccgtatggtccaactcgctaaacggctgggttgcacatattccaggtacgcagacgatataactttctctacaaacaagagcgagtttcctccggaaattgcttacaggctggaaaattcacatgattggatacctggcggagcgctcctgaaggtgatttataaatccggtttcggattaaaccacgaaaaaacccgcatgcagtatgcccgcgcacaacaaactgtaacagggttggtagtcaaccagagcaccaataccccggctgagtttaggagaaaggttagggccatgacccacaaactgttcatggacggcgagtattatgtgcatgaagagaacggcccccggtccccaaagaagaccgagcttaatcactccaagctgaacaagctggagggcatgtacagttacatctatatgactgactgtttcaacaggaaaaagattatcgagaacagcaacagacgccacgaggattttcccctgtcatcactggaaaagctccatggcgacttccttttttataagaacttttacgcctctccagcacccactataatctgcgagggaaaaacagacaatatttatttgacctgtgccatcaaatcgttacacgaaaagtttcctcgcctcgctaagcctgacgcatctgggaaggtgaagcttaaagtgcgattcatcaattacagtgagctgacccatagggtcatgggcctcaatggcgggtcatcagacctgggtcatctgattaggcgatacgctaagcaatgcggaagctataaagcgcaccccccattgaatcccactatcatcgttgtagataacgacagtggttcccagcctattttccaggccatcaaggacgttacgggcgatcggtacagcattccatctgggaagggaaaaatcttcgataagtcccagacactctataaagtggctcagaatctgtacgtggttctgacacctctcctgaacggtaaagactctatgatggaggatttttttccccccgctgtgctacgtgcgacatataacgggaaaagttttgaagccgtctctccaggacctaagggaactacctactcgaaacaccagttcagccagcatgtcgtgaagcccaaccagaagatcattaacttttcccgcttcagccatattctgaaaagcatcaacctcgcaatcagagactga

SEQ ID NO: 8239 - RNA, 1308 nt, synthetic construct
  source 1..1308: mol_type = other RNA
atgtgtcatgacaatgcactgccacaagggtcccctaccagtccattcgcctcaaatctgattggccacctcatagatattaggatggtggccctcgcagccaagaatggatgcacttacagccgttatgcagacgacatcacattcagcacaagcaagaaaaacttccccacccaaattgcttattgcatcgatgagtcgaacacatggatccctggaagtgcagtgcttaagattatctctaaatgtgggttctctctgaaccatgataagaccagaatgcagtataccagctctcagcagtccgttaccgggttggtggtaaataaaatcgcgcacactcctgctgattacagaaggacagtccgggccatgctccaccggcttttcctggatggtacgtactttactatcaagaagcccaaacatctgaataagaccgaaagaatcaccatcccgttcgggcagttaaacaagctggagggtatgctctcatacatatacatggtggatcgctataatcgcgagaagatagtgaacaacagtaagacgaaacatgaagaaatgctgatgacctcaatcgaaaagatgcacggggatttcctgttttataagtacttttacgccggggacacccccacaattgtttgcgaaggcaaaacagataacgtctacctgacctgtgctatgaaatccctgtttgctaaatatccagagctcgtctctgtggacaaggatggcaaaagaattcttaagtccaggttcattaactacagtgagttgactcaccgaatgctgaacatgtttggtggctcagcagacattgcccaattcatccggttctacgctcgccgttgcaagaagtataaagctcatcccccactacaccccactatcgtagtggtggataacgacactggatctaaggagatctttggtgcaatcaaagacacaacgggcggccgatatataattggagctgggaaggcgcaggccctagacaaaagccggaccctgtactatattgcacagaatctctacgtcgtgctgacacccttgaatgccggcaaagacaccatgatggaggactttttccctactactgttctcacaatgcctcataaaggaaggtctttcgagatattaaagggcgtcaaaccaggaaacacgtattccaaacacatttttgctcagcacatcatcaaggccaatcagaagtccattgattttagcggctttagccctatattggactcgatgaaagccgcccttctggactacccaaagatcaagttaattccggcgtga

SEQ ID NO: 8240 - RNA, 1752 nt, synthetic construct
  source 1..1752: mol_type = other RNA
atgagcgaactgagaaagttacaaaaggcagctacactccacgatctggctgtcatcttgaattacgagcctaagtttctcgcttacctcatctataagaagaccaacaaatatagccagtttaccattccaaagagcagcggtgcccccaggaacatttccgccccttgcgatgaactgaaggcactgcagcgaaaggtgaaagtgctgctggatagttgcttagagacaattgcattgcaggtgccaaatctcgctaccctttcccacgggttcaaaaaggaccattccatcattactaatgccgacaaacatcgcaaaaagctctatgtcttgaatatcgatatccaggactttttcgggagtattcacgtcgggcggcttcgcggattcttcataaccaatcgatcatttagcctgcagccaaaaatcgccacaatcctgtctcagatcatgtgtcatgaggataaactacctcagggctctcccaccagccctgtagcgagcaacttaatagggcatttgctagacgttcgtatggtttcactggcctctaaaaacgggtgcgtgtatagtagatacgcagatgacatcaccttctctactaacaaactgaaattcccacagtctattgcgtacaagatcgatgacacgcacgattggataccgggatcagacctgctgaagatcatcagtaaatccggctttggactgaaccacaataaaactagaatgcagtacaaccgtgcacagcagacggtaactggccttatagtgaattcgatcacccatactcctgccaattttaggcggacggtgcgggctatggctcataaactattcctcgatggcgattactatgtgcaagaaaagcccaagcaccttaagaaggaaaagattagtatccctcgcggccagcttaagaaactcgagggaatgttctcgtacatctatatggtggataatttcaaccgggccaaaattgtctctaactcaagcaaaaagcaagaagagttttcactaagaagcatagagaggatccacggcgactttctgttttacaaaaacttctacggcgcttccgctcccacaattatctgtgaggggaaaacagacaatgtttatttgacttgtgccatcaaatcactgcacgcgaaattccccgagctcgcctccctcacaaaagaaggcaagaccaggctgaatctccggttcattaattactccaaccttacccatcgagttctgggactgaacggtgggtctgccgacattgggctttttattagaaattacgctcgccaatgcggcaagtataaagcccaccccccgctgaatcctactatagtgatagtcgacaacgactcaggatccaagccaatttttagtgcaatcaaggatgtgaccggtagcacatacgcgatcccgaagggtaagggcaccgtcctggacacctccaagaccctctataagattgcccaaaacctgtatgttattttgacacccaaaatcggtggcaaggatagtatgatggaacatttctttcctgccgccacccttgcaactcagtacaagggaaagacgttcgaggtggtaaggtccggacccccatctacaacttacagcaaacacgtgtttgcccagaatatcatcaaggctaaccagaaaaacatagacttctcggggttcgaggcaatattgggctctattaagttagccctggacgactatcccaagattattacaccatga

SEQ ID NO: 8241 - RNA, 1743 nt, synthetic construct
  source 1..1743: mol_type = other RNA
atgctgagcctgtacgccctgcagaaagcaaaagacttgcacgacgtggctagtatcctcggatatgagccaaagttcctcagctatattgtctacaagaagaacccaaaatacacctactttacgatacctaaatcaaccggagctccacgcaatatcgctgccccctgtgacgaactgaagactctccagaagaaggtgaaacagctgctggaaaactgcctagtatctattcaactacagggaaccgcccaaggctctctcgcacatggattcaagaagggccactcaattatcaccaacgcagagccccataagagacgacgatttgtgttcaacatcgacatctctaatttctttggttccattcatgttggaaggatccgaggcttcttgattagtaacaactcctttaagctcgaacccaaagtagccactatccttgcccaaatcatgtgtcataacgacgcactaccccagggagctccaacatctcctatcgcatcaaacctgatcggacaccttatcgatatccggttagtgaacctggccgcgaagtatgggtgcatctattcacgctacgccgatgatattacattttcgacaaataagcgcgaatttcccgaacagatcgccagtaatatagaaaaggatgagtggattcccggcacttcactcctgaaagctattcacaagtgtgggttttctctcaaccacaataaaacacggatgcagtattgcgaaaatcaacagaccgtgaccggcttggtggtgaacaaaactctgaatgcacctgcgacctacagacggcaagtcagggccatcctgcacaaattgttcctggaggggaagtatcacctgaaggacaagcctacagaaaaaaaccattccaacatcagcatttacgattacaagaagcttgagaatatcgagggtatgcttagctacttgtacatgatagatagcttcaagagaaagaagttgagcctgaattccaagatccgttgtgaggacatggaacggactagtctcgaagagctccacggggacttcctgttctacaaatacttttacgccaacaacaaaccgaccattatttgcgagggtaaaacagacaatatttatttgggttgtgccatgaagtccctctggaaaaagtttaaaaggttagctaaagaggaggacggcgacattaagctcaaggtcaacttcatcaactatacggagcttacgcatagggtacttgacttatacgggggtactgcggacataagcaatttaatccgtcactacgccaaacggtgcgcaaaatataaagcgcatcctcccctgaaaccaactatcatagttgttgacaatgatagcggcagtgataagatattcaaggccataaaggagacaacagggaaacagtatataatcacaaagggcaaggagactctgcttgataaaagcaggtcgatttactatatagcccagaacctgtatgtggtgctgacacctctgaaaaatggcaacgatacgatgatggaggactttttttccaaatctactctgaagaccaaggttgatgggagattctttgaagtctataagaaatctaccaccggcacatataataagaataccttcgctcagaaagtgattaaggctcagcgcaagagaaaaattttcaatgctttcaccccaattctagcatccatcaccgccgctattgtcgattactccaaactgaagccgtga

SEQ ID NO: 8242 - RNA, 1743 nt, synthetic construct
  source 1..1743: mol_type = other RNA
atgagtttgcatgtcctacaaaaggccaaggatctgcatgatctggctagaatcctgaactacgaaccaaaggcactcagttacgttctctatgtgaaaaagccccaatatactagctttaccatccctaaatcatctggcgccccccgacatatcagtgcaccttgtgatgagcttaaaacactgcagcgtaaagttaagcgcctcctcgattcctgtattgcatcaattgagctccagggacctgccaaaggtgccctcgcgcatgggtttaagaagggacactcgatcataaccaatgcagagcctcacaaacgcaggcggtttgtcttcaacatcgacatcactgatttctttggtagcatccacgtagggcgagtgagaggattcctgataacaaacaaatcctttcagctggcccctaaggtagccaccatcctggcccagatcatgtgccacgaaaactcattaccccagggcgctcccacatccccaattgcttccaatctgataggccacctaattgacatccggctggtcagtttagcggccaaactagggtgcatatattcgcggtacgcggatgacatcaccttttctacgaataaaaaagacttcccatctagcatcgccattgaggtagacgaaaatgagtgggtacctggcaccactttgttgaagataatatacaagtgtggcttcagcttgaatcacaagaaaacgcgtatgcaatactctgacaatcagcagactgtcaccggtcttgtcgtgaacaaaagcattaatgcaccagctcagtataggagacaagtgcgcgctatgctccataaattattccttgacggcaattatcacagaaaggacgagccccgatataaagctcacgctaattccacgatctacgaccacaagtctctcgaacccctggagggcatgttaagctacctctacatgattaacaacttcaaaatggacaagttgtctaagaacggcaagattcgcaaagaagatattaaaaggacttccttggaggacctgcacggagactttctcttctacaagaatttctatgccaacaagaagatcacaatactgtgcgaaggcaaaacagataatgtgtatcttagttgtgcaatcaagtcactgcataaaaagttcattcggcttgcgaaaacaaccgggggaaaggtggagctgaaaaccaattttatcaactactcaaagctgacacatcgcgttctggatctcaatggcggtacagcagacatcgccaacctgattcggagctacgcaaaaagatgcgggaagttcaaggcccatcctccatcccagcccactattattgtggtggataacgactccggttcagacccgatattcaaggccatcaaagatactaccgggaaaaggtacgaaatcgctaatggtagaggaacgagctttgacaagtccaggcccgtttactatgtcgctcagaacctgtatgtggtgttgacaccactgcggaacggacaggataccatgatggaggactttttcagtaagaacatcctgaagaccaagctggatgggaggagctttgaagtctacaagaaaggactaccgggcaaaacttatagtaagcacaccttttcacaaaaggtgattaaggcccagcagaagaggaaaattttcaacgggtttgtgccgatccttagctctatttccgctgccgtggttgatttctctaagcttaaaccatga

SEQ ID NO: 8243 - RNA, 1761 nt, synthetic construct
  source 1..1761: mol_type = other RNA
atgttatcactcaatgctctccagacagcacagacgttgcacgacctggctcacatactgaactatgagccaaagttcttgtcctacattctgtataagaagcccgtcaaatactcccacttcactatccctaagtcatctggcgcccctagggacattgctgagccgtgtgaagaactaaaggccctacaaagaaaagttaaggaactgctggaagtctgcttaaagacaattaataaccagaagccccaatacgggtcactgtcacacggcttcaagaaggaccattctattatcacgaatgcctatccacatcgcaagaagcgttttgtgtttaacgtcgatatcagtgattttttcggaagtatccatgtcggccgcgttcgcggattcttcattacaaatagggacttcaggctgagtccaaaagtagccaccattttggcccagataatttgccatgaagatgctctgccccaaggtgcacctacaagccccatcactagcgatctgatcggccatctgatcgacatccggctcgttgaaatcgctgagcgatacaagtgtgtgtactcacgttacgctgacgacatcacgtttagttcaaatgagaagaactttcctagcgcgatcgcctttcccgtggagggtaccacagactgggtacccggtcgggccctactcaaggccatccacaagtgcggattcggcctaaatcacaacaaaactcgcatgctctatagagaaagccagcaaaccgtcacggggctggtggtaaaccagaaagtgaacccacccgcgacatacagacggcagattagagcagcactccataagctttttctggatgggcagtatttcctgcaggagaagccaaggcactcgagttctagcaaggtggatctgggaatcgactcccttgagaaaattgaaggcatgctcagctatgtgtatatggtggataaattcaacagaagcctcaccgttgagacatctaagagcaaaaaggaggaagaaatacctaaaacatcccttgagaagttacacggcgattttctcttctacaagtatttctacgcggcatctaagccaactataatttgtgagggcaaaaccgacaatgtgtatttaacctgtgctatcaagtccctgtacaagaactacccggagttggcaaaagtctctaacgacgaactgaaactcaacgtaaagttcatcaattactccgatttaactcaccgggttatgggacttaacggggggactggtgatattgctaatctgattcgagcctatgccaaacaatgcggaaagtacaaggctcaccctcccctgcacccaaccattgtggtgcttgataatgactctgggagccagcaaatccttaatgccgtgaaagatctcaccacccctaggtacgatgtgcccaatggcaaaggaaccaaactggacactactcaggacttttataagatagcccagaacttgtacatggtgcttacacctttggataagggcaagtccacaatgatggagaacttctttccaactaaggtgttgaatacaatctacaaggggaaaacctttgagatactgaaaaagtcccccccagaccagacctattccaaacatatttttgcccagcatatcgttaaagcagagcagaaaaaaattgatttcgtcggtttttcgccgattctggacagtatcaccaaagcgatcaaagactatccgaccataactctgcctaaaatcaaatga

SEQ ID NO: 8244 - RNA, 1749 nt, synthetic construct
  source 1..1749: mol_type = other RNA
atgagtaaactgaacatactgaaaaacgccaagaccttaagcgatttagctcacttgttgaactataagccgaagtatctctcctacatcatatacaagaaacagaacctttaccaccagttcaccatccccaaatcatctggagcccctagaaccattctggccccatgtgacgaacttaaagccctgcagaagaaagtctccgagctcctgcaagattgtctagaaaatatgaaccaggacttacagattcacagcagcctgtcccatggctttatgaggggacactctataatgactaatgcagacaatcaccgcaagaaacgttttgtgtttaacatcgatatccaggattttttcgggagcatccatcttgggcgggtaagaggcttttttatcaacaataagtccttccagcttgaccctaaggtggcgactgtgctcgcgcagatcgcttgttataataactcactgccacaaggaagcccttgctccccagtggtgtctaatctgatcggccacctgatcgacattcggctcgtaagtattgcaaaaaaagccggctgccagtatagccggtacgcagacgatattactttttctacaaacaagaccagctttccctccactatcgcaattcaagatgagacaacaggtaattggtctgtttctgagcaactggcgaagattattaagaagtgtggtttctctctcaataccaccaagacccgcatgacctaccgcaagtcccagcagactgttacaggcctggtagtgaaccagaaggtgcatacatcggctagttatcgaaagcaggctcgggccatggcccataaattgtttaatgacgggagtttcagcatccctgacaaagccagtcttgcggcaaaggagaactcccccaagatgattgccgggaccctgaatcagttggagggcatcttcagccatatctacatggtggaccaatttaataggaacaagttgaggggtaataatggcatcagaggggaagatctggaactaactgccattgagaagacacaccgtgactttttgttcttcaaacacttctattccacctcgctgccaaccatcatttgcgaaggcaagaccgataatgtgtacatacagtgcgcaataaggtcactggccacccaataccctgagctcgccacgatagatgcccaaggcaaacggatcttaaaagtcagattcatcaactactcagaactaacccatcgagtgctcgatttgaacggaggcactgccgatatagctcgcctcatttgtggatacgtccacctgtgcggaaagtatcataacacagccccaaagcaccccacaattgtcctcattgataacgatcagggcagccagtcaatcttttctgccataaagtcaacgactaaggatactcacacggcagggacagggaagaataaacagatcgacagaagcaaaaacttctactacatcgctcagaacctgtatgtggttgcaacaccgctgatcaatggaaaagactccatgatggaggatttctttaagaatgctacgctggcaaccctggttgacaagaagacattcagtgtccgaactcccacagctcccactggttcaacctatggtaaacacattttcgctcaaaaggttgtcaaagctaacagggacaaaattgacttctccgactttagtccaatcctcgactctcttaaaagcgtgattcagcatttcaaacttccttga

SEQ ID NO: 8245 - RNA, 1734 nt, synthetic construct
  source 1..1734: mol_type = other RNA
atgagcaagctggctatccttagatccgcccagggccttcacgacttggccgaactactcgcctacgagccaaagaagctttcttacgtgatctataagatgcccaacaggtatacaaaattcaccatccctaaaagctccggggggaccagatcaatagctgctccacgggaggagctcaaggcactgcaggttaaggtgtctaagttactgcagctttgtatccataacatgaatgctgacctcaatatcactacttccttgagccacggttttacgaaaggtcactctattatgacaaatgctgacttgcaccggaagaagcgctatgtcttcaacattgacatagaaaacttctttggatctatccatagagggcgcgtgttcggtttcctgactaaaaacaagagcttcagtctaaatccaaaggtcgcacgagcgctggctcagatcgcttgtcacgatgatgcacttcctcagggggcgccttcgagccctgtttttagcaacctgattgggcatctgatcgacgtgagattggtggagttagccagcaagctaggatgcagttacagcaggtatgccgatgacatcacgttttctacaaacaaaaagaccttccccaaagagatagctctggtgtcgccgtcaaacgaatgggtggccagccccacgctgattaagatcgtgtccaagtgtggatttgccctgaacgaaaataagactcggatgcaataccaggaatctaggcagagcgttaccggcctcaccgtcaatcgcaaaataaacagtccggctgtgtatcgccaccaggcgcgtgctatggcccactcactgtttaacacaggcagtttctcagtgcctgacaaggatccaaaagtcaaagccaagattccaggaaccattaatcagctcggcggcatgctgtcctacatctatatggtgaacactttcaatcggtccaagattgtggagaattccgcaattagggatgaggacattaaactgtctgctatggagaaggtccatgcagactttgccttttacaaacatttctacggcaaccagaagattacaattctgtgtgaaggaaaaaccgacaatatatatctgcagtgcgcgatcaagagtttggccaaaaagtacaccatcctcgcaaagctcaacgccgatggaaaagccgttctcaacgttaacttcttcaaatataccgacctgacacataggctcttggggttatacggtggaacaggtgatatcggggaacttattaagcgttacgtgtcatgctgcggcaagtacaaaaatcaccctttcaaacaccccacaataatcgtagttgacaatgacgagggttcccagaaaatctttactgcactcaaagtcgtcaccggcaataaatacatgattggatccggcaaagcgcaaaacctggataagtcactggatttctattatgttgcccaaaatctatacgtagtgtttactccccttaagatgagtggcgatgatactatgatggaggactttttcaccagtgacacactgaacaccatcgtggatgggcagagattcagcgtagtccataaggcacccaatcagctggtgtactccaagcacaccttttcacagaaggtagtgaaggcaaaccaaaaaacgatcaattttttgggctttacaccagtcctggatcgaattcaaaaagccgccaaacatttctattctttaccctga

SEQ ID NO: 8246 - RNA, 1767 nt, synthetic construct
  source 1..1767: mol_type = other RNA
atgattaaacttaagcttctccaatctgccgccacactgagggatctaagtatcgcacttggatttcaacccaaagccgtgtccttcatcctgtacaaatactcaaaagaacggctgtacaccagtttcacaattcctaaaaagagtggcgcactccgcgatatccatgcaccgtgcgcggaactgaagaacttgcagtcaagagtgagcgagtacctccaggattgtatccaggagatcaacgaaagtaagaagattacccagacgttgagccatggctttaagagaggatattccatcgtaaccaatgcctcaacccacaggaagagacgcctcgtgctcaacgttgatctcgaggacttcttcgggagcatcaatttcgggagagtacgtgggttttttatcacgaacaaaaacttctctctcaaccccaatgttgcaaccgttctggctcagattatttgtttcgacaacaaactgccacagggatctccctgttccccagtgatgtccaatctgatcgggcacctgcttgacattaaactggctcagatggccacatcgatgaaatgtacctacagccggtacgcggatgacctgacgttctctaccaataaacaacagttcccactcgagttggtcagtcccggcgacaatcatcacgattgggttgcaggagcgaaacttgaacagatcatatcaaagtgcggatttaaagttaacgcccggaagactcggctgcagtaccaagattcaagacaggacgtcaccggtctggtagtcaacgagaaagtgaacgtgcctgcaccataccgaaggcaggctcgagctatggcccaccgactgtttgaacacgggagctttcaggtcgagcgtctctccattaaggataaaggccaggtcacatctgaacggatcgaaggaagtgtggaccaactatctggcatgttctcctatatcgccatggtgtcacagcacaataaagacttagtgctgaaagccgggcttaagaatgcacagacagagttgtccagtattgagaaagttcatcgcgacctcatcttctataagagcttctacgcaaatccgatgccgactataatatgcgaagggaagacagataatgtctacctaaggtgcgccataagatctttggccaagcagtatccattactggcgaccttcgaggataagaacaaacttaagctaaacgtgagcctgttcaaatattctcgcttaaactcctccctgttgggcatcagtggcggtaccagcaatctgaagccttttatctcagactttagcaagaatattgctaggtataagtcccgcaagagcccatttcctgtgattatcctgatagacaatgacaggggtgctaaggagatttacagcacaatcaagacaacaactaaaactgctgatactattgacggttcgataccctactatcatatcgcccaaggcctttatgtcgtgcccactcccaagttaaacggcgccctggagtccaagattgaagatttttttcccttgcagactctgaaggagactctcgatggtaaaaaattcaacgacaagaacgaggacttaaaggccgatgaatatggcaagcatttctttgctgagcacgtgattaaaaaaaagcagaatagcatcgacttcaccggatttaagcctctgctcgacattataagctcaatcatttcccaatctgtcgccctgcacatgtctgctgtggtgcctcctgctcctccaaaggtatga

SEQ ID NO: 8247 - RNA, 1767 nt, synthetic construct
  source 1..1767: mol_type = other RNA
atgatcaagttgaaactcctgcagagtgccaaatccctcagggacctgtccattattctgggcttccagcctaaggccgtctccttcattgtgtataagtattcgaaagaccgcctgtatacttcttttacgattcccaaaaagagtggatctattcggacaatacgggccccctgtccagaacttaagaatctccaatcatgcgtcagcaagtatctacaggattgtattgacgagatcaatgagagcaaaaagattacccacaccctgtctcatgggttcaagcggggatactccatcgtaactaacgccagcgtgcacaagaaaagaaggctggttctgaacgtggatcttgaggacttctttggtgccattaactttggaagagtgcgtggtttcttcataaccaacaaaaacttctctctgcagccatccgtggccactgtgttggcacaaatcatctgctacgagaattcaataccacagggttccccttgctcacctgtcgtatccaacctgatcggacatctcttagacattaaattggcaaagatcgcgtctgagatgaaatgcacttattctcggtacgccgatgacttaacgttttctacaaacaagcaacagtttccgctggagctggtatctcctggcaacagcccccatgattgggtggttggtgagaggctcgagcgcgttatccagaagtgtggcttccaagttaatagccgcaagaccaggttgcagtacagagactcccggcaggacgttaccgggttagtcgttaacgagaaagtaaatgtgccagctcaataccgccgcagagcacgtgcaatggcgcataggctgtttgaaagcgggtcatttcaggtggagaaactgagcataaaagacgatgggagggcggtcagtgaaactagagctggctcagtggaagagctgagtggaatgttctcccacatcgccatggtcagtcagtacaataatgatgtggccattagagccggcataaaggacctccgaggagaactaaccagcatcgaaaaggtccaccgagatttgattttctataagtcgttctacgctaaccccatgcccatgatcatttgtgaaggtaaaacagacaatgtgtacctacggtgcgctattcgcagtttagcaaagcagtacccgagcctggtcactgtggaagccccagacaaggttaggcttaacatctcactctttaagtacagcaagctcaatagccagttgcttgggattaacggcggctcaccacatcttagaaccttcatcacggatttttctaaggctgccgcaaagtacaaatcccgtcggtcccctttccccgtgatcgtgctgattgacaatgataaaggggcgcgagagatcttcagtaccatcaaggccaccacacgaacaactgaaaagatcgacggctctatgccctactatcacatagctcaggggctgtacgtcgtgcctacccctaaactgaacggggctctcgagtcaaaaatcgaggatttctttcccgtggctacacttagcgagacactggacggcaaaaaatttaaggcagaaaatgaagacctcaaagctgatgaatatggaaaacactatttcgccgagtatgtcatcaaaaagaagcagggatctatcgatttttcgggctttaagccactgcttgatgtgatctccacaatagtgagtcagaatattgcattgcaaatgagcgctgtggtacaccaggtcgttgtgaagaagtga

SEQ ID NO: 8248 - RNA, 1830 nt, synthetic construct
  source 1..1830: mol_type = other RNA
atgagcgaatacatcgcacccgaccgtctgtgtaagagagccgtgcagatgggtagatacgagtttcgcgtgcgggtgagcatctccctcttcatgaagataaaattgctacagagcgcttcaaacctcagggactttgcaattctaatcggcttccaacctaaagccatcagttttattctgtacaagcatcccaaggatcgtctctatactcagttcgagatcccaaagaagaacgggagctttagaactatcacctcaccctgcccagaactcaaaaatcttcagtcgatcgtttccaagtacctccaagattgcttagcagagatcgatgaacgcaggccgaaaaaaggaacccttgcgcacggcttcaaacgaggctacagcatagcgtcaaacgctgccgttcaccgcaatcggaggtatgtgctgaatcttgatctagaagattttttcggggccatcaatttcggtagggtacggggcttctttataaatgaccggaatttctcactgaaacctgacgtagccaccattcttgctcagataatctgtttcgagaacaaactgcctcaagggagtccatgttctccagtggtgagtaatctgatcggccacctgctggatattcgactggtcgctctggccagcaagtacggatgctcatactcacgttacgccgacgatattactttttccacgaacaagaagacgttcccgattgaattagcttcctctcagttgattcctaacgtgtggagtctggggcccgaactgtctagtatgattgttagatccgggtttaccataaatgtgtctaaaacccgggtgcagtacagtgactcccggcaagaagtgaccggcttagttgtgaacaagaaggtgaataccgtcgcatcctatcgaagaacagcccgggctatggcagagcgcctgtttagaacaggcagcttccagatcgagaagttagtacttgattctgagggaaaatctaaatctggcaccgtgagtggaacggttgagcagttgaatgggatgctcaactttattacaatgatcaaccgcctgtctgaggagttccgcgtcagtagcgacaaacatgacttatcgtcgatcgagaaggttcacagggatctccttttttacaagtacttttatgccaacaccatgcctactattgtctgcgagggacccactgattctatatatctgaggtgcgcaatcaggaagctggccgctcattttcccgcgttggccggctttaataaggagggagaaattgagctgaaggtctgtctgttcaagtattcagacctcaacgcccgactgctcaaactcactggggggacagctcccctgaggacattcgcatctggtttcagcagcaatgctgcgaaatacaagagcagaaagtcaatattcccagtcattgtcttgatagataacgacaaaggtgccaagcccatttatagcttcatcaagcaactgccgggaaacgggggagtagtggacggctcccagaaacattatcatgtggcccagggattgtggatcgtgcctactccaagaagcgaaggagtccctgagtccaagattgaagacttctttgaagacaaagtcttgaagatggaactaggcggtaaacactttaaccctgaaaatatggatctctccgacgacgagtatggtaaacagtatttcgctgagcacgtgatcaaggccaaccacaagtcaatttccttcgacggctttgcacccattctttccacaatctccagcctgatcacagatagtatcaaccaggccaaatctgcactgaatcgcccatga

SEQ ID NO: 8249 - RNA, 1737 nt, synthetic construct
  source 1..1737: mol_type = other RNA
atgaaaattaagctgctccagtccgcgtcatctctccgggatttggccattttgctggggtttaaacccaaggctatatcgtttttgctatacaaggttcccaaaccgtatctctatacccaattccagatccctaaaaagaatggctcaactcgcaccatcatgagcccctgcgctgaactgaagaacctgcagtctgtgatctccaattatctgcaggactgtctggaggaaattgacgagaaacggcagaaaaaaggcacactgtcccacggcttcaaaagaggctactctatagcttcgaacgccgcgatccatagaaataggaggtacttactgaacttagacctcgaggacttcttcgggagcatcaactttggcagggtcaggggctttttcattaacgacaagaacttttctctccaccctgatgtagctactgtccttgcacagattatttgctttgagaacaagctgcctcaagggtcaccttgttcccccgttgtctctaacctgattggacacttgctggatatccgcctggtgggtcttgctagccggtacgggtgcagctataccaggtatgccgatgatattagtttttccacaaacaagaaggactttccagcggaactggcagccccgggtagtatgccccacgaatggcacgtaggaccggtgcttacagatgttattatgcgcacaggctttagtattaacgctagtaagacccgggttcagtatagcgacagcagacaggaggtgacaggacttgtagtaaacaaaaaagtgaacaccgcagccacctacagaagggcagcgagagccatggccgaacggttatttcgaacaggttcattccaggtggagaaaatggtgctcaacagtgagggaaacagtgtgtcaggggtggtcaggggatccatcgaccagctcaacggcatcttcaacttcatcactatgataaaccgcttctccgaagtgtcaagagagtcaatccaaaaatcggaactgagcagcattgaaaaggtgcatagagatctcctcttttacaagtacttctacgccaataccatgcccaccatcatatgtgaaggttctacggacaatatttatctccgctgcgcaatacgtaagctgtccgcaaattttccagcactggctggtgtcaatgagaagggggaaactgagcttaaagtgtgtctattcaagtacagcaaacttaacgcccgtcttctcgatctgaccggcggcactccaccattgcgaacgttcatctctgaattcgccaataatgccgccaaatacaaatcccggaagtccatttttcccgtcatcgtcctgatcgacaatgataagggggccaagatcatctacagcctaatcaaacaactaagtggcaatgcatccgtcatcgatgggagccagcgccattaccatatcgcccagggactgtggatcgttcctactcctaaagcagtgggcgtcgtggagagcaagattgaggatttctttgaggataaggtgctggaaatggagttgggaggaaagcacttcaattcagagaataatgacttgtctgacaatgagtatgggaagcaatattttgctgagcacgtggttaaggctaatcataaggacatcagcttcgacctgttcgctccaatattatccacaatttctacgctgataactgacagtattaaccaggccaactctgcccgtaatcgaccatga

SEQ ID NO: 8250 - RNA, 1740 nt, synthetic construct
  source 1..1740: mol_type = other RNA
atgaaacacctcgacttgatcaaaagctgtaataacctgcaggatgtcgcttttgtactgggctataaaccctctcggctagcttatattctttacaagatgccaaactcgaccaagtatcgggagtttgagatagacaaaaagctggggggtaagagaaaaatctttgcaccctgcccagaattaaagactctgcaacaacggctgagcaagctcctgcaaaattgcatcgccgtcattaataaggagaaaggcattcagaaaagtatttcacacgggtttaaaagagactgttccatctttaccaacgcagaacagcacagaaataagaggttcgtcctcaatatcgacctcgaggatttctttgggacgatcaattttggtcgagtgcgagggttcttcattaaaaacaagaacttcgagatcgacgaaaacgccgccaccgtcctggctcagatagcctgtttcaacaactccttgccacagggcagcccttcctctcccgtgatcaccaatcttatctctcatactatggatatacgcctcgccgcgctggctaaacagctcaaatgcacatactcccgctacgctgatgatataaccttctcaactaacgagaagaattttccgatcgaactggctgagccaacaaacgccgaaggcaccgaatggaaagtgggaaaaaagcttgagagaaagattcagaaactgggtttctcggttaaccataaaaagacacgcttgcaattctcacagtcccgccaggacgttaccggcttagtggtcaacaagaaagtgaacatcaagagtgaatatcatcgcagcgcacgagcaatggcacatagtctattcaagactggcaagtttcacattaaagaaaacaagcaggatgcgaatggtaacatcgtggaaacaaaacgggagggaaagataacggagctgggaggatacctcaatttcatcgatatggccgataaatataggaagcgtcatgtagatgactataaggaaagaaggattctgtcatctagggaggaaatttaccgtgactttctcttcttcaggtacttctatcagccttccagacctatcattctttgcgaggggaagacagactatatttacctgaaatgcgccatcaagagtcagtttagtaagtacccgaacctctgtcagaagaataaacaagatgagaagatccttaaggtggacttctttaagtacacagaggttaagtcaaggctattctcactgagcggcggagcatccaccctgtctacttttatagggaattacacaaagttctgtgaaacttatagcgtggagattagtaaaaaccccgtgattatagtcgtggataacgacatgggagtaaataaggtttttagctctgccaagaccaaaaaatatggaaagagcaaaggcagcaatatcgacggttctttaccattttaccacttgggcgagaacctttacttgaccgctattcccaagaaactgggcaaagacacagcaatcgaggactacttcaaacctacggtcttgtctacaaagtataatgggaagactttcaactacaagaataagaccaagaatgttaaccctaaaacggagtacagcaaagccgtgtttgcggaacacgtgatcgagaagaatcgggataagattgatttctccgactttactcccatcctggataacatttgcgccgctatcaatgactattccaaaaagaaatga

SEQ ID NO: 8251 - RNA, 1815 nt, synthetic construct
  source 1..1815: mol_type = other RNA
atgcaagcatcccctcttaaaaaatttctgacaagcagtatgcagattcccagcctgcaggatctgaaggagtgtcgcagcagagccgacattgccactctccttggctttaaacctgcagcgctcacatacatcctgttcaaaatagacccccccaaaaaataccgcatctttaccattccgaaaaagagcggaggcactagggagatttcttctccatgccccgagatcaagcagcttcagaagcgcttatcatacattctgtccgacgcctacactcatctatatgacttgaacaacaccaagaaatcagtctcccatggttttcggaaaaagcatagcattattacgaatgccgtcatgcaccaaaagcgaaaaaatatcctgaatatcgacctcgaagatttcttccctacgattaatttcggtagggtacgatccttcttcataaagaacaaggatttcaacctccacccagatgtggcgactacattgacccaaattgtgtgccatgaaaattctttgccccagggcgcaccaaccagtcctataatctcaaactttatcgccagaccccttgacattcgtctgctgtcactcgctaagagccacgggtgtttctatactaggtatgccgatgacatcacgttttcaacaaataagtctgagttccacagtgacattgcaaaacggaattccataggtaacgattggaccatcggagggaagttatccagcacaatcgaaaaatcgggctttatcctcaatgataaaaaaacacgagtgatgtacagcatatcacggcaggaagtaaccggacttatcgttaataaaaagatcaacacccgcattgaatatagaaaactcgctcggtcttatgtgcatagcctgattaacacagggcagtattatctgacctctcatgaggtcgaaaataacaagaagatcaaagttaagcgcattggcagcataaagcaactggacggcatcctgaacttcatctaccacacagaacggttctctaacttgaagctgaacgagaagaagaataagaagacgaatcagaacatctcttacagcaactctgagaagacatataggaagtttcttaaacacaccctcttctgtgagaatgaattcccattcatcatctgcgagggaccgactgatgatatttacctgaaaagtgcattgctgatgaagggcgagaattttcctctgttatactcttcccagtctcgtcctaaaatcaagctaaagttctttaagcactcggagaagatgagacatctccttgggatgtcagggggaaccggagatattaagaacttcatagctagctacaacaaagagattgccagcgaatttaaggagaggcctaagaatcccattattgtggttatagacaatgaccaggggtccgacgaaatctttgcgtggattaaaaggaacattgagccctttaaaagtagaaaggactccaacgtcaagggcgatgagaatttctatatcgtgaaaccatcgctctacattgttccaatcccgcggatcaatgagagtgataccgctatcgaaaacctgttaccaagccacttgataaataatcagatcgacgggaaagaagtgaatctgagtaacaaggccgtggagactaaccagataaacaaaatgaagctggccgatcacgtgagaaaaaacaagaaggatatcgacttttcaggttttaacaaactgctagagtcaatcagtatggcttattaccattacaaagacgaaactgcttccgtcgagaagtcctattcccacggcatgtga

SEQ ID NO: 8252 - RNA, 1812 nt, synthetic construct
  source 1..1812: mol_type = other RNA
atgagcaatctgaataagcttaaaaactgcgaaacccgggccgatctggctgatctcctggggttcaaggccagttctctcgcatatatcctgtacaaaatgccaccagagaagaagtatgaggagtttctgatcccaaaaaaggcaggaggcaatcggagtatcgccgcaccttgccccggcttgaagaaacttcagaagagattgtgtgagatcttaacagagtgttatcaagaactgtacggagggagcgggataaagaaatccatttctcatggatttcgcccaaagcactctgtcattactaactcactaatgcaccagaagcgtcggcgagttctcaacctggatctgaaagactttttccccagtattaactttggtcgcgtgcgggggtatttcatcaagaacaaagactttgccattagtagcgatgtcgccactgtgatcgcccagattgcttgtcacgacggcgtacttccccaaggagctccaacctcccccgtgataagtaaccttgtgctgcgctcgctggatctcaggctactgactctggccaagaaaaatagctgcttctacacccggtacgccgacgacatcaccttttctaccaacaagacttctttccctgaggagatcgctattaaggaccagctgacacataaatgggacgtggggggggaactggagagtacgatactcagatccggcttccaggtcaatgacaataaaacccgagtgatgtacaaagtgtcacgtcaagaagtcaccggcctgatcgtcaataagagggtttctacacgtgaggagtatagggaccaggtgcgctcgatggtgtattccctaacaaagcgcggtgagttttacttcaaacagatctccatcgttgacgggcaggcgacaactgttaaagaacctggagacgtgtggcagctggacggcatgctcaactacatttacaatgtcgatatggcatatctcacgtgggcagtaggagagaagaaagtcagcgaaaaaaaagataaggatgtcgtgtacagcgcaagagagcaaatttaccgcaaatttctcttctacaccctgctttgcaaaagtgagtctccttacgtcatttgtgaaggcgtgaccgatgatatttatattagatgcgccttgtcttcattagttggggagtttcccacattaagggtggcttcagatgagaaaaagatcaagctgaaattcttcaaccattcaaagaagatgaagtatctcctgggcatgggcggtggcactggagacataaagaagttcctgatcgagtacaaggctgttattatcaagacctttagcgaacggccctcctttccggtgatcgtgatcgttgacaatgattccggctttaggggtagcaaaggcatgtattcttgggtgcgagcgaacgctgaagccattgatgggccaggcttcggtataggacctaaggcaaaagaggggttttacttcgttaagcctagcttatacatagtacccatccccagaggagaggaaagcgaggtggcgatcgaagacctattgccatcgaagattttgacgtccaagatcggtgggaaagaggtgaatttgaacaacaatggagtgtcctccagcgctgaaattggcaagacaaggctcgtcgaacacgtaagaaagaataggaaagatatcgacttcgggggattcagaccgcttttgcgactgatagaaggcgcacttactcactatgacgcggccacaaaatcaggtgtcgaactcgtagccggccctaacgccgtggtggatgcttcaatgtga

SEQ ID NO: 8253 - RNA, 1677 nt, synthetic construct
  source 1..1677: mol_type = other RNA
atgaccctcctggagcaacttcgacaggctcggacactgagcgactttgcaattattctcggctatgagcccaaaaaactcagctacctcttgtacatactgccgaaggagaaacctttatacaaccagtttagcatcaagaaacgcagtggaggagagcgcgtgatatcagccccctgtgaagagctcaaggaactacagaagcgccttctcaacctccttgataagtgctctcaggagataaatgcttccaaatccaagaaccataactccatcagccacggtttcaaaaagcgtcattccattgtgacaaatgccgtaaagcacaaaaacaaacagtacgtattcaatatcgacttggagaattttttcggaacgatcaacttccagagggtctgcgggttttttgtcaagtcaagggaattccaactccatagtaagattgcagaaatcatcgctctgatatcatgtcaccaagggtccctgccacaaggggctgcaactagtcccattatctccaatctgattacccatattcttgatgttcggttagttaagttcagtactaagataggtgtgttttatagccggtatgccgatgacctaactttttcgaccaacaagaagaacttccctattgaggccgctctgaaatctatcgaactgaaacaccagtggatcatcgggaaagatttgaacgagattattaacagatcgggctttaaagtgaactcaagcaagacccggatgcagtataaaaacagtaggcaggaagttacaggactgattgtgaacaaaaagattaacaccaagcgtgaatacaagcagaaggtgcgagctatggtgcacgccctggtccatagaggtgagtttaacatctttgagtctgactctggaatgtacgtaaaaggttcacttaatcagttacgcggcatgttaagctttatagagtctattaaccccagggacggctgctccaaggcaaacgaaaagatgattggcagggatatctaccataagttcctgttctacaagtacttttacttcggcgacaagccaattctgatttgtgagggaaagacggatggcgtatatatccgcgaggccatcaaatggttttctgggagggatgagttcaagggcctgaaattcgacatctttaagtactcaaaactgaatggacgggtgctggggcttaatggtggctatagcgatctcaccaagtttatcgcgcagtatctgacattcttcaatgtcaataccgcaccttccagtaatatgcctgtgatagttgttatcgacaacgatgacgcggccaagaagatcttgaaagacgaaagaaatgagaatagagacttctatcacaaagtcaagaatctgtatgtcgtgactaccccactggtcgggacagaagtggagtctgaaatcgaggatttgttcaaaatagaggccttgagaattgagctaaatggcaagactttccacaaagaaaaagatctgaacgacggaaagcattatgggaaacacgtgttctccgagaaaatcgtgaagtccaaagaatacaatatcgacttcagcggctttgaggaactgctcaaaagaattcaaaacgccatcaagcactttgagactcagacaaatgaaaatcgaaagtctagcatcgaaccaataaactga

SEQ ID NO: 8254 - RNA, 1695 nt, synthetic construct
  source 1..1695: mol_type = other RNA
atgagcaagctcaaggacctgaagaatgcgaaatctctcacagatttggccaagctgctcggttttaaaccaaaggctctagcctacatcttgtacgtgatgccaaaagaattgcggtatgcagagtttgaaatccctaagaggactggagggctcaggaaaatttcagcgccctgcagtaagctgaaaaagttgcaaaaaaatctctccgatctcctgctgatctgttgtgacgaactgcactctcagagggagtcccagcacaatcgcaaaatttactcggccatatcacacggattcgtgcgcaagaaaagtatcatcacaaatgctgcaaaccaccgatccaggcgctatgtctttaacctggatctcaatgacttctttgggacaatcacctttcctagaatcagaggcttcttcatcgagaacaagaatttcaacttagaccccacagtggccaccctgatagcccagattgcctgcaataatgatgctttgccacagggaagtccttcctcaccggtcatcagcaatttgcttgctcatattctcgatataagaatcgtggccctggttagtaaggtagggtgtacctatagtagatatgctgacgatctgactttctctacgaacaaaaacaacttccccgaagaactggccaagtttgatgatgtcgaaaagctgtggtcagagggagaggtgcttagaaacatagttaatagcagcggatacaaaatcaattccagcaaaacacgtatgcaggagaagaggagtcgccaagaagtgaccggactgatcgtcaactcaaaagtgaatagtcgagtagagtatcgtaagtctgtgagggcgatggcttatagccttttcgaaaccgggaagttccatcgaaatatctccagactcaacgacgaaggcaaaatcatcgtaattaaggagctgggcaagatgtccgaactcaacggtatgctcaattttgtcgacatgctgtctgattacaaccggggcaaggatagaacctccagcgtggggaatgaacatctgcggaaagagcctaggaaaatggtccagctaaacacaaacgaacggatttaccgggactttttgttctacaagtacttctactctagcgacacgccaaccattatatgcgagggcaaaacagactatgtatatctgcaatgtgcgattcgtaagctgcaccaaaaattccccatgcttgcaggcgtcaacgcctctggcaagattgagttcaaaatcaagtttttccgcttctctgccctaacctcgaaactttttggcctgtccgggggggctacccagctgaaacagtttattattgattatgacgacgcatgcagccgctttaaagcagctggtctgaacaagccggttattgtggtgttagataacgacgcagaggcaaagccaatctacagcctcataaagaactacctaaatattaacgtggacggttcagagcttttttatgagtacaagcggaacttatacatagtggccactcccctgttacctggcttaaaggagactatgatcgaaaattgctttagcacggatgttactgagaaaatcctttccggaaaaaagttctcttgggccaatgactacaagaaagacgagacttatggcaagaaatatctggctgagtacgttgtgaagaagtcagccattcagtga

SEQ ID NO: 8255 - RNA, 1743 nt, synthetic construct
  source 1..1743: mol_type = other RNA
atgacccagcttaaaaacttaaaagccgccataagtctcaatgatgtcgcaactattctgggcttcaccccgaaagcgttagcctacattctgtacaaaatcccttctgcagagaagtacgcccatttcgacatcccaaaacggtccggcgggatccgtaaaatttcagctcccgtcgcacgcctaaagaaactgcagacaagactcgctttgaccctgcagcaatgcatcatcgagatcaatacttccctcaaagtcaagaatgtcctgtcccacgctttcacaccaaagtttagcatcattaccaacgcagttaaccaccgaaataagaggtttgtgttcaacctggacttagagaactttttcggcacaattaatttcggaagagtgcgcggtttctttattgagaaccgtaattttcagctacacccagacgtagctacagtcctcgcccagattgcctgccacgaaaatatgttacctcaagggagcccaagtagcccagtaatcagcaatctgatcggacatatacttgacatccgcctggcggaactagcacacaaaaccggttgtacttactcgcgctatgccgatgacctgacattctctactaataaggccaatttccccagccgcgtggcgcagctgattaatcaaacgactcatgagtggaatacagggaaagagctggagagactcatccttaaggctgggttcaccataaactcgtccaagacaagaatgcagtatgagagtaacaggcaggaagtgaccggcctgattgtgaacaagaagataaatactcgaactgagtacaggcacttggtgagagctatggctcataacctctacaaaaccggacagttttataaaacagagactgtaagggacgctaccggcgcactcgtgcacacgaaggtcgatggaaccgtcagtcagctgaatggaatgttgtcattcgttgatagcgtgggtgtgtacaacctggaaaaaaacgaacccaaggaattctcagtgacgaaacataaggacgcgaagcccgaggccaagctttccgccatagaaaccgtgtaccggagagtgctgttctttaagaacttttacagtcccgaataccccgtaatcctctgtgagggtaaaaccgattcagtttatatcaaagccgccctccggaaactggtggatgacttcccaaatctcgcagttaagaaaaatggaaaggtcgagtccaagatccggtttttcaactacacaaaaacagccgatcgaatcatgaacttgaacggcggaaccggtcagattaataagttcattgtggattacgctcctaactgcaaaaagatttctgccaaaggccaacttatgcctgttatagttctgatagacaatgatgagggggctaagggcatctactctacagtgtctaaggtgacgaagaaggaagtcaagaacaccgacgactttttctttgtcgccgaaaacctgtatattgttgcaaccccgctgttggagggcaagcagtccactatcgaagatttttttgaaccctatgtgagggatactaaacttcacggaaagagcttttctgggaaaaacacattcgatcctcatactcaatatgggaagcactatttcgcagaatatgtggtaaagaaggacgagtcaaaaatcagctttgagggctttaggcctattttggctcggctggacgccgcgctttccgactataaaaagaagacgtga

SEQ ID NO: 8256 - RNA, 1806 nt, synthetic construct
  source 1..1806: mol_type = other RNA
atgctgggagctaatgcccatatttctcttccagaatggtcaacccggctggtcactgttatcagagtccgggtgcctataaaccccttccccagcctgatagtgatgagtaaactggcctctctgaagagtgcgaccagcttaagagagctggctgtggtgctgggctataaacccaagaatctcagctacatattgtatatcaagcccaaaaaggaactgtacgaggagtttgagatccccaaaaagagtgggggagtgaggaaaatatccaaaccatgtgaagaattgagagctctacaaagaaagttggctgacttcctgcaggactgtattgatgagatcaactccgaaaagaaagtgaaggttagcatctcacacgctttcaaaaggcgacactccatagctacaaatgcttttgcacacaagaataggcgctatgtctttaaccttgacctggaagattttttcggcagtctcaacttcggaagggtacgcgggttctttatgattaacaaggacttcgagtttcatgaaccagttgccactgtcatcgcccagatcgcgtgcttcaacgggtcactcccgcagggaagcccttgcagcccagtaatctcaaatttaattggccacgtgctggatatccgactcgcacagctagccaaaaaaaccggttgcacatatactcgttatgcagatgacctgactttctcaacaaacaaaaaggtcttccctggcgacgtggcaggatttgacgttggtgcaagcgaatggggagccggcaggaaactgaagaagataattaaggacagcggcttcgtggttaacagtaaaaagacgagaatgcagttttcaacctccgcccaatccgttaccggcttggtggtcaataaaaaggtgaacgtgtcttacgcctatagaaggaatgtaagggcaatggctgattctctgtttaagaccggtaaattccacctgcctgggcctgagaagaagctcggttctgtggatcagctgagtgggatgttctcctacattcatatgattatcgagtttgaacgagcagtgcgtcttaacggttccaaagattcacagcaggagagagagttactcggcatagagaaggtttaccggcaattcattttctttcggaagttctatgcgaacccccgaccggttgtcatctacgaggggaagacggatgccatctacctacactgcgccattcggtactttgcacggattgggaagtttccagaacttgctgtgaaaaagggcgatgaataccatttcaacgtagagtttttccgcttcaccaaaacaacatcccgcattcttggcctttctggaggcgcggagcagttgaaaaacctgatccgtgaatacgctcaggtgtgttccctcttcaaggcaccaggtaataccaaacccgtaatgatggtgatcgataatgacaaaggagccaagaatatctactctctgatcaaagagttccaaaagagcgaggccccaatcgacggctctgctaataactataatgtcgtccgcaacctcttcgtcattcctactcccaaaggcaaaaacaaggaaagcaaaattgaggacttttttgacgatcaggccttggcatcgaagctcggggataagacttttgatcttaattccgactttgacacagccaacttctatggaaagaatgcctttgccgaaaacgtggtgaataagaataaggacagtatcaacttcgtggggtttgagccgattctggcccgcatggtcgaggtgatcaattactataagccttcgtga

SEQ ID NO: 8257 - RNA, 1668 nt, synthetic construct
  source 1..1668: mol_type = other RNA
atgctgggttttaaaccgaaagccctgtcctacatactttatatcaagaataaggccgacctctacaaccagtttcttattccaaaaaagaccggcggtgctagaaccatactgagcccctgtgacgagctgaaggcgatacagcgtaagctgtccgattatctccaggattgcataaacgaaatcaacagccagcggaaaattaccttctctatcgcccatgcctataagaagaagcacagcattgctaccaacgcaagagtccatcggggcaggcgatatgtcttcaacgcagacttagagaactttttcgattccatcaactttggcagggtgcgcgggttcttcatttccaacaacaattttaagctccaccctgacgctgcaacagttctggcccagatcgcctgtcataataacagtctgccccaggggtcaccttgctctcctgttatttctaatctgatcggacacatactcgatattcgcctggcgcggctagcctcaaaagaaggctgtacctacactaggtatgccgacgatttgaccttctctaccaataaaaagatctttcctaagagcattgcaatgctgtctgattccgaggagcacatctggtcaaccggaaagcagcttgagaaggagatcaagaaaacaggattcgccattaataacaagaagacacgtatgcaatacaaggattctcagcaaacagtaactggactcgtggtgaactcaaaggtgaatactaggtattcctaccgcagaactgcaagagctatggctgatgccctgtttaaaacagggaaattcaccataaagaagcccgtgcaagctaacggcaaatctatcttattggaaacccccggaaccgttgaacagctctgcgggattttttcctatatccacatgattgccgagtataacagaagcatctcgatgagtaacaacaaaaaactcgaactgagcggcatcgaaaaaacctacaaggagcttttgttttatcgccgcttttatgctaatccacgaccactgatcatctacgaaggaaagacagatgctgtctacctgaggtgtgccatcagaagcctgattaagctaggggagttccccgaattaggaggcattaatgacaagtcggaggttgaaattaatgcagacctgttcacatacacaaagactgcgagccgaattttgggcctacccggtggtgccgctccgttgaaaacgctcatcagtgagtacctgcataatttttcccggtaccaggctcctggcaacacaagcccagtcataatgcttatcgacaatgactcaggcagtaaggatatttacagcttgatcaaacaacttcggaaagagaagaatccaatagatgggtctgaggagcactattacatcgcgaaaaatttattcgtggtgccaactcccaaggtgctggggaaagagagtaagattgaagacttcttcacgcggaacaccctcgaaatgaaaataggaacgaaatcattcgactgctccaacgaccatgatacggagacaagttacggtaaaaatgcattcgccgaacaaattgtgaaagccaatcagaatactatcgactttactgggtttcgccctattctgcagcgtatcgtcaatgtaatcaactactatagggcaatctga

SEQ ID NO: 8258 - RNA, 1731 nt, synthetic construct
  source 1..1731: mol_type = other RNA
atgagcaggttggcaaagctgcggcgcgcagcaggaatcgatgatctggccgagctgctcggctttaagcctaaggcaatttcctacattctgtacataaaggacccagagaagaaatatgtgcaatttgaaatccccaagcgctccggtgggacccggcttatttccgcaccctgcggagacttgatgagcctgcagagacgactggccgagctcctccaggagtgcatagcagagattaatgaggagagaaaagtccgtacagtgctcagccacgggtttaggaggaaacactgtatcaagactaatgcttggatgcacagaggaaagaggttcgtactcaacgttgacttgtcagacttttttggctccattaactttgggagagtgcgtggattctttatggccaacaacaatttcaaactgaacgccaaagtcgctaccctgattgctcagatcgcctgccatgaaaatgcacttccgcagggcagtccctgtagccctgtcatatctaatttaatcggacatctcttggacctcaggctggcagaactggctaagcaatcgggctgcacgtattctcgttacgtggatgatattacttttagtaccaacaagccacagttcccacggaacgtggccgtgcaacgggacgaagacgaccatgaatgggacgctggagccgaccttgtgaggattgttggcagggccggatttcgacttaacgatcgaaaaacacggctgcagtaccacggttcacgccaggaggttaccggcttagttgtcaatgctactctaaataccagagtggaatatcggcacgtggcccgcgccatggtccataaactgatgacgaccggggccttcaaaagaaagaggttcgtacagaatgaggacgggacatgggcgctagccgaagtggacggaaaaatcgaagagttgaacggcatgctgtctttcatcgacagtgttgatctgtacaagcgcagacgccagctgaaggaagtggagagagataagtcgctggtgactcttaaagaccttagcgcaactgagcgctattatggggatttcctcttctacaagaacttcattttcaatgagcggcctgtgatcttaggggaaggcaaaactgataatgtctacatacagtgtgctcttcgatcactcctggcggactatccttccctcatcgctaaaggcgcaaacggtttcgatcagaagattagcctgtttaacaggacctccaccatcgagagactgacgcaattgtctgggggtgctgagcaattcaagacattcgttaaagaatacctggccgcccgccggaaatttcccataaagggcaaggcgcctcccatagtaattgtcgccgattctgatgacggcattggtcaggtcaacgcttacttgaaaaatctgactgggagtccagtggatatgacagccgattttacccacatcaaagaaaacctatacatcgtgtatacaccgcttgacgccggtggtaaaggcgcacccatggaaaatatgttcgagaagtcagtactccagacacagttggggggaaaaacctttaatccaagcaacacaaagatcaatcacgcgaaagagtatggcaaggcgtacttcgcccagcacgtggtgaaaaaggatgctgacaagatcgatttttctggattcaaggttttactggaccgaatcgtcaaggctatcgagcatggctcctga

SEQ ID NO: 8259 - RNA, 1740 nt, synthetic construct
  source 1..1740: mol_type = other RNA
atgagtcgtcttgctaagctgcgcgaagctacagggttggaggagctggcaaagcttttaggctttaaaccaaagagtattagctacgtgctgtatatcaaggatcctgaaaagaaatatgctaagttcgagattccaaagcgctccggcggaatgaggcagatctctgcaccctgctctgaactgatggggctacagagacgcctcgcagaactccttcaggagtgcatcgccgaaatcaacgaagaaaggggagttaaaacagtgttgtcgcatggctttaggaggaagcactgtataaaaacaaacgcctgggtacataggaataagcgatacgtcctcaatgttgacctccaggatttctttgggtccattaacttcggtagagtgcgagggttcttcattagcaacaagaactttcagctcaaggagaaggtagccaccctgattgcccagatagcgtgtcatgacaatgctttgccccaagggagcccttgctctccagtcattagcaatttgattggtcacctgctggacatccgtctcgcagagctcgccaaacagagcggctgtacatacagccgctacgcagacgacatcactttctctaccaataaacctcagtttcccaagaacgtggctgtgcagcgggatgaggacgatcactgttgggtcgcgggggcagacctagccaaaataatctcaagagccggattcaaagtaaatgataagaagacccgcctccaatatcatgggtctaggcaagaggtgaccggcttagtggtgaacactaagctgaatgcccggtctgagtatcgtcatgtggccagggctatggtccaccggttgatgaaaacgggatcattcaccagaaagggttacgtgctggataaagaaggaaaaggcagtatccaggaggtagagggcactgtcgaatccctcagtggagtgctgtcctttattgacagcgtcgacctgtataatcggatgtccaagatcaagaaagctgaccgggaaaaacctctggtcacacttcaggacaaaaccgccactgagcgctgctacggcgactttctcttctacaagaatttcctggcgaatgagaaaccagtagttctgggcgaagggaaaactgacaacgtgtacatacaatgcgccttaagatcaatgttcgctcagtacccctatctgatcaagaaaaatgccgataagtttgactttcagttctccttctttaatcggaccagtactacggacagagttacctcactttccggaggttcagaacagtttaagacctttgttaaggagtatctggcttaccgaagaaagtttcccattaaggagaaggctccgccgatcgtgatagtggccgattctgataacggcgtgaaacagctgaatggatatattcggagcgtcacgggctcggcagttgacatgaacgccgatttcacatatatcaaggagaacttatacgtcgtgtacacacctatcgcagcggatggcaaaggtgctcccatcgaaaacctgtttgaaaaaaacgtcctagagaaagagttgaacggcaagaaatttaatccaagtaactccggaattaaccctgcaaaagagtatgggaaagcctacttcgcgcaacacgtggtgaaggcagatgccgactcaatcgatttctccggtttcaaggtgctgcttgatcgaatagctaaagccattgcccacggaagcgcaaaggtttga

SEQ ID NO: 8260 - RNA, 1734 nt, synthetic construct
  source 1..1734: mol_type = other RNA
atgtctcgcctcgcaaaattacgtggggccgcagggatagacgagttggccgacttgctgggtttcaagcctaaggctatctcttacattctgtacatcaaggatcccgcaaagaaatataccaagttcgatgttcccaaaagagggggagggaacaggaccattagcgccccctacgacgacctcatgaacctgcaaaggaggctggctgaactgctgcaggagtgtatttcagaaatcaacggggaacgcaaggttaaagctgtgctctcccacggctttcggcctaagcaatgtataaagacgaatgcttggcagcatcgaaaaaagcgattcgtgttcaatatcgatctgcaggacttctttggttcgatcaattatggacgcgtccggggattcttcataaccaacaagaactttaagctgactgaaaaggtggcaacactcatcgcacagattgcgtgtcacgataacgtactgccccagggctcgccatgttcccccgtaattagtaacctgataggccacctcctcgacataaggcttgccgagctcgcgaagaaaaatgggtgcacatactcaaggtatgctgatgatattactttttctacgaacaagccggaatttccccggaatgtggccgtccaaagagacgaagacgatcatgactgggtagctggtgcggacttggtgaagataatcaacaaaagcggcttcaagatcaatgataagaaaacccgactgcagtatcacgggagccgccaggaggttacgggactggtggtgaatcggaaactctctgcccgtagcgaataccgccatgtcgcccgagccatggttcatagactgatgaagaccggagcttttgtacggaccgcttttgttcaggataaagatgggaaagtcagtctagccaagccggccggaaccatcccccatcttaatggcatcttgagctttattgactcagtggacctgtacaaccggcgtagtttgttaaaagtcgctgagcgggataaagcccttgtatcccttaaggatttgtccgccactgagagatgctatagggactttctgttttacaagaacttcctagggaatgccaaacctatggtggtgtgcgagggtaagacagacaatatctatatccaatgcgcgctcaggtctttactggcaggatacccaagtcttattaagaagggcgtgagcggctacgagatggaactgtccctctttaatagaactcagactacagatagactgatgagtctgagcggtggatctgagcagttcaagactttcgtcagagagtatctgaatgcgcgcaggaaatacccaattaacggcaaagtgcctcctattattatcgtggcagattcagatgacggtgtgaaaaacttcaatagctatatcggggggatcacaggcgcccctgtggatatgaaagccgactttacatacgtgaaagagaatctgtatgtcgtctacacaccacttggagctaccggtaaaggagcaccaattgaggacatgtttgacaagtccgtcttgcaaaaacagctaaacggaaagactttcaacccatccaacagcggcattaatcacgccaccgaatatggcaaagcctttttcgcacagcacgtggtcaagaagggcgcagagggcatcgatttctctggcttcaaggttcttttagacagaatcgttaaggctgtggaacactcatccaaatga

SEQ ID NO: 8261 - RNA, 1776 nt, synthetic construct
  source 1..1776: mol_type = other RNA
atgagtcatttaaagacattgaaggaggccactaccctccacgatgtagcccatattctcggattccagcccaaatctctggcctatattctgtacaaaaagccgtctgctgaaaaatacaagcacttcaccatcccaaagcggaccggaggcaagcgatctatttcagcaccctatcctgatctcatgaatctccagaaaagattgtcagaccttctccagaattgtatcagcgaaatcaatcaggcccgcaaaatcgaatccacgctcagccatggcttccgaaggaaatattcgattataaccaatgcagctatccacagaaataaaaggtacgtgttcaacatcgaccttgcaaactattttggggctatcaattttggaagagtgaggggattctttattaccaaccggaattttgagctgaagccagccgtggccacagtactggctcagatcgcttgtcatgaaaacacgttgccacagggatccccttgctccccggtgatttctaacctgatcggtcacttacttgatatcaggctggccgctctgtctagccaggtcggctgctcatattcacgttacgccgatgatctgacctttagcaccaacaagcgcaattttcccgcgaaggtggctaagctagccgaagggaaccatcagtggcaggtcgggaaagaattggtccggattatcgaccgcactgggttcaccattaataacaccaaaactaggatgcaatacatggattcgaggcaagacgttacgggtcttgtggttaacagtaagattaacacaagagcggagtaccgcaggatcgcccgtgcaatggtgcacagactgctgaatactggaagctttcagcgcaaacagattagctacgatgaccagggcaatctggtggagactgaggttaatgggacgttggaccagctcaacggcatgctctcttttattgacagtgtctccgtgtttaataaacggaaggataagaatccaacagagaaggagaaagacctgatgcctagcaaggaccccgataataacgaaaaggtttatcgtcgattcctcttcttcaaaaacttctatgcgtctgccaatcctcttattatctgcgaagggaagacagacaacatatacttaaaggcggcaatacaaagattggctgacgcctatccctgtctagcagagaagaaagagaaaggcggaataagcctgaaggtgtgcttttttcggagaaatgcaacctcagggcgcattttgggcctggccggtggtacaggtgagctgatcaacctgattaagatgtatgcaacagagtccaaacatatcactgcgcccgggaagaaacaaccagttatccttctgattgacaacgacgagggcgccaagggcatctacggatacgtaaaaaacctgactaagtctaagggagactccaaggcagctttcatctttgtgacagagaatctgtacatagtgccgaccccactaactcacgatggcaaaaacaccatgatagaagatttcttcgaagagagccttaagaacacaaagttaaacgggaaaacttttaacccttccgacaagggtttcaattccaaaaccgaatatggaaagaattacttcgctaaacacgtcgtcaaggagaaccaagctacaatagattttaacggcttcaaacccatcctcacccggattgaagccgtcctgaattaccactcaaaaaagcctagctccgagagtatggccgagagtatgggcagtgattga

SEQ ID NO: 8262 - RNA, 1746 nt, synthetic construct
  source 1..1746: mol_type = other RNA
atgagcaagcttaaaatcctacaggccgccaccagcttgcacgagctggcagatttgctgggctttaagcccaaggcagtatcctacatcctgttcaagaaggacttggctgccaaatacactgaattcgagattcccaagagagctggggggaaaaggctgatacaggctccctatccagagctgatgaatctgcaacggcgtttgtctgagctcctgcaagactgcattgcggagatcaatgccgcccgggacattgactccgtattatcacatggattccgccggaaatatagtataatcacgaacgcagtggtccacagaagtaagagattcgtccttaatatcgatcttgcaaactttttcgggactattaactttggcaggatccggggcttctttatctccaaccgaaattttgcgctgcagccaaaagttgctacactgatagcccagatcgcgtgccacgatcatgtgctccctcagggctcaccctgtagcccagtgatatcaaatttgatcggacatctgctggatgtacgtcttagcgccctagcgttccagacagggtgcacctactcacgatacgcagatgacattacgttctctactaacaaacctttattccccgcaaagctcgccaaggccgttgaaggagatgagcacaggtgggaagtgggtaagactctcttcagagccattacaaaagctggctttgaggtaaacgctgagaagaccaggctccagtacaccgactccagacaggaagtcactgggctggtggtgaactctaagattaataccaggagcgaatatagacggacagcccgcgcgatggtgcacagattagtgtctaccggcagtttttatcgcaaacgtgttgagcgggatggtgatggcgaagtggtgatttctgagaaactcggcaccctcgaacagctgaacggaattctgagctttattgactcggttggcgtgtacaataagaaaaaaggaatgaaggacgacgagcgggagaagcctctgactatgccttcctccccggattgccaagaaaaggattaccgcaaattcctgttctataagcatttctttgcaattaagcagcccatgatcgtttgtgaggggaagacagacaacatctatctgtcctgtgccatccgaaggttggcaaagtcacacctgcttctcgccagtccagacggaaaaggggggagcaggctccaggtgagcttctacaaacgcacagcaaccactgaccgcacaatcggactgactggcgggaccgaccagctcattagcctgataaaggagtatagggccgaatcgagacgcattaaaatagctggtaaagtccaaccgctcatcctattaatcgataatgacaatggtgctaaaggtatttttgcctacctgaagaacctgctaaaggtgcagatagaccccaatgctccttactttgaggcccatgagggtttgtatgtggtgccaaccccactgacatcagacgccaaaggaaccatgatcgaggattttttcgatgaatccgtccttaaaacgatgctcaacggcaagaccttcaatccttctaatgaaggcgtcaaccataagacagaatatggcaaagcttactttgcttctcatgtcatcaaaaagcacgaaaacacgatcgattttagtggattcaagccgatccttgaccgattagaggaggttattgcacaccaccagaaaaagcaccaatga

SEQ ID NO: 8263 - RNA, 1734 nt, synthetic construct
  source 1..1734: mol_type = other RNA
atgagcattctcgagaaactgcaagcggcccaaaaccttcatgatgtcgccttacttctcggttaccagccaaagagtcttagttacatcctctatgtgaaacctaaaacgcagaagtataccacctttaatatacctaagtccagcggcgggacacgagaaatcaaggcaccctacccggacctgaaaacactgcagaaacgcctctccaagctgctgcaggagtgtatcgcggagatcaatctgcaaaaagagatcaccacctctgtatcacacgggtttaggaaaaagcactctatcctgacaaatgccgctgtacacaaaaatatgcgctacgttctcaatctggacctcaaggacttcttccattcaatcaactttggcagggtgaggggcttcttcatcgctaaccagaattttcttctgaaccctaacgtcgcaactataatagcccagatagcctgtcatgaaaactgtctcccccaagggagcccctgtagccctgtgatttcaaatctggtgggccacattctggatatgagactagtgcagttagctcgtaaatttggatgcatctattctcgttatgccgatgacatcacgttcagtaccaacaagaaagtcttccctgtggatttggctaccgcagccctagatggcgagcaactgtggagcgtgtctaagccgttacacgacattatcaagagatcaggatttgatgttaactcggctaagactaggatgcagtataagttttcaagacaggaggtgacaggactgattgtcaacagccgagtgaatgtcagattcggctaccgacggatagccagggcaatgcttcataagctgataactcgcggtgaatttcacaagccaaattctaagaaagtgagttccgtgactaatacaaccgccccaagcttagactacctgaacggcgtgctatcgtttattaattctgtgaaccttttcgtccacaaaaagcatagtttcagagttaaaagcgactccaagaaggcccttgagaagtctttcttgaacttgagtatctctcgcggttaccggaattttctcctctataaatacttcttcgcagctaagaatccagtaattatctgcgaaggaaaaaccgataacgtgtatattcgctcagcaaccaggcaactgagtacacagtacccaatactggggaagtcgagcccagatggtaccatcaacttgaaaatctccttctttaagcggactaagactactgatatgtttctcggcctcacaggcggagcatcccagtttaacaaattcatcgaggatttacggcagcccatttttaaggacttcctgttgaaaatcaagcagcccatcattattgtgatcgacaacgaccacgaggctctgaaggttttctcctacctgtacaagaatttcaacattaactgcgacaaaaccgttggatttatcgaagtcttccgtgggctgtatgtcattcctattcccctgctctccggagcgaatcagtctgttattgaggagctgtttgacatcaaggatcttacacggtccttggacgggaaaaaattcaactataagtccgacagctataatacgaaactggaatacggcaaaagcgccttcgctacacggatagtacaggccaaggaagatcagatcatctttgacgggtttaaacccctattgactcagattgaagaggcgattaagtcattcagatgctga

SEQ ID NO: 8264 - RNA, 1722 nt, synthetic construct
  source 1..1722: mol_type = other RNA
atgagctttcttacagagctgaagagcgccaagtccctgcacgacgtcgcttatctcttaggatataagcccaagtccctgtcctatgttatctacaaaatgcctgtcaaatacgagactttcacagtcccaaagaagacaggcggcgtgcgcaccattagtgcaccccacccagaactcaagcttctgcaaagaaggctgtcggatggcctgcaaagttgctgggacgagatcaatagtgagaaaaagatcagcaaacctatctcccatggatttaggcggcgatcaagcatcctgactaacgcctccgtgcatcgcggtcgcagatttgtcttcaacgtggacatcaaggacttcttcgactccattaactttgggcgggtctacggattcttcctgaagaatactgacttcgctttaccagaatcagttgccaaaatcctggctgcgatcagctgtcatgaaggcaaactgccccagggctctccttgctcccccgttatcagtaatttaatcgggcaggtgcttgatatccggctggcccaactagctaggagccacggttgttcctattccagatacgcagacgatttgaccttttctacaaacaagcgagtgttcccttcagccgtagcagcacttgggataaatcacgcctgggtagtaggagacgcactgtcaaagattatagaacgctctggttttcagctcaatcctaaaaaaacccggatgcagtattgtgatagtcggcaggaagtgacaggactcatcgtgaatcggcgtgctaacacgcggcctgagtataggaggctgacacgagctatgactcacaagcttgtcacaacgggcaagtttcagatagcaggcatgaaggcggacgcctctggcacctttgcccctactctggtggacggaagcattagccatcttcagggtatgtttggcttcattgactgggtagatttgtcacacaaaaaggctaccgaaacacatgatgggccacctagctcaatctctaaggtctacaagagattcctcatgcatcgtgatttttgggcgagttcattaccagttatcttgtgcgagggcaaaactgatagtgtttacctaagaggcgcgattagacgcctcgccacagctcaccccagtttggtgagcatgaccacggtcgggaaagccgaatacaaggtcaggttttttaactactcttacactagccagcgtattctggatttgtctgggggggccccagccgtgaaaagctttataaccggatatctcaaatctgtaaagaaaaccccagcaccctctaacagacagccgctgatcgtgctccttgacaatgatagcgggggaaaagtgttctattctctgataaaggagtacaatggtaaaaagacccccgtggacggcatggatgacttctaccacctggaggccaacgtgtatgtggtgttcacccctatagctaagcccggggataattcatccattgaggacttctttgagccggccctactcgctactaaaatcgatggtaaatcctttaacccatccaatgaagatctcgacgagaacaccgagtacggaaaggctattttcgcagccaaagtggttaggcccaacattccgaagattaacttcgataagttcggcctgattttggcccgactggaacgcgtgatggacgcacatgtcaaaaagcacgtttcgaaagtgtga

SEQ ID NO: 8265 - RNA, 1725 nt, synthetic construct
  source 1..1725: mol_type = other RNA
atgtcatttctcacaattctgaagaacgccaaatctctccacgacgtcgcagatttgctcagatataagccgaaatctcttagctatgtgatctacaagatgccagtaaaatatgagacttttaccgtgccaaagaagacggggggagtgcgaacgataagtgcgccgcgaccggagctcaaactgttacaacggcgattatcagacggattacaaagttgttgggatgaaattaacaccgagaagaaaaccaccaataacaaaacaacaaagcccataagccatggcttccgcaagggcgccagcattctaactaacgcttctgtgcaccggggaagaaggttcgtgtttaatgtcgacatcaaggacttctttgattcgattaatttcgggagggtgtatggatttttcgtcaagaacaaggattttgcccttcccgaatcagttgcaaaagtcctggccgccattgcgtgccacgatggcaaattgccccagggctccccttgcagtcccgtgatttcaaaccttatcgggcagatcctagacattcgcctggcccagctggcacataggtatggttgtagctattctcggtacgccgatgatcttactttctctactaacgaacgaatctttccttctgccatcgctctgagtaatattgaccatagctgggttgctggcgtgggactgagcaaaatcatcgagaaggctggctttcaactgaatcctaaaaagacgagaatgcagtacctggactccaggcaagaggtgacagggctgatagtcaatcgccgcatcaacactcggcctgaatatagacgtctggccagagccatgacccatcagcttgtcacaaccggcaagtttcagatcacagccatgaaggcagatgccttggggacacttgtgccatccaaaatcgatggtaatatacggcaccttcagggcatgttcggattcatagactggatcgactggcggcacaaaaaggctcgtggtaccctggccggaatgcctagttccattgataaggtctacaaaagattcctgatgcaccgcgacttctgggccagctccttacccgtcatcctctgcgaagggaaaaccgactcagtatacctgcgtggagccataaggaggctggcaaccgctcaccctaatctcgtcctgatgtctgcagcgggcaaggcagaatacaaggtgcgcttttttaattacagctacacttcccagcggatcttggatctgtccgggggcgccagcgttgtaaagaaattcatcaccgagtacattaagagtgtgaagaaaaccccagctccagcaaaccagaaaccactgattgttctcctagacaatgatagcggtggcaaagtgttctactcgctcattaaagagtacaagaaaactcccgtaaacggaatggacgacttttatcatttggctgccaacgtgtacgttgttttcactcctatcgctaagccctccgacaattcatctatcgaggatttcttcgaacccgctctcttggagatgaaaattaatggcaagtccttcaacgccgataacgaagggctcgacaagaataccgagtatggtaaagcggactttgcaacacaggtggtgaggcctaacatagcgaagatcaactttgacaagttcgatccaatcctggctagactggagggggctatggaggcacatattaagaagcacgtgtcctga

SEQ ID NO: 8266 - RNA, 1716 nt, synthetic construct
  source 1..1716: mol_type = other RNA
atgttcttcctgacaaacctaaaaagcgcaaagagccttcatgacgtggcatgtttgctgggctataagccgaagtcactgtcctacgtcatctacaaaatgccgctgaattatactacatttaccgtgcctaagaagtcagggggcgtcaggtctataagtgcaccccgccctgagctgaagctcctgcagcgacgattaagcgacgggcttcagtcctgctgggacgagataaatgatcagaaaaaaatcaccaagcccatcagccacgggtttagacgcgatgcgtcaattgttactaatgcctcagttcaccgcgggcggcgctttgtgttcaacgtcgatatcaaggactttttcgattctatcaactttggtcgggtgtacggatttttcgtgaaaaataaggactttgccctgactgagtccgctgccaaggtgctggccgcaatcgcttgccacgacggaaaacttcctcaaggatccccatgtagtcctgtcatttccaatctgattggccagattctcgatgtgcgtttagctcagctcgctcatcgtcacgggtgcagttactccagatatgcagatgacctgacgttttccaccaacgaaaggatttttcccagtatgatcgccctgtcaaatgctgatcactcttgggtcgccggtgctgtgctgtctaagattatcgagaaaagcggtttccaactgaaccccaaaaaaacccggatgcaatacaggaatagcagacaggaggtgaccggcttggtggtcaacaggaggattaataccagacctgaatatcgccgactcacccgcgctatgacgcaccagttggttacgactggaaaattccagttgaccaagaccaaagcggatgtcctgggaaaacttgtgccaacaaagatcgatgggagtattacacacctccagggcatgtttggcttcattgactggatcgacctgtgccataggaaaaaccaggaagtgccaaacgtgcagcaatcagctattgggaaagtctataaacggttcttgatgcatagggatttttgggcgaattctctgccaattatactctgtgagggcaagacagacagcgtataccttcggggcgccataagacgactggccactgcccatcctaacttagtttctactaatgcagccgggaaatctgaatttaaggttcggtttttcaactacagttataccagccaaagaattttggatctgtctggtggagcccccgtggtacgtcggttcatcacagagtatatcaagtccgtgaaaaagactcaggccccagtaaatccgaagcctctgatcttacttctcgacaatgactccggcggacaggtgttctactcgctaatcaaacagtacaacggcaagaagacaaccgtaaacggcatggacgacttctatcacctcgcagagaacgtttacgtagtttttacccctattgataagcccggagacaattcatcgatcgaagattttttcgagccaagcctcctagccaaaaaaatcgacgggaaaacattcaacgcagacgatactacattcgataagaacaaggaatacggcaaggctgacttcgcagctaagatagtgaggccaaatatcgccaagattaacttcgaaaagtttgatcccatactcgcgagaatagaaggtgtcatcgaggcccatagcaagaaacacttcccctga

SEQ ID NO: 8267 - RNA, 1785 nt, synthetic construct
  source 1..1785: mol_type = other RNA
atgtcccagttacaggcgctgagggcagcctccactttggagcatgtagccgatctgctggattataaaccgaagacgctttcatatattctctacaaaatcccagcagctaataagtacaccacattttctatccccaagaaggacggaaatccccgtgacattaatgccccctgctcagaactcaaggagctccagagccatctgagcgacttcctgatcgggtgcgccaacgaaatcaacgaaatcaggaaattcaaagaccagttgtctcacgcattcaagccagaacatactattgtcactaatgctgtcagacacaagaagaaacggtacgttttcaacatcgatctgaaggatttcttcggcacaatcaatttcgggagggtgaggggctactttctaaaggatgccaacttcatgctgcatgcaaaagtggccaccattttagcccaaatcgcttgtcatgaccacaaacttccacagggatccccttgcagtccagtaataagcaatctggtgggtcacatactcgacatacatctttgtgggctcgcctttaaaaatggctgcacctacagtcggtacgccgacgatatcactttcagtacaaacaagcctatatttcctgagaacatcgcaaagctccttcccggtcaagcacacgcatggcaggtcgggaacggactggaaaaaatcgtttctcgcagtggattcaccattaaccaccagaaaactagaatgcagtatcgaggctcaagacaggtcgtgactggtctaaccgtgaacaaaaaggtcaacatcaagaatgactaccggagaacagtgcggcagtttactcagcgggttttcaacaccggaaagtttcaatatctggcggttgtgacagatgccgctggggccaaaacccctacaaagatcgacggatccctggagcaactgcatggcatgttcggacacatagattttgtcgacaatgaaaacaaggaggctgaggagaagcgggattctggcagctccaaggcaaagaatgccgccaaggacgccctgtactcgaaacgtaagctctataggcgctttttgatcttcaaagacttgtatagcgccccacgccctgtgatcatatgtgaaggcaagaccgacaatgtgtaccttctgcatgctattaaatctctcgctgctaactaccccatattagcttccatcacgacagcgggcaaagtgcagattcacgtgcgcctgctcaaagcattggactcatccattggaacaatcctacacctgggccacggggcttccgatttggacaggttggcaaaacaatatgcagaagagatcctccgctttaaggccgatgggatggagcaggccgtggtcctgcttatggacaatgatgatggtgctgatgagatgtacaagctggcgaaggatctcaccggcaagaatgtaagccgagcggaaccctactttcacctggtgggaaacatgtatgtggtggtgacgccgctgattggcacgaataaacagagcgagattgaggattcttttgccgacacactgaaaaacgttgtccttgatggcaaaaccttatctaccaagaacaagttcgacaccgctaaatatttctcaaagcacgtgtttgcccagcatgttagagagaacgccagcaaaattgacttttcgggtttcagtgggattctagacagagtagctgctgcgatccaggccaatcagattcgaattgccgcaagcgctgctccacaagccgtccctgcaactgtttga

SEQ ID NO: 8268 - RNA, 1767 nt, synthetic construct
  source 1..1767: mol_type = other RNA
atgtcccaactgcaggctctgcgtgcagccctatccctgcatcaggtggccacacttctgcagtttcagcccaaggctctgagttatattctgtacaagaagcctctgcccacacgttatacaagcttcaatatggcaaagagagacgggggggtgcggaccatcaatgccccaagcccagagctcaggttactgcagcacaacctctcagaccttttacagaactgtgtcgaggagataaatgaggggaagaagtggaaggatcagctggcgcacgggttcaaacgggactgcagtatcatcactaacgcggtcaagcaccgcaaaagaagatacgtctttaacatcgacctgaacgacttctttgggacaattaactttggaagagtcagggggttttttataaaggacgctaacttcatgctccaccctaaagtagccacaatactggcccagattgcctgtcacgaaaatgtgctgccccaaggctccccatgcagccctgtgattagcaatcttattggtcatgtcttggatatccacttgtgcaaactggcagccagcaatggatgtacttactctcgctatgcggacgatattacgttttccaccagtaaacccgattttccagaaagcatcgccagacgagtcaccggtcaagcccacacctgggaagtggggggaggacttcagaatatcgttgctcacactggattttccatcaaccccaaaaagacacggatgcagtacaggggtagtcgccaggtcgtgaccggccttgtggtcaataaaaaggtcaatatccggacagagtacaggcgaagggcgcgctcattagcgcatgagctattcaaaacaggcactttccaacacgtgaaaacaattcctgacgctaatggcgtggtgacccctacggccgttgaaggcaccttggcccagctgcatggcatattcggccacatcgatgccgtggaccatcataacttcaaaattcagtcaaaggccgaccccagagaagccaaaattgtgctgcgaagcaaagagaagctgtaccggcgtttcctgatgtttaaggatttttacgccgcgtctttgccagtactcgtgtgcgagggcaagacggataacatctatctgttgcacgctattagatctctagctgcttattatcccaagcttgctaccgtagctgcaaacaagaaaattactctgaacattcggatcctcaaaacggtgaagaccagcactggtcgggttctccaactggaggggggtgcctcttatttgaaagcattcatcgaacagtacgtgtctgagatccataagttcaaagcacccggaatgcaagcagccgtggtgctcatcgttgataacgattctggcgcagatgaaatctacaacactataaggaagctcgccaaaatcaaagcaccacgctcagacgcatacgttccagtagctggcaatctatacgtggttccgaccccgctgaaagctggtgcgacaaagtccgcaatagaagactgttttgccgacgaaataaagaatctcaagttaggaggaaagactttcaatgccaactcagacgaggacaccgtagcatatttcgggaagcacattttgagtgtgtatattcgcgagaatgcttccaaggttgatttcaccggcttcgccggcctccttgataggattactgccgctatcgaggctcatcaggctaaacaggctgccgttggaatcgcctcggcacctgcagcccagccttga

SEQ ID NO: 8269 - RNA, 1788 nt, synthetic construct
  source 1..1788: mol_type = other RNA
atgagaaacctggaactgctgaagtcaattaagacacgatccgaattggctgttttactggggtacaagcctaaggcccttacctatctgctgttcaagatgccccccgaacagagatataagagttttcctgtgccaaagaggtctggcggccagcgtacgattaacgctccttgcccagaactgaaggcgttgcagaagcgcctggccggactactggtgaattgctcttccgagctggctttggccaaaaagctgccacgtattagctacgggtttaataagggcggctcaaccctggataatgcctctgtgcacagaaggcggcgttacgtgctcaatgtggatctggaagatttctttgggtcaattcacttaggacgagtgcggggctttttcattaataacgaggacttcaaactcctccccgacgttgcaactgtgatcgcccaaatcgcctgcctcgatgggaagctacctcagggaagccctgcttctccagttataagcaatatcattgggcacatcctggatgtgcatctagcacgcctcgctcggcggtatgggtgtagttatagcaggtatgccgacgatctcaccttcagcacgaataaacctatttttccacagcagattgcttctcttgtggatcccttggagcacatttgggtcgcgggtggtgagttagagagggagatcacccggtgcggctttagagtgaaccattcaaaaacacgcctcgagtataacgatagtaggcaagtagttaccggagtggtagtcaacaaaaagctgaatgtcccgtccgaattcaagagaggcgcacgggcaatggcagacaggctgttcaaaactggctcgtttgaaaatgtgcaggtggttgaactcgacggcgtgaagcaatttgcaagaactagtggaacaatcaatcaactggccggagtcttttcctatatatacatggtcagtcattggaacagcaagaaactggccatcaaacccggtactccactaacttctatcgagcgcgtccaccgcgacttcctcttttataaggacttttacgccaatcagttccccactatactgtgtgaggggaaaacagataacacttacttgaaatgtgcccttaaaggtcttgcttcctcgttccctgcactcatcggtagaaagccggatggatcccccgactataagataaggttctttcgcgggtcacgacttgcagcacggctgcttagcttaagcggcggaaccgcgcagctcaaagacttcattgctgcctacagttcctggtgtgccaaattcaaatctcaggggggcgctaagcccgtgatcatcgtaatagacaacgacgcaggagcgacccatatctacaactggtatgccagcgtaaagaggatccccaaacccgacggaatgctgccttactactacgtcggccagaacctctatattgtgccaacacccaaagccgcgccagccgacatgtccaaaatagaagacctgtttaaggccgacgccttaggggtcattcttggcggtaagcgattcaaccctaacaacgatactgagaataccacagaatacggtaagcaatactttgcagaccacgttgttaaggccagacagaaaacgatcgatttcagcggcttcgagccgctgttggataccatctccaaaattatcttgtcccataccacagctgtcgccgcagctgctgagacatcattcgcggcagctatcgaggcctcaacagctgtggctccggtagcccctccaacctga

SEQ ID NO: 8270 - RNA, 1431 nt, synthetic construct
  source 1..1431: mol_type = other RNA
atgatcacaaacgctatcaaccatcggaacaagaatttggtcttgaacatcgacctggccgactttttcggctccatacacttcggccgcgtacgcggcttcttcctcaaaaacgagaatttcaaactgtcaccttctgtcgccactgttatagcccagattgcttgtcatgagaatgcgcttccacaaggctcgccttgctcccccatcctgtctaacatgattgcacacatcttagatatccggctagctaggctcgcagcggctgagaagtcatcttatagtagatatgccgatgacatcacgttttcaactaacaaaaaagagttcagcgaaagcttggtgcgatgcattgatcacgtgaaccatacctgggtggccgggacagcgctcgaaaacacgattaaccgcgcctggttttcaatcaatagcaagaaaaccaggctgcagtacagagactccagacagattgttaccgggctgactgtgaatagcaaggtaaacgtgagagccgagtatcatcgaacagccaaagccatgacccataagctgtttcggactggctcctttgaggtcctgaaagctaatgaacatggaatccaagagaaaactgcagggtcccttcatcaattaaacggaattctgagcttcatctacatgatcaatgattacaaccgtaagcttcgcgcccagaatccactcaacccggcattcacccccacccctgatcggttgaagagcatcgagaaatcccacaagaggttcatattctacagagacttctacgcctcaccagtcccgacaatcatttgcgaagggaaaaccgataatatttatctccgtgccgcaatatatagtttgagtgctaaataccccgaactggttgaaaccaataaagacggttctaagaagctgaaaatcaaactcttcaagtacaccgaacagataaagcacctcatgagtctgagcggcggaacaggtgaaatgaccaaattcatgacgagttatacaaaggaatgtgctttctttaaggcgcctatcggcctgaagcctgtcattatgctcattgacaatgatcagggggcaatagagatctacaaacagattcacaagatgaaaaagctggcaaagaaacccgatggttccgacgagctacactttattgggaggaatctgtatgttgtgccaacacccttaaataagggacagaacactatggtggaggacctttttgaaccaaagctacttaagactgagctgaacggaaagaagtttaatcctgacgatgctaagatgacctctaatgagtactctaagaatcactttgctaagtttgtggtgaaagcccagcaagagtcgattgactttagcggcttcgaacccattctgaacacaatcctgaaaatcgtgaagcagcacggaaggttgtga

SEQ ID NO: 8271 - RNA, 1773 nt, synthetic construct
  source 1..1773: mol_type = other RNA
atgtccgaactggccaagttaaagaaaattatcagccttcaggacctatcatctatgttgggattcaaatctagcgccctgtcttacctcctgtacaagaaacccaaaactgagctgtacaggactttcgaaatcagaaaaaaaacagggggaatccgaatcatctctgctccttgcccagagttgaaattgctgcagagcaacctggcccgcctcctgcagaaatgtgtcaacgagattcaagaggcaaggatcaatataaaccagaacaaaatccagaagcacagatcactatcccacgggtttaaaccaggtttctctattctgacgaatgcgaaaagccacaggaagaaaagggtcgtgctgaacattgatctggaggactttttcggcagtattcatttcggccgtgtaagaggattttttctgtccaaccgtgatttcaacttgtctcccaaaatcgccacaattatcgcacagatcgtgtgtcacaataattcccttcctcaggggagtccttgcagtcctattgtgagcaatctcatagcccatattctggacatccgcttatctaagcttgcattcgagaacaaatgcagctactccaggtatgctgacgatataaccttcagtactaaccaggaaaagcttcccgactcaattgcccgctgcacttgtgaagagagccacatctggatagcaggcaagaatctgcttcgaattatcaaggacagttggttctctattaacagcaagaaaactcggattcaatatagggactcgcgccaggaagtgacgggtctggtggtcaatagtaagctcaatataaaggcggaatatcaccggaccgcaaaatccatggctcatagcttgtttcaaacgggcagctttactatcctaaagagaaatgagtccaacgagctcgagagatgttatgggaccataaaccaaatcaccggcatcttctccttcatctactggatcaataagtataatcgcgagttaccaatcggagtccctcctgacgatgtcccacccccaaaaattgaagatctcaagtccatcgaacgaacacacagaaagctcctgtactacaaatacttcttcgccaatgagattccaacaatcgtgtgtgaaggaaaaaccgacaacgcatatctgaaggctgctatccagagcttggcccagaattatcccgccttagttgaggtcgataaagataacaacaagatcctcaaggtgaagtttttcaagtactccaaacaggtgaaatatcttctggctctgaccggtgggacaggcgatctcgaaaagctgataagtaaccatcccaaagagtgctcatcatttaaggcccgggcaggtaccaagccagtgatacttgtgattgacaatgactcaggcgctaatggtatttacaaccggctgcataagtttctaaagttgagcaagaagcccgacggctcccaggagttttactattacgggaataacctctacattgttccgacaccgttagcggccgacgggggacaaactatgatagaaaatctttttgaccccaccctgctgcagaccgttgtgaataacaagacctttaaccctgatgaaaaagcttcgtcaagtttgtattatggaaagagcaagttcgttgagaacgtagtaatgccgaaccggtccaccatcgattttggcggcttcacaaagctgctcgatacaatttctaaggtcgtggataatcacgccctcctggtttcacagtctaaaccttga

SEQ ID NO: 8272 - RNA, 1818 nt, synthetic construct
  source 1..1818: mol_type = other RNA
atgtcagaacttatcaaactgaagaagactaattcactctccgacctggctttgtatctgggctacaagccgaagtccttatcgtacattctgtacaagaaaccgaaggaggaactctacagaagctttgaagtgcccaaaaaaactgggggctccagaaccatttccgccccatgcaaggaattgaagctgctccagagtaaattgctagagaagctgcaggcctgtattaacgagattcaaagcctgaaaaaccttagaaaaaccctcacacagccctttaagactgaaaagaacacttctcttagtcatgggttcaagccaggattctctattattaccaatgcaaggcagcaccgccataagagacatgtactgaatatcgaccttgagaacttttttggaagcattcattttgggcgagttcgtgggttcttcataaaaaaccaggatttcaatctgcacccaaaaatcgctactatcttggcccaaatagcttgtcacgataacgtgttgcctcagggcagtccatgcagccccctcattagcaacctggtggctcatgtcctcgatatcagattagccgaactggccaaaaagaatgactgtacatattcaaggtacgctgacgacatcacatttagtaccaatgaaaagaagttccctagttccctggccgtgtgtgtgtgcgaagaggatcacatatggatcgctggcaagactcttgtggatctggtcaaaaaatgctggttcagtattaatcacgcgaagactcgtctacaatataaggactctcgccaggaggtaaccggcttaattgtgaattcaaaggtaaatgtgcgggcagaatatcaccgcactgccaaagccatggcccataggctgtttcactccggtaagtatgagacactcggctttgataaggacggactatcaaaaaaagtcctgggatcagtgaaccagcttagcggcgttttctcctttatctacatgatcaacaagtacaataggaaccttcggacaatcaacccattggagaagttccctaatccccagcctaagctcaaatcgatcgaggagacacatcggaaactgttgttttacaaagacttctatgcaaacgaagttcccacgataatgtgtgaaggcaagacggacaatgtttatctgcgaaccgcaatccggagcctaagtgagaaattccctgcactcattgagaaagacaaggacggagagaagaggttaaagctgaagatcttcaattacaccgatcaggtgaagtatctgatgcacctgacagggggtaccggtgacatggtcaaatttacctccaactatcccaaggagtgctctttctataagagcaaaggtggactgaaaccagtgattctcgttgtggataatgaccagggtgccagcgacctttacacacggatccagaaatttggcaagatgcccgtgaaacctgatgggtctaagccattctacttctattctaacaacctgtacattgtcccgacgcctttaacccctgatggaaaacagaccatgatcgagaaccttttcgatcccgagctgctcaagaccgaactggacggcaaaacatttaaccccgatgaaaaaacagcaacagcctccaactactctaagaatcactttgccgagtacgtcgtcaaggccaatcaaaagaccatagacttttcagggttcgagccactcctggctactatctccaaaataatccaagatcatgagcgcctgtctgcgctcgctacgttgcctctagctaccgcgagccacaaggtagcgaaagcatga

SEQ ID NO: 8273 - RNA, 1686 nt, synthetic construct
  source 1..1686: mol_type = other RNA
atgagtgagctgaataagctgaaggcttgcacaactatcggcgagctggcactgctgctgggtttccaggcaaagactttgggttatattgcttggggcctcccctcagccaccaagtactctacgttcgctatacctaaacggtccggaggtaaaagaacaatccacgctccaagccctcagttaaagctggcacagggtaaactgtcaatcctcctgcaggcatgcgaaaaggaaattgaggaggaattgggagtgaaacatactgtggcccacggcttcaaactagggcggtcaattctcacaaatgcagacgttcaccggagacagcggtatgtgctgaactttgatctatccgattttttcggcaccatcaatttcggcagggtgcgtggattcctcatcaacaatcgcaactttcagctccacccggacgtggccacactgattgctcagataacctgtcacaaagatatgttgccccagggatcccctacttcacctgtcatatcgaacctcatcggtaatatccttgatgtcaggctctctaaggtggctcgagccaacggctgtgcttatacaaggtacgcggacgatatcactatctctacgagtcagaccgaattcccaaaagccattgcgaatcaggttgactccacgtctggatggaccctggctaaagacgtggaacaagccgtcgccgcctgtgggttccggatcaaccatgccaaaactagattacttcatcatagaagcaggcaggacgtgaccggcatcgttgtgaatcgccatgtgaatgtgaataccgattatagacgagcagtcagggccatggtgaacaatctttgcagcaccggaacctaccaccgcaagaaaagcattgtcgccgccgaagataccacgacagtgtctgtagaggggtctaggccccaactggaagggatgctcgggtttttactgcaggtagagcgctatcgcagaagcgacgagttgccacccccaactttgagtagtaccgagttactcctgcatcgctttctattcttcactacattcgccagcaatgatcgacctacaatactgtttgagggcaagacagacaacatctatatttccgctgcgattaggcggcttcgggaatcttaccccctgctgatggcgccaggaagtaaggagttgctggtcaagcttctcccacacactaagacccgtgaaagaatctttaacctgacaggcggcgacaatcccctgacttccttcatagtgtcatatcgtgagaattacaggcgaattaaggggccgaaaggggcaaacccagtaatcgtcatctttgataacgatagcggtagcaacgccgttattgcagcgatcaaaaagcactacaagcttgacatgcccgacggggaccaatacattagagtttacgacaacttgtacgtactccttacctcgaaaaaggggagtggaaatcactgtatagagaattacttttcagccgccacactggctaagaccctgtctggaaagaaactatccctttccaacaagaagctcaaagacgatgagtatggcaaagcatggtttgctgaaaagattatcaaaccctactataaggacattaacttttccaacttcagcggcttactggatcctatctgcgagataattcaaggccattacccttga

SEQ ID NO: 8274 - RNA, 1686 nt, synthetic construct
  source 1..1686: mol_type = other RNA
atgggggagctggccaagctcaaagcttgtaccaacacgggcgagctggcccgcttactggattttcaaacgaaaaccctctcatacatcgcatggggaacccctagtgcggccaagtatagcgcctttgatatccccaaacgctcaggcggaaaaagggccatccacgctccgagtccccagttaaaactggtccagggcaagctgagcaaattgctgcaggcttgtgaaaaggagatagaggaggaattgggcgttaagcaccccgttgcccatggattcaaacagggacgatccatccttacaaacgccgatgtccacaggcggcagcgatatgtgctcaattttgacctgacagacttttttgggactattaatttcggcagggtccggggcttcctgatcgggaatcgcaacttccagctgcatcgtgatgtggccacaataatcgcccagatcgcctgccatgacgataaactccctcaaggcgcacctacatctcctgtcatctccaaccttatcggaaacatattggacatacgattgagcaaaattgctagagcacaagggtgcgcttattcaagatacgcagacgacattactatgtctacatcgcagccccagttccctcatgctatcgcccggcagctgcttgctacgcccaattgggtagtaaccaaggagatcgaagaggccgttaaagcatgcggttttaaaattaatcacgcaaagaccagactcctacatcaccgcagcaggcaggatgtcacagggattgtagtgaaccgacacgtgaacgttaatggagattaccggagggcaatccgggccatggtgaaccgcctgtgcagtaccggaacctaccatctcgaaaagacagtgctcgccgcgggacagactatgcttgcctctattgaaggtagcaggcctcaattagaggggatgttgggttttctcctgcaggtggagcgttacagaagatccgacgacctggtgccacctatactttcagcaactgagcgccttctacacagattcctcttttttactacatttgccgcgaacgatagaactgctattctcttcgagggaaagaccgataatatttatatctcctctgcgatccgcaagcagcgtgccacctacccagcactgattgctccagggagcaatgaactgctggtgaagctgttgccacatacaaaaaccagggaacggatcttcaatcttactgggggcgattcaccgctgactaacttcattgtcggttacagagataactataggaagataaaaggccccaaagggtcccaccccgtgattgtgattttcgacaatgacaaaggttctaacgctgtgataggcgctattaaaaagcactataagctggacatgcccgacggcgaccaatacatccacgtgtacgcaaatctgtatgtcctcttaaccagcaagaaaggttccggggatcattgtatcgaacattacttcagtgaggctacccgggccaagaagttgagcggaaaaaagttcaacctgagtaataagaagcttaaggatgacgagtatggtaaggcctggtttgcggaaaaaatcgttaagccatattacaaggacatcgacttctccggctttgcaggcctgctagatccaatttgtggcattatcaagtctcaccacccatga

SEQ ID NO: 8275 - RNA, 1686 nt, synthetic construct
  source 1..1686: mol_type = other RNA
atgtccgaacttgccaagctgagggcctgcactacaattgccgaagctgcccaactgctcggtttccaaaccaaaactctgtcattcattgcttggggtctgagcccagcgatgaagtattctgtgttcaacattccaaaacgatccggcggaaaacgcactattcacgccccgagccctcagctgaagctggcacaggaaaaattgtcaaggctcctccaggcctgcgaaaaagagattgaagatgcgctaggcgtaaagcacacagtgagtcacgggtttaagtcgggacgttccatactgaccaatgccgaggtgcacaagagacgtcgatacgtgcttaatttcgacctagcagatttcttcggcaccattaacttcggaagagttcgcggtttcttgatcacaaatcggaactttcaacttcatccagacgttgccacactcatcgcacagatcgcttgtcacgaggacaaattaccgcagggcgcgccaacatctccagtgatctctaacctgataggaaacatcatggatatccgtctgagcaagattgcccgagcacatggctgctcctatagcagatatgccgacgatataactatgtcgactagtcaccctcagtttcccggcgcgatagcccatcaaataggaacaccatttaaatggcagatcagtaaagaactggagactgctgtgggggcttctgggttcaagatcaaccacgccaagacgagattactgcacgctcggtcacggcaagacgtgacgggtattgttgtgaataagcatgtcaatgtgaatactgattaccggcgggcagtgagagctatggtgaacaatctttgtagcacggggacatattaccgggagaatcctgtactaggggtcgacaacaccaacatgacccttgtcgaaggctcaagacctcagctggagggcatgctgaactttctcctgcaggtcgagaggtataggcggagcgatcatctgaccccactggagttgagtgccacggaacgcctcttgcataggtttctgttcttcaccacatttgcagacaacgataaacctacaattcttttcgaagggaagacagataatatctacatcagctctgcgattagacgcctgcgggcatcttaccccctgttaatggcacccgggtctagggatctcctggtcaaacttctcccccacacccgaactcgcgagaggatctttagtctgaccggaggagactcccctttgaccaacttcattatttcctatcgcgaaaactataggagaattaaggctcccaaaggcaccaatcccgtaattgtgatctttgacaatgataggggctcaaacgggatcatctccgccatcaagaaacactacaagttagacatgcaggacggtgaccagtatatccgagtctacgacaatttgtacatactgctcaccagtaagaaagggagcgagaagcattgcatcgagcactacttctctgaggctactcgcgctaagaagctatccggcaagaagttatcactgtccaataaaaaactcaacgatgacgaatacggcaaagcttggtttgccgagaaaattgttaagccctattacaaggagatcgatttttccggatttgccgcactcttggaccctatatgtgagatcatccagagccatagcccctga

SEQ ID NO: 8276 - RNA, 1704 nt, synthetic construct
  source 1..1704: mol_type = other RNA
atgagcgacttgatcgccctgcgagcttgtactaccattgccggtgtggccaaactgcttggatttcaagccaagacgctggcatatatcgcctggggagcaccgtccgcaacaaagtactctgtgttcgacatcccaaagagatctggaggaaaaagaaccatccacgctcccgccccccaactgaagcttgcccagggaaagctcagcaacctcttacaggcatgtgagaaggaaatcgaggactcactgggtgtaaagcatagcgtgtcacatgggttcaaacgtgaaaggtctatactcactaatgctgaggtacaccgccatcagagatacgtgctgaatctagatctgttggacttctttgggaccataaatttcggccgcgtccggggatttctcataaacaaccgcaacttcaaactgcaccctgatgtagctacacttatcgctcagctggcttgccacgaagacagactgccacaaggctctccagcgtccccagtgctcagcaatttgatcgggaatattctggacatcaggctgtcaaaaatggccagagcccatggttgcgcctactcccgctatgcagatgatatcactttatccacttccaagcccgaattccctactgcgattgcccaccaggtcgacgcatttaaatggcaggccagtgaagatctcgagagtgctgtcggcgcctctggctttaagataaaccatgctaagaccagactcctacaccaccggtcaaggcaggatgttaccggaatcgtggttaaccagcacattaatttgaacagtgactatcggcggaatgtgcgcgccatggtcaacaagctgtgtagtacaggcagttaccagagggataagactatactcgctgccgacaatacaacaaaggtgtcggtcgagggcagctacgcgcaactgcaggggatgctggggtttatgatgcaggttgagcgtcatcgacgctccggaggtcccctaccaagcactctgtccgcaactgagaggctcctgcatcggttcctgttctacacgacattcgccggcaacgataagcccgtgattctgtgcgaaggaaaaaccgacaacatttatatttcagccgctgttaaacgactaagcgccagctatcctaagttaatcgagccggagtccaaaaatctgcttgtcaagatattgcctcacaccgcaacccaagagagaatctttaatcttaccgggggcgataacccccttgtgaatttcattatcgcttatagggacaactataggttaattaaggcgcctaaaggcgcaaatcctgtgatcgtcatctttgacaacgataatggctctaacgctgtgattgccgccattaaaaaacactttaagattgagatgcccgacgatacccagtacatccgggcctacgcaaatctgtatgtgcttctcacaaccaagaagggcacaggtaaccactgcatcgagcatttctttccgagcaaaacgctcaaaaaaacgttgtcaggtaagaagctgaatttgagtaacaaaaagctgaaagatgacgaatacgggaaagcgtggtttgctgaaaagatcgttaagccttactaccacgacattgatttcaccgggttctcgggcttacttgatccactctctgaaatcattacacatcatgcaaaccacaagatagacgagaaagggtga

SEQ ID NO: 8277 - RNA, 1710 nt, synthetic construct
  source 1..1710: mol_type = other RNA
atgagcaatctctccagactacatgcctgcacttcagttgtggacctggcgaatctgctgggctttcaggccaaagcgctgggattcctggcatggggcttaccacccacagcccgatattccacgtttgacatccccaaacggtctggcgggaagcggactataaacgcgcccatacctcaactgaaactggcacagcagaagctggcagccatcttgcagagttgcgaggcagagattgagctcttgctgggggttaagcggtcagtcgcccatgggtttaaacccaaccactcaattcttaccaacgcagccgtgcaccggaggcagagatatattctgaacttcgaccttgaggatttttttggcaccatacactttggaagggtccgtgggttcctcatcactaacaggtactttaagttacatcctgacgtggccactctgattgcacaactgtgttgccatcagaaccagctccctcagggtgctccaacatcaccagtgctgtctaacctgatcggtaagattcttgacgttagactctccaagcttgcccggattcatgggtgtgcctatacccggtacgccgacgatatcaccatgagtacatccgctccagagttcccagctgcccttgctactgaatgtgccaatagtctgacctggcaactaagcgctagagttacatctgctatcgcggattcacgcttcaagctcaaccctagtaagaccaggctccaacacagaagatctcgtcaggacgtgaccggcatagtggtgaaccagacactgaacgcaaattctgactttcgtaggagtaccagggccatggtagacaaactgtgtcgaacaggatgttaccagctggtcaaaccgactttgcttgccggagataccgtaagcgaacctagagaaggtactaatgcccagcttcacggtaaaatcggcttcctgttgcaagtcgaaaggtttcgccgcgctggagatcccgaaagccctcagctctcagcaactgaaaagctccttaagcgatttttgttctataccacgctggccaatgctgagaggcctgtcattctctttgagggaaaaacggatgagatatacctccggtgcgctattaaacgcctggcctccgcctttcctcggttagctgcggccgcaactggtgaagtgctggtcaatttgttctcgcacacccccacacgccagagaatctttggcctgacagggggagatccgccactaacaaacttcgtgaatgagtaccgagaacactaccgcccaataaaagggccgaagggcacacaccccgtgatcgtcttgtatgacaatgataatggcgccaacagcattttcgctgcaatggacaaaatctacaaggtgaaaatggcagatggcctccagttcatccgcatctacgacaatctgtacattgtgttaagcagtgcaaagtgcgctcccggaacgggccattgcatcgagcacttattcgataaatccgtacttacaactaccctctctgggaagacgctgagcttgtctaataaacccctgaaacccaccgagtatggcaaggcttggttcgctgagaaggtgattaagactaactataagtccatcgatttcagcggattccaccctctattggaagcgatttccacaatcgttaccacccataaggccagctcgtccccactgccatga

SEQ ID NO: 8278 - RNA, 1689 nt, synthetic construct
  source 1..1689: mol_type = other RNA
atgagcaaactcttggccctgcacctgtgtaattcggccagcgacgttgcacggctgatcggcttccaacccaaggcaataggatatctggcctggggaaccaaggcccgctatacaacatttgagatccccaagcgaagtggagggaagagaactattaacgctccaattctgcacctgaaaatcgcccagcggaagctggccgacctgctacaggaatgtgagagcgagatagaagaggccattggggttaaacagagggtgtcacacgggtttcggagggaccattgcatccttacaaatgccagtgtccacagaggcaagcgctacgtgttgaatcttgatttagaggatttcttcgggactattaactttggtagagtcaggggctatttcatcacgaacaagcattttcaactgaaggcggacgtggcgactctcttggcccagctggcttgtcatgactcaaagttgccgcagggcgcccctacttcccctgtgatttccaatctgatcggaaacattctagacattcgactgctaaagctggcgcgcgctcacggctgttcctacacaaggtacgcggatgatataacgatttccacatcagcccctacatttccagtggaaatagccctagagggcccaaccaacacctggacattaagcaaaacccttaatgattctgtgaagtcttctggtttcgcagtcaacgctaaaaaaacccgcctgcttcaccggaggagtcgtcaggatgtgaccggaattgtagtgaacaagtgcctgaatgtaaattccgactatcagcgacgtgtgagagtgatggtgcatcatctgcgctccaccggaaagttctaccggaaactctccagtttgacagctgccggtgataccgaggtacaatcacgggatggtactagagcacagctgcagggtatgctcggctttgtcatgcacgtggagaggttccgtcgaggagatgagcctcttcctgagaagctcactgggatcgagaagctttatagacgcttcttattttacacgcagtttgccaaccacgagatgcccgtcctgctgttcgaagggaagacggacaccatctacttgggagctgctattagggctcttgcccccgcgtaccctacactcatcgcagcaagcgcactccaagtacacatgctgcgcaacaccccacgaatcgaaagattattcgggcttaggggcggtggcgatcagctgtttaacttcgtcggagaataccatgaggaatataggcatatccagggcccaaaagggacacggcccgttatcgtggttgtcgacaatgacgccattggcagaaatatggttaaaaaagtcgaggggatgacaaagaccaccatacccgtgggttcgcagtggttccgggtccaagataatctctatgtagttctcacttctcctttcgaccccaagggcgccatgcactgcatcgaagcatgctttgaccccaaattcatggcaactgctctcgggggcaagaccctcagcaaaggatccaaaggcaagaaattggacccagctaaagaagtgagcaaggcatggtttgctgaaaaaattgttaaaccgaacaccaagagtatctctttcgctgggttttcatctctgctggattgcatcagcgacgtgataactaagcatgtgccatga

SEQ ID NO: 8279 - RNA, 1692 nt, synthetic construct
  source 1..1692: mol_type = other RNA
atgtccaaactgtttgccttacaacagtgttccggcgcgtccgatgtggcacacctcattggcttccagcccaaagccttggggtacgtcgcgtggggaacgaaggctagatactcggcattcgatatagccaagagatcggggggaaaaaggactattcacgcccctatcccacagctcaagctggcacaacagaatctagcagaacttttacaggagtgcgaactggagattgaggcggcacttggagtcaaaaagagactcagccacggattccgccgtgatcattctatcctgaccaatgctgacattcactgcgggaagaggtatgtcctgaacttcgacctggaggacttctttgggacaattaacttcggcagagtcaggggctatttcacaaacaataagcattttcgactcaaacccgacgttgctacgctgattgcccagcttgcctgtcatgaatcaaaattaccccaaggtgctcccacttctccggtaattaccaatctgatcgggaatatattggatatgcgcctggttaagatagcccgagccaacggatgcgcttattcccggtacgccgacgacattacattcagcaccagcgcacccgaatttcctactgctgtggcctctgagatcgcaccgcatgcttggactctgtcaaagactgtagaggactccgtcaaagcctcaaggttttctattaatgccagcaagacccgaatgctataccgccgcagcagacaagacgttactggcatcattgtcaacaagttcgtgaatgtcaacagtgattaccagaaacggctgagagtgatggtgcaccacctgcggagtagcgggatcttccaccgcaagaactcagtgcttggggctagcggtaatacctcagtgcaaaaagaagtcggtaccaggaatcagctgcagggcatgatcggctttgccttgcaggttgaagcttttcggcggtatggagcccctcctccacctgagctcacatcaacggagaggctctacaaacgttttttgttctacacccagttcgcagcccatgataaacctgtgctcctgttcgaaggcaaaactgacgtggtgtaccttaagtctgcaataaagagcttgtccgcgagttatcctaccctatatacagggagtgacatcctcgtccatctgctgaggcacacaccccgtatggagagactttttggactgtctggcggcggtcacccattgatcgcatttattaagaactaccatgaggaatatcggcacatcaccggcccacgaggcgccaaaccggttattattgttgtggataacgaccagataggacgcaatacaatcaacctgatcgaaaagattaccaagacagtggtagcccccggtacacaggccgtaaaggtgttcgacaacctccacgtgatcttaacttccccacacgataaggatagtgagcttcattgcatcgaggattgtttcgaccccgcatttattaaggctgaactggacgccaaaaccatctacaacgggaagaagatcaagaaaaataacgagtttgacccaagcatccatatatccaaatctgcattcgccgagacgatagtgaaagctaaggctgcggcgatcgattttgctggatttaagccactcctggatcacatcgccgccgtgatcgctaaatattga

SEQ ID NO: 8280 - RNA, 1938 nt, synthetic construct
  source 1..1938: mol_type = other RNA
atgattcagatagggttggcaaatgcacaccgcaagttggcgctcgcggcactgacttccatcgccagccaggccgcactatgcctgcttctgggcgttgccggccgtttcggctgtagaaggatagctgccagtgaagccatcgcacgttggatttgtccagtgacactgtctgcaacccgacggtcccttggggttcgggagagttcttgcaacccctcatttccagcttcacatggggacggaatgagtaagctcctcgcgctgcagatctgtaactcagctagtgacttggcccaccttatcggattccagcccaaggctctgggctacgtagcctgggggaccaaggctaggtactccactttcaacattccaaaaaggagcggcggtaaacgaacaattaatgcccccatcccgcagttgaagctcgcacaacagaagcttagctcactgttgcaagaatgtgagagagagattgaagagactctcaatgtccgacaccggctgagccacggcttccgtaaacaacactccattttaacgaatgctgccgtgcatcgggggcagcgttgtgttctgaactttgacctgcaggatttctttgacaccataaatttcggacgggtcagaggctactttatgaccaacaagcatttccgcctacgcccggacgtggcaactctcattgcccagattgcttgccacgacagcaagcttccacagggcgcccctacttctcccgtgatctctaacctcgtggggaacatactggacatgcgcctggtcaaaatcgctcgcgccaatggatgcgcctacagccgatacgcagatgacattaccttaagcacgtctgccccagagtttccagaagcaatcgccatcgagggccccacccattcatggaccctgtccaaagccgtgaacgatgcagtaaaggcctccggatttagagtcaacgcagctaagactcgacttcagtataggaggtctaggcaagacgtaaccggcattgtggtgaataagtgcgttaacgtcaatgcagactacaggagaagagttcgcgtgatggtgcatcacctgaggtcgagtgggaaattctatcgcaaaagctccggtctaagtgccgccggagatactgaggtgcagcagcacgaaggtaccatcgcgcatctgcagggcatgatcgggtttgtcctacaggttgaacgctttcggaggggagaagatcctgcgccagcggaactgtctggaattgagaagctctataggcggtttctcttctacacacagttcgctaaccacgagaaaccagtcttgatgttcgagggcaaaaccgatgtcatatatctggcctcagctatcaaatcgttagcagctgtatatcctacactgatagtgaagccccctgagctccttattcacttgctgagatatacccctagaatcgagcgcctgttcggcttaagcggtgggggccatcaactcatcactttcatcaagaattaccatgacgagtatcggtacatacaaggtcccagaggaagcaagccggtgattgctgtagtggataacgataaaatcggtagagatacgatcaatctggtggaaaagattacaaagacgcctatgcctacaggagcccagagcgttcgggtctatgacaatctgtacgtggttctgacatccccccacgataaggccggaaagcaccattgtatcgaggactgctttgatcctgaattcgtgaaatccgagctggccggtaaaaaaatttctaaggggaccaagggggtgaaacttgaccccgtcacagaagtgtcaaaagcctggtttgcggaaaagattacaaaaccgtccttcaaacccatcgattttagtggctttcagcctctcttaaacgagatagctgccatcatcgctaagcacgctccatga

SEQ ID NO: 8281 - RNA, 1770 nt, synthetic construct
  source 1..1770: mol_type = other RNA
atgtccaaactggccgccttgaaagcttgcagcagcattggggatctggccctcctgttgggcttcaaagcacagactctcggttatattgccagaggtctgcgagatccggcaaagtacacatcattcgatatccccaagagaagcggggggaagaggacaattcatgcccccgtgcccaaactgaaattagtccagcgtaaactatgtaatctcctggaggagtgtcagaaggagatagagtccacccttggagtcgaaaaaagactggctcacggattcaagaagcaccactcgatcttcacgaacgccgacgttcaccgtagacagaaatacgtgctgaacttcgaccttgaagatttcttcgggacaatcaatttcgggagagtccggggcttcttcattgctaaccgacattttaagctgaactctgatgttgcaatgttaatcgcgcaactggtgtgttgcaacgccaagctgcctcagggctctccaagcagtccaatcataagcaacctgatcgggaacatcctggatattaggctcgccaagcttgcccgcgcaaatggctgttcttattcgagatatgccgacgacattacgatctcaacttctttgcccgatttcccttccgccatagcttcattggtcacagggagccacgtatggactctgtcgtccgacgtgatgaataccattagcgcatgcgggttcaaactgaatcccaagaagactcgcttgcaatatcaccatagtaggcaggacgttacaggcatcgtcgtcaatcgccatgtaaacgtgtcctccgactatcggcgcaaactgcgagccatggtcgaccgacttcgcagcactggttcttttacctactctgcaacagagctcgacactgctgcctcaacaaaagtgagcgtgaagacgggaaccaggaaccaattacaaggaatgttgagttttgctctgcaggccgagaggtataggcaggcttcaacttccacccctgcgcccgaatgtctgacaggtaatgaaaagctcctcaggcggtttctcttctacaccacctttgctagtcacgagcggccactggtgatctccgagggaaagaccgacggaatctatctggcttctgccatccggtccttagccgccacctttcctgagcttgtggcgcccaagacaggtgtgcccgctgttcgttttcttcggctcacccggtcaatggaacgcctgtttggccttagcggaggagatggccccctgaaggagttcgtgcatcagtacgctgaagaatacagacacattaaaggccctaaggggtccatgccggtaatcgccatttttgataatgataccggcgcgaagggggtcttgggcctactcaagggtttttacaaaatgcctatgcctgccggggcacagagtgtgcatgttcacggcaacctgtacgtcgtactcacttctcctcatattacaggcgctccctcccactgcattgaagactgcttcgacgcggcaaccctagccataacactgagcggaaaaacgctgagcttggccaacaaaactctcggcccgaatgagtacggcaaggcttggtttgcggagaaggtgatcaagcctaatgcaaaaaccatcgattttgcaggttttaacggccttctaggagtgatttcacagatagtgaagggacataccccacctccagtggcaccaccggctccaagtagtgtggcactccctttagttactccaaaaccatctataccctga

SEQ ID NO: 8282 - RNA, 1743 nt, synthetic construct
  source 1..1743: mol_type = other RNA
atgagtgcattgacaaacatcaaagcttgcaacacattcaatgattttgctcggctgctaggctttaaggcgaatagcctggcctaccttctgtggggaatgcacgccgatacgaaatataccacctttgatattccaaagaggtctggtggcaagcgcacaatctgcgcccccaacccaaagctgaaactggcccagtcaagactgtcggagctgctccagcaatgtgagaaggaagtggaggtgattcacgccgtgaaaaaatcactcagtcacgggtttaagaaggaacatagcattttgaccaacgcagaggggcactgcggcagacgctacgttttaaatattgacctggaggacttcttcggcactatccattttggccgggtacgtggattcttcatcaaaaatagacagttcgcgctgaatcctaccatagccatgacaatagctcagattgcctgccacgagaataaactgccgcaaggaagcccctgttcacccgtgatctccaatttggtggccaatatcctggatatcaggttggccaagctctccaagatccacgggtgttcctacacacgctacgccgatgacattacttttagcacctctatgcccgacttccccgaaagcatcgcatttaagcagatcgactcgaaccattgggtactcggcaagccactggtcgacgcgattaaggcatgcaagttccgtatcaacctgtccaagactagactgcaatatcgacggtccaggcaagacgtaacaggcatagtggtgaataaacagctcaatgtgcgttcagagtaccgaaaggccctccgcgctatggtgtacaagttgagggagacaggaagcttcagccgaaactatagccagctcggagctaacggtgatacccaggttattgctaaagatgggtccagggcacagctatttgggatgctgagctatgtcattcaggtggaaaggtggcgcaaccggaggattgactcccctcctgagcggctctccgccaacgaatggcttatgcgggagtttcttttctacaccatgtttgcgaacgccgatagaccttgtatcgtttgcgaaggcaaaaccgatagtatctatatcagagaagcaatcaagaacctgggcgcctctttcccttatcttgctaaatcaaatgccggcaataacgaggtcattgtgagtctcgtcagaaacaccgacttgctggccaggcttttcggtctatctggcggggaaacgcggttaaaggactttgttaagaattaccgcgatgaataccgaaagatcaaaggtcctaaggggagtcatccagtcatcatcctcttcgacaatgatagtggcgcaaaagacgtcctgaacctgctggctaacctgttcaaagttattcccgttgtggggagacaatatttccatgtccacgacaatttatacgtgatgctaactagccctgtgggagccggacctcactacattgagaaatgtttcgatgcagccactcttgccatgacgcttggaggcaaaacttttaatccggctaaccagactttgggaccaaacgagtatgggaaaggttttttcgcagagaaggtaatagctcccaacgcacagtctatagacttctcagggttttccaccatgctcgcggaattttcctctattatagtgagtcatgctgcaccatctccatcattacccgtcccccctggtatggctccatctccgtga

SEQ ID NO: 8283 - RNA, 2142 nt, synthetic construct
  source 1..2142: mol_type = other RNA
atgagcgcattgaagaggctgcaggccgccactacattgtccgatgtggctaagattctgggcttcaaacctagagcattggcctacttaatcagagtcatgccagccggcagccggtataccgaatttgagatccccaagcgcatgggcggattcaggcgtatctgtgccccgaacaaaaagctggcattggttcagacacgtctggctgacctactaagcgattgcgccgaggaaatagccgctcagagaagcgtaaaaaagtacgtcgcacacgggttcaggcgcggtcatagcatcctgacaaacgctgacgtgcaccgcgggagaaaatacgtgcttaatgtggacctgctgaacttttttgatgccatccacttcggaaggatacggggattcttccatacatctcaggactttcagctggagctggaggtagcaacagtgatagctcagattgcttgccacgaggctaagctgcctcaggggagtccctgttccccagtgatatccaacctcatcgccaacattcttgacatgagactagcaccactggcgcaacactatggctgctcctacacccgatacgccgatgacctgtcttttagcaccaataggcgagaattcccggaagaactcgccgcacaggtgaaaggacaagagccaatttgggaagtcggaccagcacttctcgctgccatcaagacagccgggttttccattaatcccaagaagacccgcgtgcagtatgactgcagcaggcaggacgtgactggcatcattgtgaataagttcttgaacactccaattgagtaccggagaactctccggtccatggtgcaccatctgactgggaccgggaagttctatttaaaagatgtcgaccctgcgaccggcaaaaagagggagggatctcgagctaagctgcaagggatgctgggatttgcctatcaggtggagaaatggagatcacgcaggagtccagtggtttcgggggcccatactgccatggaaaaactcctgcagcggttcctctattacaccgaatttgcctctccttccatcccggcaattgttttcgagggcaagaccgattctctttatctccgcgaagcaattcggagaacaccctcagccatgcccatgctggctacgggtgtgggtggtggctaccgattacgggtgaaattgcaccgtgagtctgtcatcatgcgcaaattcttcaacctttcaagcggcggcgatcctctcaaaaatttcattcgggacttctctaagttatttcctaggattgttggacctaagggcgaaatgcccgtcatagtgctcatggacaacgactcgggttttagttccaccaagagcatgctgaaaaattgttacggtatctcagtgatgcctggggaccaaaaaatccacgtttttgagaacctctacatactgctgacgagtccttatgctgttggcgcctctcattgtatcgaggactgctttccatcgtccgtactggcaacaaaactgggttccaagtcatttagcaagagtaacgattttgatactagcacgcattacggcaaagagtggttcgcggagaaagtcgtcaagcctggcagtaagggaattgattttaccgggttcaatggcatcatcgatggagtaaaggccattttgctggaacacgccgtgtcattcaaagccaaggcgcttcttcccatggcggccccttctgtcggaggagcttctattgctgctccctccgccgccagacgactaatccccaaagtctccaaggcgccaaaaactttagccgcaagcaccccttcagtggccagcaagtcaagtacggcggttctcgatcctaccggcccagaggctcccaaggtacccaaagcaccaaatatccctaaggctcccaaggctccaaaagcacccaaggctcccaaggccccgaaagcccctaaagctcccaaagctcctaaggctccaaaggcaccaaaagcacccacagggcccgaagcacctaaggttcccaaggccccgaagatccccaaagcccccaaagccccgaaagcaccgaaggccccaaaggcaccaaaggctcctaaggcgccaaaagctccaaaggcgcctagtcccaaatga

SEQ ID NO: 8284 - RNA, 1719 nt, synthetic construct
  source 1..1719: mol_type = other RNA
actactacgatcggattcaagcccaaagcgttgtcatttataaccagagtgaccccaccagccgcacggtatattgagtttgatatccctaagcgctccggaggtacccgtcgaatctgttcccccaacaaacaactgagtctactgcagtcacgattggcagagctgcttaatgaatgcgaagtagaaatagcgcagcagagatcgatcaagagacatgtggcccacggctttagaaagggatactcaatccttaccaatgctgacgtccacagagggaggaggtacgtgctcaatatcgacttgacggatttttttggtaccatccactttgggcgggtgaaagggttcttcgagaactctctggatttccagctgaaagcagagcctgccttagttctagcacagattgcctgccatgagggcaaactgccacaaggaagcccttgcagccctgtgattagcaatctgatcgccaatattctcgacatgcggctcgtagccctctcaaaacggcatggttgttcttacacaagatacgcagacgatctgtccttctccacttccaaactgatcttctctgacgctctggcaacacccagtgaagcgaacaagagtatctggcaagctgggccggacttgattgccgccgtccattccgccggctttaagatcaacccactcaaaacccgggtccagctgtcaaggagcagacaagatgtgaccggcgttgtcgttaatcgacagctgaacacacccgtagagtatcgccgcacactgaggtccatggttcaccgcctttgtagcactggggaatacctcctgcaggagacagacccggcaaccggcaaacagaaggtgggaacacccgcccaacttcagggtatgctggggttcgcctatcaagtggaacgttggaggagtcgtaacgatgaaccagctagtggcgcccagacggctatggagagactgttaaaacgcttcttgtactacaaggagtttgcaagtcccatgctgactgctatagtgtttgagggcaagaccgattccgtctacctgcgggaggcaattaggcgctctggaaccgccttccctatgctaagcaaaggcgctggtacaactttcgagttaaaggttaaactgcaccgggaaagcaaaattatgaagaagctttttggactcacctctggcggcgaccccttgaagaatttcataaaatgttaccgatgggagttttccaggatcgatggcccaaaggggcagaatcccgtgattgtcctcatggacaatgatgacgggtttacaggaactaaggctatgcttttcaacgtctataagatcagcatttcttcaggccagcagttcatacacgtgtgggaaaacctctatatccttctctctagccctttcggtggagctaaacactgcatcgaagactgcttcactgcctccgtgctggccgtgaagttaggcataaaggagttttcgaaaacaaacgatttcgaccctaacatttattatgggaaggagtggctggctgaaaaggtagtgaagccaaactcagccacgattgatttttctggtttcgggaatctattaagtgcgttgcaggacgtgatcctgcaccattctgctaccatgctcagcgcaagggccgctaacacaggcgttccgagcctgcccatgcctctcccaattcctgggggaccagccccctga

SEQ ID NO: 8285 - RNA, 1758 nt, synthetic construct
  source 1..1758: mol_type = other RNA
atgaaaaaacccactcacatcgcacaactgcggagtcttgctgccctgcatgggcttgccaccctcctcggatatgaggcgaagggtctggcctacgtggtctatggtataaaggacaaggataagtatgtggatttcccgattcccaaacggtcaggcggcacacggattatctcggcacctgtgaagtcactgaagctgctgcagagccgcttatccacactgttggcggcatgcgccgaagagatcgaggtcgaaagaggtgggaaaaacaagtttttccacggctttcgcaaaaatcacagtattctgactaatgccacagtccacagaggcaagcgctatgttttcaatgtcgacctttcagacttctttggatctgttcacttcggccgtctgacaggatttttcaccaagaacagacactttgagctggaaccagtggtagctaggatacttgctcagatagcttgtcataacaccgtattgccccaggggtcgccctgtagtccggtgatctcaaacctgatcgctcatattttggacgttaggatggcacaactggctgcacgtaacgactgctactactccaggtacgccgatgatttaacattctctaccaacagaaacgagtttccgagcgcgatcgccactagggttggggattctaatgaatgggtggcgggtaagtctctcctaaagatcgtaaaggatagtcggtttgagctaaaccatagcaaaacacgcatgcagtttcacagattccgccaggatgttacgggagtggtggtcaacaagaaactcaacgtcccctccgaatacgtgcgcgatgtacgagcaatggtgaacagctttgtcaagaccgagaaatttactcttcggaagaaatataggaacgatacaggagcctgggttctcgagacggtccagggaacgaaagaacagctcaggggtatgctgtccttcattgacaatgtacgcgtgtttcctcagaagaagctcgccatggaaaaaaaggacaaaagagaacaacgaattccacgagtggagttcaaagacatggacggagcctctcgtatgtaccggcggtatttgcagtacacccaattctttaatccagaactcccctttgttatctgtgaaggcaaaacagataatgtgtacatcaagtgcgctctacgacaattagccggcacttatcctcagcttgtttcaaagactgcctccgctaataagctgctgctgaacttcttcaactataccaaggtggcggacaggatcttacaccttggggggggcactggcgatttccagactttcatcggaaattatgggtctgagtttaagggattcaaatccgagaagaagaggaatcctgtgattctcctgatcgataatgacgaaggcaccgccaaaatcttttccagcatcaagacagccatcaagtctaaaagtcccgtcgatgggtccgagccattttaccatattgctgacaatttctacgtggtggctattcctagaaaaggcggcaaaagcaccacaatagaggactttttcgaccctgccctgttgaaaaccaagctgggtaccaaaattttcagcgggaaggacgggttcgatccagctaccgagtacggcaagcactactttgccgagtatattgtgaagaaaggacagaaaacgattgacttcagcggcttccatccaatactcgagagactggtggcagtgttgatggcacatgcagtcaaaccttga

SEQ ID NO: 8286 - RNA, 1758 nt, synthetic construct
  source 1..1758: mol_type = other RNA
atgaaaaaccccactcacattgctcagctgagggcccagacttccctgcatggtcttgcccgtctgctcggttacgagcccaagggactggcttatgtcgtttacgggatcggcgacgcgtacaagtacgtggacttccccatcccaaaaagatcgggtggcactcgcatcattagtgcgcctgtgaaatccctcaaacttcttcaggctcgggtgtctacattactcggggcttgcgctgaggagattgaagtggaacgcgggggtaagaaccgatttagccacgggtttcggaagaaccactcaatccttacaaatgccacggtgcaccgcgggaagcgctatgtatttaacgtggatctacacaacttcttcggcacggtccactttggtagagtaagcggatttttcgcaaagaacagacattttaagctggaccctgtggttgcgaggattctcgcccaaattgcatgccataacaaagtcctgccacaaggctctccgtgtagtcccgctataagcaatctcatcgcacacatcttggatgttcggatggcccagttggctgcacggcacgactgctattactcccggtacgccgatgacctaactttttcaacaaatcggaaggaattcccggagtcgatcgcaactcgagtttcagacagcaatgaatggattgccggaaaaagcttgctgaagataattaaggattctagattcgagcttaaccactccaaaaccagaatgcagtttcataggtttcgtcaggacgttaccggtgtggtggtcaacaagaagttaaacgtcccaagcgagtatgtcagggacgtgagagctatggttaattctttcgtgaaaacgggccaattcacactgagaaagagctaccgcaacgatgcgggcgcatgggttgtggaagaagtagccggaaataaggtacaactcaggggcatgctctccttcatagattctgtcagggtgttccctcaaaaaaagctggcaatggaaaagaaagataagcgcgagcagcggattcctagggtggaactgaaggacatggacggcgcctctcgaacatataggcgatacctgcagtacacccagttttttaatcccgaactgcccttcgtgatttgtgagggcaaaacggataatgtctacatcaagtgtgccttgcgtcagctggccgacacatatccacagctcgtgtccaagacagccagtgagaataagttgctcctgaacttcttcaactataccaaagtggccgatcgcatcctgcatttgggggggggcaccggagatttccagacattcatcggaaattatggatccgagttcaagggcttcaaaagtaaggaaaaacgaaacccggtcatcctgctcatcgacaatgacgaaggaaccgctaaaattttcagctcagtcaaaactgcaactaaaagaaagagcccagtggatggcagtgagcctttttaccatatagcagacaatttctacgttgtggccatccctaggctgtcaggaaaatccaccactattgaggacttctttgatccaacactgctgaagaccaaattaggcaccaaggtattctcaggcaaagacggatttgatagtgccaccgagtatgggaaacactattttgcagagtacatagtgaagaaagggcagaagaccatcgatttttctgggtttcatcccatccttgagcggctagtggctgtcttaaccgcccatgccgctaagccttga

SEQ ID NO: 8287 - RNA, 1785 nt, synthetic construct
  source 1..1785: mol_type = other RNA
atgtccgccgatatactgcctctcacaatgaaaacccctacacacattgctagactgaggtccatcagctctcttcactcgcttgcacgcttgctggggtacgagcctaagggactagcctatgtggtgtacggaattgatgataagtacaagtacactgactttcagatccctaagcggagaggcggcgtacgaaccatttccgcaccgatcgagaaactgaagttactccagagaagggtcgccaccttgcttgatgcttgtgtggaggagattgatgccgaaagaggggtgcggaacacactttcacatggattccgtaaaaaacatagcatcctcacaaacgcagcccctcatcggaatcgcagatatgtgttcaacgtggacctgcacaattttttcggcactgtcgactttggccgagtagtgggttacttgaagaagaacaaacatttccaactcaaccccaccgtggcccgtatgctcgctcagattgcctgtcaccagaaagtacttccccagggatccccatgcagtcccgctatcgcaaatctgatcgcacacatactcgatattaggctgggacgcctcgccgcgaggaacgattgtcattactcacgttatgcggacgacctcacttttagcaccaataggccggtgttcccaagcgagatcgccaggagagtgggcgacacgaacgaatgggttgccgggaaaatcctgctcaagatcataaaggaatcacgatttgagatcaacccagagaagaccaggatgcaattcgcaagattccgccaagacgtgaccggcgtcatcgtcaatcgaaccctcaatgttcggcgcgagtatgtgaaaaacgctagagctatggtggattcttatgttaccaagggcgtgttttatagcgagaagcaataccgggacgagaagggagcgtggacgaatgaactggtcgatggaaccgtgggccagctgcgagggattctgtcttacattgactcagtgcggctgttcgaacagcagaagcatgcttctgctaagaagactaaaagagactaccgcgtgcctcgcgtcgagattaaggacatggatagtgcagcaaggacttttaggcggttcctgttgcatacccagttctttaatccagaaaaacccctgataatctgcgaaggaaagactgataaagtttatatccagtgcgcgctacgccaattagttgatgcacacccgcagctggcgacacggacaaaatccggggttgatatccacgtctcttttttcaatttcacgaaagtggccgatcgtatattaagactgggggggggtacgggcgactttcaggacctgatagccaaatatgggacagaatttaagggtttctacgctaaaggccagcgccaacctgtgattctactggtagacaacgacgacggtactaagaagattttcagtactgtgaagaccgcaacaggaagcaaaaccgccattgacggtagcgcttccttttatcacattgccgacaacttttatgtcgtcgccgttccacagttgggcaaaaaagatacaaccatcgagaactttttcgatccagttgtacttactgaacggttaggcacaaaagtcttcagtggcaaggaccagtttgaccccgccacacagtacgggaaacaccacttcgctgagtacgtagtgaagaagaagcagaatactatcaatttcgcaggttttgaacccatcctggccaggctggatgctgtcttgaaggagcatgccgccaaaccctga

SEQ ID NO: 8288 - RNA, 1758 nt, synthetic construct
  source 1..1758: mol_type = other RNA
atgaataagatcacacatattgctaggctccgcccacttagttcgctacatggcctggcccatctgttggggtacactcccaagggcttagcctccatcgtgtatggcactcctgactcctcaaaatataatgactttcggattaggaagcggtcaggcggaactagacttatttccgaaccaaacgatcgcttgaagctcctgcagcgtagactggcgaacctgctgtccgaatgcattgacgacatcgactccgaacgtagagtaacaaactcattcgcccatggatttcgcaagaaacattccatcctcacaaatgcctctcggcaccgacgcaaaaggtacgtttttaacgttgatttgcacgatttcttcgggactgtggatttcggcagaattagcgggtaccttaagaagaacaaacactttctattggacgagcgagtggcaaggatgctcgcacaaatcgcttgtcacaacaaggtgctccctcagggctcaccctgttctcccgtgatggctaacctcatcgcccacatcctggatgtgcggctggctcggttagccgcgctgcatgactgctactacagcagatatgcagacgacctgactttttctacaaatcgagccgacttcccaagctcaatcgccaaaagggtcgaggattcaaacctgtgggttgcgggaaaggcgttagagaaaattgtaagcgagagtcggtttcagctgaacccttctaagaccagaatgcagctgaatcgatttcgccaggacgtgaccgggattgtcgtgaacagcggcatcaatgtccgtagcgaataccaaaagaccgttcgggccatggtgcactccctggtcaccaaaggggtcttccatatacaaaagctccatagggacgacaagggcgcctgggttcgtgaaaagaaagaggggaccagagctcagctaagaggaatgttgacattcatagacaacgtcaggctgtttgagaagacaaaacgcctgccccccgatagggctcaggatcaacgcggacagaaaggagatccggctgagatggattccgccactagaacatttcgccgatttcttatgttcacgcagttctttcaccctgagaaaccattaattctttgtgaagggaaaacggataaagtctacattcaatgcgccctccgacggttaagcacagcatatcctctactgagttcaaaatccgcaaccaagacaaatatacacgtaagtttcttcaactacaccaaaatagcaagcagggtcttgagtctgggcggagggaccggtgatctcaatggtcttgtagccacctacggatctgaatttgcaggcttcaaatctacaacgaaaaggcacccagttatcctgctggtggacaatgatgagggcacgaagggcatttttagcgccgtgaaaactcggaccaagagtacttcgccaatcaccggtaatgaaccttactatcacgtggcagataacctctatgtggtgtcccttccgctggtgaactctaatatggtgaccatagagaacttctttcccaagcatgtgagagacaccaagctcaacggtaaggtcttcagtggtaaaaatcgctttgatgccaagaatcagtatggaaagcacgtgttcgctgagcaggtcattaagaaaatccagaatgctggggacttcagcggtttccacgacatcctgatgcggatccaggctgttttggtggtacactctgcaaagaagccctga

SEQ ID NO: 8289 - RNA, 1752 nt, synthetic construct
  source 1..1752: mol_type = other RNA
atgaccaccactcatatccagaaactgcaggcgactgctggtctgtattcattgtctgatttgctggggtatagcgctaagggtttcgcttacattttgcacggcattagtgacgatcataagtacatccaatttgacattgccaagcgttcaggaggcaagcggattataagtgctcccatacccgagctcaaaatccttcaacggcgactggccgagttacttgaggcttgcgtggtcgacattgataatagcagaaagcttaagaacaccttctctcatggctttcgcccaaaacacagcataatgactaacgccagtttccaccggaagcgaaggtgggtttttaatgtcgacctccaggactttttcggaacaatcaattttggtcgcatttgcggcttcttcgcgaaaaacaaatacttccagctggatcccactgtggccagaatcatcgcacaaattgcatgtcacgagaagaaactgccacagggcagtccatgcagtcctgtgatcgctaatcttatcgctcacattctggatgtgaagttggcccgcctggcttcctcctacggatgtttctatacccgttatgcggatgatttgaccttctctaccaactcagagatattcccagagttaatcgccagcaggatcgacgggtccaacgagtggacagccggaaagaaactgctgagaatcattaaagattgtgccttcgagattaaccctgccaagacaagaatgcagtttcgcgagttcaggcaggatgtcacagggctcgttgtgaatagcaaaattaatgttaggaccgattacgtcaaatccgcgagagctatggtgaattccctcgtggaatccggtgaattttacataaagcgtagatttcgagatgaaaacggagccttccgggatgagacggaaaagggagagcccgacgtgctcagggggatgctcaccttcatcgactcggtgcggcagtttgacgccctgaagaatgtacgcgacatcgacaaagctgaccataggccaacccgccccctcgcaaaagacctgtcatctgcagaccggacgtttcgcaggttcctcctttatacccaatttcacaacccacagaaacctctcattatctgcgagggcaagacagacaaggtctatatacagtgcgccctaaaacagcgaaaagacaaatttcccgacctgagcaaaaaagaagatgaaacagatgggaaactgtcgttttttaactacagcaaggtggcagacagaattcttcacctagggggtggcacgggcgatacagatgcctttatcgccaggtacgggaaggagttcaaggggttctttgagaacaagaaacagcatccggtaattgtattagcagataatgattctggcgccaagtcaacattcggcgttgtgaaaaaggctggaaatatccccagtgtcgatggatccgcgccgtactactatatatgtcggaacttgtatatcatcttcatccctaagattgatggcaaagacactaccatagaagacctatttgacaagagcgtcagagaagcagaactgaacggaaaaaagttttctggctctgacaagttcgacgcaaaaactgagtacgggaagcacctgttcgccgaatatgtgatcaaacctaagcaaaaggagattgacttctccaagtttgattcaatcctgaagagcatcgttgacgtgctggcagatttcgaaaagcggcagcctacttga

SEQ ID NO: 8290 - RNA, 1755 nt, synthetic construct
  source 1..1755: mol_type = other RNA
atgacaacaaggctggcttcattgaaggccgccaactccttgcacacactggcacaggttctcggttatagagcgaaagggctcgcttacgtggtccacggcatccctgattcaataaaatacaccgacttccagattaagaagcgttccggtgggcttagaacgatctctgctcctattcccgaactcaagaagcttcagaaacatctggcccacttactggaggattgtgctgcggagatcaactcaacgaggggaatcaagaaaagcctgtcacatggttttcggaggaagcactccataatgactaatgcagctgcccaccgaggtcgcagatacgtgttcaacattgacctgcaggactttttcggcacaataaattttggacgcgtttggcgattcttcgaaaaacatcgggagttccaactaaatagcgcggtagcgcgcaccatcgctcagatagcttgccacaataaggtgctaccgcagggctctccatgttctcccgccatatccaaccttattgggcatgtgctggacatccggatggcacaattcgccgcaaaagtgggatgccattactcaagatacgctgacgatcttacatttagcactaataagaaggagtttcctgccctgattgccacccgcatgggggataccactcagtggtcccctggcacgaagttaatacgtgagatccgacggtgcggattcgaactcaattttgccaagactcggatgcaattcaaggactttaggcaggacgtgacaggagtcatcgtgaatagtaaagttaatgtccgcaccgaatatgtaaagaacgtaagggccatggtccacgcattggtgacaagaggagaattccagatccgtaaagttttccgagatgattcgggggcatggactgaggctgtggcaaaaggcagtgaagcccagctgaggggcatgttgtcgtttatcgacagcgtccgacactttgaagaatgtagagacactcctaagaataacggagtgccggattacaagctcccccgtagttctctggacgatatggacggcccagcacggatttaccgcagatttttggtctttactcaatttttcaggccagtgcagccactgattttctgtgagggtaaaaccgataacgtgtacatcagatgcgccctccggcagctgtttgccaaataccccgctctggccgccaagaagaagagcggcgagattgagttcaaaatcgacttcttctcccatagcaaagtcgccgacaggattctgcaccttggcggagggaccggggacatgtgcgatttcattgccaaatatggctctgaatttaaggggtttaagcatgacggcaaacgcaacccagtcatcatactaatcgataatgattccggcgcaaacaggatctactccgctatccggtctgccatcaagagtaaagataccattgacggatctaaaccatattatttcgtgcgcgataacctctatattgtgcctgtgcccatgctgggtggcaaccccacagccattgaggacttctttgagaagaaagttctggacaccgtgttaaatggaaaaaagttcagtagagcagacaagtttgatgctgcaacccaatatgggaaacacttgtttgccgagcacgtcgttaagaaggggcagaagagcattgatttcagcaacttcgcagctatcctcgaccggattaacgatgtactgaccatccatgctgcgaaaccctga

SEQ ID NO: 8291 - RNA, 1746 nt, synthetic construct
  source 1..1746: mol_type = other RNA
atgactcgtctgaagaaactcaaagccgcctcgtcactgcacgcctttgccgatgtactcggatacaaggctaaggggttggcctatatcatccatggcattgacgatagcaaaaagtacaaggactttgagatcaaaaagcggagtggtggattgcggaagattagtgccccaatccctgaactgaagcgactgcagaagagcgtggcccatctgcttgaagactgcgtctctgagatcaactcgcaccggaagaccaagggcacattgtgccacgggttcaggccaaaacactctattatgacaaatgcagccatccatagaaagaagcgctatatcttcaacatcgatctgaaggacttttttgggacgatccatttcgggcgagtttggcggttcttcgagaagaaccgggattttgcgcttgatagtagcctggctcggaccattgcacagattgcgtgtcataacagggaactcccacagggctcaccttgtagtccttccatctccaacttaattggacacattctagatatccgcatggcaaagctggcagctcaggctggctgtcaatactcaagatatgccgatgacctgacattttctaccaatagaaaaaacttcccccccgagatcgcgcaaagagtgggcgacacgaacctgtgggtgcccggtaaacaactggctaatgaaattaaaaggtgccgctttgagataaatcctgcaaagactagaatgcaatttaaggacttcaggcaagatgtgaccggcattgtggttaatagcaaacttaatatacgggcagagtatgctaagaacgtacgtgcaatggtgcacagcctagtgactcgcggagagtttactgtacgcaagaccttcagggatgaggccggggcctggattgaggaggtcgaagctggcactgaagctcgcttgagagggatgctctcattcatagactccgtcaggttttttgaactgcatcgacagacaataaagaaatccgttgcatccgacagcagattgagtagacggcctgtgagggaaatggacaggcatgagagggtttaccgtcagttcttgttattcagcaccatttttaggcccctccagcccctcgttatctgtgaaggtaagactgataatgtgtacctgcgctgcgctctgcagaaattatctggaaagtatccaaaactggtcaatgtgtccggggcaaagataacgctccagctgaacttctttaactactctaacacaaccgaccgaattcttcatttaggtggcggcaccggcgacctcgccgaatttatcggcaattatggggctgccttcaagggttttaaatactcagagaagcgtcgaccggtcatagtcgtcgtcgataatgacagcggcgcacagcccatcttcgctgcgatcaaaaaggctacattcagtaaatctgccatcgatggatccctaccttattaccacattcgggacaacctttacgtagtgccggtgcccaaacagaagggaaaagagacagcgattgaggactttttcgaaaaggccgtgcttgacaccaaactgggaggtaaggagttctcacgccaggataaattcgacccagccactcagtacggcaaacacctcttttctgagcacgtggtcaaaaaaaataaagggagcatcaacttcgacggattcgaaccagtgctggatagaatagttcaggtgctggatgcccactccgtgaagtga

SEQ ID NO: 8292 - RNA, 1806 nt, synthetic construct
  source 1..1806: mol_type = other RNA
atgtatcgtagtttgtgccaaggagtgtccgtagttccatttcagaccatctacctttttgagaacatgagcaggctggcttccctgaagagcgccacatccctccacgaccttggacatattctggggtacacagccaaggggctggcgtatatcctgcatggcgtgcccgataccgctaagtatagtgaatttacgatcaagaaacgcagtggagggtccagggtgatttctgcccctatcccagaattaaagagattgcaacagcatctcgccagccttctgaacgattgcatggtggagtccgacgcaaacagaggtgtcgtaaacaccctatctcacggattccgccctaaacattcaatcatgacaaacgcagcaatgcaccgcaaacaccgttacgttttcaacctcgatcttaaagacttcttcgataccataaacttcggacgggtctggaagtttttcgagaaaaacagggaatttggtctgaataccgcaatggcgcgtaccattgctcagatcgcatgccacaaggggactctgccacagggctctccatcttcacccgtcatcagcaacttaattgcgcacattctagacattgccatggtgcagctggcagctaaagccaagtgtcattattctcgctacgctgacgatctgactttttcaacaaatgagtcagaatttcccggcctgatcgcaacccgcatcggtactaccacagaatgggctatcgcccccaaagtcgtgagagagatcgtacgatgtggcttccaagtgaatccgctgaaaacgaggatgcagtataagactcgacggcaggatgtaaccggcattgtggtgaacacaaaagtgaatattcgctccgagtactccagagatgtgagggctaaggtcagtagcctgattacaaaggacacgttctcgatcaacaaaacattccgcaatgatacaggggcctggaccacggagacaaaggatggaactgatgctcaactgagaggcatgctctctttcattgactcagtgcggttgtttgaaagaagacgaaatgaacagatcccaccggagacacacattcctaggatcgaactgaaagagatggatggcaatctgcgggtttatcgggcgttcttgttatttactcagttctacagacccgtccgacctctcattatatgcgaaggaaaaaccgacaatgtttacgtgcggtgtgccctccatagtctagccgctgcccaccccatgcttgccaaaacgaccggaaagataagcgagtgtctcatagactttttctcctacagcaagaccagcgatagggtgttgcatctcgccggtggcaccggtgacttaggtaactttatcgccaattatgccaatgagttctcaaggttcaaaaaaatcgacagtcggaatcctgtgatcatcttgattgacaatgactctggcagcagcaagatattctccgtcattaagaaagttactgagtccaccgttaatgtggatggcagtctgaagttttaccctattaaggataatctgtacgtcgtccctatcccgaagattggcggcaaagaaactactatcgagcacttttttaccaagaagattcttgggactaagctcaacggaaaagtgttttctgggacagacaagtttgacccagctactcagtatgggaaacacctgttcgccgagtacgttataaaaaagaacaaggacgacatcaacttttcaaagttctcgatcatactgaagaacatagaagcagcactcaaattccattatgggatgccctga

SEQ ID NO: 8293 - RNA, 1821 nt, synthetic construct
  source 1..1821: mol_type = other RNA
atggctgcctttaagattacaccgcctaagactacactggagcttttccaaacagctacctcacgcgcagccctagcctcattactgaatatcgagcctaaagacttaacctaccttctgtatgtgctgaaggacgaagataagtactccgtattctctgtaccaaagcgggggggcggggagagacagatttccagcccaatttctcagattaagagcctacaggaaagactggctgacagcctggagcgctgcataaacgacatcgagttgctgaccggtaggagcaattccgcaagccatggctttcggccagagaaatccatactgaccaatgccagcgtacaccgaaataaacgctttgtattcaatctagacctcgaagactttttcccaactataacaggcagaagaatcagagggtttttgatcaacgacaagaacttcaaattccacaaagacgtggctaccaccattgcccacatagcctgtctcgatggtaaactccctcaaggctctccatgctctcccgtcataagcaacttgattgcggggattcttgattttcacctcgctaggctggctaaggcctgtggttgccgatacacaagatacgccgatgacatcaccttttccaccaacaagaaggatttccctaaagagatcgcattttgtgatgttgagcacacccatatatggaaagtcggtaagcagctccgaggcctgattgcgaagagtggcttcgtcatcaatgagaagaagactcggatgcagtattatacatctcgtcagcaagtcactggtttagtggtcaacaagaaaatcaacgtgaccacggaatacaggaaactggtgagggcttacgtctttagtttgatcaaccatgggaagttcacccttaaaactacaactaaggatgcaagcggccaagttaccattaccacggcaacaggaactcgtgcccagctgcatggcatgctcggtttcatccattccgttgataacgtgtatcgcgcagaggtcaaactgcacccctacaactacctaggacaccagcagagcacgaaggaatcagtgggaaatcaggctatctaccgacgcttcctcctgtatacgcggttttatgacaacgacactcccttgatcgtgtgcgagggaaagactgacggagtttacatttcaaacgcagttcaccagtcgaaggcccatttccccaagctccttaaaaagaacgatgatggcaatgacgtcctgtcgttccagctctttaagtatgcccgtaagcacaaaaaaaaggaccatgtgtatctccctaactttagtaccgcgtccatcttgggcgtaggatctggggggggcggaaatttagggaatctgatacggacatatcacaaggaactggagaaattcaagacaccagtgggagcttcacccgttgtgttcatcgtggacaacgatgatgggggacgggcggtgtacaaagtcatcaaaaacatcttgcatatcacagtgtccggccacgaaaggtttgtccacctctttgccaatctgtatatcgtgcctgtgccctttaaagggagtaaggacacttctattgaggacctgtttagtgaagttgacatttccaaaggacttaatagtcgctcattcgatttctctaagaagattgacgccagagcagctgtgggtaaagccgattttgcatacgaattcgtggctaaacaggccgagaggatggattggggcggcttctatccgctgctgcaaaatatttgtgatgcccttgccgattacgcaaaatacaggaaggaaaatgtgtga

SEQ ID NO: 8294 - RNA, 1806 nt, synthetic construct
  source 1..1806: mol_type = other RNA
atggccgccttcaagttgcctgccccaaagtcagcgctggaaaggtttcagtatgctagtagcagggctgccctggcatcacttttgtctattgagcccaaagacctgacttacctgctgtacgtgctgaaaaatagtgagaagtactctttgttctccatccccagaaaagggggtggcctgagggagattaacgccccgatacctaagattaagtcactccagcgtcgcttggccgaaggtctagagctgtgtgttgccgacattgctcgcttgactggacgctcaaattcagctagccacggattttgcccggggaagagtatactgagtaacgcatccgttcataggaacaagagatacgttttcaacctcgacctaaaggatttctttcccactatcaccggcggacggatacgggggttcctgatcaacgacaagaactttaaactgcacaaagacgtcgctaccacaatcgctcatattgcgtgtctggagggcaaattaccccagggcagcccctgctctccagtcatctccaaccttatagccgggatcctggattttcatcttgcacgcctggccaagaccaacggatgcagatataccaggtacgccgatgacataacattctccaccaacaagaaggactttccaaaatctatcgctttctgtgaaaaggatgcccacagatgggagatcggaaaacagctccagggcctgattatcaaaagcggcttcgtggtgaatgaaaagaaaacccgcatgcagtacaagaccagcaggcaacaggtaactggactggtcgttaacacaaaggtgaatgtcacgcgtgaatatagaaaactcgtccgggcatacgttttctcacttgtgaaccatggccgctacacaatcaagacagtggtcaaagatgataaagggcgtctggttgaggaaacagaagaaggccggcgatcccaactacatgggatgttgggttttatccattccgttgataatgtgtaccagagcgatgtgagagatcacccatacaattatcctggccagcaacggtctaacaagaacccaacggggaatctggccatctatcggaagttcctgctgtacaccctattctatgacaataagatgccccttattgtctgtgaaggcaagaccgacggagtatacatcagcaatgccgtacaccagtcgaaggctattttcccacagttgctcacgaagaatgatgacgggaaagacgtgctctcttttcaacttttcaaatatacccgacagcacaaaaagaagaagtctgtgtatatgccgaacttcagtaccgcctccatacttggcgcatcgtccgggggaggtgggaatttaggaaatttaatccgagcttatcacaaggagttaaatagctttaaagcccctattggagatcaccctgtcatcttcattgtggacaatgatgacggtggtagaacagtgtacaagattatcaaagagactctcaagatcgcaatgtcaggccatgaatcttttgtgcggctgtttgcaaatttatacattgtgcctgtgccctttaacgggaacgcccaaaggtccattgaggacctctttactgagactgatattagtaaaggcctcaacggtaaacgattcgactttagcaataacgcaaatagcagcgcgtctgtgggcaaagctgaatttgcatatgagttcgtggctaaacaggcagagactctcgactggacaggattccactccctgctcaacaacatctgcgccgtactggtcgattatgagacaagtgcgtga

SEQ ID NO: 8295 - RNA, 1791 nt, synthetic construct
  source 1..1791: mol_type = other RNA
atggaactgctgcaggccgcaaagtctagacctggcctggccaaactcctgcaaatcgagcacagtcagctgacatacatcctgtacaaaaagagcgatgcagagaaatacaaaacattcgaaattcccaagcgtggtgggggactgaggacaatctccgcccccatagccgagttaaagctcttgcagcggcgactcggagacgtactgtatatgtgtgctgtgaatgtggagaatagcaccggtcgaatcaactatagcgcccacggctttaagccagatcggagcattttaactaacgctgccgtgcacaggaataagagattcgttttcaacgtcgatcttaaagattttttcccgactatatcagcaaagcgcatcagggggtacttaatcaatgataagtactatcgagtggtcccagaggtagccaccacaattgcccatatagcttctagagatggtattttggctcagggcgcaccgagttcaccagttatctccaatctcattgccggaattctagactttcatcttaccagactcgccaaatcttgcggatgtcgttacactaggtatgctgacgatatcaccttttccacgaataaaaaggagtttcccaaggaaattgcccgcctggtggcaggggccgaacataactgggaaccagggggagccctcgtacgtctgattaagaaatccggctttgagattaacggggataaaacacgaatgcagtataagaacagcaggcagcaagtcactggtctagtggtcaacaagaagttgaacgtgacccaagaatacagaaaactggcacgcgcatatgttttttccctgatcacccacggcaagtatacggtgaccaagtttactaaaaacacactcggcaatattgaaaaggaagtgatagaggggacgtttgcgcagctgcacggcatgttaggatttatccactcggttgacaacgtctttagggccgatcggaaaaataacccctacaactacgtcggatatgggggcgaaggcaaaaatggagatcagaaactgcagatcttccggcggttcttgtactacactaacttctactgtaattctgcgccactcattgtttgcgagggaaagaccgacaatgcttatatcagtaacgctgtgcatcagtcaaaggcgctcttcccacaactgctgaagaaaggggatgaggacaatgacgtcctcagttttttccttatgaagtacgataggaaacataagaagcgcagacacatctaccttcctaatttttcaaccgtcagtatccttggcgtggggtcaggaggcgtggacaatctgaaaaaccttctaatagggtatagagcggagatagaccgctttcgcgctaaacccggtcctcaccccgtgatattcatcgtggataacgaccacgcaggaaaaaaagtgttcggcacagccgtggaactgtccagccctaaagtttctagcatcaccggtgacgagaagttcattaacatcttcgccaatatttacatcgttccaatacctaaagtcaagaaacccgaaacttctattgaggatcttttctccgctaaggatattcctgctgctatcaatgggaagcccctgaagttcagcaacgacaatgacaagtcgttcgctggcaaggcagacttcgcctttgagcatgtggtaaaaaatgcggacgccatcgactggggcggcttctatcctctgttgaacaacatttgcgacgccatcgagcatcggaaggcaaagttggagggtgcaatctga

SEQ ID NO: 8296 - RNA, 1839 nt, synthetic construct
  source 1..1839: mol_type = other RNA
atgctcgtgcccgaaattacaacactggaaagatttcaagctgcccactccagagaagctctggccaacctccttgacatcaagcatcagcacttaacttatctcctctacgtgaaaaaagatgctggcaaatacgcgacctttagcatacccaaaaggtctggaggaacacgagagataagggctccaatcaaagagttgaagtccttgcagcggcgcctggccaacaggcttcagaattgtatctccgacgttagtcggattaccggacgggaaaatcagtcaagtcacggcttctgtcctaacaagagcatcttgacaaacgcttcagcgcaccgcaataaaaggtatgttctgaatctggatctgcaggacttttttccaactattacgggccagcgtattagagggttccttatcaacgacaggaacttcaagtttcatcgcgacgtggcaaccacaattgctcatatagcctgcgtggatggggtgctacctcagggttctccgtgctccccagtgatctcgaacttaattgccggcatcttggattcacacctcagtcgcctggctcagaagaacggctgtcactacactagatacgccgatgacattacattcagcaccaacaagaaggagttcccatcccagatcggttttctggataagtcaaccagtgacaaatgggtactagggaaagaattgcgtaggctggtcgccctctgcgggtttgtcataaacgatggtaaaacacggatgcaatgcaagaatagcaggcagcaagttaccgggttggttgtgaatgagaaagtgaatgtaacctccgaatatagacaccttgtccgggcatacgtattcagcctggtgaaccgagggtcatataaaattcggagtaccctcaaaggaggcgacggaaatgagattgtctccgagaaagatggaacccctgagcaactgcatgggatgctgggtttcatccacagtgttgacagcgtattccggacagagctgaagaacaatccgcacaatcacctgcccccttaccagctgagcggtaagactacacccgaccctcttccattaagaaatctgactatctacaggaagttcctcctgtatacgcgcttttacagaaccaccactccactcgtggtgtgcgaaggcaaaacggacatagtttacatctctagcgctgtacatcaatccaaagctgttttccctcagctgataaaaaaaaacgacgccggaaaggatatcctcgcgtttcagttttttaagtatgaccgtaaacacaagaagaaggagcatgtctatatgcccaatttttcgacagcagccattcttggcgtggcatctggcggcgggcctaacctttccaacctgatccgcacctaccataaagaatctaagaagttccagagcccgtgcggtgataagccagtggtgtttgtcgtggataatgactctggcgccacggaggtgttaaaagccattaaggattgttcaggtaaggcatgtgatcgagacgaccccttcattcatgtgtttggcaacctgtacgtggtcttggtgcctcgaaacggactagacaagatggatactgaggggctattcagtccactggacctggccaagggccacaatggaaagaccttcgatttctctaaggacgcagattccagcacatctgtcggaaaagcaccctttgccttcgagtttgtcgcgcccaaagcaaaggaattagactggactggcttccaccccctcctggccaatatcatcgccgccttcgatcattataaggggactatggctgcaatcgtcccctcaccaccttga

SEQ ID NO: 8297 - RNA, 1806 nt, synthetic construct
  source 1..1806: mol_type = other RNA
atgagttcagaaaaaactatcctgcagctgttccaagcagcgacttcccggtcagatgtggccgccctcctggacataaaagtgaaggaccttacataccttctttatgttatgaaggccgaggataagtataaaacgttcgacatacctaagcgcagtggtggcatgagaaagattaatgctccgattaagaaagtcaaaagccttcagcggaagctggccgacaggttggagcagtgtctgacgttgattgagggcacaacaggcctgacaaatccctcaagccatggattccggagaggcaagtctattctcactaatgcggctacgcaccgaaatagacgttttgtgtttaacgtggacctccaggacttcttcccttccatcaccggccgaagaatcagaggtttactcataaaagaccggaaatttgggtttcacaaagatgtcgcaaccaccattgctcatattgcttgccacaacggcgagctgccacaagggggtccttgttctcccgtaatctccaacatgatcgctagtgtgttagactttcacttgagtcgcctagccagggacaacggctgcgcctatacaagatatgctgacgacatcacgttttccacaaataagaaaactttcccctccgcgatcgctgtctgtgacgaggcatctggccataattggaagttgggcaaccagctggccggattaataaaaaagtccggattcagcgtgaacgagaagaaaactaggatgcagtacaggactagtcgccagcaagtgactggcctggtcgtgaataaacgtgtaaacgtgaccaacgaatacaaacggctggtccgagcatatctattttctctgatcaaccacaacaagttcacaataaaaaaggtcgagccatccgagctgggtgacaaggtatctttaatcgatgggactcgagaacagctccatgggatgctggggttcgttcactctgtggactcagtcttccgcacaaatgttaagcagcatccacagaattatccagggatgcagacagatatcaaaaaggacactaagaaaccgaccgggaccctggagctgtaccgtagatttctcttcttcacccgctttttttcgaacacactccccctaatcgtttgcgaaggaaaaaccgatattgtttacctcagcaacgccgtgcaccaaagcaaattggcctttccaaagctcattaccaagaacagtggcggggccgatgtattgaattttaggttcctgaagtatgcgaggaagcacaagcggaaaaaaaatgtttacctgcctaatttctccaccgtccagattctcggagcagggtcgggcggaggaccaaaccttggcaatctcattttaaattaccaaagcgagttccccaaattcagggcacctaagggcaagtaccccgtgatcttcgtggtggacaacgacagcggaggtaaggatgtcttcaataaagtgaagaacattgtgaagatcaccgggcatgagtcttttgttcgcctgtttggtaacttgtacattgtgcctctacccctgaacggtgccgctgaaaaatcaatcgaagatctttttagcccggcagatatcgccaagggaatggatgggaagccattcgatttcacaaaggattcatccgacgccaccagcatcggcaaggccggattcgcctatgattttgtagcaaaacaggcagaagatctggaatggtctggatttcaccctctgctgcagaatatatgcgccgctcttgacgattacgctgcactggccgctaccccctga

SEQ ID NO: 8298 - RNA, 1794 nt, synthetic construct
  source 1..1794: mol_type = other RNA
atgtctagtgaaaagtcaatcctccaactgtttcaagccgcctcatcccggtctgacgttgccgctctgttggacataaagctcaaagacctgacttatctcctctacgtcatgaaggatcatgataagtacaagaccttcgatatagccaaacgctcaggaggtaagaggcagatcagcgcaccaattaagaatgttaaatccctccagagaaagttggcagatcggttagaacaatgtcttaccctgattgaatcggctgcaggtcggaaaaatccgtccagtcacggctttcgccgaggtaaaagcatcctaaccaacgccgcaactcataggaacagacggtatgtctttaatgttgacctcgaggatttcttcccttccataaccggacagcgaattagggggctgcttattaaggataaaaagttcgggtttcacaaggacgtggcgaccactattgctcatatcgcgtgccacaatgggaaactgccacagggttctccctgctctcctgttatcagcaacatggtggccgccatattggattttcacctgagcagactggcacgggataacgggtgtgtctacacaagatatgctgatgacatcactttctcaaccaatcagaaggagtttcccatcgcaattgccgtgcgaaaagaaagcaatgggcacgtgtgggaggcctctaaccagctacaagggctgattaagaaatcagggtttagcatcaacgtgggaaaaacacggatgcaatacaagacctcaaggcagcaggtgacggggttggtcgttaacaaaaaggtcaacgtcactactgaataccgcagattggtgagagcttatgtttttagcctgattaatcggaacggattcacagtcaaaaagagtcgtcgaacagagcttggcgacgagatagtgtctgtggacggcacaagagagcagttacacggcatgttgtcgttcgtgcactccgtggattccgtgttccgtaccaatgttaagcagcatccccagaactaccccggtatgcaggccgacgccaaaaagcctactggcacgttagacctttatcgccgctttctgttctttacaaggttcttcagtaacaccctgcctcttattgtttgcgaaggcaagacagacaacgtatatctgagtaacgcagtacatcaaagcaaggtggagttccccaggttgatcactaaaggcaataatggcccggacgtcctcgcttttcattttctaaaatacgcgaggaaacacaagagaaaaaagcacatatacctgccaaatttcagtacggtacagattttaggagccggatccggaggcgggcctaacctaggaggactgatcctgaactatcacgctgaatataccaagtttcgtgcacccaagggcaaattcccagtcattttcatcgtggataatgactctggcgggaaggcagtctttaataaggtgaaacatatcgccaaggtatccggacatgagccattcgtgcgcctgtttggcaatctgtacatcgtgcctgtgccgcttgtaggcgctgcagagaagtccatcgaggaactttttgccccagccgatctcgctaaagggatggacggcaggagcttcgacttcagcaaagattctagcgatgcgacatcaatcggtaaagctggatttgcctacgacttcgtggcaaagcaggccaaggacctcgactggagtggtttccaccccctcctccagaacatttgtgctgcgctgaatgattacgatgccctgtccgctaccctgtga

SEQ ID NO: 8299 - RNA, 1806 nt, synthetic construct
  source 1..1806: mol_type = other RNA
atgttccccaagtccatgttggagcgcttcaaggtcgccaagtctcgtgaaaccctcgctatgctattagatattaagcacaaggacctcacatatcttctgtacgtgaaaaaagacgtcgagaaatacagcgtgttcagcatggcaaagaagaacggcggctcaagggatatatgcgccccgatcccagagcttaaatctctccagcggaaactggcaactgcgctggagcgttgcattgcagatgtcgaaaccatcacgaagaagaataataaagcttcccatggctttcgccctggaaagagcatcctgaccaacgccgctgtgcacagaaaccgacgctatgtgtttaacgtggacctgcaggatttcttctcttccatcacgggcaaacgtatcaggggatttctgattaaggaccgcaactttgctttcgacgcatctgttgccactgccatcgcacatatcgcctgccgggaaggcaaactcccacagggtagtccttgttcgcctgtcatctcgaacatgatcgctggagtcttggacgttcacctggcgaaattagctcaaatgcatggctgtacgtatactcggtacgccgatgatctgactttttccaccaataaagaagactttccagttgaaatcgcctttagaaatgactcaacaggccacacttggcgagttggggccgaactcaaccgcttgatcttacagagtggattctccattaatgagacgaaaactagaatgcagtacagggacagtagacagcaggtgaccgggttggtggtgaacaaaaaagtcaacgtctctacagagtatcggtaccttgtaagagcttatgttgcttccctggttaaaaacggcactttcacagtaaaaaggcaggcggtcggcgtagatggaaagccccaaacccttgaggaggaaggggtgacagctaaattgcacggcatgctgggcttcattcatagcgtagactcagtgttccggacagatgtgaagaaacacccttacaattaccccggacaacaggcgaacgagaagaagccaaccgggaatctggccatctataggcgatttttgatctataccagattctacgcaaacacagtgcctctgattgtgtgtgagggcaagacagacggagtgtacatcagcaatgcagtccatcaaaccaagaatatctttcccagtctagtgcggaaagatggtgaaggaaaagatgtgcttagcttccagctgctcaagtacgccagaaagcataagaagcgaaagaccgttcacttacccaattatagcacaattaccattcttgggggtggtagtgggggcggtgcgaatctcgggaatctgatacgcgcatatcactctgagctgagtaagtttaaggcccctaggggaaagcagccggtcatttttatagttgataacgattccgggggaaagacagtgttcaaagtggtgaaagacaccctcaagatgactattatagggaccgagtcatttgtccacctgttcgctaacctgtacgtcgtacccgttccattgggagaggacaaggagaggtctattgaagggctgttcgctccaattgacctcgccaagggccttaatggtaaaccgttcgacttttccagcgatagctcctcaggtacttcagtggggaaagccgactttgcatacgaatttgtggctaagcatgccaacgagctagactgggccggcttccaccccctgctcgaaaatatagtaggagcaatggatgactatgccgagagggtgcgggccgcagatctgtga

SEQ ID NO: 8300 - RNA, 1746 nt, synthetic construct
  source 1..1746: mol_type = other RNA
atgctcctggacataaaacaccaggatctcacttacctgctctacgttaagaaggaccctgagcgctataatgtcttttccatcccgaaaagctcagggggtagcagggatatctgtgccccgacctcagaacttaaaagcctccaaagaaagctggccgctgccttggagcaatgcttagtagacatcgccgctctgacaaagcgcaccaataaagcctcccatggattcagacctggtaagagcattctcacaaacgccgcggctcacaggaataggcgctacgtctttaacctagacctgaaagatttcttcccatcgatttctggtcagagaattcggggattcctgattaatgaccgatattttgctttcgacgctaaggtagcaaccaccattgcacatatagcttgtcgtgatggcgtcctcccccaggggagtccatgctctccggtgataagcaacatgatcgctggaattctagatgcccacctgtcaaaactggcacagatgcacggctgtacgtatacccggtacgcagacgatcttaccttctccaccaataaagaggtgtttccagcagccatcgcatacagagacgacagcaaggaacattcttggcacgtcggagcagagctgcagaggttgatcctgcggtccggcttcagtatcaatgagaagaaaactcgcatgcagtaccgcgacagcagacagcaagtgactggcttggtggtgaacaaaaaagtgaacgtgagtacagagtatagatatcttgtccgagcctatgtggcctccttggtaaagaacgggaagtatacggtgaaacgccaggttcctgacgtacatggcaagctccagacttttgaggaagaaggcacacccgcaaagctccacggcatgctggggttcatccattctgtggattccgtctttaggacggacattaagcggcatccttataactatcctgggcagcaggctaatgaaaagaaacccaccggtaacttagccatctacagacgatttctgatctacactcggttttacgccaatacagttcctctgattgtttgcgaggggaagaccgatggggtctacattagtaacgccgtgcaccagagtaaaaacttgttcccatcgctggtaaaaaaaaatgtcgagaaagaggatgtgctgtcatttcaacttctaaaatatgctaggaagcacaagaagaagaagatggttcatttacccaactacagcaccattactatcctgggaggagggtccggtggaggagccaacctaggcaatttgatccgggcttaccatggggagctcgccaagttcaaatctcctggaggcaagcaaccagtcatttttatagttgataacgacagcggcggtaaaactgtgtttaaagtggttaaggacacacttaagctgactataacaggcgatgagagtttcgtgcacttgttcgccaatctgtacatcgtgcccgttccacttggcaacgcgaaggaaaggtccattgaagacttattttcacaggtggacatcgcaaaaggactgaatgggaagccctttgatttctcctctgaatcatctagcacaaccagtgtgggcaaggcagatttcgcttacgagttcgtcgccaaacaggcgaaggaactggattgggccggcttccaccccctccttgctaatatcgtgtctgcgatggacgattatgccgcgcgtctggctgccgctgcagcataa

SEQ ID NO: 8301 - RNA, 1746 nt, synthetic construct
  source 1..1746: mol_type = other RNA
atgctgctggatatcaagcatcaagacttaacctacctgttatacgtgaagaaggatgcggagaagtacaacgtgttttctatcccgaaaaagagcgggggctcgagggacattcacgcacctatccctgagctgaaatcactccaaagaaaactggccactgccctcgaagagtgcatcgctgatatcgagaagctcaccaatcgcaagaataatgcaagccacgggtttcgcccgggaaagagcattctgacaaatgcatctgctcatcgcaataagcgttatgttttcaatatcgatctgaaggacttttttccaagcattacaggtaagagaattagggggttccttattaatgatcggaatttcggcttcgatgcaagcgtggcaactaccatcgctcacatcgcctgtcgcgacggaagacttcctcagggctctccctgttccccagtcataagcaatatgatcgccggaattctggacgctcatctgtccaaactcgccaaagcccatgggtgcatatatacacggtatgcagatgatatcacattctcaacgaataaagaggaatttcctactgccattgcatactgtgacgacgctaatgaacattgttggcgggtggggtctgagctctatcggttggtactccgatgcggctttagtgtaaacgaaaaaaagacccggatgcagtatcgagacagcaggcaacaggtgacaggactgattgtcaacaaaaagattaacgtctccacggagtatagatacctggtgagggcctatgtggctgccctcgtcaagaatggaaagtacaccattaaacggcaggtggcagacgctactggtaaattggagacagtgactgaagatggaacccccgcccagttgcacggcatgttggggttcatacactcagtcgattccgtcttccgtacggacgttaagaaacatccttacaattaccccggacaacaggtgtccgacaaaaagcccaccggcaatcttgccatatacaggcgcttcttaatctacacacgattctatgctaacaccctgccattgatagtttgcgagggcaagaccgatggcgtatacatcagtaacgccgtccaccagtccaagactattttcccctctctggttaaaaaagacggggaggggaaggacgtgctgtcctttcagttgctcaagtatgcccgcaagcacaaaaaaaagaagatggtacaccttccgaactattctacaattactatccttggcggcggaagcggcggtggagcaaacctaggtaacctgataagagcataccacggagaactgacaaggtttaaagctccccgaggcgaacagccagtgattttcatagttgacaacgactcaggcggtagaaccgtgtttcgtgtggtcaaagaggttgctaagatcaacatcacgggggaggaaaggttcatccatctcttttccaacctatatatcgtgcccatcccactggggagtgccaaggagcggtcgattgagtccctattttcagatgcggatatcgcgaaaggtctgaacggaaagccatttgacttctcagcggacagttctagtgccaccagcgctggtaaggccgactttgcctacgaattcgtggctaaacacgctaaagatatcgattggactggcttccatcctcttctggaaaacattgtcggggcaatgaacgattacagtgccagagtggccgcagcggccctatga

SEQ ID NO: 8302 - RNA, 1920 nt, synthetic construct
  source 1..1920: mol_type = other RNA
atggctttcggcaacaatgtcagaacctatgcggcctccgggattattagacgtacaccctgtgtcgctcgcggccaattcgccatggagtgcctgaggggcccacattctatgctgctgcctaagaacaagctgcagtggtttcaagccgccaaaagccgcgccgagcttgccatattgttggacattaagcacaaagatctgacatacttactctacgtgaaaaaagaccctgagaagtacaagatcttctcgattcctaagaaatcagggggcagtcgcgatatccacgcacccatacctgaattaaagtccctgcagcgaaaacttgccactgcgctagaggagtgcatcgccgatgtggaggagctcactaacgaaaaaaataaagcaagccacggattttgccccggaaagagtattctaacaaacgccagtgtgcataggaataaacgatatgtgttcaatatcgacctggaagactttttcccctctatcaccggacagcgggtgagagggttctttattaaagacaagaacttcgcgttcgatccaagcgtggcaactgccatcgcccacattgcatgcagggatggtaaattgccccaggggagcccttgttctccggtgatctcaaacctgatcgctggcatcttggacgtccatctttccaagcttgctaaggttcacgggtgcatatataccagatacgccgacgacatcacattttccaccaataaagagaacttcccagctaccatcgcttaccgagacgaggctaacgagcactgttggaaggttggggaggaactgcgtagactgattctgaagtgtaggtttagcatcaacgaaaaaaaaaccagaatgcagtaccgctcaagtaggcagcaggtcactgggctggtggtgaataaacgagttaatgttacgagcgaatatcggtatttggtacgggcttatgtagccgctctcgtgaagaacgggaaatacactatcaagaggcagatagtagatgccacagggaagcaggagacaattagcacggatggtacccccgcccagctccatggtatgcttggcttcattcattcagttgattcagtattccgcaccgatgtaaggaaacacccgtataattatcctggacaacaggctaacgacaagaagcccactgggaacctggcaatctaccggcgcttcctgatctacaccagattttacgccaacgcactccccctcatcgtgtgtgagggcaagaccgatggcgtgtacattagcaatgcagtccaccaaacaaaatcgatttttccaagtctggtgaagaaagataaggatggcaaggacgtcttatctttccagctgcttaagtacgcacggaagcacaaaaagaaagacgccgtctatctcccaaactactctacgatcactattctgggtggcgggtccggtggcggagctaatttgggcaacctgatacgggcgtaccatggagaactgggaaaatttaaggctccacgtggtaagcagcccgtcatattcatcgtggataacgacagcggcgggaaaaaagtgttcagcgtcatcaaggaagttctgaagaaaaatctcaccggagaagagccttttgtgcggctgttctcaaatttgtatattgtgccgataccattaggtggaaataaggaaaggtccatcgaacagctcttttccgatgtggatattgcaaagggcctaaatggaaaatcttttgacttttctgcggactcttccagtacaacttccgtgggcaaggtcgacttcgcatacgagtttgtggcaaagcaagccaagaatattgactggaagggatttcatcctctccttcagaacatagttgccgcaatcgacgattatgctgctcacgttgtcgccgagggcctatga

SEQ ID NO: 8303 - RNA, 1839 nt, synthetic construct
  source 1..1839: mol_type = other RNA
atggatactgcttatctgtatgtcaccattggaagtagaaagtcagtatgtggtgccacatttacggatggccatcatttccctaccgtagtcttaagttcattgtccagactgaaggctgccacctctagggcacatttggcaagcatcctgggtatcaagctccaggatctgacttacctgctctataagaagcccatctacaaaaagtacacttccttcgaaatccctaaaagaagcggcggcaagcgtaaaatcagcgcacctatagacagcctgaagtcgttgcagcggaaggtggcggaagtcctgcaggagtgcatttccgagatagaaacctctacaaagaaaatcaatcgcgctgcccatggatttagacttgataagtccattctgacaaacgccgctatgcaccggaataagcggtacgtttttaacattgacctggaggactttttcccatccattacatttcccaggatccgggggtttctgaccagcgataagaacttcaatctggccccagttgtggccaccactattgcgcaaatcgcgtgtttagagtctaaactcccacaagggtcaccatgcagccccgtgatatcaaacctcattgccgggatccttgacgtacacctgagccgcctagctaaggtgaatggatgtacatataccagatatgccgacgacatcacattctccacgaacaaaaaagactttcccatcgcaatagcaatcgagagtcagggtaatgctaatgtctgggtactgggccgtcagcttgccggtctgatcaagaagagcggcttctccgtcaacgtctctaagacccggatgcagtatcgaacgtcacggcaacaagtgacagggctagtggtgaacaaaaaaatctcggccccgaatgagtaccgacaccaggtgagggcatacgtcaactcgctggtaagaaggggtttttacatggtggataacggggaaaaagtggaagaaggggggattcagaaacttcatggaatgcttgggtttatccacgcagtggagagcgtgtacagaaccgacctccagcggcaaccatataattaccctggcgtggttatagacgagaggaggcccactggcaatttgagcatttatcgaaggttcttgttatatactcgcttctatgctaatcaccagcctttgcttatctgcgagggaaagactgacaacgtttatattggcaacgctattcaccagcgtaaatccgaatttcctctcctcatcaaaaagaatgacgatggaaaagatgtcatcagtttccagttcttcaagtacgccaggaaacatcgccgaaaaagtgatatctacctgccaaactatagcaccgctatgatcttaggcaacggtagcggagggggacccaatcttgccgggctaatgtccgcctaccgctcagagctcaaaaagttcaccagtccaggcgggaagtgcccggtgattttcattgttgattccgattctggcggaaagcctgtgtttaaggtgattgaaggcatcactaagaagaaaccttcaggtacagagctcttcatccacgtgtttgaaaacgtgtacgttattcccatttcaaaggatggcaaaagcaatgtctccatagaacacctgtttagtgagaacgataaaagcatattgatggacggcaagcccttcgacttttctggcgaatcttccgactctattctcggaaaagcgtctttcgcttacgactttgttgccaagtacccggagaagatcgactggtctggattctcacgcctgctgaaatctataagtgatattctggagctgcacaaagcatga

SEQ ID NO: 8304 - RNA, 1779 nt, synthetic construct
  source 1..1779: mol_type = other RNA
atgtcctcctggggcagcacatacaaaatgcgcaagattgaagccttaaagtccgttaagtccataaacggactggcggacctcctgggctttaaggcttcggccttaggctacattttgtttaaactgcctgatgcacagaaatacaactcattcacgatccccaaacgttctgggggtcgacgctcgatcagtgcccctgtccccagattgatgcttcttcagaagaaaatatccaccctgctgaacgattgcctggcagagattgagggaaagcttagcagtccggctcatggctttaagctcgggagatcaatctttacaaacgcggctcaccacagaggcagacgctatgtccttaaccttgacctgaaagatttcttcccaagtatccattttggaaggatcgccggttacttcgagaagtccagggactttggtctggacccaaaaatagccaggattctagccaacgtattgtgtcataagtcatctcttccccagggaagtcccagctcaccggttgtttctaatctgttggcccggatgctcgatatccacctggccaaacttgcaaaacgcaatcgtctgacctataccagatatgcagatgatctgacattctcaactaacctgaatgtttttcctgaggcggtcgccaaaagggtcagcgagcatgtgtggcagctgggtcccgagctcatctctaccatcgggagttgcggatttagcattaacgatctgaagactcggatgctgtaccggagcagtcgacaagaggtgaccggcctcgtggtgaacgataaggttagcgtgccggtggagtatcggagatgggccagagctgctgttgcccgtctcgtgaagaccggagcatatttcaagcccactcctaaaggctttatcgggcctcaacctgctacacccgatgccgggtccctagaccacctcgaaggctgtttaagccacatctataatgctcaccggtttcagcggtcacaggctgctctgggaagagcactgcaccacgcgccagacgagctaaattccgacgaacacgtctacaggaggttcttattttacaccaagttctatgtgccagaaaaaccagtgatcgtgtgtgaaggggagacagatagtatatacattgccgctgctatttccgcaatggggggttactatccagatctcatagacgctaagctgaaacctggcgagcagaaccggttcaacgtccgcttcttcaagcattcttctattgccggcaggttgctggagctgaatggcggcacggatgccctgaagaacttctgcaggatttacgtggaccagaccaaaaagttcaaaggcggtttattgtctcagccaacaattgtgattgtagacaacgataaggctggccgagacgtggtcaattatgcaaagggaatcgccaagaatcaggggctcccagcaatcaaaggactgaattacgtattcacccgccccaatttgtacgtggtcagcattcagtctcctgccaacgcacctgactgcgtcatcgaagacctctttcccgcacatctactcaatactaaactcggggggaaggtgttgactctctccaatcaaaaggtaggtgacaatgaatacggaaagatgtatttcgccaaacatgtagttccacacgccgatcccaaagacttctctgggtttagccaacttctggacactctggtggaagtgatcgcggacttttcaagccgagtgcaagtccagccggccacaaagaaggcgtga

SEQ ID NO: 8305 - RNA, 1722 nt, synthetic construct
  source 1..1722: mol_type = other RNA
atgaaacttggcaagcttcaggcagccacctcaactatcgatctggcgaacctcctgggatatcaaccgtcggcgttccactacttgatctataaactctctgaggccgccaagtactctgtctttcagattcccaaacggaatggcggaacgcgagaaatcagagccccagagccaaaactgaaactgctgcagcagcatctagcagaatatctgtctgaatgtctgaaggagattgaatcaagctccgactatgccagccctgcacacggcttcaagcctgggcgctccatttttactaatgcagaaatacacagacagaggcgctttgtcttgaatatcgatctcaaggacttctttactacaatccactttggacgggttaagggctacttcgagaaaagtcgggagtttaggcttaactccaccattgcactcgcgattgctaagatagcttgttatgacaggtgcctgccacaaggagcccctacaagtccagtgatctccaacctgatcggacgcgtactggacgggcatatgtgcaaactcgcaaaaaagcataaggtgacttatagcagatacgcagatgacctgactttctcgaccaatctaaaggagttcccgagcgcacttgccattcagaatgaggagcacaagtggcaccatggcaaagagctcggtgaggtggtgaagcacgccggctttgagatcaacgagaagaagacacgtgtgcagtaccgcgcaagccgccaggaggtgacaggtctgatcgttaatgaccgagtgtctatcagggctgaatacagagcttgggcgagagtggctgtgcacaggttggtgcataaggatgggtttttcgaaccaatcgctaaaaccttcgtcgggcctctcccaaatgagaaggctcctgggtcattgcggaagctcgaagggattctgtctttcatctacagtgcccaggtttttcgcagagagatgataattgagaagggcgggcagaacaaagagaagaaagccgaactgcattccgatgaacgactgtatcaaaaattcctctactacaccaagttctatcggaatgaaaagcccctgatcgtctgcgagggcaagaccgacaacgtgtatatacgagccgctatagtggcaatgggtgaaaagttccctacattaaaacaggaaaaaggcgagaaggacagccttcttgtacgtttttaccctcaccccaagtatggaaacaggctgctcgaaatgggcggaggaactgctgggttacggaatttttctcacacctacgtagataagagtagaaaattctcccaaattgcccccaggaatcccgttattatcgtcctggacgccgacgatgctggcaaatcagtatacagctttgcccagaagaatcacgccaaaaaggatgattttcagggtattgtctttttgcatccgaacctgtacttcatttgtatccctgagccaaaaaactccacacataaagcaattgaagggcttttcccctcagtcttgacggatcaaaagttaggcgacaaaagtttcaactggaagaacacgccactgaaggagaaagaatatggtaaagcctactttgctaaaaacatagtgcctttggccacccccgaaatgttcgttgaatttacacccttactagagggaatcgcggctgccatcgagcacttccgtaaactgcccgaggccaagagctga

SEQ ID NO: 8306 - RNA, 1806 nt, synthetic construct
  source 1..1806: mol_type = other RNA
atgggaccactcgattaccaagccgtgctttacatgtcgcagctaatcgctctgcgtaacgcagacacaagacgcgagatggctgccctcctgggctacgaatctagcaagctcacctatgccctgcacggcttgaaagaggagagtcgttacactcagttcgccattcctaagaaaaacggtgggcaccgcaccatctctgcgcctgatgacgctacaaaggcattacagaggaagctggctgccctgctggccaattgcgtgagagagatccgctccgttgaaagccctaggctgccaggccagagaagaggagtactgagccacggattcgaacccggcctaagcatcatcacaaatgctcgggtgcatcgaaaacggcggtgggtctttaatatcgatctggccgatttctttgattctatccatttcggacgggttagaggatattttgaaaacaacaggaactttcagctcaagcctatagccgcgcttgtcatcgctcagattgcttgcttcaagagcaagctgcctcaggggagtccgagctcaccggtcatcgccaacctggttgcctccattctagacatacatctgtcccggcttgcaacccaggtagggtgtagctatacaaggtatgctgacgacctgaccttctctaccaaccaggaggaatttccttcagccattgcacaccaagtggatcgcgactctaacagatgggaggcctctaaagagctcgtagatgtgatctcccgatcggggtttaaactgaattcccggaagacacgcatgcagtacaggcactcacgccaggaagtcactgggctggtggtaaacagggtcgtaaatgtccctagtgagtatcggagagaggtgagagcgcgtgtccatcggctcataactaagggcgagttttacattagtggtatcggcgaagcaggccaaagcacccaggtcgctgggactcccgcacaactgaggggcatgcttgccttcattgacagggtggacttattcaatctcaatttggcccgggagtcaaagggcgaaccacccatcactcccgcatcagacttggtggatttgacgcggaatgaagaaacgtataggaagttcctgtatttcacagagttctatgcaacaccacttccactcgtgatatgcgaaggatccaccgattacgtttacttagtgcatgcaattcgcgctttggtggatgactttcccgagctggcttacaggaccggggacgaagagattaaatttaagatccgtttctaccggtacccacgcaacagcacgcgccgtttgacaaggatccgaggtggcaccgctgatctcaagaaatttgtggccacttatggcgcggaggtgcagagattcaaagctgggggtcagcaacaccccgtgatagtggacaatgatgccgcaggcagagaggtctacggacccgcaaaaaaactaggagtcgtttttaacaagagtcggccccttacccgagtgagtgccaatctgtatctcactgccacccctttactgggtgccgacgagtcttgtattgagtcactgttcaagacggaagatacagccagattagttgatgggaagtcctttgacccggacgacaaagccgaccgatccctgacatactctaaggcggtgttcgcccaccagattgtggcaaaacacgctgcacacatcaactttgatcgcttcaggcccttgctcgctagcctttcagacgctgttactatgcatagagagtcccgaaccgaagaggttgccccagcggccattacttga

SEQ ID NO: 8307 - RNA, 1815 nt, synthetic construct
  source 1..1815: mol_type = other RNA
atgatggttaactatctgaaagaacttcagcaagctaaatcattacaagacctcgctaaactcttgggtactaatgagtccaacctaaacatcctgctctacaaaattagtaggaagtcactgtatagaaccttcgagatccctaagaaaggaggcggcttcaggatcatctcttccccagacgaaagcctgaaagtcgttcagaagcgcctggccagcatactgtcttccatattggagccgaactatcagttgaaacacaagaagaaacttcaaaatcccaagaaagagcgggccacccgggcttactctaacaagagcgtgagtcatgcatttaagcagaacctaagtatagcgaccaatgccgaacagcatctgaagaaaaagtacgtgctgaacttggatctcgaggatttttttggcagcatcaatttcggcagagtgcggggcttcttcattaaggacaagcagttcaagctggaccccgtggtggccacacacattgctaatatcatttgccatatggacaaattgccccagggatcaccctgttccccggtgatgtctaatttgattggacgcctgttagataggcacttactccgattagcaaaccggcgtggttgtttctacactcgatacgccgatgatctcacttttagctttaatggcccaaaatttccaaccgaaattgctatcctcgaacaggaccagtgggtcatcggggacgccctgaccgaggtgattgaaaaatcgggctttaagattaagaagtctaaggtcaggatgcattataggacttctagacagatggtgacagggttggtcgtgaattgccacgtaaacgtgccagccgaatactaccgcgacacaagaagtatgtgtctcaacatctttacgactggatcctgttacctgaaaacaaatcggaataagaaccttagtatgcagcaactggaggggcgactcaattacatctaccagatcaagaaattcaagaacatctatgctgaccaggggggatatcgccactccagacacaatggaaagtacaaatcggactcaaatctggaccggtccacccaatatgccgacaactcccatcaggttagcctggatggtataaaaaacatctacggccgttttcttttttacaagaattttttcgccccacaaatgcctctgatttattgtgaagggaagactgaccccgtgtacttaaaatgcgcacttctcgcgctggaaactaagtattcaggcatggtcagcagtggcaagcttaatgtcaggttttttgccggcaataatctcgacggggagatgatgaagcttgtcgatggtacaggtgggatgaagtacctgattagctcttacaatcgcatgaaaaaggagtgcaaattcaacggcgtgcccctgcaccctgtaattattgtagtggataacgattccgccggactggaggtgaagaaggcagctaaaaaaaaacgttccatgacgaacggggtctttcacattttccacaacctctatatcctagagatacctaaaaaccctaccgacgcggtggaaaccgttatcgaggattatttcacagataaaaccctgaacatgaagttcaaaggaaaaacattcaagtcaggggatctggacgagaaggatgcagtaaaccatttcggaaaagcagttctgtctatgcttgtgaagaagagatgcaaaaagatcgatttttcaaagttcagcgaaatattcgacaaggttgatgagattatcaaagactatcagacgatcctaagcacaaagaccagccaggagtga

SEQ ID NO: 8308 - RNA, 1686 nt, synthetic construct
  source 1..1686: mol_type = other RNA
atgagttatctcgagcgactcaaaagttgctcaaatctgaaagagttcgcagagtatctggggtacaaacctagtaacctttcttatctgctgtacgtgttgaacgatgacttgaaatatcgaaccttcgaaatctccaagaaaagcaaagaggcccgggtgattaaagcaccagaaaagtctcttaaagggctccagcgtagactggccagccgcttggagaattgtcagaaggaaatcgagagcaacctgggcattgtgaaccccgtaagccatggtttcagaaaagggcacagcattgcgacaaatgccaacatccacaaaaggaaacgctacgtgtttaatctagacattaaggacttcttcggcacattggattttggcagggttcggggattcttcataaagaactataactacgagctggctcccgaggtggcaacgataatcgcacagatctcatgctttgataactctctccctcaaggaagtccatgtagccctataattagcaaccttattggcaatatccttgatgtgaaactccttaagctggctaaaaagaatggatgtcactacagcagatacgctgacgatctcacatttagcactaatcagaaagtttttcccgctgacattgccatccaagaccctattaagggcgactgggattgcggcgcggagatctacaagatcatgaagttggtgaggttccagattaatgactccaagacacggatgctgtatcgcaatagtcggcagttagttactggcctggtggtcaacagaaaggtaaatattgcagcagactattggcgcgatactagagctatgctgtggaacctcttcaatactggatcgttttttatcaaagacaactcagaagaggtggccgaagggaccctgagccagctcaacggccgcttagatttcatctaccagattgacgcctataataccaacaagagtaaaggagagaatgttaaaaccgctaagaaagaagcctacaagaagtttctgttcttcaagtccttctatgtcaacgaaatgccaactatagtatgtgagggtaaaacagatcccatttacctaaaatgcgctctcgaatctctcgccgattcacacagggaacttatcgataaggacggaaagctgaatatcgggctgttcaattactccaaggtggccgcggacgtcctggagttatctggcggtaacgccccgatatctaagttcctggaccaataccagaagatgttttcattgtttagggtcaactcctcccaaaatccaacgattataatcctagacaatgacggcgcgggactgcgaacccttaatcatgccaaaagaggggccacctctgaggttaaaatggacggtttcgatgagcccatacagtgcttgccggaaaacatttatgtctttaggattccacggatcattgacaaagacctggaaattgaagattactttaaggaggaggcttttcagatcaagctgaacgagaagtcctttaaacgtaagggtgtcatcgataagaagaaggagttcgggaagtttttattcgctgaaaagatcgtgaagaacaacaagaagaacatagatttctctcagttttcactgatctttaatgtgatccagcaaatcatctcccattcgaaagcatccgcccctaccgattga

SEQ ID NO: 8309 - RNA, 1734 nt, synthetic construct
  source 1..1734: mol_type = other RNA
atgaacgatttttcaaagttgaaggcccttcagaagacgactacattatcagagcttgcccatctgctccgagtccagccaaagacactgtcttacaacatatacatcatcgacaagaacaaaacaacgactaagaagtattccgaattctctatccctaagaaaagtggaggaactaggatcattctggcccccaatcaaaatctgaaattcatccagtcccagttgtcaaagattctgtattcatgtatcgacgagattaacaaagagaaaggtgttacaggtagtctatcttttgggtaccgtaaaaagtcgtccattttcgacaacgctaaggtccacaagaagaagaaattcgttttcaacattgacctgaagaactatttcgacagcataaactttgggagggtaaggggcttcttcatcaagaaccggaatttttgcctggacgagaatgtagctaccgtgattgcacagatcgcttgtcataataacattctcccacaggggagtccagtcagtcctgtgatttctaatctgattggccacattttggatattcgattgagcaagatagcaagcagctgcgggtgttcctactcaagatactgtgatgacattaccttctccaccaatgaaaaagtgttcccgaaaaaactggcctattctaatacagacaagacctggcatccgtccaaactgcttatctccattgtcagccagtctggctttgagattaatatgcagaaagtgcgcatgagcctgttttacagccagcaacgggtcactggcttaactgtgaataagaaggttaatacgactcgcgcttacagagatctggtgcgagccctggtgcactccctctgcactaaaggagactttgagtttcgcggtgacttttacaaagataagatctccgaaaccaataaacttaacagtctacaaggcatgctcaactatatctcaaggatcgagtaccaagaacttagaggcaatagggagaacaaacggttctatccaaacataaacaaactcaccaagagtgaaataacccttcgtgattatgtgctctttcgctactttttcaatcctgagaaagtcacaatctttggggaaggaaagaccgataaaagtcacctgaagcattatctgaacttcaggtcgaacattgatacaagcaagaatccaatgcccgagagcttttctgactggaagaatatgaattttcacgatttcgagtcaagaattttcgacgtcatcagcaaaagcggaggcacaggcgacatcaaaaagctggtaaccgagtacaagaaatactgcaacaagttctgcatccccgaggttcagaatcccgtgataatactggttgatgatgacgacggatccgcggatctcttgatgaaactggagaaggtgaagaaagataagctcattaaagtggtgagaaaggacttctatcacatcgacaataacctgtacttaatctttctacctcggatcaactcaaccgataccgatatcgaatctttctatagcaaggaagttatagacatcccccgcaatgggttgtactttgagaaatccaacctctctaataacaagcggaactattctaagaaagtattcgcaactgagattatacctagaaaccaggaattagtggattggagcaaattcgaccagatcttcgaaaaagtgcaactcgccatcgaacattttcagagtaagaagtga

SEQ ID NO: 8310 - RNA, 1752 nt, synthetic construct
  source 1..1752: mol_type = other RNA
atgagcgcccttaagaaactcaaaagtgcatgcgatataaatgacctcgccaagctgctgaattttaaatcctctaacatcgcatacatcatttaccggttgaaggaagaggagaaatattcatcctttgagatcaagaagtcctccggcgggctgagaacaattgatgcaccagagcccaaactaaagaatcttcagagcaatctggcatatctcctacaggagtgcctgactgaaatcgagaagacctcccaaattaaatcaaccgcctcacaagcttttcagcccaagaaatccattatcaccaacgcctccctacatcggaagaaaaggttcctgttcaatttagatatcgagaactacttcggcagcattaattttggtcgagttcgcgggttcttcatcaaaaataagaatttcgagctcgatcccaagattgccaccctgattgcacagatcgcttgttatcgcaaccgtttaccccagggaagccctgccagcccaataattagcaacctcatttctcacatccttgatatgaggctcatcgaactttctgcaaagaataaatgcttctacacaaggtatgctgacgatataacatttagtacgaatcttacggagttcccacctgaaatcgcctatgagagcgaagataagatctggagcccttcacagaagctcactaagctgatcctgaaaaacgggttcaacataaactatcagaaagtgcggatgcaactccattttagcagacaggaagtgactggactaactactaacagaatcattaacacaccgattgagtatcgaaaaaatgctcgggccatggtgcgcagtttgatcatgaaaggctcttttcacatgcctaaagaagagcaggaagcctccgtggaacaacttcacggaattctgtctttcatagaccacgtgaagttggtcacaaagcacgggcattcaaacgacccccattcgttacctgccgccaaagaggagaaaaaatcatctttcgagaaagactttgcggattttctgttttataagtactgttacgcgccgaccaagccactcattatttgtgaaggtaagaccgacaacatctacctgaaatgcgctattaagtcattggattccaagtaccccaaactgatacaccctaataacaaacaggacttcaagattgacttcttcaaatactctagaagtcaggggggcgactcgcagaagggacgtctgttagaattgagagggggcgagggtaatttgaagaatttcatctctgcctatgataagaagtgtaccaagatccgagctcccgggaagcttcacccagtcattgtactgatagacaacgataagggcggcaagcagattctgagcctgatcaagaatctgaaaagagagactagtacggtcacaggaaatgaggactactactttatcaacaacaacctgtacgttatcccaataccggatattatgggaaacaaaaatacaaccatcgaggactttttttacaagaagaccctgaaccggaagattaacggtagggtttttaaccgcaagaatgaccacagtggcaaaaatttctacggcaaatacgaatttgctcaaaaaatcgtacagaaggacttgaagaacatcaacttcaagaaattcatcaagatcctcgataggtttgaactggtgatatccgactataaaaggtatctcaagagtaaagcgctgcagaatagccgcgctaatcattga

SEQ ID NO: 8311 - RNA, 1722 nt, synthetic construct
  source 1..1722: mol_type = other RNA
atgaccactatggtgtcccggttacaggcttgcattgggaggtctgatctctccagtctgctggggttcaagcccaaggcattcgcgtacgtcctttttcatgtggctgacgctgaaaagtatacagacttcgaaattcccaaaaagaacggaggggtgcgtgtaatatcagctcccatccctcaactgaaactgctgcagtcacgactcagcgagtgtctgcagacctgcctcgctgaaatcgaaaaagccgatggcgtgaaggagtcctgcgccatctctcatggctttcggaagggcaggtctatttacagtaatgcggaagtgcacaagggccgcaggtgggtgttcaatatcgacctggaggactttttcccttcaattaacttcggcagggtgagagggtacttcattaaaaacaagaactttgccctctcacccgacgttgcaactgtgatcgcccagatcgcttgccataaaaatgctttaccacagggaagtccgtgctcccctgtcattagtaaccttctggcccacatgttggatatgaggatcagtcgaatagctaagaaagcccggtgttcctacacaagatatgcagatgacctcactttcagctgtagcaaaaaactctttcctgatgggattgcccaattatcccaggcggaccagggcgtgtggattccatctgataaacttcgccatacgatcttctcttccggtttcaagatcaacaaaagtaagactcgtatgcaggtttactggagcaggcaagatgccacgggcctggtcgtcaacgccaaagtcaacgttccacgcgaatacgtgaaaacagcaagagcccagtgtcatcaactgataacgaagggaagcgtgttcaataaggaggagttgtgggggcaggacgtcaaagtgccctatgatcctgctaaactacaaggcaagctgtctcacatattcaatatcaaagggcaggatctgaatttcgagagacagaagggttcactgaaaacatggccaaatttttaccgggactatcgcagcttcctcgactatcagtcgttcggatccagcccaaagcctgtgtttctgttcgagggaaaaaccgacaacatttatatccgttgtgctttgaattctctggccgctgactatccggaactgatctctgatggggctccaaagcagttaatggtgcgcctctttaactacagccggccaaccaatgccgtacagcagcttgcaggaggcaccggtgacctgcaactcttgattaacaattacgagcttagactgagaggattttcggcagcgacactggcctttcctgttatcctcgtggtagacaatgataaaggatccaccgacctattcaaggcagcaggaagtaagtcagacaccaaagcgaaagtcgatggttcccagcccttttatcacataaccaagaatctttacctcgtccctacaccaacccccaaggggatggttgagagctatattgaaacatttctgcccaacagcgttttgaagaagaagctaggcaaaaagacttttcacctgccggagaagggctttgacgtgactaaacactttggcaaggtactattggccgagcagatcgtgcagcggcaacaaaaggccatctcatttgtcggtttcaagcctcttttggataacatgcgagccgcaatgcaggattacgccgccaagatggcaccctga

SEQ ID NO: 8312 - RNA, 1776 nt, synthetic construct
  source 1..1776: mol_type = other RNA
atgacattgacggtaatcctccgcattgagagcgcctgcaaacttaccatgtccattgaacgcatgaaccagctgaagaactctcaggggaaatttggattcgcaaacgccctgggtatttctctcaaacagctcaccagggcagtgtacggtattccagtccaaaataggtacagcacttttctgatccccaaatccaccggtggccacagggtgatacatgtgccccaccgagagattaagtttgtccagaaggctctggctaaccttcttcagatctgtctctccgaaatcgagacaaagaagggagtggtgaggccagtgagccatggatttcaccccgggcgatctatttttagcaatgcgtgggcgcacaggaataagaactatgtcatgaacttcgatttggagaatttttttcactccattcactttggtagaatatgttccttcttcgagaaaaacaacgactttctcctgcacccgaaagtggccaatctgattgcaaacctgtcctgtcaccggatagatggaggcggtacattcctgccacagggaagtccttgctctccaatcatcagtaactttatagctatgcctctagaccagaaattaaggaaattagcccgagataacggatgtcggtactcacggtacgccgatgatatcaccttttccactaataaggacctattccccgacgatattgccattttcgacgtgtcatctaagaagtggatcgccggcagcggaatcctgaaagtcatttccaagagtgggtttaagctgaatattcagaagactaacatgtcaatcgctggcacccgccagatagtgactggcctggtcgttaataagcaggtaagcgttagtcgaccagtttacaagtgggctagagcggcggccgatcatatgttcaaggacggcgttgccttcaagagagatcctagcacagcttcaatccatacgacggatcgccaagttaccctcgggcacatcattggccaggtgaatcatatttgctacgcacgtagaaagtcgaatatcccattactgaattctagaaagatggtggggcccgaattgctctatcgccggttgacctattatgagcggttctttgctcataaggaaacccttatcatctgcgagggcgagacagataacacctacctcaaaatcgccatcgacaagctcgggcataagtttaagaacgtagcccgcagggcagacggaaacccccaggtaaaactgttgaatgtgaccccgcacatcacaatctatacagcactcaatggcggctccgaccaacaaaaaagcttccttcaaaactacgacaatgatatgtcaatcgtgggcgaacgttgggctgacaaatgcgtgataattttcggcgacaacgattctggggccaactcaattatgcagatattgagaggaaagagcatcattcctggggacataaaaactgcagacttcacttattacactcgtaatctttatgtcatcctgacacctattcccaacaaaaatagcatctctatgattgaagacttcctagaccctaacgccagtcgggttaagctggaaaataaagtgttccatctgggcgggaaaggtttcgatgaaaaaaaacactatgggaagaaagctctgagtgagcacgtccggcagaatgccagtaagtacgacttttccaagttcgagattatcctgaaaaggatagacctagccatcgatgattactcgtcaagactggctgcattaaagctgtga

SEQ ID NO: 8313 - RNA, 1728 nt, synthetic construct
  source 1..1728: mol_type = other RNA
atgtccaatggccagctggatcgattaaagaatgcccaaggaaagcttggtctagcaatggctctgggggtccccctgcgtcaactcacaagggctgtgtatggcataccaatccccaacaggtatactgtttttgagattcgaaaatcttccggcgggtcgaggatcattcacgtacctcacagagaaataaaattcgtacagaagagcctcgcccagttactgcagagctgtctgtctgaaattgaaacccgcaatggcgttaagcacccagtgtctcatgggtttcaccccaaacggagtattttcagcaatgcttggccgcaccgaaacaagaactacgtgatgaatctggatcttgaggactttttccattctatccattttgggagagtgtacggatattttgaaaaaaacaacgacttcctcctgaatcctaaggtggcaaatttaatagccaacatctcctgccacagaaatgacgtgggtggaacctttctgccgcaagggagcccctgttcgccagtcataagcaacctgatagcaaggccccttgattcaaagctgagaatcttcgctaaagagaataagtgccggtatactcggtacgctgacgacataactttttccacgaacctcgataactttccagaaagtatcgctctgctggattcagtcaagaaatactgggtggtgggtagtggtactacgaagattatcactaaatctggcttccggttgaatctgggaaagacgagaatgagtgttgccgggacacgccagatggtcaccggactagtggtcaaccggcaggtgtccgttaataagaccacttacaaatgggccagagcagcatccgatcgccttttcaaagagggcgttgcctttaaacgggacccttcaaccgcctctattcataccacagatcgtcaggtcaccattgcccagttgatcggtcaggtgaatcacatttgtcatgcgcgccgcaagagcaacattccattactgcattcaagggatatggtcggacctgagctgttgtaccgaaggctgacctactacgaccgcttcttctccaataaaaacacactcatcatttgcgagggagaaactgacaacatatacctgaagatcgcgcttaaaaaattcggcgcgaacttcaaaaatctctataatcacgtggacgacaaggccaccgttcagctgttgaatatcaccacacacgtaacctcatatacagccctcaacggcggctcagaccagcagaaaagcttccttcagaactttgacaatgacatgaggattgtgaaggacaggtgggccgataagcctgtgatcctattgggggataacgatagtggcgccaatgcaattatgcaaatcttgcgtgggaagagcattatcgctggggacatcaagacagcccaattcacacactatatcaaaaacctctatgtgatcttcacacccgtaacttcaaagacggataacagtatgatcgaggactttctggatcctaaggcttccaaggctattcttggaggtaagagctttcacttgggagggaagggctttgatgagaaaaaacattacggcaaaaaggcactcgccgaacatgtgaaggagaacgctgataagtacgacttctccagcttcaactctatcctaaaaagactggacctggcagtcggcgattatgcggagagactcgctcggtctatggcctga

SEQ ID NO: 8314 - RNA, 1761 nt, synthetic construct
  source 1..1761: mol_type = other RNA
atgtcctctcttccaagcgaaagtaccctggagagacttaaggcctgcaaggggaagcttggccttgcgatgctgctcggcgtacagttgaagcatctgacccacgccctatacggcattccgatgcctgtgcgctatgctgtgtttactattccaaaatccagcggaggggtaagaattatccatgctcctaacgacagactcaagtttgtgcaaagtgccctggctgctgtcctgcaggagtgtctgatagaaatcgaaactaagtcaggggtccagcggcctgtatctcacgccttccaccccaaacgtagcatcttcagtaatgcttgggttcacagacgcaagcggtttgtcgttaactttgacctgcaggatttttttcctagcctacacttcggtcgcgtgtgcaaattcttcgaaaagagctccgacttccagctccatcccaaagtggccaacctgatcgctaatctggcaacccacccagatggagctgggggcaccttcctgccacaaggatcaccctgttcacctgtgattagtaacctcttaaccaggccactggatcttagactgcgaaagctcgcacagcgctgcgactgtaggtattcacggtatgccgacgatctcacattctcgtcaaacactactgcatttcccgaagccatagctaagctagacaacgagtgttggattgctggggacgaattcgagaagatcgtagtccaatctggcttcttcctgaatcacgctaagacacgcatggctctgaaaggtaccagacaggtcgtcactgggttggtggtcaacaaacaagtttctgtgaaccgagatacgtacaagtggctgcgtgctgcatgtgattctatgttcaagaagggaatcgcgtcacggcatgatccacggacggtgaaggtttacaccatggccaggaaattggaactgaagcagttaattggacatgcagagcacgtgtttcatgcaaggcggaagtccggtattgagctgcccgccatgtccctgatgaaaggacccgagctcctcttgaaacgtctgatttattacgagcgcttctttgcgcatgataggcccatcgttatttgcgagggcgacaccgactatgtttacctgaggatagccttggccaaattcggtcatcagttcgcaaatctggcgccttcgaaagaaggattaccggcaattcggtttttgagatttactcctgtgatcggcaggttcacagggctccaaggagggtctgatcagcttaagacatttttgcagaattgggatgtgaatatggccatggtgggcgacaggtatcccagccagccagttatcctctttatggacaatgacagcggagcaaacgcgacaatgcagatcctccgaggcaaaaaggtgatctcccaagatatcaaaatgatggaattcacgcacgctacaaaaaacctttacgtgatcttcactccagtgcctgatgtgaaaagccagtcctgcatagaggattttgtggaccctacagccaaaagtgttaagctggacggcaaaacatttcacccgggtgggaatgcaacctaccagggcaagaaatggagcgacaccctgcactacggcaaacgagtcctagccgagaaggtagtggccgagaatgtggccaaatacgacttttctttattcaagcccatactcgatagattagataaggcaatcgccgactatcccaagcaggtcgccaaaattgtcgcctccaagtga

SEQ ID NO: 8315 - RNA, 1647 nt, synthetic construct
  source 1..1647: mol_type = other RNA
atgaagtacctcaaaaggttgcaggacgcaagaacaactgaagacttcgctaagctgctcggtttcaaggccgggaacgtgagttatctcgtatatcattattccggccagaaatactacagcttccaaataccaaaaaagaatggaggcactcggaccatcaacgcacctaacgatgagctcaaaaaccttcagaggcggctctcagactacttgtataaatgcttagaggaaatccacctccaaaacaatattcatgacacagtgtcctatggatatcagaagaacaagtgcatctacgacaatgcccttatccatcggaatcgaaggtacgtgtttaatgttgacctaaaggacttcttcaattctatcaacttcggtagagtgagaggcttcttcattaacaacaagaactttaagctggatccccacattgccaccctcattgcacagacagcgtgtaacgacaatattctcccccagggctccccgctgagccctataattactattctgatcgggggaatattggaccatcgcatactacgtctgactcacaaaattaggtgcagctactctaggtacgtggatgatttgacctttagcacgaacctgaaaactttcccccctgagattgctttttttgatgagacaggtaaatgggtcatcggaaaggagcttaataacatcttgaaaacgagtggttttgaatctaacgaaaagaaagtctccatgcaatacaaggatagtcgacaaacaagcgttggcctgatagtaaataaaaaggtggacgtgccacgcgaatattataaaaccgtaagagccatgtgtaattcgctaatcacccgtggctactttgtcaaaaaagacgccgctgaggatgaaccccccactcttaaccagcttgaggggatgctgaattacattttctcagtgaagtccaagaataccaatgtccgggtgaaagaccactatccaggcttccagaacatatacatcgatttctatatctaccgctttttcttcgctaacgagaagccgatcttattcactgagggcaaaacggacatcatttatattagatctgcgctgaaacatctcaaggccgagtacccaaaactgatcacctcggaggggctgctgaactttcagctgatgtggatcaacgactatttacagtccgtcttccacatctctagcggatgttccggatcactgaaactgctcgttcagtatgagtcatttctgaagcgctacaaaaagaccgaatctatgaaccaagttttttttctgttcgaccacgatagtgggattaaggagatcgtgaacaaatacaagaagtacgattccgccaaggattacttcagcaagaatgacttttctagtttaagtgtcgaagtctataagaatgtgcggtttatctttacacacgaggaacatgataagtacatcgaacagtatttcgatgaggctcttctgtcagagaaaattaatggcaagtcatttacacctgagaacaatgtgcacgatcctgaacactatttcgggaagcaggtttttgcaaccaagataatcaagaaaaagcaggacagcattgattacagcaattttcgaccactgttcaatgaattgtccaaatacctgtga

SEQ ID NO: 8316 - RNA, 1689 nt, synthetic construct
  source 1..1689: mol_type = other RNA
atgtccttcctcactaaactgaaacaggccaaaaatgtgagtgacgtagctcatattttgggatgcagtccagccgctctgacgtatacaatctacaagaataacgcgaaatacaccacattcaagattaagaagaagtccggtggggagagatgtattacttcacctgatcggaagcttaaagaactccagaaaaggctcgctaaaggcctgcaagagtattttgatgagattaacaaaggacgcgataccgagacttccgcccatggttttgtgaaaggcaaatcaattctaacgaacgcctacaaacacaagaacaagaatctcgtcttaaatatcgatctggagaattttttcgacaccatcaactttggccgtgtgagaggttactttatctataataaagggttcgcactaacagagaaagtcgcttctgtcatcgcacaaatcgcatgcaacgaaaataagctgccccaggggagtccttgttcacccattatcagcaatcttatcggacagatactggacgttaagctttcctctatggccaaaaagaacaaatgcttctatacccgctacgtagatgatatcacattttcaacgaatcagaaagccttcccagagtcaatcgcaaatatcaacgatacacaagtgataatcgggaagaagctgagaaacgaaatagagaaggccggctttaaggttaacgatagtaaaactaggatgcagcttcggaacagcaggcaggacgtgacgggcctggtggtgaatcaaaaggtgagtgtcagatctgagatgagacacttagcacgtgccatgaccgacagtttcttcaaaaacaatactgcgtttatcagcatagatgggaaggaggagaatatttctatcgaacgcctcaacgggattttgagctttatctataacattaggaccggcgtatatggggcaaacggctgtaagaacactagcttgcacgactctttcgaaagaatgtacgcttgcttcttgttctataagaattttgccgccaacaagtctaccgttataatttgcgagggagagacagacaatatttacttgaagtacgcttttcgatccctcgtgggttgttatcctgaactgcaggtgattaagaagggagtaaaaaagcggctggatctgtctatctatcgacagaccaaaacccttgagaatctgctcaatatcaccgatggaacaggcaacaacatcaagttcattaaaacctaccgccagtccatgcgacggtatgcttcccccccgaaagtttttccagtgatcgttctgctagacaatgattcgggttcatcctccatagacggaataatcaatcgcgacttcatcgacacaagggaggtgtgcgatggctttacatacgtctgtgaaaatctgtacattgtcaagactcccctgatcgataagaagaaggaatcgaaaattgaagacttctttgacagccacacattaagcaaaaccctcggctctaaaacctttactagcgaaaacaagttcgacaaagagcagcattatgggaagaaaaaattcgccgaaataattgtgaagcaaaactacaaggagattgacttcagcaactttaagaagattatcgacctgttcaatgacgtcatactgcactaccaggaaaagcggaaccagaggtttaacttctga

SEQ ID NO: 8317 - RNA, 1674 nt, synthetic construct
  source 1..1674: mol_type = other RNA
atgagctttctcgctaagcttaaacaagcccagtccacatcggatattgccaaaatccttggatgtagcccagcagcgcttacctatacgctgtataaaaatcgaaccaagtacacagagttcaaaattaagaagaagaacggaggagaaagaatcatttcagtgcctgagaaaaagctgaaagaactccagaggcggttgtccaagggcttacaggagtgcataaatgaaatcaacgctaagaggaagttcgagacttcttctcacggcttcgttaaaggaaaaagcatctttactaacgcttacaagcataagaacaagaatctggtgctgaacatcgatctcgctaacttcttcgactccatcaatttcggccgtgtgcggggatatttcatacataaccgcgagtttgccctatctgacaaagtgagcagtattttggcccagattgtctgctacgacaataagctcccccagggatccccgtgttctccagtgatttctaatctgatagcccagattcttgacgtgaaattgtccgctctggccaagaagcacaattgttactacacacgttatgtcgatgacattaccttttcaaccaaccaaaacaaattctcagccagcatcatctcctttcaggaacgagaggttatcgtaagcgggcagttgaaaaaggaaatagagagggcagggtttaaaatcaactccgggaaaaccagactacagtttaagaattcaaggcaggatgtgacaggtctggtggtgaacaaaaaggtaaacgtcaaacacgaattgaaacatatcgcaagagccatgaccaattcattttttaagctaaacagcgcgtacatctcaattgataatcgcgttgaggaagtgtctctggacaggctaaacggaatgctcagttttatataccacattcgctccaagatgaatgacaacaatgacaccaagaataaaggcacacttgatagtttcgacaaaatgtactctaagttcctgttttacaagacctttgcagctaacaagagtacagtggtaatttgtgagggcgagactgacaatatctatctgcagtacgcgttccaaaatctggtcggtagctatccagagttgcagctgatcaaaaaaggcgtcaagaagaagatcaacattttcctgtacaagcagaccaaaacattaagtcacctgctgaatgttactgatggcacgggtaacaacatcaaactcataaagacctacaagcagaatatgtctggtttcgtatgccctccccaaaactatcccgtgatccttctcatggataacgacagtgggtccaatgggatcgaaggcttaattaatcgggacttttcagatactcgcaaaatacatgatgggtatacctatgtctgcgagaatttatatgtggtgaagacgcctctgatagacggcaaaaaggaaactaaaatcgaggacttcttcgattgcaagactctcagcaaaaagctgggggataagacatttagcgcatcgaacaattttgacaaaagcctctatttcggcaagagaaaattcgccgaactgatcgttaaacagaaccacaaggagattgatttctccaacttcaagatgattatcgacctgttttacctcgtcatttgtgattaccaaaagcggctgagttga

SEQ ID NO: 8318 - RNA, 1347 nt, synthetic construct
  source 1..1347: mol_type = other RNA
atgtcctttctggcgaagcttaaggagtcccagaacatctctgatatcgcaaatctgttgggatgcagcccaaaaagtctcgcatacacgatatacaagtcacagaacaattacatcacattcaagattaggaagaagaacggtgggcatcgggatatcaaagcacctgctaagaaacttaaggaattacagcggcgtttggcaaagggcctccaggaatgcatcgaggagatcaatggcaaaaaaaataagcgaatcagttctcatgggtatacaaagggcaagtcaatctttaccaatgcctatgagcataagaataaaaacctggtgctgaatcttgatttggagaatttcttcgactcaattaacttcggcagagtaagaggttacttcatccacaacaaaaacttcatgttgcccgagaagaccgccacaattattgctcaaatcgcgtgccatgagaattctcttccacagggatccccttgttctccggtcataagcaatatgatcgcccagattctggacgtgaaattgtccgccctggctaagaagaacaagtgcttttatactaggtatgtcgacgatctcaccatcagcaccaatcgaaatatcttccccaatgatattatggaactccacgaccacaaacccattattggaaagtccctgattaatgagattaaacgctcaggctttacaatcaacgacaacaaaactagggttcagtgtaaggactcgcgccaagatgtcaccggcctaatagtaaacaaaaaggtgaacgtgaagagcgagtttaaacacctggcccgcgccatggcaaataacttcttcaaaaacaaccaagcctttattagtctgaacggtgaaaaaactcccattagtctggagaagctcaacgggatgctgtcttttatttaccagataaggaatcgaatggatatgcagaatgctaatggacaacctagaaaaactcacgatagcttcgaaaagacctacagcgactttctcttttacaagaactttgctgcgaataatagaactgtggttatatgtgaaggggaaacagacaatatctacctaaactacgctttcaagaacctagtgagctattatccagagttacagaactatgggaaaggaatcaaaaagcgcattgatatccacctgtttaagcagacaaaactgctgtaccgtctcctgaatataactgacggggccggtaacaacataaaactgctgaacacgtatcagaagcggatgtcaaggttctccagtcctcgggagtccttccaattatactgttatcttatcaccaccgccgaccagctcggctctaaagaatga

SEQ ID NO: 8319 - RNA, 1707 nt, synthetic construct
  source 1..1707: mol_type = other RNA
atgagcgctttggagactcttaagaagctgaagaacctaaaagatgtggcagtgtttctggactgtaagcccaaattcttgtcgtacctgttgttttttgagaaggacaaatactcggaattcgaacttcggaagaaatcagggggggtccgaatcattcatgcccctaataagaagctcaaggctatacaaaagaagctgagcgacgttctctacgaatgccaggatgagatttaccctaaacagaagttcaaagtcctgagtcacgggtttgttcggaaagagaagatcaagaacaagatcttaatccatggcgcgctaagtaatgcaaaagcgcacaaaaacaagaataacgtgtttaacatcgacctggagaactatttcggctccttcaattttggacgggtaagggggttcttcattaagaacaaagacttcctgttgacagacaaatgcgccactgtgatcgctcagatcgcctgctataataattccttacctcagggatcaccatgtagccctataataagcaacctcatcagcagaagcctggacgtaaaactcgcaaatctagccaaacggaatagcgctacttactcccgttacgtggatgatatcaccatttctacgaacaagaagatattccctaagaatattgcgctgaatgattcccataaaatttctcttggagacgaattcagtaaaattatttccagttcaggcttcaccgtcaactctaagaagacacgcctccagtattcagacagcagacaggaagtgaccggcctcgtggtgaataagttcgtgaacataccacacgagtataggtctaacctcagacccaaagctcattcccttttcctgaccaacagttacttctatgtggataatgagggtaataaatgtgaagggagtattgataagctgaacggcctgttttcctacatccactttatccgaaaaaatacgatcaatcacgggaagtacatccgcgacaagaacggagagcttgccctcgatgggtcagactacttatatagccaattcctgtactacaaatactttgctaacaacgataagcctatcgtcatctgcgagggaaaaacagacgtgatttatctgaaggccgtgctcaaaactctggctgccgactatccagacctgattgaggtgaacaatgacaagacttctctgaagatccaaatcttaccagcatcaaaaaccgtccaggatttacttggcctactcaccggcaccgcagacttgagaaaatttatcctgtcttatgaggcccgcctggaagactttaaaagcccctcccttctgaatccagtcattgtattggtagacaacgatgatggtccacgtaagatcaacaacgccataaaggacaaatataagataagcccggaagcaggcaagccgtctatcatcttttccaatatggtctatgtgaggactcccgaactggagaaaaagaaagaaacatccatcgaggatttcttttccgacggtattcgcaaaattaaaattgatggtaggacgttcagtcccgatattgacgatgataccacagcccactttggaaaaaagacatttgctgaagaggttattctcaagaagaggaagaccctggattttacatcattcaagcccgttttgaatctgctcgttgagtctatcagaatatacaagaaaggcgcctga

SEQ ID NO: 8320 - RNA, 936 nt, synthetic construct
  source 1..936: mol_type = other RNA
atgactacactggagacactcaagaaattgaaagacttgaaagacgtggcaggtttccttgactgtaagcctaaatttctgtcttatctcctgttcttcgaaaaggagaagtacacaatttttaaggtgccgaagaagaacgggggcgtaagggaaatctatgccccaaaccagaaactcaaagccattcaaaaaaagctcagcgacatactgtacgaatgctattccgaaatctaccctaagaacaaatacaaagtcattagccacggctttgtgaagaaagagaacaactcaaaaaaggaggtcatttatggggcgctgtccaacgccgtcgagcataaaaataagcgcaacgtgcttaatgtggatctggagaattactttggatccttcaactttggtcgggtgcgcggatttttcataaagaataaggatttcgccctgagtgaaaaatgcgcaaccgtgatagcccagattgcttgttataataacctgctaccccaggggtccccttgttctcccattatcgcaaatctgatcactaggcctctggacatcaagttggcttgtttggcgaagaagaactctgccacttatagcagatacgtcgatgatatcaccatctcgacgaacaaaaagaccttaccaaaatgcttttgcctgaataacaagcacgagatttttcccggaaaagctctcgttgagatcatcaacaaaagcggcttcagcataaatgataataagacacgactccaatactccgattctcgtcaggaggtcaccggattagtagttaataagttcgttaatgtgccctatgaataccggcacaatcttagaccaaaggctcatagtctattcaatgagaactcatacttctacgaagacaacgagggcaacaggctttcaggcagtatcgaaaagctgaatgggtga

SEQ ID NO: 8321 - RNA, 1737 nt, synthetic construct
  source 1..1737: mol_type = other RNA
atgatgagctcactcgagtccctgaaaaagctaaagaacttgaaggatgttgctacctttctgggttgtaaaccaaaagccctgtcctacctcttgttcttcgatgagaacaagtaccgtacgtttgagattaaaaagaagtcaggtggctcccggaaaatcctcgcgcctaatgacaaacttaaggcgatccagaagatactgtctaatgtcttatacgactgctatgcggagatctatccaactaagaagtatagcgtaatttcccatggatatgtcaggaaggaaaagaatcagattaacaaggagaacaatcacacgaaagatcaaaacctttcttatgggactataaccaattctatcccgcacaagaacaagcataatgtgcttaacatagatctggctgattacttttcgtcctttaatcttgggagggttagaggcttttttatcaagaacgagagtttcaagctaagcaccgaatgcgcaacagtgctggcccaaattgcatgctatgaaaatgaactgccgcagggtagtccatgttctcccattatcgctaacctgataagcagaagccttgacgtgaagctagctgggctggcaaaagagaattccgccacatacactcgctatgtggatgacatcaccatttccacaaacaaaaaagtcttccccacgaaaatcgccggcgtgattgataacaaagtgacactgggcaaatcactgcagcggattgtgattaagtccggatttactatcaacccccctaaatcaaggttgcaattctcagacagcaggcaggaagtcaccggtcttatcgtgaataagttcgttaatgtaccatcaaactaccgacataccttaagacctatggtccatagcctctttaagaacaatacctacacctatatgaacgacgaaggagacaatgtaaaaggatctatcgatcggctgaatggaatgctgagctatatccactacatccggtccaacactataaacaaggggaaatacgtgcgcgacgataaaggcgggataagattggacggaagcgatcagctatacgctgacttcttgttctacaaatatttcgccaacaatacccgtcccgttctcatctgtgaaggcaaaaccgatgtgatttatctcaagagcaccctgaaagccttggctgacaattaccctagtctcatcgagaaggatggatctaaaacccacctgaaaattcagatcctgcctgcatccaaaacaattcagaatttacttgggctgctctctggggccgacgacctcaaaaaattcatggagacttacgaagcaagattttcaaaatatgccaagccaagtgcactgcatcccgtgattgtgttagtcgacaatgacgaaggtccccgaaacatcaactccaagattaagaacaagtacaaggtcattccaagtcctgggactccagtgaaggtatggggcaacttactgtacgtgcaaactcccgagatcgtgggcatgaaaaacacagccatcgaggatttcttctcttctgaaattcggaagatcaaggtcgaaggccgcacattcagccctcagacggagacagagacaatagctcactacggcaagagggtttttgccgaggacgttatttcgaagaagcgcaagatcctcaattttgacagctttaagcccatattggatctgctggtgagtagtatcgatctccacaatctgaaaaagtga

SEQ ID NO: 8322 - RNA, 1758 nt, synthetic construct
  source 1..1758: mol_type = other RNA
atggctaccggcggcagtccatacgagtgcgacaaatcagtgtatagacctcttccctctattttcaacatggatattatgagcaagctggcagatatccggtctttgaagagcttatccgacgtcgcagactttctgggttgtgagcccaaaaacctggcatactcactgtattttgccaaaaacaagtacaaatccttcgagatctataagaaatcaggaggcgttaggattatcaatgctcctaatgagaaactgaagagtcttcagaaaatccttgccgggtacctcagtgagtgtctagacgagatttacaatactcacggtggcaataagatttctcacggatttgtcaagggcaaaacaattatcaccaatgcgagccagcaccggaacaaaaacctagttttcaatatcgatctgagcgacttttttaacacaataaactttgggcgagtaagaggattcttcatcaagaacaagtacttttccatggatgagaaagcggccaccgtattttcccagatcgcatgccatgaaggcagattaccccaggggagcccttgttctccagtgatctccaacctgatactgaatatccttgatatacgactggcttcgttggccttcaaaaatagttgcaattacacccgctatgccgatgaccttactttcagtacaaatcgtaaggaattcccaatcgacatagtgaaagacgagctaggcgattgggtggtcgggaacaaacttcataaggagatcaccaaatgcggattcattatcaataagagcaagacgcgcctccaatacaaagactctcgccaggatgtgactggattggtggttaataaattcgtgaatgtcccgtctgactacaggcgtctcactaaaagcatggcccacgaactatttcggactaacgaattctacataaagttacctgatggggaaagcatagaaggtacccagaaccaactcaacgggatgctgtcatacatttatagtaccaggaagataaccatccacaagaacttcgactcaaccatccccagagacggcaaaggcattcccattctcgatgcttccgacagactgtatagcgatttcctcttctacaagaattttgtggctaacgacaaacccattgttatctgtgagggcaagacagacgtggtctatctcaaacatgctattaaatccaggtatgagaaatacccgaacttggttgaaattaagaagaaggaaaaggccctgaagatccaaattctgggagcaagttttctcgtcaatcacttgctggatctgctcaccgggacaacagccatcaaacggtttgtggaatcttatgccactcggctgagcaaatataaatgccccccactgaacaaccctgtaatcatcctgactgataatgacgatggcatcaaaggtctgatacacgcgattaatggtaagtataaggaatcagaagaccgagatggaatttactttattacgtccaacttgtacctcatacgcacccctctgctgaatgacaagaactcctctaagatcgaggatttcttcactaaggagctgttggccaggaagctcgatggaaagacatttcatccagacaacgacaccgataatacaatgcattactcaaagcaggtgttcgtggagaagattattaagaaggagtataagtccatcgactttagcgggttcgactcgatcattaacttacttgagaagacgatcatcgatcacaaatga

SEQ ID NO: 8323 - RNA, 1674 nt, synthetic construct
  source 1..1674: mol_type = other RNA
atgtcaaaactgacggagatatcacagctccaaagtctcagggacgtcgcaattttcctggggtgtgagcccaagaatcttgcctattcactgtactttgagaagaacaagtataagtccttcgaaattcacaagaaatctggaggcgtcaggattatcaacgctcccaacgaaaagctcaagtctctgcaaaaaatcttggcctgtcagctgaatgaatgccttgaggagatatacaggatgcacggcgggaataagattagccatggttttacaaaggggaagactattatcacaaatgcaagcaagcaccggaataaacgcctggtgttcaatattgacctgacagacttcttctctaccattaattttggccgggtccgcggcttcttcatcaagaataaccatttcaacttgaacgaaaaggccgctacgatccttgcacaaattgcctgccacgagggaaaactgcctcaggggtcgccttgcagcccagtgattagcaacctcattctgaatatccttgatgtgcggcttgccaaacttgccagtacaaatagttgcacttacaccagatacgccgatgatttaaccttttccaccaacaaaaacgattttcctagcgatatagctcgacagtccgcagagaacacatggatccctggttctagggtgcggaaagaaatcctaagatccggttttagtgtaaatgacaagaagaccagactacagtactatgattccaggcaggacgttaccggattagtggtcaataaggtggttaatgtgcccagcgagtacagacggcttgtgaagagtatggttcatcagttatttaacaccaacgagttctatctgaaactgtctgacggagagtctctggaaggctcccaggaacagctgggaggcatgctaaactatatttacagcactcgtaagacaaccattcatcatgggaaggtcaaacgcgatgctgagggcaacctgctcttggacgcttcagatcgaatgtacgccgatttcttgttctacaaatattttgtggcgaataacaagccaatcattatttgtgaggggaaaactgacgtagcctatatgaaatatgcgatcaagtcacgaagcaatcactttccaagcctcgtggaagaaaccgaaggtaaaaagcaactcaaaatacagatcttggcagcttcaaatactgtgaatcacttgttggatctcctgaatggcacctcctctatcaaaaaattcatagagctgtacgacagtaagttaaagaagtataagaaccccatcctgaaaaacccggttataatactaacagacaatgactccggaagttcaaacctgataccgactatccgtggaaagtacaagaactccgaggaaaaggacggtttttacttcatcacgaagaacctctatctgatcaaaacaccactcatcaacgggaatgactcgtctaaaatcgaggatttctttaccaaggagctcctgtctagaaaactggacggcaagacttttcaccccgataacgatacggataataccatgcattacagcaaaaacgtatttgtggaaaagatcattcgcaaagagtataaatccattgacttttccggcttcgacagcatcctgaatttcatcactaacgtcatcagcacacacaaatga

SEQ ID NO: 8324 - RNA, 1677 nt, synthetic construct
  source 1..1677: mol_type = other RNA
atgtccgaactcatagaaatatcaaaactgcaaaacctgagtgatgtggcccattatctcggatgcaagccacagtccctcgcttacactctgtatcatgaaaagaacaagtacacgacgttcgaaataaagaagaaaaatggtggtgtccggctgatcaactccccttgtgacaagctgaaggtacttcagcggatcctggctaataaattgtcagaatgcctcgacgaaatttacaaagagaatggaggcaataagatttcccacggcttcgtgaaaaataagaccattatcaccaacgcgagtgaacaccgaaacaagaacctcgtgtttaacatcgacttaactgacttcttcaataccataaacttcggacgtgttcggggctttttcatcaagaacaacaacttcatgcttaatgaaaaggtggccaccatctttgctcagatcgcctgccatgacggcaaactgcctcaaggaagcccctgttcaccagtgatctctaatctgatcctgaatatcttagatatccgccttgcaaagcttgctttttcaagtaattgctactacacacgatacgccgatgatttgacattttccacaaacaaaaaggtcttcagtaagaacattgttaagtaccgggatgacggagcaccagagtcagggcctcttctgacaaaagaaatttctaggagcggcttcattatcaatgacaaaaagactagactccagttctgtgattccaggcaggatgtgacagggctgatagtaaacaaagttgttaacattccctctgactatcgcagactcatcaaggctatgactcatgagctgttctgcaagaatagctactatatcaaaaacgccaacaaaaaggatcagaaaggaaacctggagcagctgaatggcatgctatcttatatctactctgtccggaaaaacaccatacacaaaaatatcaccacaagggacagcaagggtaatccgaggctagacgccaatgagaagatctacagcgattttctcttttatagatacttcgtcgcaaacgacaaacccattctaatctgtgagggcaagacagacgtggcctacattaaatacgcaatccgaagccgctccagcagatataactctttggtagaggaagaatatggggagaagaaactgaagattcaggtgttgaacagcagcggacaagtcaaccatttgctggatctcttgaatgggacctccagcatcaaaaagttcattgagaactatagtgcgcgtcttaaaaagtacgagaagcctctgtttactaatcccgtgattattctcactgataatgacgacggctcatccaaactggtgccagccataaaaggcaaatacagggggagtaaggagataaacggttttcacttcatcacgaacaatctgtttcttattaagactccgctatttccagataaacctgatagcaagattgaggacttcttcaccaaagagttattatcgagaaaactgaatgggaagacctttcaccccgataatgacacagacaataccatccactattcgaagaacatcttcgtggaggagattatccgcaaagagtataagtctattgatttttccgggtttgatgagatactggacttgattgtgtctgtcattgacgaatataagaagtga

SEQ ID NO: 8325 - RNA, 1917 nt, synthetic construct
  source 1..1917: mol_type = other RNA
atgagctggagatttcttggaagctgccaagtgtgcgttcgcgtgcccatcaacctttttaaatggggccggcgggttaaccggctacttctcctgaagtcggcaaagactaagcctgatctcgctcgaatactgggtgttaaaccatccgctctaacccattgtttatacatcgtgaagcctgaaaaccagtatgtgcagttcgagatcccaaagaggaatggggggaagcgttttatctctgccccctcaggcatgttaaaaaccctgcagagcagcctatcagatctcctgctggactgcctcgatgaaattatctttctaaagttcccagactcagagattactcgcccgaaggcaaagaactcgctttttttgaaggtgaagtgtagcggctctgagacaaagcaaccatctctgtcccacggctttgaacgcaagagaagcatcataacaaatgctatgatgcacctgggcaaaaaacacgtgttcaacattgatttggaaaacttcttctcatcctttaactttggaagagtgcgtggttttttcatcaagaacgggaactttctgctggagcccgagatcgcgactgtgatcgcaaagattgcctgttacaataacgaattgccccagggaagtccttgttccccggtcatttctaatctgattacccatgctctcgatatcaaattggccgcggtcgctgctaagcacagctgcacttatacccggtatgcagacgacattacattctccaccagaaaggagagcctccctagtagtatagctaagagcgataatcatactttcgtggccgggaaagtcatacgcaatgagatcgttaggtctggcttttctattaatgagtcgaaaacacggaatcagtacaaggacagtagacaggaggtgactggactggtcgtcaataaaaagcccaataccaagaaagaatactggagactggtgagggcccagtgtaaccacctgttcaataccggggagtttaaggaaacaataaatggagcggaggttagtggcaatattcacaggctggagggcaagcttacatttattgaccaggttgaccactacaatcggctccgacaaggggagaaactgaaccccaagtatcacctcaaaaaagacgctattagaaaatcaaacccctctatccggcgatatcttcatacctctagggagacaactttcagtaagttcctgttctacaggtggttctatggaaacactaaaccaaccatcctgaccgaaggccagaccgacaatatatacttgaagtctgctatctggaagttagcagcaaatttccctaaactcgcgacggggaaaagtgccacagagccttataaggccttaacacggttctttaaatacaatgagaggaccaggtatctgttagagctgttcggcgggggagattacttgcgtgacttcgtggacaactataaagaactgttcaacgcctataaagcccctaagccgtcccatcctgtcattattttcgtggataacgactccggccccaacaatctgattaacaaagtcaagcgagtaaagggcatcgaaatctttccagcaggtgtcgggctggccgatatccgccagtcagaatttgtacatatcttctgcaacttgtacctggtgctcaccccacaaggtgccggatcctccgagacggacatagagtacttttttagcgatgccgatagacttagggaacacaaaggtaagcgcttcaacacagtggcagaccgagatgaagtgaatgacctcagcaaagaagccttcgccacgcatattgtaaaaacgcagaagggaatcattgatttctcacgctttactcatctccttgaaagaatcgagaaggtaatcgaccactacaactccataaaatga

SEQ ID NO: 8326 - RNA, 1836 nt, synthetic construct
  source 1..1836: mol_type = other RNA
atgaagaaactggacctgcttaaagccgctaagacaaaacccgatctggcaaagctcctcggggtaaagccctccgcactaacctattgtctttataaaacaaagccggagacacagtatgtgcagttcgagattcccaaaaagaatggaggtaaccgtattatttctgccccctccgggatgctgaagaatatacaggcctccttaagtgaattactgttagactgcctagatgagatcatcatcgacaaatttcctaattcagagatcgccaggcagaaagcaaagaatagtatcatcttgaagctcaaatgcagcgggagtgaaatcaagcaaccatctctgtctcacgggtttgagagaaagcgttccatcatcaccaatgcgatgatgcatctggggaaaaagcatgtgttcaatattgacctggagaacttcttcggtagcttcaactttgggcgggtgaggggtttctttatcaagaataagaacttcctcctggaacctgagattgcgaccgtaattgccaaaattgcttgttataacaacgaactcccccagggtagcccttgttcccccgtgatatctaacctgatcacacacgccctggacataaaactggccgcagtcgcatcgaagtatagttgcacctacagccgatatgcggacgatatcactttttctacaaggaaggattccctgccgtcgtccatcgctaaatcagataatcacacctttgttgctggaaaggtcatcaaaagcgagataaaacggtccggctttagtataaatgaaacaaagaccaggaaccagtacaaggactctcggcaggaagtcaccggattggtagtgaataagaaacctaacactaagaaggaatactggagactggtgcgagcccagtgcaatcatctcttccgcaccggccaatttaaggaaatcgtggacggagtcgaggtggtcggaaacatcaatcggctcgagggtaagttgaacttcatagaccaggttgatcattacaatcggttaagacagtcagagaagctgaaccctaagtaccacttgaaaaaagatgctctgaagaatggctatgccaagtcccgcagatacctacatacttctagggaaaagacgttcagcaagtttctcttctatagaatgttctacggcaacaagaaacctacgattcttactgaggggaagacagacaacgtgtatcttaaggcagctattcacaaactcgctgctttatttcctaaactggccatagagaaaaccgcccttgccccatacaagctccttactcagtttgtcgaatataacgagcgaaccaaatacctgcttgagttgtttggcggcactgactatctgaaagacttcgtgattcattaccgccattacttccacgattacaaagcaccaaagccatcaaatccagtaattattttcgtggacaatgattctggccccaaaaacctgattaactacgtcaacggcgttgagggcatccaaatttttcccgcgggcgttgctgacatccgccaaagcgatttcgttcacattttctgtaacctctacttggtgcttaccccacaagtggaaggatgcccagagacggatatcgaatactttttctcaaatgtggacagactgaaacagcacaagggaaaatgtttcaacactgtcgccgacagggatccgagcaatgatctgtcaaaggaagcatttgccacacatatagtgaacgctcacaaaaatgacatcgattttagtcgctttactagcctattggagcggctggagaaagttattgatcactataacctcatcaagtga

SEQ ID NO: 8327 - RNA, 1836 nt, synthetic construct
  source 1..1836: mol_type = other RNA
atgaagacgctgcagtcgctgaaagaggccaagactaagccccagctggcaaagatccttggaatcaaaccttctaccctgacacactgcttatatgtgcttaatacgaacaaccaatacatcaagtttgagatacccaagaagaacggtggaatccgggttatccacgccccaaccccaatcctgaagatgatacagaaatcactttcgaagcttttactaaactgtttggacgagattatcttcaccaaatttccaaatagcgaactggccagacagaaggccaaaaattccggaattctgaaggtgaagattagcaacgcagagataaaacagccttccttgtctcacgggtttgaaaggaacaggtctattattaccaacgcgatgatgcatctagataaaaagttcgtattcaacatcgacctgcatgacttttttggatcttttaatttcggcagagtgcggggctactttattaagaaccgtaattttgagctccaccctgatatcgcaacagtgattgctaagatcgcctgttatcagaataaattgcctcagggcagcccctgtagccccgtaattagcaatctgatcactcacgctctagatattaaactcgcaaagcttgccaaactgagctcatctacatacacaagatatgccgatgacataacattttcaaccagactgtcagaactgccgaaatccatagcagaaaaagagaatcacaaatacgaaccaagtaaaaagatcacgaaagagatcaacaggtcaggattctccatcaatacctccaaaactaggaatcagtatgctgactcccgtcaagacgtgaccggcttaatcgtcaacaagaaaccgaacactaagaaagaatactgcagattggctcgcagtcagtgcaatcacctgttcaagcggggcgagtttaaggaacttatcaacgggaacgaagagaaaggtaatatcaactctttggagggcaaactcaatttcatcgatcagatcgaccattataaccgcctgaggcaaactaagaagctcaaccctaagtatcagctcaaaaaggatactatcaagaacggcaacgccaagctccgccgctacctgcactccagtcgtgagaaaactttcagtcagttcatattctaccgacacttttatgggaacgagcttcctaccatcttgacagaagggaaaacggacaatgtttacctgaagagcgccataaacaaactcagcgcccagttccccgaattatccagaagtaagaccagtcaagcagagtataagctcctgctgaagttcttcaattacaacgaacgcactcgatttctgttagagttgtttggaggtaccgattacctcagagactttatcgtcaactacaagaagaacttctcttactaccaagctcccaaacccaagaagcctgtcattatcctggtggacaatgatagcggcccaagggacctcataaattatgccaagaatatagagggcgttatgatttaccccgctggtaccacagaaatccgggatgccgacttcgttcacattttccataatctctatctggtcctgaccccaaagaaaccggggcataatgagacagacattgagcttttctttaaggatgtggatcgcctaaggatttacaacgggaaacactttaatacagccgcgcagcgggataagaatcgagatctctccaaggaagcttttgctgaacatgtgattcatgctcagaaagacgtcattgacttctcagagttcccagcaattctggagcggctggtgaaagcgatgaatcattatgacaccattaaatga

SEQ ID NO: 8328 - RNA, 1650 nt, synthetic construct
  source 1..1650: mol_type = other RNA
atgattcaaagttcactttctgggctgttgctcgattgtcttgacgaaattatccacaacaaatttccagaatcggaattggctcgacagaaagcaaagaactctaaaattctgaagatcaagtgttcctcagctgagattaaacagccatcactctctcatggctttgaaagaaagcgcagtataataaccaacgcaatgatgcacttaggcaaaaagtatgtgttcaacattgacctggaggattttttcgggagcttcaatttcggaagagtgcggggattcttcatcaagaatcgcaattttctcttagatcctgagattgctactgtgatcgctaaaatcgcctgttgcaataatgaactgccacagggaagcccttgctcacctgtgatcactaacctgataacacattcactggatattaagctagccgccattgcaaaaaaaaattcctttacgtacacccggtatgccgatgatataacgtttagtactcgcaagagcgatttttcaagctccatcgcgaagaaacagaacaacaagtacgtaatcagcaaaagggtgcgcaatgagattatactgtccgggtttatcatcaacgagtctaagactagaaatcagtacaaggacagtaggcaggaggtcacaggcttggtcgtgaataagaaacccaacacgaagaaagagtactggagactcgtgagggcgcagtgcaatcacctattcaagaatggagagtttgtcgagataatcgattccaaagagacaaagggtaatattaacagacttgaggggaagctgaacttcatcgaccaaattgaccactataatcgactccgtcagggtgaaaagctgaacccgaaatatcatctgaaaaaagatgccatcaagaagggtcaagccaagtcccgtcggtgcctccataacagtagggaaaagacattctctaagtttctcttctacaggttgttttacggaaacaaccttcccactattctcaccgaaggcaaaactgacaatgtgtatctgaaagcagcgatccacaagctggctagcctcttccctaagctggcagtcgttaaaagtgcaagctccccgtataagatcttgaccaatttcatcgattacaatgaacggacaaaatacttactggagctctatgggggcgccgactatctgaaagacttcatcatccactacaagaacaatttcaactactacaaagcccccaaacccagcaatcccgttataatttttgtggacaatgatagcgggccaaaagacctaatcaactacgtgtccaagatcaatgatattaagattagccccaccggcctgatggacataaggtcttcagagttcgttcatatcttccacaacctttatttagtcctgacccctcagattaagggctacgctgaaaccgacattgaacatttttttacagacaccgatcggctgcgcccacataaaggcaaggtatttaacacagcctccaagcgagatcctgacaacgacttgtccaaggagtcgttcgctactcacatcgtgcacgccaagaagcatgacattgacttttctggattcacctctctgctggagagacttgaaaaagttatcaaccactatgataccgtaaaagagtga

SEQ ID NO: 8329 - RNA, 1644 nt, synthetic construct
  source 1..1644: mol_type = other RNA
atgcagagctcgcttagtcgcttgttactcgactgccttgatgaaatcgtatgcatcaagtttcccgattctgagctggcccgacagaaagccaaaaactctaaaatcctgaagctcaaatgctccaattccgagatcaaacagcccagcttgtcccacggattcgagcggaaacggagtattatcactaacgcgatgatgcacctgggaaaaaaatatgtcttcaatatcgacctcgataacttcttcggatcttttaatttcgggagagtcaggggcttctttatcaagaatagaaatttcgcgttggaccctgagatcgctacagtgattgctaaaattgcctgttacaacaacgaactcccacagggtagcccttgcagccctgtgatcactaacttgattacccactccctggatattaagctagctgcaatagctagtaggaacagttcaacattcacgcgttacgcagacgatattacatttagcactcgcaagggcgagtttccctccgccatcgccaaaaaccaaaacggcaagtacatagtgtctaagaaaatccgaggcgagatcacccgctcagggttcatcatcaatgacgggaagacgagaaatcaatataaagactcccgtcaagacgtcaccggactggtagtgaataagaaacccaacactaagaaggagtattggagattagtgcgagctcagtgtgaccacctgtttaaacatggcgagttcctggaagtaattgacggcaaagagatcaaaggcaacgtcaacacccttgccggaaagctcaactttattgaccaggtggaccattacaatagactaaggcagggtgaaaagctgaatcctaagtatcacttgaagaaggacgccaataagaatgggcacgcaaaaaagcggcggtaccttcattcatcaagagagaaaacattttccgaattcctgttctatcggcttttctacggaaacgagctgccaacaatactgaccgagggcaagacggataatatttatctcaaggctgcaatccataagctcgccagttctttcccaaaccttgctgtggcagagagccctggtctgtcatacaagccacgcaccaaattcgttaattacaacgaaaggactaagtatctcctggaactgtatggtggcgctgactacttgaaagatttcgttatccactataagcagcattttaaccgttacaaggcccccaaaccatctaatccggttattatcctagtcgataacgatagcggccccaaggatctgataaactacgtcagcaaggtggacaatataggtatttttccaaccggggtgcccgatatacgcgcaagcgaattcgtgcacatattctgtaacctgtatctggtgttaacaccgcaggtgaagggatacactgggactgacattgagcatttttttaaggacgcggataggttacggcctcataaagggaagttttttaacaccgtatctaaaagggatcacgacaatgatctctccaaggaatcatttgccacccatatcgttcacgcccataagcacgaaattgactttagtgggtttacatcgctcctggaacgcctggtcaaagttattaatcacttcgataccgtgaaatga

SEQ ID NO: 8330 - RNA, 1857 nt, synthetic construct
  source 1..1857: mol_type = other RNA
atgaacagactgcaatcactgaaggaggcaaagaccaaacccgacctagctaaattgctcgatgttaaacctagcgctttgacttactgcttatatatcttgaagcccgaaaaccagtacacccaattcaaaattccgaagaaaaatggaggagagagaaccatcaatgcccctaatgggttactgaagtctatccagagcagtctttctaaactgttactggactgtctggacgagattattttcaacaaattccccgattctgagctcgctgctgagaaggccaacaacagcaaagtattgaaaatcaagtgttccgccgcagagatcaagcagccaagtttgtcccatgggtttgagcggaaaagatctattataaccaatgccatgatgcacctcggcaaaaaaaatgttttcaacatcgacctggagaatttttttggcagctttaactttgggcgggttcggggcttcttcatcaaaaaccgtaactttgagttagaccaggagatcgcaactgtgattgcgaaaatagcttgctacaataatgagcttccgcaaggctcgccatctagccctgtcattaccaatctgataacacattccctcgatattaaattggccgcgctcgccgtgaagaactcttgcacgtacactaggtacgctgatgacattacattcagtaccaggaaaatcgactttcccagcttcatagccaatgataagtgcggcaaattcgccccgagcaagaagcttcgcagcgagattgtccggtctgggtttcttatcaacgacaaaaagacacgaaaccagtataaagactcaagacaggatgtaactggcctcatcgtgaacaagaagcccaataccaaaaaggaatactggcgcctggtgcgcgcgcagtgtgatcacttgttcaaatatgggacatttgtggaaaagatcgatgacatagaaatcaaagggaacatcaataggcttgaaggtaaactgaacttcattgaccagctggaccactataataggctccggcaggccgagaagcttaacccaaagtaccagcttaagaaggatcctacaaagaatactcaggctaagactcgtcgctatctgcatggcggaagggagtctacgttctcacgttttctcttctaccgactgttctatggtaatactctccctaccattctgacagaaggcaagactgataacgtatatctgaaggcagctatccacaaactggccgccttatttcccaaactggccagcgaaaagagtgccggatcaccctataagagtctcacgcgcttcctggactataatgagcgaaccaagtatctcctagagctgtttggtggagctgattaccttaaggactttgtgatccattacaagtcgtactataagtactataccgcaccagaaccttcccatccagtgatcatttttgtcgacaatgacacggggccaaaagacctcattaactacatcaacaagattgataacgcgtcaatattcccaaaaggactgaaagatattagaagcagtgattttgtccacgtgttccacaacctgtacctggttctaacacctcagaccaaaggttactccgaaacagacatagaacatttcttcaaggacaaggacagactgcggcaatacaaaggaaagtcattcaataccgtctccctgcgcgatcctaacaatgacttgtcaaaggaggcattttccaagcacatcattcatgcaaataaacacgatatcgatttctccggctttacatccctcctagaaaggctggtgaaggtgatagaacactttaatagtctgaagatcaagaacagctccgcaccctga

SEQ ID NO: 8331 - RNA, 1842 nt, synthetic construct
  source 1..1842: mol_type = other RNA
atggagagactccagctacttaaaaatgctaagaccaaacccgatttggccgcgcttctgaatattaaaccaagcgtgctcactttctgcctttataaggtcaaaccacagaaccagtatacccagtttatcatccccaagaaaaacggcggagaacgcattattaatgccccaactggagtattaaagtcaatacaatctgccctgtccaacctcctgctggactgtctcgatgagataacccggaataagtttccaaagtctgagctcgtgatcgaaaaagctaagcatagtaaggtgctgaaagttaagtgctccaatagtcaatctaaacaaccgaccctgtcacacggattcgaacgaaagagatccataattacaaacgccatgatgcacctaggcaaacgccacgtgtttaacatcgacctcgaggatttctttgcttcattcaatttcggcagggttaggggattctttatcaagaacaagaactttgagctggagcctgatatcgctaccgttatagctcagattgcctgtcacaataatgaactgcctcaaggcagtccttgctcccccgtcatcactaatttaattacccattccctggatatcaagctgtctgccctcgcaagcaagaattcgtgtacctacactagatacgctgatgatataactttcagcacccgcaagaaagaattccctattgatattgcaaggaaaaaaggagagcagtttatcagcggcaaaaaacttcggagcgagataatcagaagtgggtttaagattaacaagggcaagaccaggaatcagtataaggacagcaggcaagatgtgacaggcctgatcgtgaacaagaaacccaacacaaaaaaagagtattggcggaaggtgcgcgcacagtgtgactacttatttaagtacggtgagtttatcgacacagtgaacgggaaagaggtcaaaggaaatattcactctctggaagggaagcttaactttattgatcaggtggaccattacaacagattgcggcagacgctgcccttaaacagtaagtatcagttgaagaaggacgcgattaaaaatggacaggcaaagttgcggcgatacctccactcaggcagagaggagacattcagtaagttccttttttatcgcctgttctacgcaaacgagtctcctacaatattgactgaaggtaaaacggacaacatttacctgaaggcagccatccacaaactggctggttcatacccaagactcgcgtcggaaaagaatgacaacagcccatacaaactgctaacccgttttgtcgaatacaatgaacgaaccaagtatctactcgagctgtacgggggtgccgactacttgaaggacttcgtagtccattataaacaccacttcaaatactatgaggcccccaaccctcagaacccggtggtaatttttgtggataatgactccgggccgaacaacctgatcaactatgtaaacaagatcaatgggaagtgcatctatccagagcatatcaatgatatccgtgcttccgagttcgttcacgtgtttcataacctctatcttgtcttgacaccccaggtggccggcttcaaagaaactgacattgaacacttctttgtggaatccgaccggttaaggccttacaaaggcatgatcttcaatacgattagcaagaggaaccccgaaaaagatctgagcaaggatgcctttgccacacatatcatccacgcaaaaaagaatgagatcgacttcaatgggttcaaatctctgctggaccgcattgtcaaggttatcgagcattacgactcaataaataagaagtga

SEQ ID NO: 8332 - RNA, 1836 nt, synthetic construct
  source 1..1836: mol_type = other RNA
atgacccggttacaagcgcttaagaaagccaagaccaaacctgaacttgctcatctgctcaatattaagccttccgtgctgacttactgcctctataaaataaagccgcagaaccagtacacccagttcaagattcctaagaagaacggcggggaacggacgatcaacgcaccaactgggacactaaaatctatccagagcgctttgtctgagctcctcttggattgtagcgacgagatcactcgcaataaataccccgagtctgagttagccagagagaaggcgaaacactcaaaaatcctgaaagtaaagtgtagcaactcgatcatcaaacagcccacattgagccatggatttgaacggaagcgctccataattaccaatgccatgatgcatctcgggaaaaagcacgtctttaatatagacttagaggatttcttcgggtcatttaattttggtcgggtgagaggcttcttcattaaaaataagcagttcgagttggagccagagatcgccacagtgatcgcacagattgcctgctataataacgagctcccccagggaagtccatgcagtccagttatcaccaatcttataacacacagtctggacatcaagctcgccgctctggcttctaagaactcttgtacttacacccgatacgcagacgacattactttctcaacaaggaagaaagaattcccgtcattcatagctcaacagaaggacgatcagttttttgccagtaaaaagctgaggagcgagattgtgagatccgggtttaagattaaccctagtaagacgaggaatcagtacaaagattcacgtcaagacgttaccggtttgatcgtgaacaaaaaacccaacacgaagaaagaatattggagaaccgttcgcgcccaatgcgactatctatttaaatatggcgagttcatcgaagtgatcgacggagaaggggtgaaaggcaacattaacagtctggaaggtaagctgaacttcattgaccaggtcgatcattacaatcgcctgcggcagacactgccccttaatcctaagtaccaattcaagaaggataccataaagaacggtcaggcaaagctgcgcaggtacctccattcaagccgtgaggatacatttagcaaattcctcttctatcggtttttttacgcttcggaacttcccactatcctgacagaaggaaagacggataacgtataccttaaagcagcaatccacagactggcttcttcctatccagagctggccctcgagaagaagggcgatagcccatataagctgctgacccgatttgttgaatacaacgaaaggaccaaatatctgctagagctatacggcggggccgactatctgaaggactttgtcattcactataaacagaacttccgcttctataaggcacctaaacctgagaatcctgtaatcatcttcgtcgataacgactccggacccaataatctgattaattacgtgagcggcattcaaggcaagtacatatacccggaatccgtgaaagatatcagagcgtccgagtttgtccacatcttccataatctctatctggtgttgaccccacaggttgctggatttaaggaaactgatatcgaacacttctttaccgacaacgaccgattgagagaatacaaaggcatgtgtttcaatacaatcctgaacaggaagcccgagaaggatttatccaaagatgccttcgcgactcatattgtccacgccaaaaaaaacgagatcgattttgacggatttaagattcttctggacaggatggtcaaggtgatagagcactatgtgtctattaagtga

SEQ ID NO: 8333 - RNA, 1836 nt, synthetic construct
  source 1..1836: mol_type = other RNA
atggagcgcctccagacgcttaagcaagcgaagacaaaacccgatctagcaaatatactgggcattaaaccatccactctcacgtactgcttatataaactgaagccccagaatcagtatgcccagttcaacgtgccaaaaaaaaacggaggcgtgagggtgattaatgcccctactggcactctgaagtctatccaggctgcccttagtatcttgctgttagactgctgggatgagatcctcaagtctaagttccctgctagcgaaatctccagagagaaggccaaacatggaaaaacactgaaagtaaaatgcagcaactcagaaaccaaacagccttctctatcccacgggtttgaaaggaaaagatccatcataaccaatgcaatgatgcatctgggtcagaagcacgtttttaacattgatctggaggactttttcgggtcgtttaactttggtcgagtacggggctttttcatcaaaaatagggacttcgagttggaccccgaggttgccaccgtcattgcacaaatcgcatgtttcaacaacgaacttccacaaggaagcccttgcagcccagtgataacaaatctgatcacccatagtttagacatcaagttggcagctcttgcctcccggaactcttgcacctatacccggtacgcagatgacatcaccttctcaactaggaagagctccctccccaagtgtatagcccagaatcgtgacggggagttcttagtgggtaaaaaactgagatccgagataactcgctcaggttttaatatcaacgacaaaaagacacggaatcagtacaaagactcgcggcaagatgtaacaggactcattgtgaacaaaaagccaaatacgaagaaggaatactggagaaccgtgcgggctcagtgtaaccatctgttcaacaatgggttcttcattgagtctattaacgggaaggacgttaagggaaatataaaccgactggagggcaagctgaatttcatcgatcatgtcgaccattataatcgtctgaggcagacactgcccttgaaccccaagtaccagtataaaaaagacgctattaagaacgggcaagccaagctgcggcgctacctccacaccggaagagaggatacattttcaaagttcttgttctaccgccttttctatgccaatgatctccctacaattctaactgagggaaaaaccgacaatgtctatctgaaagcggccattcacaagttggccggcggctttccgaaactagccactgagaagaatgggaattcaccttataagctgctcactcgttttgtggaatataacgataggacgaagtacctgctggaactgtatggcggcgcggactaccttaaggatttcgttatcaactacaaccaccactacaagtactataaagctccaacccccaataatcccgtcattatctttgtggataacgacactgggcctagtggtttgatcagctacattaacaaaatacaggatagtgtgatctacccagatggcgtcaagaacattcgcgactctgattttgtccacatcttccacaacctgtacctggttctcaccccgaaagagaatggttacgatggcacagacatcgaacattttttcgtagaaaaagacagactcaggaaacacaagggaaagtgttttaatacagtggcagaccgcgatagcgaaaatgacctcagtaaggacgcgtttgctaaccatattgtccacgctcgaaagcacgagatcgattttagccgattcaacacccttttagaaagaattgtgaaggtgattgagcactatgattccatcaagtga

SEQ ID NO: 8334 - RNA, 1833 nt, synthetic construct
  source 1..1833: mol_type = other RNA
atgtcaaagcttcaggaccttaaaaaggcaaccacaaaaccagatctggcacatgtgctgggtgttaagccctcagtcttaacgtactgtctctatgtgctcaagactgaaaaccaatacacacagttcaaaatacccaagaaaactgggggcgagagagtcattaacgcacctactggcaagctgaaaacgatacaaagcctgctcagcaatttgctgctggattgtctggacgagattaaccacaaggcttttccaaagtctcagctggccaaagagacagtgaagaacgcagaagtgttgaagatcaagtgttcaacagccctggtgaagcagccagccctgagccacggatttgagcggaaacgttccatcatcacaaatgctatgatgcacctcggaaagaaacaagtgttcaacattgacctggaggatttctttggatcgtttaactttggcagagtgaggggattcttcatcaagaatcggaatttcgagctgcaccctgaaatcgccaccgtcattgcaaagatcgcgtgccacaatgacgaactcccacaaggcagtccttgcagtcccgtcatcaccaacctcattacacatgcactggacataaaattagccaggatggccagtaaaaactcttgcatctataccaggtatgctgacgatatgacctttagctcccgcgagtctacactctccaagaacattgcctatgaagacgataatatattcgttgtatccaagaaactgcgtgcggaaatcacgcggtccggtttcaccatcaatgataaaaagaccaggaaccagtacaaggactctcgccaggaggtcactggcctcgtggtgaataagaagccgaacacaaagaatgagtactggcgaactgcgcgatcccagtgtgatcgccttttcaaaactggcgggtttaccgagctagttaatggcgaagttgtgcccggcaatataaatcgactggagggcagactcaatttcatcgaccaggtggatcattataatagattgcgccagaaacttccgctcaaccccatttatcagaccaagaaagaggtactgaagaagaccaaccaggccaagctacgcaggtatttgcattcaggtcgtgaggacactttctctaagtttctgttttaccggttgttctacgccaatgaactgccgacaatcttaaccgaaggcaaaactgacaacatttacttgaaagcagcgattcagatgctagctaaaaatttccctagactggctactgaaaaaactgccgtgtccccttacaagttactgctaagatttgtcgagtacaccgagcggaccaagtttcttctcgagcttcacgggggggccgattacttgagagatttcgtgattaactacaagaagcactttgagtactataaggctcccaggcctgaaaatccagtgatcattttcgtcgataacgacacagggcccaacgatcttattaactacgtcaacaaaatcgaaggaatcaccatctatccatcaagtcagaatgaagttcgcaaatcggacttcgttcacgtattctgcaacttatatctggtgcttacgcctcgggatagcaacggtaatacagacattgaacatttcttcacgaacaaggacaggctcaggcagtacaaaggacgatgctttaatgtagagagcaaacgggatgttaaaaatgacctgagcaaagacgcctttgctaaccatgtcgtgcatgccaacaaggcttctatagactttgatggatttagtgggatgctggggcaaattgctaaagtgatcgagcactatgatagcatctga

SEQ ID NO: 8335 - RNA, 1833 nt, synthetic construct
  source 1..1833: mol_type = other RNA
atgtccaggctacaagaattgaagaaagcaaccactaagcccgacctggcaaaactgttgggcataaaacccacaatgcttacgtactgtctctatattctgaagaccgagaaccagtatgcccaattcaacatcccaaagaagaatggaggggaacggacaatcaatgcacccaccggcatcttaaaaagtattcagtctcttctgtcaaagctcctgctggattgcctggatgaaatcaatcacaagaaatttccgaagtctgaactggcacgcgaggtggccagaaacagcaaggttctcaagattaaatgtagcaacgcgctcattaaacagcccagcctgagccacggattcgagcgcaaaagatctatcataacaaacgcgatgatgcatatcggtcggaagaatgttttcaacatggatctggaaaatttcttcggctcatttaactttgggcgagtcagagggttcttcattaagaacaagcattttgagctgaacgatgaaattgccacggtcatagccaagattgcctgtcataacaatgagctacctcaaggcagcccttgctctccagtgatcactaatttaatctttcactccctcgacatcaatcttgccaaattggcctctaagaatagctgtgtgtacacccgatacgctgatgacataacattctcaagtagggagaaagagttacctaaagatattgcacacgaggacaacggagaatttgtactctcaaagaagctgaggtatgaaatcacacgcagtggtttcatcgtgaacgacaaaaaaactcgcaaccagcataaagattcccggcaggaggttaccgggttgattgtcaacaagaagccaaacacaaaaaaagaatactggcgcactgtgagggctcagtgcaacagtctctttaaaacgggggtgtttaccgagatcgaaaatgggaaagctatcccaggatccatcaataggctcgaaggcaagctgaatttcatcgatcagatcgaccattacaaccgtctgaggcaggcaccacccctcaacccaaaataccagccgaagaaggaagctattaaaaatggccaagccaagttgagaagatatttacactccggaagagaggacactttttcaaagttcctgttttaccgcttgttttatgccaatgagttgcccaccatcctgacggagggaaagacagataatgtgtatcttaagagtgctattcacatgttggcgaagaattacccgcagctgtctagcgaaaaaaccgataaatccccatacaagcttctgctgcgtttcgtagagtatactgagcgtaccaagtatcttctcgagctctatgggggtaccgactacctaaaggacttcatcatcggctataaacagcaccttaagttttacaaagctcctagacccgagaaacctgtcattattttcgtagataatgacactggtcctaaggacttaatcaactacgtcaacaaaatagatggcaaggagataagccctagcacagaagttgatattcggtcctcagagtttgtccatatcttctataacctgtacctggtgctcacacccaaagacaacaatatcaacaccgacatcgaatacttctttacagagaaggaccgactgcggcagtacaagggcaaatgctttaatattgtgtccaagagggacctagataatgatctgtcgaaagaggcctttgccacccatgtgattcacgctaataagaaggacatagatttctcgggattcactggcatgctggaccggattgtgaaggtgcttaagcactatgactctataaaatga

SEQ ID NO: 8336 - RNA, 1848 nt, synthetic construct
  source 1..1848: mol_type = other RNA
atggttaagttgaaagccctgaaagaggctaagacgaaaccagacctcgctcgcttattaggcatcaaaccgagccttctaacacactgcctttacgtgattaagacagaaaatcagtacatccagtttaagatccccaaaaagaatggtggggaaaggattataaatgcgccaaccgacaaactgaaatttatccaatccgctctttcaaatttgctgttagattgcttggatgagatcaattatgataagtttcccaagtccgatttcagtaacatcacaagcaaaagagctaaggtgctcaagataaaaattccaaacagcaacattcgtcagcagagcctgtcccacggattcgagcgcaagaggtcaattattaccaatgcaatgatgcacctgggcaaaaagtacgtgctgaatatcgatctggaagactttttcgggtcttttaactttggccgggtgcggggattctttattaaaaaccgcaactttgagctctcccccgaaatagctaccgtcattgcgaaaatcgcttgccacaataacgagctgcctcaagggagtccatgtagcccagtaataacaaaccttatcgtccattccctggacatcaaactggccaaactggccgaaaaaaattcgtgtatctacacccgatatgccgatgacattaccttctcttgtagaaaaagggatctccccaaggccatagcatatgagcttaacggcgagttcattttatcaaagaaattgcggtcagaaatcactcgaagtgggtttaacataaaccataagaaaacgcggaaccagtataaagactctcgacaggacgtgaccggcctcatcgtaaacaagaagcctaatactaagaaagagtattggcgcacagttcgggcccagtgcgacaatctgttcaaaactggtgccttcaccgaactggtcgacggaaaagacgtcgagggtaacattaatcggctggaagggaaactaaattttatcgatcaggtggaccattacaacaggctgcggcagacacctcctctcaacccaaaataccagaccaaggaggatctgattaaaaataaccaagccaagctgagaaggtacttgcacaatggaagggagaagacgttctctaaattcctattctatcgcctcttttacgccaatgagctgcccactattctgacagagggaaagactgataacgtgtacctcaaagctgcaattcacatgctgtcaaaagattttcctaagctctccagcgtgcaaaccactacgagtaagtacaagcttttgttgcgtttcttcgaatataaggttaggactagatatctactggagctctacggcggcgcagattatcttaagtcctttgtgatcaactatcgctaccagtacaattactacaaggcacccaagccggagaatcctgtgattattgtagtggacaatgacacaggtccaaatggcttgatcaattacgtgaacgggataaccgagaaaaagatcttccctagcgcatctaaggacatccgaacatcggagtttgtccacatctttaacaacctgtacctggtgttaactcccaagggactgggcgggtgcaacaccgatattgaatattttttcactgacaaggaccgtctgagaacctataaaataaaggactctctcaagtgtttcaatacagttgacaagagagatcccaacaatgacctttccaaggaagtcttcgccacccatatcgttcatgcgaacaagaaagatattgatttcagcggattcaaggtgatactcgaaagaatcgtcaaggccatcgaccactatgatagtatcaagtga

SEQ ID NO: 8337 - RNA, 1836 nt, synthetic construct
  source 1..1836: mol_type = other RNA
atgcagaagctgcaactgttaaagaaaactaaaaccaagcctgatctggcccacttgttaggaattaaaccatctgccctgacttactgcctctacatcgttaagacagagaatcagtattcccaattcaaggttcccaaaaaaaacggtggcgaacggattatcaatgcgcccacagccgctttgaagtcgatccagagttcactgagcaatctgttactagactgcctggacgaaataaacgccgagaagttcccaagtagtgagattgtgaaggaaaaggcgaagaattctaaggttttgaaggtgaaatgctccaacgcaaagacgaagcaaccatccctgagtcacgggtttgagaggaagcggtcaattattaccaacgccatgatgcatctcggcaagaagcatgttttgaacatcgatttggaggacttctttggcagctttaattttggacgggtgcgaggatttttcatcaagaataaacacttcgagctctctccggagatcgcgactgtaatcgccaagattgcctgtcacaaaaacgagctgccacaggggagcccttgttcccctgtcataacaaacctgatagtccattctcttgacatcaaactcgcaaggctggcatccaacaacagctgtatttacactcgctacgcagatgacataacatttagcaccagaaatagagaacttcccgtggctctggcctctgaaagggacggagaatttatcctcagcaaaaaactccgttccgaaattcgccgcagtggttttctgatcaatgataaaaaaacgcgcaatcagtacaaggactctcgacaagatgtgacaggcctgatagtaaataagaagcccaacaccaaaaaagagtactggcggaccgtgcgagcccagtgtaattcactatttaaaactggcgggtttacagaactagtcaacggggaagtagtgaagggtaacgctaacgtccttgagggcaaactgaatttcatcgaccaggtggaccattacaaccgcttgcgccagtcaccacccctgaatcctaagtacaataccaagaaagaagccatcaagaacaatcaggcgaagttaagacggtacctccatagcgggagagaggatactttcagcaaatacctgttttattcccttttctatggcaatgaacttcccactatacttacggaaggtaagacggacaatgtgtatctcaagtctgctgtgcatatgttggctaagtcattcccaaaacttgcttcagagaaaacagccaccagccgatacgagctcctgctgaggttcgtggagtataccgaacgtactaggtatctgctcgagttatatggcgggacagactacctgaaggatttcattatcaactatcgtcagcactttaaattctacaaggctccgaaacctaagaaacccgtcattattttggtggataatgatgtgggacctaagaacctcatcaattatgtcaaccacattgagggcaaaagcatcttccccagctctgccaaggatatcagagcttccgactttgtgcacatattccacaacgtttatctggtgctgacccctcttggaaaagaaaactcggagacagacattgagtatttcttctccgacgcagatcggctgagaaaatacaatggaaagtgctttaacaccgtgagtaaaagggacccagattcggatctatccaaggactcatttgcaacccacgtcgtacacgcaaacaagaaagatctcgacttctctaggtttaaggggattttcgatagaatggttaaagtcatcgagcattacgacagtatcaagtga

SEQ ID NO: 8338 - RNA, 1833 nt, synthetic construct
  source 1..1833: mol_type = other RNA
atggagcagttaaaaagtcttaaaaaggttacgaccaagcctgagtttgctcaattgttgggcattaagccatccgtattcacctattgcctctacgtgatacgccccgagaatcaatacagccagtttaagatcccgaagaaaaatgacggctataggacaattaacgcacctaccggaaccttgaagacaatccagtctgcattatctaatctcttactcgactgcctggacgagatcaataaagacaaattccctagtagcgagatgttcaaggcagaagccatcaattcaaaattcctcaagatcaaatgctctaatagtgtgattaagcagcctagtctgtcacatgggtttgaaaggaaacgctcgatcattactaacgccatgatgcacgttggaaggaaaaatgtcttcaacatcgatcttgagaactttttcggcagctttaattttggccgcgtgcgaggtttctttatcaagaacaagaacttcaagctctgtcccgacatagcaactatcattgctcaaatcgcctgcaataacaatgaactgccccagggcagtccttgctcccccgtaattactaacctcattgttcatagcctggacctgcgactagcgaagctggcttcgaatgattcctgtatttatacacggtatgccgatgatataaccttctctacaagagaaaacaagttccctataaacatagccaaggaagacgacaataagtttcactccagcaagaaattgaactccgaaattaaatcagctggttttgtcataaacgataagaagacacgaaaccagtacaaggattctagacaggacgtcacgggcctgattgtgaataagaagccgaataccaagaaagagtattggcggactgtgcgcgcccagtgtgactcactgtttaagactggggaattcaaagagctggttggggatagctatatcatcgggaacattaatagactggagggcaagctgaactttattgatcaggtggatcactacaacaagctgaggcaaagtgtgcccttgaatccaaagtattacctgaagaaagaggccaataaatcccaggccaagaaaagacgctacttatacaccggccgtgagattaccttttccaatttccttttctaccgtctgttctacgcatccgaactgccaactatcctcacagaaggtaaaacagataacgtctatcttaaagcggccatccatatgcttgctgacaagcactctagcttagccagcgctaaatcaggtaattccagctataaattgctcctgaagtttgtggagtacagcgagagaacgaagtatctgctggaactgtacggaggaacagattacctaatggacttcatcaaaaactacaacctgaactacaacctctataaagcgccgaaacccaataatcccgtcattatcgtagtggataacgacgatggacctaaagggctgattaattacatcaacaagatcaaggacgcaaagcttttcccacagacagctaaagatatcaggtcaagcgagtttatccacatcttcaacaacctctatctggtgctaaccccacggacggaagacaactgtccaactgatatcgagtacttttttactgacaaagatcggctgcgggaatacaagaacaaatgtttcaatacccactctaatagggacaccgagaatgatctttctaaagactcctttgctaaccatataatccatgccaataagaacgacattgacttctcacggttcaacgggctcctaaacagaataggaaaggtgattgagcactataatttgggcaaatga

SEQ ID NO: 8339 - RNA, 1839 nt, synthetic construct
  source 1..1839: mol_type = other RNA
atgacacagcttcaagccctaaaagatgctaaaaccaagccggacttggcccgcctcctcaacattaagccatccatctttacgcactgcatctacatcgtcgatactaagaaccagtatacccagtttacaatccctaagaaaaatggcggcgaacggaccattaactccccctcagataaactgaagaagatccagaagagtctctcaaacctgcttctggactgtctcgatgaaataaataagctgcagtttcccgacagtgagatcagtcgccctcgggctagcaactcaaaatatcttaaggtgaagtgctccaattctaaaatcaaacagccttctctcagccatggctttgaacgcaagaggagcattattaccaactcaatgatgcatgtgggcaagaagcacgtttttaacattgatcttgaggactttttcgggagcttcaattttggcagggtacgcggattcttcattaaaaacaagaacttcctcctcgagcccgagatagctacggcgatagctaaaatcgcctgctacaataacgagctgcctcaaggtagtccctgttcgcccgtgattacaaatctgataacacacagcttggacatcaaattatcgaagttagcgttctataactcttgcatttattctcggtatgccgatgatattactttctccactaatgaaagcaagatgccaagacatattgcgagatcagtggacggggaattgattgtgggaaagaagctttattccgagatcaggaggtcaggcttctccataaacaagaataaaacccgagatcagtacaaggattctaggcaagacgtaacaggtctggtggttaataagaaacctaacacaaagaaggagtactggcggacagtccgtgcacaatgtaacatgctgtttaagaccgggagctttaacgaggttttgaacggtgaaataatcaaaggtaacatcaatcgcctcgaaggacgtctgaactttattgatcaggtggatcactacaataggctgagacagcacccagcactggaagctaaatatcagagtaaaaaggaggccctgcacctgagaaatatggccaagctgaggcggcatctgcataacggccgagagaacaccttcagcaagtttatcttctacagactattctacgcaaatgaaacccccactgtgctgacagagggcaaaactgataacgtctacatgaaagctgcaatccatatgctcgcttcatcttacccgcagctggcacaggagaataatggcagtaccccatacaaactactgatgaagtttgtcgaatactccgaaagaactcgatatttgctggagctgttcggaggggcagactaccttaagacttttgtcatgcactaccgccagcactacaaatactataaggctcctaaagccgataatccagtgatcatcttagtagacaatgacgagggaccaaaggaccttatcaactatgtcaatgggataaagtctaaacacgtttaccctacgagctccaaggacattcgatctgcagactttgtgcacatcttccataacttgtacttagtgatgaccccgagagggaataataatcaacacaccgacatagagtatttcttcaaagatttcgaccgtctcaggaaatatcagggaaaatgtttcaacaccatttctaaacggaaccccaacactgacctctccaaggatagttttgccaatcacatcatccatgcccacaagaagtccattgactttagcggattcgatgccatcctgaatcggatcctattggccattgaccattataaaagcagaaaatga

SEQ ID NO: 8340 - RNA, 1851 nt, synthetic construct
  source 1..1851: mol_type = other RNA
atgcagaagatcgaagcactccgcaaaattaccacaaaaccagagctggcagccctgctcggcatcaaggccagcgtactgacctatgctctgtatatagtgaagccccagaatcagtacatccagtttaagatcaagaagaagaatggcggcgagagactgatctcggcgcctactgacaaactgaaatctattcaaagcgctctgagcgatcttctgttggactgtctggatgaaatctacaagtccaagtttcccgattccgaaattgctaagcagaagcttaagcactcgaaggtgctaaagatcaaaattgggtctgccaaaaacaagcaacctagcctctcacacggatttgaacgcaataggtcaatcattaccaacgccattatgcatatagggaaaaaaaacgtcctcaacatcgacttggaggattttttcggttcgttcaacttcggacgaattaggggcttctttatcaagaatgagaactttaagctggactccaacattgccactgttatagcccatatagcgtgttgcaacaaggagttaccccagggtagcccttgctctcccgtcattaccaatttgatcgctcatagtctggatattcgtctcgccgccctggccaaaaaacactcctgcacatatacacgatacgcagatgatattaccttttccacccgcgaagataccttcccagaatccgtaatgagacaagaaggaggtggctacatagctggaaagaagctcagaagtgagatcagacgcgccgggtttagcataaaagagagtaaaactcggattcagtatgccgacagccggcaggacgtgacggggttaattgtgaaccagaaacccaacgtgaaacgagagtattggcgcaccgtccgggcccagtgtaattcactttttaagacaggcaagttcgttgaggtggccggagaggagcaaaccgtcggcaatatcaacgtgctagagggtcggctgaacttcatagaccagctggaccactataatcgacttcgtcagaaacctgctctggatccgaattaccatcttaagcgcgatgctttagtccagcagaaaaaggcaaagcaacgttctcacttattgaattctagggaaaaggtgtttagtaagttcctgttctataggtacttctatgcattcgataagcccttgatcctgacagaaggcaaaactgacaacacctacctcaaatctgctatctggaaacttgcggcgcattacccaaagctggctaaggccaaatctaatactagtgcttacgagctcctgctgagatttttcaactacacagagaggacgaatttcctcttagaactagcgggaggcggggattattttaaagacttcgccagtggctacgcagagaattataagaagtacaaagcccctcggccagagcacccagtgattataatcgtagataatgacagtgggccgaaggaccttgtcaacctaatcgcaaccaagaagatcgggagcatttaccctacgaaccccgcacactcaaacgtggacgtgagaaattccgactttgtgcacttgtttcataacctctacatcatccttactccactcagcgctgggtcttccagctcagacattgaactgctgttcaaagacgtggatcggctgaggttgtataaaggaaagtctttcaatacagctactaaaagggataatagcaaagacctctccaaggaggcatttgcaacacatatcgtgtcagcccagaaaaacatcgtcaatttcgatggtttcaaagaactgttggacagagttgtttccgttattaaccactacgactcagtaaagtga

SEQ ID NO: 8341 - RNA, 1848 nt, synthetic construct
  source 1..1848: mol_type = other RNA
atgaggaagttgaactcactggcacagatcaccactaaagcagagctggccgccctcctgggaattaagacctcgttcttaacacactgcctctatgtcattaagcctgcaaatcagtacacgcagtttaagatcgctaaaaagaacggcggcgagaggacaattaacgcccccacgaatagattgaagagcatacagtccgccctatcccatttactacttgactgcctggatgaacttaatagaaagaaataccctgcgagcgaactggccaagtccagtgcccagcattcccatatccttaaggtgaaatgttcaaacactaagaccaaacagcctagcctaagccatggttttgagcggaaacgatctatcatcacaaatgctatgatgcacaccaacaagaaaaacgttttaaacattgacctcaaggagtttttcaactcatttaactttggaagggtcaggggtttcttcataaagaatgacaacttcaagctggacccccacatcgcaaccgtgatcgctcagattgcatgttataataacgagttaccacaggggtccccatgcagcccggttattaccaacctgatcacgcacagtctggatatacggttggccttgcttgctcaaaagcattcttgtacttatactcgatatgccgatgatataacatttagtactcgtgagagtatctttcccccgcaaattatgagagaagaaaacgggcagttcatagctggtaagaaacttcgctccgagataaggcggtctggcttctcaattaacaacaagaaaaccaggattcagctcaaggattcaagacaagacgtgactggcttggtggtcaaccaaaagcccaacactaagaaggaatactggagaatcgccagagctcagtgcaataatctctttaatacaggcgctttcactaaaaccgtgaatggagagacaataaagggcaatgtgcgcgagctggaaggccaactgaatttcattgaccagctggatcactacaaccgcctgcggcaaaagtcccctctgaatcccaaatatcatctgaagaaggacgagattatcaaacagaagaaagcgaaacaacgcagctacctttttagcggccgggaaaaaactttcagccagttcctcttctaccagtttttctacgcctctgacaagcctaccattctcaccgaagggaagaccgataatgtgtatctaaagaccgcaatcaacattctggctgcaaattttcctgaccttgccaaaacaaagacagtcaccacaccttatgaattactcctgcggttcgtagagtactcggagcgtaccaaattcctgctcgagctgcatggaggtaccgactatcttaagcactttatcatgggctacgagagcaagctgaaacgttataaagctcccaaacccaagcacccagtgattatcgttatcgacaacgacacgggaccgcagggactcctgcattacgtggccaatatctcttctgccattattagtccaaactccctgattctgaaacaggattaccgaaaagctgattttatccacatctttcacaacctctatatcgtcttgacaccacggggggccgggaacacacacacagacatcgagtatttcttcaaagatatcgataggctccgaacctacaaagggaaatgtttcaatactgtagcgaatagagatgaagaacgcgacctgtcaaaggatgcctttgcaaaacagattataaaggcgcagaagaaagttgtagacttctctaatttgaagccactgttggagcgctttgtgatggtgatcaaacactacagtactatcaattga

SEQ ID NO: 8342 - RNA, 1908 nt, synthetic construct
  source 1..1908: mol_type = other RNA
atgacaaagctagaattactccaggcagccaagacaaagtcagacctcgccagtattctcaatatcccccccagggcgctcacataccggttatataaaataagaccagagtcgcagtaccacactttttcgatcccaaagaaaaccggaggttcacgcaccatcagggctcccgagaaagaactgaaaaacatacagtcagcactgtctaaccttctgctcgactgtttggacgaaatcaataaaaagaggtttcctaacagcgagcttgccagccctaaagctcggcacgcaagaacactgaaggtgaagtgtaactccgctcgacagaagcaaccctccatttcccatggcttcgagagaaatcggagcatcattacaaacgccatgatgcacattggacagaagaatgtcctgaatctagacctcgctaatttttttgagagctttaacttcggcagggtccgagggtatttcctcaagaacgaaaactttaagctgacacccgaggtatcaaccaccatagctcagatcgcatgtacagacaactctctgcctcaggggagcccatgcagccctgttataaccaacttgattactcagtccttagatatccgcttggccgcgctggcaaatcgccatagttgcatctatactcggtatgccgatgatataacctttagtacacgcaagaagagttttccctcccagatcatcagaaattctcagggcatccagacactggggaagaaattggcttcagaaattaggagatcagggttttctgttaatcccaagaaaacccgggttttgtatcactcttctcggcaggaggtgactggacttgtcgtgaaccaaaaaccttcagttaagaaagactattggcgccttgtgcgagcccagtgtcatcagttgtttacccatggtagctaccttgaagaagtggacgataattttgtgaccgggagcattactgagcttgaaggaaaactgaatttcatcgaccagatcgatcattacaatcgcctgagagagaaaccaccattggatccacgataccactacaagaaggacgctctggccaaatctagcagcagcaaaagtcgtgagtacctgttcaacaatagggaaaagacattctcacaattcctattcttcaagtacttctacgcaaatagtacgccaacgattctgactgagggtcacactgataacatttatctcaagaccgcactactgcaactgtcttcgaattatccgtccctcacaaaaggatcaccacccaagctgagctgccacctatttaactacacggaacgtactaaattcttgctggagctggccggcggcacggactatctgaaatctttcgtggagaagtacaacactcgttacgagaagtacaacgctcccaccccgacccagcctgtaattatcgtggtcgataatgatagtggtccatccagcctgctgcactctctcaagaagtatgatcaagcgaagctctttcctacgaacttaaagattagcgatataaacgacgtaaagaagtccgagttcatctggattttccataacctgtacttagtcctgaccccgctcaagggaaagaacgataccgacatcgagtccctttttaaagagaaagaacggctgcggaaacacaatggcaaatgcttcaacaccgtggagaagagaaacgaggaaaaagacctttctaaagacagctttgccaggaatattatccgcgccaacagaaaatccatcgacttctccaacttccatgggctcctgaataggataactgccgtgcaaaaacactatgaaggcattaagaatgacaatggctccaaggatatccagccgttccttgcgacattgctgaaaccctcccagagtcctccttga

SEQ ID NO: 8343 - RNA, 1839 nt, synthetic construct
  source 1..1839: mol_type = other RNA
atgggtagactcgacgaactgagggctgtcaagacgaaatcggaattagcgaaactcctgggaattaagccatcgttcctcacgtaccaattatatgtggtagggctggcttctcagtacaagaacttccacatccccaagaaatcaggcgggttgcggtccatcacagcaccagatgctaaactgaaaagcatccagtccgccttaagtaatctactcctggactgcgtggatgagattaacaaagagactttccctagatcagagttggctaacgaaaaggcccagcacgccaaagtcctgaaaattaagtgtaacagtgctcgcaccaagcagccgtctcttagtcacggcttcgagcgtaaaagatctattctcaccaatgcaatggttcatgttggacagaaaaacgtcctgaatatcgacctccaggacttctttgccagcttcaactttggtagagttcgcggcttcttcattaaaaacagggaattttcactcacgcccgagatagctactacaatcgccaaaatcgcttgctttaataatgaactgcctcaagggtccccaagtagccccgtaattacaaacttgatcacccatagcctggatataaagctcgccggcctggcagaaaaatacagctgtctgtacagtagatatgcagacgatataactttctcaactcgggaggagacttttccacatcagataatgcgtgaaacccgaggggaataccagcctgggaaaaggctcagaagtgagatccgaaggtccggatttacgatcaacaataaaaagacccgcattctatatcggtcttctaggcaggatgtcacagggcttgtggtgaatcagaagccatctgtgaaaaaggaatactggcgcactgctagagcccaatgtcattcgctgttccggaccggaaaatttactaagtccacagatggtcagatcttcgagggtaacataaacgaattggagggccagctcaactttattgaccaggtggaccattacaaccggctacgacagaaacccgccctgaatccacggtaccacctgaagaaggacgaactgtcaaagaataaagactccaagaagaagaggcaatatttactgaacagccgagagaagacattctccaagttccttttctatcgcattttttatgccaataccaagaccaccattctgaccgaaggaaaaaccgataatacctacttgaagagcgccatcagagagctgagccactcttatccctcccttgctaaacctaatccttatgagcttcaatgccagttcctgaattattctgagcgcacaaagtttctcctcgaattgcacgggggaggcgattacttcaagagctttgtggagagttacttggagaaatttcgtggattcaccgcgcctaagcccaaccatcctgtcatcatttttgtggataacgacaaaggcccccaggagcttatctccaggatcaagggcctcaagggcgtgcagatccacccgatccatcttgatattcagaaggatataaggcaagcagaattcctgcaccttcgcgccaatctgtacttaattctgactccgcaaactagctccctaggcgagacagacatagagtactttttcaaggataaggaccggctgaggcagcacaatggtaagtcctttaacacagtgaaaaaacgggacgaggcaaaagatctgagcaaggccgcctttgcacagcatatcgtaaagtcacaaaagaagtctatcgactttagcgacttcacattgctgctggatcgaattgttgcggtgcagaatcactatgactcaatcaaatga

SEQ ID NO: 8344 - RNA, 1833 nt, synthetic construct
  source 1..1833: mol_type = other RNA
atgagccgacttgaaaatctccgggccgtagtcagtcgaccacagctcgcaaacctgctggggatcaggccatcgttcctcacgtataccttgtatgtgcgcggggtgtcaagccaatattgtaagttctcaatcccaaaaaaggccggaggcaaaagatacatcaaggcccctcagaaagaactcaagtacatccaatccgcgctgagcactctattgctggactgccttgacgagattaacaaagaaaagtttccaaagtctgagcttgtctcacccaaggcagaacacagtaaaactcttaaagtgaagtgcaactccgcacgggtcaaacagccaagtctgtcacatggctttgagcgtcagcgttctatcattaccaattcaatgatgcacttagggaaaaagaacgttctgaacatcgatctgaaggacttctttcagtcttttaactttgggcgagtgagaggcttcttcattaaaaacgagtacttcaagctggaccctaccatagcaacaactattgcgcaaatagcctgctatgataatcagctcccccagggatctccgtgttcccccgtcattacaaatctgattgcccattctctcgacattcgcttggctcgcttggcaaagaagtactcttgtacctatagcagatacgctgacgacattactttctccaccagggagaggatcttccccccgcagctcatgcgagaggatgatggtatctatacacctgggaagaggctgaagtccgagatacagagaagcggattcagcctgaatgatcggaaaactagaatcctgtaccgggacagtaggcaggatgtcacaggtctggttgttaatcagaagccaaacgtgaagaaggaatattggaggaccgtccgcgctcaatgccattggctttttaacattggtgcatttacaatggtcgtggatggcaaagatatcgagggaaatatcaacgctctggagggcaagctaaattttatagatcagctggaccactacaacaggttacgccagaagcccgccctgaatcccaaataccagctgaaacgggaggtgaaggggcgtgattcactcaaagctagacgctacttgttttcagccagagagaagactttctcccagttcctcttctatagactgttctatgcgaacgacaagcctactatccttaccgaaggtaaaaccgacaacatttacttaaagtccgccattcaatccttagccgcgtcgtaccctaagctcgccatcgagaatccttatcaactgttgtgtcattttgtgtcctacacagaacgcacccggttcttgctagagctttatggcggagctgattacctgaaaggcttcatagactcctataaggacaattttgaaatgtacaaggctccgaaaccccgccacccagtgatcgtgtttgtggacaatgatagcgggcccaaggatattatcagccgggtgaatggattaggcgaggcctctgttttccctcccaagatcgagaaggtaaaagacgttagaaaagccgacttcactcacctcatgaaaaatctctatctagtactgacgcctaggtctgaagctgataaagacacggatatcgagttcttctttaaggacgaagatcgactgcggaaatttaatggcaaatacttcaacaccgtagataaccgtgacgaaaccaaggacctgagtaaggaagcatttgctaggaacattgtgaaatttcagcggaaaagcattgactttagtaagttcacaagcctgcttgacagggttgtggccgtgatcgatcactacgagacaataaaatga

SEQ ID NO: 8345 - RNA, 1830 nt, synthetic construct
  source 1..1830: mol_type = other RNA
atgtccaaactggccaaattgcgagcggcaaagacaaaacctgaactggctgatgttcttggagtgcatccttcattcctgacgtatactttatatgtgcgcggcactaacagtctctacacttcattcaacatacctaagaaatccggtggcgtccgcaccattcaatctcccgatagcgggctcaagtccatacagtcagcactctctaacctcttgcttgattgcatagatgagatcaacctggccaactttccagattcagagctggcaagtcctaaagctagccactcgaatatcctaaaggtcaagtgtaactccgcaaagacgaaacagccatccttgtctcacggatttacccgtcaccgctctattattactaacgcaatgatgcacgtcaataagaaagccatccttaacattgatctgaaggacttcttttcgagcttcaatttcggcagggtgagggggttttttattaagaacaagaacttcgagctcgatgacaatgtggccaccaccatagcccagattgcctgtcatgacaatgaacttccacagggtagcccatgctcacccgtgatcaccaacctgatcacccacagcctggatatccgactggccgacctagcgagaaagaatagctgcacatactccaggtacgccgacgacatcacattttccacagggaaacgaaaatttccctctgagattgtgtcggaggagaatggtatttgtgctctgggaaaaaaacttaagtccgaagtgcggaggagtggcttttctattaacagtaagaagactcgggttttatacaaggatagtaggcaggatgtaactggcctaatcgtgaacaagaaacccaacatcaaagcggagtattggagaacagtgcgggctcaatgcaatttgctcttcaagacgggtaagttctatgacttgatcaacaacaaggaagttgaaggcaatatttatgagctggaggggaagttaaattttatagaccagctggaccactacaataggctgcggcagaaacctgcgttgaatcctcaatatcacagacagaaggacgcacttgctaaaggcgggaaccagaaacagcgacgctacttatataacaatcgggaaaagaccttctctaacttcctgttctataaactgttctatgctaatcccctgaccatgatcctgactgaaggcaaaaccgataacatttacctgaaggcagccctgagtaggctcgctacagcctttcccagcctggctaaatcacagccgtacgagccactgtgccaattctttaagtacacagagcggacgaggtttctgctggaactccatgggggaggtgactactttaaatccttcgtggggtcctacgaagagcgctaccgtctctataaagccccaaagcccgctaaccccgttatcatcttcgtcgataatgataccggaccggaccagttgataagccgtattaagggaatgaagggcatcggcatctatccgacatcactgaacaaaggcgatatcagaaagagtgacttcgtccacataagcaataacttatacctcatccttactcctcagagcaacacaggagacaatacagacatcgagtatttttttaccgactttgacagaaagcgcccatacaatgggaagtgtttcaatactgtgaagctcagaaatgacaatgttgatctatctaaggatgcctttagccggcatattgtgcaggccaaaaaaaatgtcattgacttctctggattccataagttgctcgaaagaatcgtacttgtacaaaaccattacaaaaccctgtga

SEQ ID NO: 8346 - RNA, 1821 nt, synthetic construct
  source 1..1821: mol_type = other RNA
atgtctaggctcgacaggctgaaggccgtcaatacgaagcctcagttcgcaagacttctgggtatacatcccagcttgctgacatatacgctctacaaaaagcggcccgagcactgctatcatgagttcaaaattcctaagaagagtggcggcaaacggacaatcaacgcgccggacgaaaagctgaagtcgattcagagagctttggcagacctactgctcgattgccttgatgagattaatgccgtgtactttccatctgcagagactctgaagccaaaggcaaagcacgccgatatccttaaggttaaatgtaatagcgctttgtcaaagcagccagctttgagtcacggatttgagagaaaacgctctattctcacgaatgcagtgatgcacttagataagaagcacctcttaaatatcgacttaaaggacttcttcccctcatttaattttggccgtgtgagggggttcttcatcaagaacaaccactttaagctgcacccgtctacagccacacttattgctcagatcgccatccttaacaacgaattaccgcaggggagcccctgttctcccgtcatcgccaatcttataacccaccatcttgatatccgcctggcgagtctagccgctaagtattcctgcacttatacccggtacgccgacgatatcacgttcagtacccgaagagccgcattccccagacagatcatgaacgagaaagatgggggatacattccttccaagcgtcttgcatccgaagtaaatagggccggctttcgcattaactctcagaaaactaggattctctacagagatagccgacaggaggtgaccggcctagttgcaaataagaaagtgggagtcaagaaggagtattggcgaaccctgcgggcccagtgccattccttgttcaccactgactcattcacaaaaatcgtcgatggcaaaaaggttgaaggcaacatcaatgagctcgaaggccaactgaatttcgttgatcaagtcgacagatacaaccgcttgcgccagaaacagccactgaacccattgctggccctgcggtcagagcaaaagaacggagacaaaaagagtaagaggcacctgctcaataatcgagagcggaccctgagcgactttctcttttacaagctgtttatttcgaactccaaaaccacaatcctcaccgaagggaagactgacaacacctatttaaaatccgcgatccaggccctggccaaacgcttccctactctcgctgaaactaaaccctaccagcctctggtacaattcatgaactacagcgaaaggacccggtttctgctggagctgttcggaggatgtgactacctcaaggcatttgccgaaaactatagctccaggcgcaagaagtatctgaaagagaaaccaacaagtcccgtaatactacttttagataatgaccaggggcctaaagacctgataaatcggttctccaaggataagtctattactctcttgccctcaacaagcaaaaacataagagatgctgagtttgtgcatgtgtgcgacaatttgtatctcgtgctcacaccaatttctcctaaacggaaagaaacagacatagagtacttcttcatggctaaaactagactgctaaaggatagcaaaaccggtaaatgttttaacaccatctcaaaaagggatgaaaagcgtgacctgtcaaaggaggcttttgcgcaactggtgaagactaacaaagggagcatcaacttctcccgctttggtcctctgctgacccgaattacaaaggtgcagaaacattacgccgctctgtga

SEQ ID NO: 8347 - RNA, 1857 nt, synthetic construct
  source 1..1857: mol_type = other RNA
atgagcaagctaaaatatctcaagagtgtctccaccaagcccggttttgccaaagccctcggtgtcgacgccgtattcctgacacgatgtctttacataaatcagccagaaacacagtatcaccagttctctattgccaagaaatccgggggcaagagggtgattactgccccgtccgacgaattaaaatcactgcagaaaagactgagcatacttcttctggattgcattgatgagattaacgctaccaaataccctaactcccaaagagcaaggcctaagctgcgaaagaatggcgatccagattacgccgccgaggtcctcaagatcaaggtgccaacaaccgaaatcaagcagccatctctgtctcacggattcgtacgcgagcgtagcataatcactaatgctatgatgcatgtcggaaagaagcatgtcctaaacatcgacctcaaagatttcttcgatagctttaatttcggtagagtgaggggcttcttcatcaaaaacgttaacttccagttagacccccacattgctactgtgatcgctcagattgcctgttttgataacaaactgccccagggctcaccctgctctccagttataactaatctcataacccatgcactggacatcaggctcgcttcgttagcaaagaagtataagtgtacttacacccggtatgcagatgacattacattttcaacccgtaaggcggactttcctcctcaaataatgagacaggatactgacgggtacattgcaggtaagaaactgaggtctgagatcgagcgcgcaggctttgcgatgaatacctccaagactaggattcagtacaaagacagtcggcaggatgttacaggactggtcgtgaacaagaaaccgaacacaaaaaaggaatattggcggctcgcgcgagccaaatgcaaccagctatttaaaaccggaaaattcacgacgatacacgacgggaatgagattgagggtaacctgaatgagctggaaggccagctgaactttatcgatcaagtggaccactacaatagaatgagacaaaaagctcccttgagcatggagtacgagcataaaaaagtaaccaagtccactagaaacatcttgacagggcgagaacggacgtttagccagttcctttactatcggctattttgcgggaacgacaaaccaacaattctctgtgagggaaaaactgataacgtctacctgaaatcagccatctcagaacttagtacaagctacccccaattatctgtgaccaaggatggcaagtatgaattgctggttcgctttgtagaatactccaagcggaccaggtttctgctggagttgtttgggggcgccgactatcttcgcgggttcattgataactttgagaaaaacatgcgcctgtatgataaggtgaagccaaaacaccccgtgatcgttttcctcgacaatgacgaaggccctaagcaaatcgtgaacctcctgaaacagaagtcctttcaggataaaatcgaactgattccgagctctatgaataaaatggacgacatccgctcctcggagtttatccatgtggtgaagaacctttatgtcatcttcacgcctttgaccgaagatggaaaggagacagacatcgagtatttcttcgatgaaaaaacccggttgtttaaacaccctaagaatggaaaatgcttcaacacaattagtaagcgtaatagcaagaaggacctctcaaaagaggctttcgctacccatgtgatcaaggagaagaagaaggacgttaatttcaatggcctgaagcccttgctggacagtattgtgaaggtgattaatcactacgacagtatcaagtga

SEQ ID NO: 8348 - RNA, 1854 nt, synthetic construct
  source 1..1854: mol_type = other RNA
atgagcaagctcaggcatcttaagagtacatccagcaagccgggctttgctaaagtccttgatgtggatgcagcttttctaacaaggtgcctgtacatcaaaaaaccggagactcaataccaccaatttagcatcgccaagaaatctgggggaacacgggtgatcaacgctccgtcagaagaactgaaatcgctgcagaaatcccttagtaagctgctcctggattgcatcgatgagataaatgccactaaatatcccaattcccagtggtcaaagcctaagctgcgaaagaatggcgagacggattatgctgccgaagtgctgaaaataaaaattccaaccgccgaaaccaagcagccaagcttgtcacatggattcgtgagggagaggtctattattacaaacgccatgatgcacgtgggcatgaaacatgtgttgaacatcgacctgaaggacttctttgattcgttcaatttcggcagagtgcgaggatttttcattcggaacgcgaactttcaactggacccccacgtcgccacagtaattgcgcagattgcttgttacgacaacaaactgccacagggtggaccttgctctcccgtgatcaccaatctgattacacactcccttgacatacggctcgcaagtctggcgcgcaaatataagtgcacgtacacacggtacgctgatgatatgacattcagcacccggagagctgacttcccagcacagattatgaggcaaagctccaacgagtacctcgcaggcaaacgtctacgtagagagattgagtctgcgggctttgcaatcaattctaacaaaactcgcgttcaactgaagaacagccgacaggaggttaccgggttagtagtgaataggaagcccaataccaagaaggagtactggcgtctcgcccgggccaaatgtaaccatctatttaaaatcggacgcttcaccgtggccaaaaacggcaataatgttgagggtaatttaaacgagttggagggtcagttgaattttattgaccaggtcgaccactataatcgcatgaggcagaaggccccttctattcctgagtatgcatcctccaaaatagggaagaataccaagaacctgctcacggggagagaaaaaactttctcccagttcctttactacaggttattttacggcaacgataagcctactgtcctctgtgagggaaaaactgataatgtttatctgaagtcagccattagtgagcttaacaagtattaccctttactcgtcgatgtaaaggacgaagaatatgatctatctatccgctttgttagatatagcaaacgcactcgattcctgctggagatctttgggggggccgactatctcagaggcttcattgacaatttcgagaagaacgtgaagctctacgaggctatcaagcctaaaaatcccgtaatagtgtttctggacaatgatgaaggaccacagcagatcgtcaagctcctgagtaccgaacgcttccagaaaaagatcgaaattatcccatctaagctgaacaagaaaaacgacatacggaaatcacacttcatacatgttgtcaagaacttgtacgtggtgttcacccccttgacccatgaaggtaaagagactgacatcgagtacttttttaatgataaggccagattgatcaagcacagtaacggcaaatgttataatacagtcaagaacagagacgcaaaaaaagacctgtcaaaagacgctttcgcaacgcacatcatcaaggaaaacaagaagagcatcgatttcgaagggcttaagcccctgttaaactccattgtgaatgtgattaaccactacgaaaagatcaagtga

SEQ ID NO: 8349 - RNA, 1854 nt, synthetic construct
  source 1..1854: mol_type = other RNA
atgagcaagcttaatagactccgcctgatttccaccaagccctctttcgctagaatcctcggtgttgacgccgcattcctgacgaggtgtttgtatataaacaaaccagagaaccagtatcatcagttccctgtgaagaagaaaagcggaggggaacgaatcatccatgcccccagtgacgaattgaaatctctccagaagtgcctgtctatattactgctggactgcatcgatgagatcaatgcgaagaaatatccccactcccagcacgttaagccaaagctccgcaagaatggagagcctgattacgccgctgaggtcctgaagataaagattccctctgcattaagcaaacagtcaaccctcgctcacgggtttgtgagagatcgaagtataatcaccaatgccatgatgcatgtgggccagaggcacgtgctcaatatcgatctgaaagactttttcggctcctttaactttggcagagtgcgagggtttttcatcaaaaatgctcacttccaactggaccctcatatcgccaccgtaattgctcagattgcgtgttttgataacaaacttccacaaggcagtccatgttcacctgtgattacaaacctcatcgcccatagcctcgatatcaggcttgcgtccctggccaaaaagtacaagtgcacttacactaggtacgccgatgacattacatttagcactagacaggctgagttccccgcaggacttatgaagcaagatgctaattgttatgtcccgggtcgaaagttaaagagcgaaattgaacgggccggcttttacattaatggaaacaaaacccggatacagcacaaagactctcgccaggaggtgacaggacttattgtgaataagaagccaaacatccgtaaagaatattggagattagtccgggcaaaatgcaatcagctattcaagaccgggaaatttacatctaaagaggaagagaaggaggttgaaggcaatttgtacgagctggagggtcagcttaattttatagaccaggtggatcactacaaccgtctgagacagaaaagccctctatcaaacgaatatgctgtcaataaggtagggaagaacacccggctgattctgacagggcgtgagaaaactttctcacaattcttgttctaccggatgttttgtgggaatgagaaaccgacaatgctgtgcgagggcaagaccgacaatgtttacctgaaggccgccatctcctcattgaaaggaaactacccgcaactggcacgggtttccggcgagaagtatgagctgctggtaaggtttgtggaatatagtaaaagaacgcgcttcttcttagaattgttcgggggcgccgactatctgcgcggttttatcgactcgttcgaaaggaacatgaagatttacaactcaatcaagccagtcaaccccgtgatcatattcctggataatgataagggatctcagcagatcgtaaacctattgacaagcaaaacatttgtgaaccggattaagctgtttcctgtgaccctcgacgcaaagcaggacattaggaagagcgagttcatacacatcgttaaaaatctgtatgtgatcttcaccccccttactaacactggcaacgagactgacattgaatacttttttgacgagaagacgcgcctcatgaaacatagtaacggaaaatgctttaacaccctacaaaataggaattccaaagcagatctctccaaagattcgttcgcgactcatatcgtcaaggaaaagaaaaaagacatcgatttcatcggtttcaagagtctgcttgattctattgtgaaggtcattaaccactacgactccctcaagtga

SEQ ID NO: 8350 - RNA, 1854 nt, synthetic construct
  source 1..1854: mol_type = other RNA
atgagtcggctgaagagattaaaaagtgcttcgacaaagcctgagtttgctaaggtcttgggaatagacgccgcctttctcacacgttgtctgtacattaacaaacccgaaaaccagtatcaccagttctctattccgaaaaaatccggcggagagagattaataaacgccccatcagaggaattgaagagccttcagaaaaatttgtccattctcctgctggactgcattgacgagatcaattctgaaaagtaccccgattcacaatggtccaagccaaagctgcgaaaaaacggcgatcctgactacgccgctgaggtcctcaaaattaagatcccaaatgctcaggtgaaacagccatcactttctcacggttttgtgcgggagcgaagtatcctcaccaacgccatgatgcatgtagggaaaaagaacgtgttgaatattgacttggaatccttctttgactcatttaacttcggcagagttcgcggctttttcatcaagaacgctaattttaacctcgacccccatatcgccactgttatcgcgcaaatcgcatgcttcgacaacaagctgcctcaaggcagtccttgtagccctgttatcacgaatctgattagccacacacttgatatccgcctggcatccctggcaaagaagtataattgcacctatacgagatatgcggacgacatcacctttagtactcgcaagtccgagttcccaccccagataatgaggcagaatgagagtggatacgtgcctgggcgcctcctgaagagcgaaataaagagatccggcttcagcattaactctagtaaaactcggatccaatataaaaacagccgtcaggacgtgacaggcctggtggtgaacaaaaaacccaatgtcaaacaggaatactggaggctagctagagcaaagtgcaaccagctcttcaaaaccggtaaattcacaacaattaaggacggaaacgagatcgacgggaatctgaatgaacttgagggtcagttgaatttcatcgaccaggtggatcattataataggatgcgccagaagacgcctttatcaaccgattatacccacactaaggtgggaaaaaataccaaggtaattctctctggacgggaaaagacctttagcaacttcctgtactacaggcttttctgcggaaatgagaaaccaaccattctctgtgaggggaaaacagataacgtgtacctgaagtccgcaatcagcgaactgtctaaggattacccacagctcgcccatagaaagggaaataaatatgaactgcttgttcggtttgttgaatactcaaaacggtctaggtttctgttggaacttttcggcggggccgattacctgaggggctttgtggataactttgagaagaatatgaagctctacgatgccatcactcccaagcatccggttattgtgttcttagacaatgatgaggggccccaacaggtggtcaacttactaaagagcaagaactttcaaaagaagatagagctaatccctagcactctggataaaaaagaagacataaggaagtctgagtttatccacgtcatcaagaacctgtatatcgtcttcactcccctcgctaaggatggcggggagacagatattgagtatttctttgacgataagactcgtttgatgaaacttccgaatggtaaatgtttcaacaccgtaaagaatcgcgattccaaaaacgacctgtcaaaagacgccttcgcaacacacatagtcaaagagaacaagaccaaaattgacttcaatggtctgaaacccctgctagaatcggtggtgaaggtaattaatcactacgattccctgcgatga

SEQ ID NO: 8351 - RNA, 1854 nt, synthetic construct
  source 1..1854: mol_type = other RNA
atgagcaaacttaaaagacttcgctctgcttcaaccaagcctcagctagcacgcgtactggaagtagacgccgcctttttgacccgctgcctgtacatcaacaagactcagaaccaatatcaccagtttagtatcgcgaagaagtcaggtggcactcgtctgatcaatgccccctccaaagaattaaagagcttgcaaaaaaagctctccatacttctactggactgcatcgatgagatcaacgcagagaaatacccacggtcccagttggtgaagccgaagttaaggaaaaatggagatcccgactatgccgctgaagttctgaaaattaagatatctaccgcagaaacaaagcagccttccctggcacatggcttcgttaaggagcgctccatactgacgaatgcgatgatgcacgtggggaagaagaacgtcctcaatatcgatcttaatgactttttcgactgctttaactttggtagagtgcggggattcttcattaagaacgaaaacttcaagctcgaccaacacatagccactgtcattgcccagatcagttgttttgataataaactcccacagggctccccatgttcgcctgtgatcactaatctcatcacccatagcttagacatcaggttggcttcactggctaagaagcacaaatgtacttacaccaggtatgctgatgacattaccttctcaacacgtctgtcagaatttccagcccagattatgtggcatgattctacaacgtatcgggccggtaaagccctaaggaaagaaattagtcgcagcggtttcagcattaacaacagcaaaaccaggatccaatacaaggattcaagacagaatgtgacagggttagtcgtgaacaagaagcccaacatcaagcaggagtattggcgcctggtgcgagcaaagtgcaacaaattgtttaagacgggcaaattcacagtggttgaggacggtgagaaaaaagatggcaacatatccgagctggaaggccagctgaactttatcgatcaggtagatcattacaacaggatgcggcagaagccccctctgtctaccgattacagtcacaatagggtggggagaggcacccgaagcattctgaatggccgagaaaagaccttttccaagtttctgttctttagactcttctacgggaatcaaaagcccacaatcctctgtgagggaaaaaccgataacatttacctgaagtctgcaattagcgagctcagccagtcctatccacaactgagcagctctaagggagatgattatgaactcctcgttcggttcgtcaaatacaccaagcgaactagatttttgctggagcttttcgggggagcggattatctgcgtggcttcattgacaatttcgaaaaaaacacgaaggcctatgctaaaataactcccgaacaccctgtcatcatttttctggataatgacgaggggccgaacaatatcgtcaaactcctgagggacaaagggttccagaaaaagatcaacctggttcctccaacactggacaaatccgagggcatccggaaggccaatttcatacacgtggtggagaacctatacattattttcacaccactcacccctgatggaaaggagacagacattgagtacttctttgatgacaaaactagattgatgaagcatcccaatggaaaatgctttaatactttgcagaagcgggactcgaaagtggacctttctaaagacgccttcagtacacacatcatcaaagagaaaaagaagcagatcgactttaacgggcttagacccctgcttgactctgtcgtgaatgctattgaccattacaatagtgtaaagtga

SEQ ID NO: 8352 - RNA, 1860 nt, synthetic construct
  source 1..1860: mol_type = other RNA
atgtcaaaactcaaccgcttaagaatcgccagttctaagccagattttgctaaagtcttggaagtagactcgtcatttctcactcgcgtcctgtacatcaataagccagaatcacagtatcataagtttacaatagcgaagaagtctggcgggctgagagaaatatcggccccctccatcgaactgaagagtcttcagaagtcactgtctaagctgctgctcgactgcattgatgagattaatgccaaaaagtacccctatagccaattgaacaaacccaagctgagaaagaatggtgaaaacgactacgctgcagaggtcctgaagattaaaatacccacttcctctataaagcagccaagcatttctcacgggtttgtgcgggaccgctccatcattactaacgccatgatgcacctggggaaaaaaaatgtcctcaatatcgatctcgaggatttttttggctctttcaatttcggtcgtgttcggggcttttttataaagaacaagaatttccggctcgatccccacatagcaacaattattgctcagattgcatgttacgataataaactacctcagggatctcctagtagcccagtcatcaccaatttgatcacgcatagcctggacatgaggttggctagtcttgctaaaaagttcaaatgtacctatactcggtacgcggacgatattaccttcagcacccggttaatcgagttcccagctcagatcatgaaacaaaacgaggatggctacatcgctggtaaaattctacgccgcgagatcaaacacgccgggttcagtattaacgagtccaagacccgtattcagtataaaaacagcaggcaggacgtaactgggttaattgtgaacaaaaagcctaacacgaagaaagagtactggagactcgtgcgggctaaatgcaaccatctttttaaaaccggctatttcgtgagtatcgttgatggcaaagagataaaaggaaacattaacgagctagagggacagctcaacttcatcgatcaggtggatcactataaccgaatgaggcagagagcccctcttaatccagagtacgccaggtctagcgtgggaaaacatacacgaaacctcctaactggcagggaaaagacgttccgcaatttcctgttttatcgacttttctgtggcaatgacaagcctacaatcctgtgcgagggaaaaaccgacaatatttacctgaagtccgcaattagtgaactggtgaaggaatatcctcagctggcacgaaaaaaggcctccgagtatgaattgttggtaaggttcgtggaatactcaaaaagaaccagattcctgctggagctgtacggtggaactgactatctgcggaacttcatcgactcatttgaagcgaacatgaaagtttacagcaacatcaaaccgaaaaatcccgtgatcctttttgtggataacgacaaggggacatccaatattaagaacctcctgtcttccaagagctttatcaagaagattaagatcagccccagcagcatcgataagaatgagcaaataaggaagtcccaatttatccatgtagttaagaatctgtacgtggttttcaccccgcttgcctccaatgacgactttaccgacgtcgaatacttttttgacgataaggcacgtttgatgaaacactcaaacggcaagtgcttcaatacagtgaggaatagaaatgacaacaaggatctctctaaggatgccttcgcaacacacatcgtgaaggagaacaaaaagaatattgacttcaccgggttcaaacccttactgaattcgatcgtcgaggtgatcaaccactatgaatccataaagaaagcctga

SEQ ID NO: 8353 - RNA, 1854 nt, synthetic construct
  source 1..1854: mol_type = other RNA
atgtctaagctgcaatcactgaagtccattagttctaagcctgaattagcaaagctgcttggagttgacgcagccttcctaacccggactctgtacattgtacgcccagagaaccagtatcaccagttcactatcgataagaaaagcggaggaaagcgagtgattaacgcgcctagtgaggagctcaagtccttgcagcgaaaactcagcaatctcctcttggattgcattgatgagatcaataagatcaagtatcccacttcacagctggctgctcctaaagtgagggaaaatggggacattgactatacagcaaaggtactgaaaatcaaaatcccaagcagcaagagcaaacaaccctcactgtcccatggctttagtcggaaaaggtctattataaccaatgccatgatgcacattgggaagaaaaatatccttaacattgacatcgagaacttctttgatcgctttaatttcgggcgggtgagaggttacttcattaagaacaatgacttcaagctggatccccatatagctacggtcattgctcaaatcgcatgttacgacaataagttgccccagggttccccctgcagccctgtgattagtaatttgatatgccacagcttggacattaacctgagctcattagccaagaaatacaaatgcacctatacaagatacgccgatgatatcacattttccacccgcaaatctgagtttcccaagaagatcgccgaacagaacgagggctactatacactcgggaacgaattgctatatgaaataaaaaggtccggattctcagtcaacaacggcaaaaccaggatacagtacaagaacagccgccaagacgtaacgggtcttgtggttaacaagaaaccaaacacaaaaaaggagtactggcgtttggcgagagccaagtgtaatgctctttttaaaactggcacgttcaccaccatcgaggatggcgtgtctgtcattggcaatctggatgaactggaaggacagctcaattttatagaccatgtcgatcactacaacaggctgagacagaaggcgccactttcaccagagtattcacttaaaaccattgggaagtccaccaatatcttgctatctgggagagagaaaacattttcgcagttcctgtattatcggctgttttacgggaacgagaagccgacaatcttatgtgagggaaagaccgataatatttacctgaaatccgccattagcgaactcatggcccattacccaagtctggcaatcaagacagacggcaagtacgaactgctcattaggtttgtggagtataccaaacggacccgatttttactggaactcttcggtggcactgactatcttaaggggtttatcgaaaactttcacaaaaacatggccccctataagaacttaaaaccaaagaaccctgtgatcatcttcctagataatgacactggccccagtaacatagtgtctctcctgcagggaaataagttccagaaaatgatcactctgatcccttcccatctggataaaaaagacgacatcagaaagagtgagttcatccatgtcatggataacctttacgttatattcacaccgctcggcaattcgggcgaggaaactgacattgagtacttttttgacgataaaacacgcctcatgaagcactctaacggaaaattcttcaataccgttgagaaacgtgataccaagaatgatctgagcaaggacgctttcgccactcacatcgtcaaggaaaaaaagaaatccatagacttcacgggtctgaaggtgctgctggaccctatcgctaaagtgattgagcactacaagaatatcaagtga

SEQ ID NO: 8354 - RNA, 1854 nt, synthetic construct
  source 1..1854: mol_type = other RNA
atgttaaatctagaacggctgaagcagatatcaaccaagcctgactttgccaagctgctgggtgtggatgccgcatttctcacaaggaccctgtacattgttaaacctgacaaccagtactcacaattcaccatcgacaaaaagagtggaggtaagcgaatcattaacgcccccagcgatgagttaaagtctctgcagaagaaactctcaaatctgctgctggactgcattgatgagattaatgctaagaagtttcccaaatcacagtccattaagccaaaactcaggaaaaatgacgagaatgattacgccgcggaagtcttaaagataaagattcctacttccgaatctaaacaaccatcacttagccatgggttcgtgcgtgaacgtagcattataaccaatgccatgatgcatattggcaagaaaaatgtccttaacatagaccttgagaatttcttcgacagttttaatttcggcagggtgagagggttcttcatcaagaacaacaactttaagttgaacgaccacatcgctaccgtgatcgcccaaattgcatgttacgagaacaagcttcctcaggggagcccttgcagccccgtgatatccaatctcataacccactccctagatatcaagttagccttcctggcacgcaagtataagtgcacatatacacggtacgctgatgatattactttcagcaccagaaaggatgatttcccaaaccagctggcaaggcacgacggaaatacgtatatcctgggaaaaaagctactgagagaaatcaaatcctctggcttcagcgtcaacaataacaagacccggatacagtttaaaaattcccgccaggatgtcacaggcctgattgtaaacaagaagcccaatacaaagaaagagtactggcggctggctcgggccaagtgtaacactttgttcaaaactggaacattcacttcgataaaggataatgtagaggtgaaaggcaacctgaacgaactggaaggccagttgaatttcatcgatcacgttgaccattataacagattgagacaaaaacctcccctggttccagagtacactctcaaaacaatcggcaaatctacaagaatcctcctgtctggccgcgaaaagacattctcccagtttttgtattaccgcctgttttgcggtaacgagaaacctacaattttgtgtgagggaaaaacggacaacatctacctcaaaagtgctatttccgaaatgaagaaggactacccgctcctcgctgatacgaaggacgatcattacgagcttctggtaaggtttgtcgaatataccaagcggacccgatttctcctggagatctttggtggagcggattacctaagggggtttatcgacaattttgagaagaacatgaagacgtatgagaatgtgcgaccaaaaaagccggttattgtgtttctcgacaatgacaccggacccgacaaaatcgtgaatctgcttcagggcaaaggctttcaggacaaaatcacccttatcccctctcacctggataagtcgtgtgatattcgtcgcagcgaattcatccatatcaccaaaaacctctatgtgatcttcaccccacgagggagcgcaggtgaagaaacagacatcgagtatttcttcgatgagaaaactcgcatgatgaaacactcaaatgggaagttctttaacaccattaagaaaagagacactaagagtgacttgagtaaagatgcctttgcgactcacatcattagggagaagaagaagaacatagatttcaaagggttgaaacccctgttagactctatcattaaggtgatcaaccactatgacgacattaaatga

SEQ ID NO: 8355 - RNA, 1848 nt, synthetic construct
  source 1..1848: mol_type = other RNA
atgagtaaactgaaactgctgcgaaaaatcacttccaaacccgaactagccaaattgatgggaatcgccccagtgtttctgaccaaatgtctctacgtcacacggccagagcatcaataccaccagttccagattgacaagaagtcaggcggaaaacgtacaattagcgccccgtccgaagaactaaaatcattgcagaaaaagctgagtcttcttctactggactgcctggacgagatcaactctgaaaagtttccatattcccaggtcccgagtcctaaaaaacggaataatggagacgactactctgccaataaactgaagatcaagattccgtctgcgaaaacaaaacagccatctctttctcatggttttgaaaggaatcggtccataatcacaaatgcaatgatgcatatcgggaaaaagaatatcctgaacattgatcttgccgatttctttgatcagttcaattttggaagagtgagaggcttctttataaagaacaagtacttcaacctcgacacacacatagcaaccgtaatagctcagatcgcatgctacgataataagctgccccaggggagtccttcgagccctgttataaccaatcttattactcactctctggacattcgcctgctatccctggctaagaagtacaagtgcaactatactcgctatgccgatgatctcactttttccaccagactcgacgatttccccgagcaaattatgaaacaagtcgacggcgagtatatcccctcaagtaaactgcttcacgagattacccgttccggttttactattaacaacaagaagacgcgaatccagttcaaatcaagcagacaggatgtcaccggcctggtagttaataagaagcccaatgttaagagcgaatattggcgccaggtgagggctaagtgtaactccctgttcaagacgggtgaattctttagcatcaagaacggcaaaattatcgagggcaatatcaacgagttgcaggggcaacttaactttattgaccaggtggatctgtataatagactcagacaaaagcctcccctgcagcccgaatttgaactgaagaaattggggacctcgaccaaacagatcttatcatctagggagaggacattttctcaattcctcttctaccgcctgttcataggaaacgacaggcctacaattctgtgcgaagggaaaaccgacaacgtatacctcaagagtgccatcaatagcttaaagggagactatcctagccttgccaagatggaggatgggaaatacaacttgctgataaatttcgtggagtacagcaagcgaaccaagtttctgctcgagctcagcggcggggcaagttacctccgggacttcatcctgaactatgagaagaacttcaaaatctacaaggatcattcccctaagtatcccgtgatcatctttttagacaatgattcaggtgcgaatacaattatcaatctcttgcagcagcgggaatggcagcggaagatttcgctgagccccaacacgctcgacaaaaaggacgatatcaggaaaagcaacttcatccatgtcgagtacaatctgtacgttatattgacaccacgcactccaattggcggcgacactgatattgagtatttcttcgatgacaagacaagactactggctcactccaatggaaagtgttttaacactgtgtctaaaaggaaccctaacaccgatttgtccaaagaggcttttgcaactcacattataaaggagaagaagaactcaatcgacttcaccagcatgaaaccattattaaacctcattgtggatgtggtgacggactataatacccgctga

SEQ ID NO: 8356 - RNA, 1011 nt, synthetic construct
  source 1..1011: mol_type = other RNA
atgtcaaggctggataaactgagatccaccagcacgaagtccgggtttgctgacgtgcttggagtatcagctgtgtttctcacacggtgtttgtacatcaacaaaccagaaaatcagtatcatcagttcaccattgataagaagactggtgggaagagagtaattaatagcccgtctaaggacctgaagtctctccagaagtcgcttagtgatctccttctggactgtgtcgacgagataaattctaaaaagttccctaagagccaactggcgagccccaagctgcgcaaaaataaagagcccgactatgcggccgaagtgctgaagttgaaaataccctccgccaattccaaacagccgagcctgtctcacggcttcgtgcgcaaacggagcataatcactaacgcaatgatgcatgttggctcgaagtacgtgcttaacatcgacttgcaggatttcttcgatagtttcaattttggcagggtgcgaggcttctttatcaagaacagaaacttccaactaaaccctgatgtggccaccgtcatcgcccaaattgcatgctatgataataaactcccacagggctcaccatgctccccagttatcacaaatctgatctctcactctttggacattcgactggctagcttagctaaaaagtacaagtgcacatatacccgttacgccgatgacattacgttctcaacacggatgcctacttttcccgtccagataatggcacagcaagacggttgttactaccctagtaaagctctcatcggtgaaattgagagggccgggttttttgtcaacaataagaagacaaggatcctgtatgaggactcccgccaggaggtcaccggactagttgccaacaagaaacccaataccaaaaaagagtactggcggacagtgagagcaaagtgcgacactctgtttaagaccgggaacttcagtactgtgattgatggcaagaaagttgaaggaaacttaaacgaactcgagggatga

SEQ ID NO: 8357 - RNA, 1854 nt, synthetic construct
  source 1..1854: mol_type = other RNA
atgagcaggctggagcacctgaaaagcataaccactcgcccttcgttcgccaaggcactcggcgtcaaccctagttttctcactagatgcctctatataattcgtcccgagaatcagtatcaccagttcgaaatcaagaagaaatcaggggggaaacgtattataaaagcaccttccgtcgacctgaagagcttacaaaagaaactctctgacttactgctggattgcatcgatgagataaatgcctctaagtttccaaaaagtcagttggcttctccaaaaatgaggaacaagaaagatttggactacgcagctaaagtcctcaaaatcaagatacctggagctgagagcaaacagcccagcctgagccacggatttgtgagggacaggtctataattaccaacgctatgatgcacctgggtaagaagaatgttctcaacatcgacctggaaaattttttcgatagcttttccttcggacgagtgtgcgcgtttttcatgacaaacaggaacttcaacctaaacaagaaaattgccaccgtgatcgcccaaatcgcttgttacgaacgaaaactgccacagggttcaccctgttcgcccgttattaccaatctgattacgcattccctggatatccgccttgccgtgattgcgaaaaaatataagtgcacttactctcggtacgcagatgacatcaccttctctacaaataaaagcacctttccctatcagattatgaatcagtatgctgacgcctatatcccaggaaaagagctgatctgggagatcgagcgagccgggtttagcattaatgacaaaaagacccggattcaatataaggattctagacaggacgttacaggcctgatcgtgaataagaagccgaacactaaaaaggaatactggaggaccgcaagagccaagtgcaactcattgtttaaaaaagggaagttcacttccatcaaggacaatgtagaaactgatggcaacattaacgaattggaaggacagctaaacttcatagaccaagtggaccattataatcgtatgcgccagaaggcaccttttatcccagaatacactatcaagaatcatggcaaaaacacaaagctgctgttatctgctcgagaaaagaccttctcccacttcttattctaccggctgttctacggtaatgataagcccacaattctttgtgagggcaagaccgacaacgtatatctcaaatcagccatctcagagcttcaggctaattatccgtccttagccacaattaaagataagaagtacaagctcctcctcaggtttgttgagtacagcaagagaacaagatttttgctggagctgtttggcggcgcagattatcttcggggtttcatagacaacttcgaaaagaacacaaaacaattcgaggctcctaaaccgcaacatcctgtgatcattttccttgataacgacgaaggaccccagcagattgtgaatctactacagagtaagagttttcataacaagatctcccttttcccagatgggctggacccaaagaaggatattcgcaaggccacattcctgcacattacgctgaacctctacgtgatctttactcctttgaatagttccggcaaggagacggatatcgagtacttctttgaccgcaagactagattgatgaagcactcaaacgggaaatgttttaataccgtcagaaaacggaattcccgcacggacctttcaaaggatgcctttgcgacccacattgtgaaagcccagaagaagcggatcaatttcaagaaattcaaaagtctcctggaccccatcaccaaagtcatcgagcattacaagacactgaaatga

SEQ ID NO: 8358 - RNA, 1851 nt, synthetic construct
  source 1..1851: mol_type = other RNA
atgtctcagctgaactatttgcggagaataagcacgaagccgtccttcgccaaggccctgggagtggatcctcggtttctcacacgctgtctttacattatcaagcccgagaatcagtaccaccagtttaccatagagaaaagaagtggagggaagagaattatcaacgcacccggcgacgatctaaagagccttcagaaaaaactctcagatttgctgttagactgcatcgacgaaattaacatcagtaagtaccctagcagtcaactcgctaaacccaaaatgcggaataaaaaggatttggattacgccgccactgttctgaaaattaaaataccgactgccgaaagcaagcagccatccttatctcatgggtttgtacgggaacggtcaattatcacaaatgcgatgatgcacctggggaaaaagaacgtcttgaatatcgatctgaagaatttctttgacagtttcaactttgggagagtccgtggtttcttcattaagaacaacaacttcaagctggatcctcatattgctacaattatcgcccagattgcgtgttatgataataagcttccacagggcagcccatgttcccccgttattactaacctcataacacactcactggacatacgactggcaaagctggccaaaaagtacaaatgcacctactccaggtatgcagacgatattacattctccacgcgtaagtcaaccttccctaaagagatcatgaatgaggacatcgacggctatacccctggaaaaaaactggtaggagagatcgtgcacgccggcttcagcatcaatcataacaaaacacggatccagttcaaagactccagacaggaagtgactggccttatcgttaacaagaaacccaacactaaaaaagagtactggaggactgctcgcgccaagtgcaataacctattcaagaagggaaagttcacctcaatagaggatggcttcgaaatagacggcaacctcgacgagttggaggggcagcttaatttcatcgatcaagtcgaccactataatcgaatgaggcaaaaagcacccctaaccgctgagtatgctattaacaacatcggaaagaataccaagaacctcctctctgcacgcgagtcgacatttagcaggtttctcttttataggctgttctacggcaatgataagcctaccatcttatgtgaggggaaaaccgataatgtgtatttgaagtcagctattagcgaacttctgcccaagtaccccagcttagcaaggatcgaagacaataattacaagctgctggtgcgctttgtggagtactctaaaagaacccgctttctcttggagctttttggtggagtggattatctgaaggactttatcaacaatttcgaaaagaacaccaagtgctatacagcaccagaacctaagcatccagtcatcattttccttgacaacgacgatgctagaatacctaacctgctgaagggtaaatctttcaacaagaaggtgacactgtttcccagtagtctcaattctattgacgacgtcaagaaggccgactttattcacatctttcaaaatctgtacgtggttttcacgccactggggaaatccggcgaggataccgatatagaatacttctttcacaagaaaacgcgtatgatcaaacactccaacggtaaattcttcaatacagtcgataagaggaatccagaagtagacctgtcgaaagacgcgtttgctatgcatatcatcaaagcccagaaaaagtctatcaactttactcgcctaaaaccgctgctcaatcgaattgtgaaggtgactgagcattatgaccagattaagaagtga

SEQ ID NO: 8359 - RNA, 1854 nt, synthetic construct
  source 1..1854: mol_type = other RNA
atgtccaaactcaaatacctcaaatctatctcaacaaagcctagttttgccaaagctctgggagtagaccctaggttccttaccagatgcctgtacataaccagacccgaaaatcagtacatacagtttacaatcgacaaaaagtcaggcggtaaaagaatcatcaatgccccgaaagatgacctcaagtccctgcagaagaaattgtccataatgctgctcgactgtattgacgagataaatattagcaagtacccttcttctcaactggctcagccaaaaatgcgaaataagaatgacctggattacgcagccgaggttctgaagattaaaatccagtccactgaatctaaacaaccaagtctgtcacacggcttcgtcaggaaacgttccattattaccaatgccatgatgcaccttggaaaaaaaagcatcttgaacatagatctggaggattttttcggaagtttcaactttggaaggattcgggggttcttcattaaaaacgagaactttaagctggatccgcatattgctacgattatcgcacaaattgcatgctataacgatcagctgcctcagggcagcccatgttcgccagtgattaccaacctgatcagccattctcttgatatccagctggccgccctcgctaagcgctacaaatgcacctattccagatacgcggacgacatcacatttagtacccgacgctcaactttcccttcggagatcatgaattatgagagtgattcttacgtgccaggacggaagctgataagggagatcaaaagggcgggcttcagcatcaatgagaaaaaaacccgtattcagtacaaggatagcagacaggacgttacgggtctggtggtgaacaagaagcccaacacaaagaaagagtattggcggattgctagagcaaagtgtaatgtcctgtttaaaacaggtaagttttcaagcatctctaacggcatcgaggtagaaggtaatattaacgaacttgcagggcaattaaactttatcgaccaggtcgaccactataatcgcatgcgccagaaagccccatttacaccagagtactcccctcgggtgatcggcaaaaacacgaaggtcattctgtccgggcgggaagttactttcagcagatttcttttctatcgtctattctatggcaacaataagcccacgatcttatgcgaagggaaaacagacaatgtgtacttgaaatccgctatatcagaattaatcgccgattatcccactctcgccaagatagaagacaagaaatacgaactgcaactgcattttgtagaatattctaagcgaactaggttcctcctagaattgttcggaggcgcagactacttgaagggttttatcgataacttcgagaagaataccttgcctttcaaggcccctctaccccagcatcccgtgataatctttctcgataacgacaaggggccagagaagattaagcaactgctccaggggaagaccttcaatgagaagatctcactcttccccaagggccttgatccgaagacagacgtgaggaaagcgaactttattcatgtgatcaagaacttgtacgtggtgttcacccccctaaaaaacacaggcgaagacaccgatattgagtatttttttgacagcaagacccggctcattccccaccagaatgggaagtttttcaataccattgagaatcgcaattccactactgatcttagtaaagaggccttcgctacacacataatcaagagcaagaagaagaacatcaacttcaagggattaaaacctctgctggatcgcatcgttgaagtcatcgagcactataacactattaagtga

SEQ ID NO: 8360 - RNA, 1857 nt, synthetic construct
  source 1..1857: mol_type = other RNA
atgccccggctgacccacctaaaaaccgtgtccagtaaacccgggttcgccagagccctgaatgtcgatcccaggtttcttacccggtgcctgtacgttgtgcgccctgagaaccaataccaccaatttagtatagacaagaagtcagggggccagaggctgatcaatgctccttctgatgacctcaagtctttgcagagtagcctgagcaacctgctgttggattgcatcgacgaaattaataagaacaagtaccctgagtctcaaatcgcgtcacctaaaatgctgagcccgaagaagaaagatcacattgcggaggttttaaagattaaaattcccagctccgaacacaagcagccgtctttatcccatgggttcgtgcgtgaacgctccatcatcacaaacgccatgatgcacctgggaaagaagaatgtgctaaacatagatctcaaggacttcttcgactctttcaactttggccgcgtgagaagctttttcatcaagaacatcaacttccgtcttgatcctagtatcgccacaatgattgctcagatcgcatgttacaaagataccctgccacagggttctccatgttccccagtgatcaccaacttaatcactcatagcctcgacatacgactcgcctctttggcaaaagattacaagtgtacgtacactagatacgccgatgatataacattctccacaaggaagagcgtgtttccccctcagatcatgcgggggaaagtcgatgataatcatggatatatacctggcgaaaagttaactaacgagatcaaaagggctggcttcctgattaaccacaaaaagacacgaatacagtataaggactcgagacaagatgtcacaggtctgatcgtcaatcagaggcccaacactaagaaagagtattggaggacagttcgcgctaaatgcaattttttgttcaaaactggcgagttcacctcgataaaaaatgacatagtggttgccggcaatattaacgaactggaaggacagctgaattttattgaccaagtcgaccattacaatcggattcgccaaaaatctccgctcaagccagagctggcactgaaaaatgtaggatccaataccaaactgcttctgtcaggtagagagaaaacctttagccagttcatcttttatcgcctcttctatggaaatgacaagccaacaattctatgcgaaggcaagactgacaacatctatattaagtcagcgatttccgagttggtcattagttatccaaaactcgctagagtagcaaagaatgagtataagcttctcgtccgatttgtggaatacagcaaacggaccagattcctcctggagctatacggaggggccagctacctgaaagattttattgtgaattaccgtacccagtttaaaaagtacaaagcagccaagccccagcaccctgtgatcatcattatagacaatgacgctgggccaaaggatgcaggcatctttggatatatcagtaatcagaaggaagccaagatctacccccagacccttgaccttaaaaaggacctgcgatcagcaaactttgttcatttgttccataacctgtatatcgtgatgacacccaaagggattaaggattgtgacactgacattgagtacttcttcacggataaagatcggctccgggagcactcaaaaaaatgctttaatacggtagctaagaggaacgctgacaaggacttgtccaagggtgcttttgccactcacattattaaggcccagaaaaagaacatcaacttcaacggcctgaagccacttctcgacaggatcatgatggccattgatcattatgacatcaacaagtga

SEQ ID NO: 8361 - RNA, 1860 nt, synthetic construct
  source 1..1860: mol_type = other RNA
atgttatccaggttgaaaaacctgaagggcgcggccacgaaacctcagcttgcctctatacttaatgtgtccccggtgtttctgacgaaatgtctgtacatcatcaaaccagagaaccaatatcatcagttcgaggtaaataagaagtctggtggaaagcgggtcattactgcccctagcgaggacctgaaggggctgcagtctaagttatcagaattgctcctggactgtatcgacgaaatcaatactctcaagtatccagattcacagctggtgagtcctaagaaaaacatatctaagaagaacgacccatcggctgaggttctaaaagttaagatatcaaacgccgccattaaacagccttacctctcccatgggttcacccggcagaggtctattctgaccaatgccgtcatgcacttgggccagaaatccgtcttgaacatcgacctcgaaaacttcttcgattccttcaacttcggtcgggttcgagggtttttcatcaagaacaaaaacttcgagctaagtccttcaatagcaacagtaattgcccagattgcatgctataaagataccctgccccagggttcaccatgcagccctgtgatcacaaatttaattacccatcacttggacatccgccttgcaagtctggcgaaaagatacaagtgtacgtacactcggtatgctgatgatatcacctttagcacacgcctttctgtgtttcctcccgaaatcatgtgtgacagcctgaatgggttcgcacccgggaagaggctgaaacgggctattaaacatgcagggttttcgattaatgagaggaagacacggatacaatacaaaaattcccgacaggacgtcaccggtctgatcgtcaataagaagcccaacgtgaagagtgaatactggcgaaccgctcgtgccaaatgcaactccctctttaacaccggccactttattaccaacaagaacggaagaagcgtggagggcaacatcaatgaactggaaggccagctcaactttatagatcaagtcgaccactataatcgcatgaggcaaagccccccacttagccctgagtacagtcttaagaactatggaaagcgcacaaacggactactgtccggccgtgagacagtgtttagcaaattcctgttctaccgactattttacgccaatgagaaacccactatcctctgcgagggaaagaccgacaatgtatacctcaaatctgctataaaccagctgcacaatcaatacaagcagcttgtgaacattggggatgagtacaagttgctggtcagatttatcgagtattccaaaagaacaaggtttctcctggaactctatggaggagctgattacctccgtggttttattgatacatatgcggtcaagagtaaaatctacaatgctccaaagccagaaaaccccgtaattatatttatcgacaacgacgacggcccgaagcagattgaaacactgctgcagtctcgcaattttaacaagaagactacactcgttccaaatactttagatccgaagaaagacgtgaggaaggcagagttcattcacgttatcgataatctgtatgtggtgttcaccccccgcggcgatcaggatgaagacactgatatcgagtacttcttcggagatgacgcccggctgagaaaacacaccaatggcatgttcttcaatactgttcagaacagagatcctctgaaggacttatcaaaagaggtgtttgccacgcagatcattaaggcccaaaaaaaacacatcaacttcaatgggcttatccccttgttggacagaatcgtgaatgtgattaatcattatgacagcgtgaagggcctgtga

SEQ ID NO: 8362 - RNA, 1143 nt, synthetic construct
  source 1..1143: mol_type = other RNA
atgtctcgtctgaagtatctcaaggttgctaagacgaagccacagctggcagatgtattgggggtcagccctgtgttcctcactaagtgtctgtacgtggtgaagcctgagaatcagtatcatcagttcgagatagacaaaaagagtggcggtaagcggaaaattacggctcctaaaaccgaattaaagtcccttcagtccaaactatcagaattgttaatggactgcatagacgagattaacaagtccaaattccccaactctcagcaggtgtctccaaaaaagaatatccaacagaagaaggaccccgctgctgaagtgctgaagattaaaatctctaactcagccatcagacagccctccctgtcgcatggatttaccaggcagagatctatcctcaccaatgcggtcatgcaccttggacagaagaacgtactcaatattgacctggagaacttttttgactccttcaacttcggccgcgttcgaggcttctttatcaagaacaagaactttgagctgagtccatcaatcgccactgtcatcgcacagatcgcttgttacaaggatacccttccgcaaggaagtccctgctcccctgttattactaatctgattacccaccacctggacattaggttagcaagcctggccaaccggtataaatgcacctacaccaggtatgcagatgatatcacattctccacgagactcagcatcttccccccagagattatgcgggatacattgaacgggtttgccccaggcaaacgactgaaaagggccatcaaacacgccggcttcagcattaacgagcgcaaaactcggatacaatataaaaacagcaggcaggatgtgaccggtctgatagtgaataaaactctaggggtcaagagtgaatactggcgaactgccagagcgaagtgtaatagcttgtttaatacagggtcgtttacaacagaacgcaagggggagctcgtcgaaggatctataaatgagctggaaggacagctgaacttcatcgatcagattgaccactacaatcgtatccgccaaaaagccccgcttcaacctgagtactcaatcaagaaggtgggcaaagagacacgccggctccatagcggtagagaaaaaaatttttga

SEQ ID NO: 8363 - RNA, 1890 nt, synthetic construct
  source 1..1890: mol_type = other RNA
atgtccaagcttaactacctcaggtcaatttcgagcaaaccagagtttgccaaggcactgaatatttctcctaaattcctgactcacactctgtatgtggtcagaccggaaaaccagtaccacacattcaacatagataagaaatcagggggtcaacgtaccatcaacgcccccagcgacgaattgaaatctctgcaggccgcattatccaatctgctgttagattgtgtcggagaaataaacgctagcaaatatccaaaaagccagctagcgagtcccaaactcaaaaacaacaagatcgatagcgattattcggcagaggtactgaagattaagattagcaatagtgccatcaggcagccaagcctgagccatggctttactaaggacaggtcaatcattaccaatgcgatgatgcacatagggaagaagaacatcctgaatatcgatctggagaactttttcgactgttttaattttggcagagtccgtggtttctttcttaagaacaagaacttccagttcaaccccgagattgcaaccgttatcgctcagattgcgtgctatgagaataagttgccgcaaggaagtccctgttccccaattatcactaatttaatcgctcactcacttgacattcagctggcctctctggctcggaagtacaaatgtacctataccaggtacgcagatgatattacctttagtaccaatttgagcaccttccccacagagatcatggcagaggaaaagggcatttatacaagtggcaagaagttaaagaacgagatagagcgggccggtttctccattaatgacaagaaaacacgcatccaatacaaaaattctcgccaagacgtcactggactggtggtgaataagaaacctaacgtcaaaaacgagtattggcgcacagtgcgggctaaatgcaactccctcttcaagacaggcaggtttatgacgaccaaaaacggcgtggaagtcgaagggaatatcaacgaacttgagggccagctgaatttcatcgaccagatcgatcattacaatcggatgagacagaaacccccccttgtttcagagtacgctataaagaagatcggaatcaacgaccacagtacgaaggaactccttactggacgagagaaaactttctctcagttcctgtactacaagagcttttatggaaacgataaacccacaatcctttgcgaagggaaaactgacaatatttacctaaagtctgctatttcagagctcgccattaattatcctaatctggcctccttcacctccgaaatatctaaaaaagggataccgtacaagaaatacaacctcctggtgaatttctttgagtactctaggagaacacggttcttcttagaactctttgggggagtaggagatctgaagaagatcatcctgaactttgagaagtcccagcgaaagtatcagtgctccaaccctaaaaaccctgtgattattctgttggacaatgacactggtcccaaagacatcgtggccctcctgcaaagaaagcctctggtgaataagatcaccctagtaccacaagggctggaccctaagaccgatgtgcgcaaggctcagtttattcatgtcacaagaaacttgtacgttatattcacgccactcgatcctagcggcaatgccaccgatatcgaatatttttttgacgacaagacgcgcctcatgaagtactcaggcaagtgctttaatactgtgaaaaaccgaaacggcacaacagatttgtccaaagacaacttcgccacccatattgtgaaagcacagaaaaaaggtgtggatttcaatgggctaaagccactcttggacagtatcgtttctgttataaaacactatgacaccatcaagtga

SEQ ID NO: 8364 - RNA, 1866 nt, synthetic construct
  source 1..1866: mol_type = other RNA
atgacaaagattgagctgctaaggaaggcaacgcataagcgggagctggcagcacttttaggatgtacaaccagcgctctaacctatgtactgtatatacttaaggtcgacacacagtacaagcagttcgagatcgacaaacgtaatggcgggaaaagaataatcacagcgcccactgacaggttaaaaagattgcaagcctccctttccaacctgcttctggattgcatcgacgacatcaaccgaattaagtatcccaatagccaggttaattcgccgaaacttatcaacaaaaagttcaaagacgcctcggctgacattcttaaggtgaaaattagcaacgctaagactaagcagcctagtctctcacatggatttgtgcgcgaaaggtccatcatcacgaatgccatgatgcatctcgacaagaagaatgttctgaatatcgatctgcacaacttcttcgattcctttaattttggcagggtgaggggtttcttcatttccaacgagaacttcaaattagacccaaatatcgctaccgtgattgcgcagatcgcctgttacgataacaagctaccacagggctctccctgctccccagtgatcagcaacctgatcacccatagcctcgacatccgcttagcctcactcgctaagaaaaattcatgtacctattctcgctacgctgatgacattaccttctctactaggaaatcagtctttcctaccaaaattatgagacaggaggacggcgagtacattccatctaaaaaactgcgcaatgagataaagaagtctggtttcacgattaacaacaagaagactagaatccagtacaaggattctagacaggacgtaactggcctcattgtcaataagaaacctaacgtgaaaaaggagtactggagaacagtgaaaagccagtgccactcactgttccaaaccggagcctttactaaaaaagtaggcgatgacatcgtcgagggaaatatcaacgagttagaagggcagctaaacttcattgaccaagttgatttgtacaataggcttcgacagaaaaaacccttgaatcctgtatacaaacacgcaactcacgggtataatacctccatcctcctcagtggtcgggaacggacattttcacgttttctctacttcaccttgttttacggcaacaccaagcccactatcctctgcgagggcaagacggataatgtttatctgaagtccgccattaacaaactggcagcaacataccctgctctggctcaggccaagacccccaacaaggaatatgagttgctgatcagatttctggaatatagcaaacggactcggttcctcctggaattgtacggacgcacaagctacctcaactatttcatcgggaagttcgacaagaactttaagttctacaaagctccaacacctcagcatccggtgataataattctggataacgacagtgggtttgtgggcaaaaaggattctgggattgccgggaaactgaagaagatcgatagtgcaaccgcctatccgacaacactgaagaaggatgactttcgcaacgcagacttcatacacgtgattcacaatctctacatagtcctgaccccccttggaacagccaaggaaaccgctatcgaggatctgtttgatgatgagacgcgtcaggtgaaggtcagtggaaagagtttcaatcacaaagatgaccgggataatgccaaagaatatggtaaagaagtgtttgcccaaaaagtcattaaggcccataagtcctctattaactttgatggcttgaagccactgctggaccgagtggttcaagcgatcgaacactatgacactataagcgcggccaaatga

SEQ ID NO: 8365 - RNA, 1845 nt, synthetic construct
  source 1..1845: mol_type = other RNA
atgaccaaacttgaggccttgaagaaaataacaaccaagaaagagctggctgcactgctgggtgtgaagacatccttccttacgtacaccttatatttcatcaaaccgcacactcagtatacccagttcaagattcctaaaaagaatggcggcgaacgtatcataagctctcctaatgggaagcttaaaaccctgcagaagaaactgtccattttattcctcgatagcatagacgaaatcaacaaggcgaaattccccgaagctgaagccttcaagaacatcaacgacaagataatgtactccccaattctgaaagtcaagataggatctgcaaagatcaagcagcagccctctctctcccatggatttgtgagaaatcgcagcatcattactaatgccatgatgcatctggggcagaagaatgtactgaatatcgatctcagcaacttttttgactcctttaatttcggtagggtgagaggcttttttatcaagaacgaccactttaagctggatccagcgattgccaccgtgatagctcagattgcctgttacgataacaagttgccccagggatcaccgtgctcccccgttataacaaacttgatcacccacagtctggatattagactagcctctctggccaagaaaaattcgtgtacgtacagccgttatgctgacgatatcacatttagcacacggaagaaatctttcccatccaatatcatgagcgaactgtcaggcgaattcaccccctcaaaaaagctaagttttgagattaaacgggccggcttcagcatcaataacgttaaaactcgcatccagtacaaggactctcgccaggatgtgacagggttgattgtgaacaaaaagcccaataccaaaaaggaatattggcgaacagttcggtcgcagtgtaataaactcttcaagtctggcaaatttaccaagactgtcaacgacaaagtggaggatggtaatattaacgagctggaggggcagcttaatttcatcgaccaagtcgatagttataaccgactaaggcaggcggttccgattaaccataattacgcaacctcaaagcacggacacaacactagtaagctcctgtccggaagggagcggactttcagtcggtttctttactacaggctattttatggcaacgataagccaactattatatgcgaagggaagactgataatgtgtatctcaagtcagccattaatcgcctcatgacaggttatcccacgttggcaaataaaaccctcaattcaaagtccaacaaaactgagtataagctcctgattaagatcctgaaatacacaaaacgcaccagatttcttttgcagctttacgggggcacgtcttatttgaactactttatctccaagttcgataagcagtacgagtattacgacgctcctaaaccacagcaccctgttattatactgctggataacgactcaggatttgattgcatcgagaaggagctgaaaaaggtgcaacccgctattatcctgcctccacctttaaaaaagcatgacttcaggaacgccgacttcatccatgtgttccacaacttatacatcgtgctcacccctatgaacaaccaacctaaaacaatgatcgaggatctcttcgacgtagcaactcgacaaatccaggtcgacaataaaacctttaacccagagaaagactttgacaagacaaaagaatacagcaagcaaatctttgctcaaaaagtggtcagtactcagaagagcaccatcaatttcgatggcttcaaacccttcctggacaggattgtcagagtaattgaacactatgacacaattaagtga

SEQ ID NO: 8366 - RNA, 1866 nt, synthetic construct
  source 1..1866: mol_type = other RNA
atgaacaagttgaaatccttgcaaaaagttagcacaaaaagcgaacttgcctctcttctgggggtgaaagccagcttcctcacacacaccctctacgtggtcaagcccagttctcagtatacgaacttcaagatccccaaaaagtccgggggcgagcgctcgataaatgctcctactaaaaagctgaagacattacagtcttgtctgagtaaactcctgctagactgcatcgacgagatcaataccatcaagtatccagacctcgcctcttacgaagtgacgcggaacaaaatcctgaaggtaaaaattcctaactcaaagatcaagcaaccaagcctggcgcatggatttgtgcggaatagaagcattataaccaatgccatgatgcacgtaaaccagaaaaatatcctgaatatcgacctgaacaatttcttcgacagctttaacttcgggagagtccgtgctttctttatcaagaacaagaacttcaagctgcccgagaacattgcaacaacaattgcacaaattgcctgcaacaataacacacttccacagggatccccttgtagtcccgttattagtaatctcatcacgcattccctcgacataaaacttgcctatctagcccacgagtattcctgcaggtactcgaggtacgctgatgatatcacattttcaactcgcaaaaaagctttcccgaccaaaatcatgtcctacgaaaacaactgttatgtggccggcaaaaagctgcagggagctatcaaacaagccggattttcaatcaatgacaagaagactaggattcagtataaggatagccgacaggacgtgacaggcctgatcgttaataagaagcccaatgtgaaaaacgagtattggcggagagtgagagcacagtgccactctttatttaccactggtcagtttaccaaggaattaaaaggggagatcgtggcggggaacataaatgaactcgagggacagctgaactttatagatcaggtggatcactataaccgcgtcaggcagtccccaccactggatcccaagtaccacctgaagcgagatgagctgttgaaaactaatcaggctaaggaacgccaatatctgtttacaggccgtgagcgaacgttttcacgctttctgtactacaggagtttttacgctaataacaaaccgaccattctgtgtgagggtaagaccgacaatatttacctcaagtccgccattagtgagagggtgaagcggcatccaacccttgcgtcacagaaaaagggcgctgtaccctacgagttgctgatcaatttcttcaattattcccctcggactagatttttgctggaactggcaggcggaactgactacctcaaagacttcgtaattaacttcaataagcacttcaacagctttaaggcaccaaaacctaagcatccggttattattgtgcttgacaacgataagggtcctaatggcttgcttcactatctgagcaacgtcaagggcgcatctataatccccaacaccttgaagcttaaaacagattatcgtaaggccgaatacattcatgtgttccacaacctctatgtcgtcctcacccctttatcaaacaagggcaagtcacaaaagatagaagatcagtacaccgatatagaaagcttattcaagaaagccgacctactgcgcacttaccagaaaaagtgctttaatatcgcttccaaacggaatgaagatattgacctctctaaaaatgccttcgcaaatcagattgtgaaagggcaaaagaaacaggttaacttttctggtttcaacaaactactgaacagaatcgaggaggtcatcaagcattacgacaatatgatcttctga

SEQ ID NO: 8367 - RNA, 1728 nt, synthetic construct
  source 1..1728: mol_type = other RNA
atgcccaaaaagaatggtggtaaacgggagattaatgctcccattgaaaagctcaagagtcttcagagctcgttgtccaatctgttgcttgattgtatcgatgagatcaataaagtcaagttcccaagatccgaagtgaataagaatcgtgataaatcctcgaaagccaacaatcatgaaatcttgaagatcaaggtcccgaatgccgacatcaaacaacagtccctctcacatgggtttgtgagaaacaggtctatcatcactaacgccatgatgcatctaggccagaagaatgtactgaatattgatctcaaagacttctttgacagctttaactttggccgtgtccgcgggtttttcatcaagaacaagaactttaagctggacagccacatcgccacggtgatagcacaaattgcctgctacgacaataagctgccccagggaggcccttgcagtccagtgattacaaacctgataacgcacgcccttgacattcgcctagctgcgctggcagagaagtattcatgtatttatacgaggtatgcggacgatttgaccttttccactagggaaaaggtgtttcccgaaaaaatcgccagactcgataatgggaagtatgccgcgggtaaaaaattaaagagtgagatatctcgcagcggattcagcataaacgataaaaagaccagggtgcagttcaaggactcacggcaggacgtgaccgggttagtagttaaccggaaaccaaatgtgaaaaaggaatactggaggactgccaaaagtcagtgccactctctgttccggacaggatcatttaccaaaatcgtttccgatgtcgtggtcgagggaaacatcaatgagttggaaggtcagttaaactttatcgaccaggtggactcttacaatcggctaagacagaaggctcctctgaactacgtctaccagttcgcaaaacacgggcacaacaccttaccgctcctgagcgaccgggagcgaactttcagccgatttttgtactatcgacttttctacggaaacgcaaagcctacaattttgtgtgagggcaaaactgacaacgtgtaccttaagaccgccataaagaggctggtttcagcttacccaaagctcgctaagactcgcgtgaattctgagacaaagaaaccatcctacgacctcctcgtgcgcttcctggaatattctaaacgcactagattcctgctgcaactttttggcggcacatcctacctgagctacttcattagcaagttcgaagcccaatatgctttctacaaagcaccaaaaccccagcaccctgtccttattgtactggataatgattctggcttctacaaggagatcgaaaataagctgaaaaaaatcgagacaccgaccgtgtatcctgttagcctgaaaaaacatgattttcgaaaggcggatttcattcacgtcatgcataacctgtatattgtgctaacccccctcagtgctaccggcaaagatacaatgatcgaggatctgtttgatgacaccgcaagaggagttgtcgtgtcaggaaagacattcaaccctaaggacggcagagacaacgccaaggaatatgggaaggaggttttcgcaaagaaagtaatacaagaccagaggaacaagatcaactttgatgggctgaagcccctcctggaccgtatggtgaaagctatcgagcactatgattccattaagaacagttga

SEQ ID NO: 8368 - RNA, 963 nt, synthetic construct
  source 1..963: mol_type = other RNA
atgaacaagctcaacaagttaaaggcggtgactacgaagcaggagctcgcagaattgctgggagtgaaggctagctttttaacttacgtgctatatatcctgcgaccagagaaccagtatgtgcagttcagtatccccaagaaaaatggagggaagaggaaaatcaacgcccctatagagaaactgaagtccctgcagagctctctttcaaatttgcttttcgactgtgtcgatgagattaacaaggttaagtttcccttctcagagataaacaaagaccgggatcggaattcaaaaaccaacaactacgagatccttaaagtcaaagtccctaatgccgatgtaaagcagcagagcctctctcacggcttcgtgcgaaacaggagtatcattactaatgctatgatgcatctgggtcagaaaaacgtcctcaatatcgacctcaaggacttttttgggtcctttaatttcggtcgcgtgagaggattcttcattaagaacaagaacttcaagctggactcgcacatagccacggtaatagcccagatcgcatgctatgataataagctacctcagggcggcccatgctcacccgtgatcaccaacctgattacacacagcttggatattaggcttgcagcgttggcagaacgctactcctgtatctatacaagatacgctgacgacctgaccttctccaccagagaaaagttcttcccagaaaagatcgcccgtctggacaatggaaaatacgtagccgggaaaaaactgaaatctgaaatttcccggagtgggtttagcattaatgataagaagacccgcgttcaatttaaggattctagacaagacgttacaggcctggttgtgaatcgcaaaccgaatgtgaaaaaagagtactggaggacagctaaatctcaatgccatagcctctttcggactggcagttttaccaaggtcgtgtga

SEQ ID NO: 8369 - RNA, 1851 nt, synthetic construct
  source 1..1851: mol_type = other RNA
atgaaaaaaatcgaggctttgcaagccgtgcggacaaagcccgaactggctagacttttaggtgtcaaggccagcatgctgacttacgtgctgtacgtgctgaggcccgaaaaccagtacagctccttcactatcccaaaaaagtctgggggcacgcggacgataaacgcaccacacgacagactgcgacttattcagcgagcacttagcgacctgctccaggattgcattgaagatataaacgactccaaacctaagagcgctgtgaaaggcaaattcatcgcagccaaaaaggacgacaacccagactacagacgccataaatttttcgaagacgtatttacccctactctgtcccatggctttgtaagaaaaaggtccatcattacaaacgcgatgatgcatattgaccggaagaatgtgttgaatatcgacctgaaggactttttcgatagttttaatttcgggcgggtgagaggtttcttcattgctaataatcatttcgggttgagccctgagattgctaccgtaatcgcacagatagcctgctacaatcacaaacttccacaaggcagcccttgctcacctgtgataaccaacctgataggccatatccttgatatcaaactcgctctgctcgcacgagagcacagttgtacctatacaaggtatgcagatgacatcacctttagtactcgtagtaagcactttcccgatgctttgatgagagagtataagggtatctacgtcccaggcctggagctagagaatcgcatccgccaagcgggcttccgcgtcaattctaagaagaccagaatccaataccaggattcaaggcagatcgtcaccgggctagttgtcaatgagaaaccgaacatccgctctgagtactggaggactgccaagagtcagtgtcacctgctgtttaaaacaggcgccttcacagaaggagataaggagaagtctctccctggaaacattgagcagcttgaggggcgcctcaactttattgaccagctggatttttacaaccggttacgccagaaaccgcccctgaactcagaatacgttctagaaaagcatggcgtggatactcggaagttgttaggcggacgggaaaggaccttcgggcgttttctatattacagatcgttttacgcttcatcctctccaaccattttatgcgaggggaagaccgacaatatctatgtgaaggccgctattaaccgccttgccgccgattatccctccctcgcccgagtcaaagcctccgagtccgaatataagctgctggttagcattttcaagtatacaccccgaactaggtttttgctgggactctacggaggggccagctaccttaaggaatttatcacacgtttcgaggaagcctattcttactacaaggcgccagacccagagaatccggtcatcatcattatggacaatgacgggggctttgacggagtagatagcctgttaaagggtaagaaactccacgctactcccttccctaaaggtgccggaaaactggaatatagaggcgcggacttcatccacgtgaccaaaaacctgtatattgtgctgacccctatgtcctcatctggcggatccagtgagatagaagacctcttcacgcctagcacgaggagtgagccctttgatggaaagcacctgtgtctcgagaaagatatagatagggcaacacagtatgggaaggatacattcgcaaataaggttattctccccaagaagaactcaattgatttctctggtttcaaagtgctgttggaccgggttgtgatgtgtatcgagcactataagtcagcaaaactcgccttgtcgaaatga

SEQ ID NO: 8370 - RNA, 1848 nt, synthetic construct
  source 1..1848: mol_type = other RNA
atgaaaaagattgatgcactgagaacagttactacaaaacctgagttggcgagactgctgggaatcaaagcgtccatgctgacatacgtgctttacgtgttgaggccagaaacacagtactccatttttgagattcccaagaaatctgggggtacccggaccatcagcgctccacatgacaaactgaaatccatacaacgcgccttggcggatctgctccaggactgcattgaggacataaatgactctaaacctaagtccgccgtgaaaagcaagttcatcaactccaaaaagaatgacaatccagactatcggaaatccaagtttttcgaagatgtcttcacccctactatcagccatggctttgtgcgtaaacgttccataattaccaatgcaatgatgcacctcaaccgaaagaacgttcttaacatcgatttaaaggactttttcgactcctttaactttggaagagtgagggggtttttcatcgccaatgaccacttcggattggacgagcatattgccacagtaattgctcagatcgcttgctacgagcacaagctcccccaggggagtccctgtagcccagtgatcaccaatctcatcgggcacattctggacatcaaactcgcattgctcgcacgggaatatcgatgcacctacacgcgatacgcagatgatataacattttctacaaggtcgaaggagtttcctgttgaactgacccgggaatacaagggaacctacatcatcggttcggtactggaaaaccggatcagacaggctgggtttcggatcaatccacgaaagactaggatacagtataaagacagcaggcagactgtgacgggtctggtcgtcaatgagaagcctaacgtgagaagcgagtactggcggactgtcaaatcacaatgtcacatgctctttaagtctggcgccttcactgaagatgggcccgaggaaccggtacccgggaacattgatcagctggagggacgactgaactttatagaccagctggatttctataaccggctaaggcaaaagcccccgctcacccctgattacatgctggaaaagcatggggtcaatacccacaaactgctaagtggacgcgagcgcacattctcacgcttcttatattatagggctttctacgggaatgctagaccgactatattatgtgagggtaaaaccgacaatatttacgtgaaggccgctatcagcagacttgcggccgactacccccgccttgccaagattaaaactgctacaagcgactataagcttctggtcagtatctttaagtataccagccgcacccggtttctgatgggcttatatggcggcgcagcctatctgactgattttgttgctaggttcgagaacacgcaccgcttctacaaagccccccgccctactaaccctgttattattatcatggacaatgacggcggcttcgatggagtagagggtatcttcaaaggcaagaagtctaatgccacaccagtgcctaaaggcaccggccgtacagaatatagaggcgcagatttcattcatgtcgttgagaacttgtacgtggtccttacaccactcggaccatccggttcaaaatctgaaatcgaggatctattcacgtcaagtacgagagaggagttggtggacaagaaaaccctgtgccttgataaggaaatcgataggtcttctcaatacggcaaggataccttcgccaacaaggtgattctccccaagaaggccagcatcgacttcagtggatttaagatactgctggaccgtattgtgctctgtatggaacactatgagagttcagtgcttgcatcaacttga

SEQ ID NO: 8371 - RNA, 1440 nt, synthetic construct
  source 1..1440: mol_type = other RNA
atgatgcatctgaatcgtaaaaatgtcctcaatgttgaccttaagaatttcttcgactccttcaactttggtagagtacgcggcttctttataacaaacaaccattttcggctggcccccgagatagctactgttattgcccagatcgcctgctacgataataagttaccacaaggatcaccagcctccccggtgataacgaacttaattacccatattctagacatcagactcagcatcctcgctcgggagcaatcatgcacatacacccggtatgcggacgatatcacattttctaccagggagaaggtcttccccgagcagatcatgaaggaaattggtgacacctattcccccggacacctactgagcggtgagattaggcgcgccggcttcagtctcaatgctcaaaagactcggatccagtacaaagattctcgccaggaggttaccggactggtggtgaataagaaacctaacgtgaagaaagagtattggagaacggtcaagagccaatgtcacctgcttttcaaaattggcaacttcgtggaaattataaacgatgaaccgcagcccggaaacatcaaccagctggaaggccggctgaattttatcgaccaggtagactactataatcgtaagagacagaaacctcatctgaaccctgagtatgctctgtctaagcatgggaccaacacccacgaactcctgagcgggagagaaaggaccttttctcgttttctgtactaccgaagtttctatggaaacgacaagcctgcaatcatctgcgaagggaaaacagacaacatctacttgaagagtgcaattaataggctagctccagtgtaccctaggctggccactgcaaaatcaactacttcagactacaccctgcttgtggacattttcaattatagcgcgagaacgcgatttctgttagagttgtatggggggaccagttacttgaaggattttatagtgcgctttgagaaacactattcgttctataaagctccacgaccacagaatcccgtcatcatcatacttgacaatgataagggtttcgatgaaattgacaaattgctcaagtccgagaaaagcaaatccaccgcctacccagagatagcaggacagaacaagtacaggggcgctgactttattcacgtaattcacaacctctacgttgtcctgacacctcttgccgcaactggcggccagactgccgtggaagatctctttccccaggtcacacgcgatgaaattgtggatggcaaaagtttctcaacagacaaggagatcgatcgcactacacaatacgggaaggacgttttcgcaaataaagtgatcgcggccaagaagggcagcatcgatttttctgggttctccgtgttgctgaaccggatcgtctcttgtatcgagcactatgattccattaagtga

SEQ ID NO: 8372 - RNA, 1842 nt, synthetic construct
  source 1..1842: mol_type = other RNA
atgaggaaaatcgacgccttgaaggcggtcagaactaaacctgaattggcctccctgctgggagtgaaggcctctaccctaacttatgtcctgtatgtactaaagacaagcacccagtataagtcttttactatccctaagaagacggggggcactaggaccattcatgcaccccatgatagattaaaagccatccagtcatccctgagtgaccttctacaggactgtattgaggaaattaattcggctaaaccaaagaaagcagctaaaaccaaattcgtcaataccaccaaagacaagaaccctgactacaagaagacaaagtttctggaggatactttcacgccgaccctatcacacggctttgttaggaaacggagcataataaccaacgccatgatgcatctgaaccggaaaaacgtgctcaatgtagatcttaagaatttcttcgactccttcaactttggaagagtgagaggctttttcattactaacaaccattttcgcctctgtgaagagacagccactgtcatagcccaaatcgcatgctatgagaacaagctcccgcagggatctccctgttctcctgtgatcacaaacctgatcactcacatcttagacatccggctcgcagccctcgcacgcgataatgcctgtacctatacccgttatgcggacgacattaccttcagcacacgcgagaagatcttccccgagggaattatgcgggagaatgacggagaatactctacgggtcacctgctgaatggtgagattaagcgagctgggttttccttgaatatccagaagacacggattcagtacagcgattcccgtcaggatgtcaccggccttatcgtgaataaaaagccaaacgtgaagtccgaatattggcgaaccgttaagagtcaatgccacctgctgttcaagtcagggagtttcatcgagatcattgatggcgaaccaaaaagggggaacatcaaccaacttgaaggcaggctgaatttcattgatcaggttgattactacaaccgactgcgccaaaagccaccattaaatcctgaatacgagccctccaaacacggtcacaatactagggagttactgtctggacgtgaaaggacgtttagccgcttcctttattacaggtcattctacggcaacgagaaggctacaatcatctgcgaaggaaagacagacaacatttacctgaagagtgcgatcaaccgcctcgcagcagcctacccaagacttgcaaaagcaaaaagcgcaagttccgcttaccagttgctcatcagtctgtttaattacagcgctcggaccagatttctgttggagctgtatgggggagccccttttctgaaagagtttatctccaacttcgaagagaattatgagctgtacaaggcccccgcgccaagcaatcccgtcataatcgttttcgataatgacgccggtttcgatattgtggattctctcttgcggggcaagaaaatacaagctgtggcctttcccgcttcgtcaggtagaaatgaatatcgaggcgcagacttcatccacgtgacaaagaatctgtacattgtactcacacccctcacagctgctgggacgcagaccgacattgagtctctgtttaccaaagtgactcgggatgaaatctttgaggggaagacatttagcagcgctaaggatttcgatagagctcttcatttcgggaaagacactttcgccaacaaaataatagccgccaaaaaaggcagtatagacttctcaggctttaacatcctcttgaaccgcattgtgcagtgcattaaccactacgactccattaagcagccttga

SEQ ID NO: 8373 - RNA, 1839 nt, synthetic construct
  source 1..1839: mol_type = other RNA
atgaagaacattgatgccctgagagcagcacgcacgaagcctgagctcgcccttctgctgggtgtgaaagccagtttcctgacgtacgtgctatacgttttaaagccagacaccctgtacagatctttcaccctgaagaagaaatccggcggtacccgtaccattcacgctccttatgaatccctaaaatccatccagagcagcctgagcaacctactccaggattgtattgaggagataaataaggccaaacccgccaaagccatcaagaccaagttcatcattaccaaaaaggacaagaatagcgatcacaaaaaaaaaaagcggcctgaccacacatttactccaactctctctcacggctttgtcaggaaaagatctatcatcactaacgccatgatgcatctgaatcggaagaacgtgcttaacgtggatctgaaggattttttcgacagtttcaactttggcagggtccgaggcttttttatcaccaaccggaacttccaactgcaccccgacatcgccaccgttattgcgcagatcgcctgttataacaacacccttccgcagggatcgccctgctcaccagtaattactaatctgatcactcacatccttgacattaaattggccgctctcgctagaacatacagttgcacttactcccggtatgtagatgacatcaccttctcaacccgaaaaaagatatttcccgaacagatcatgaaagacttagaggggtcttatacagcaggatatctgttaaatggagaaatacagagggctggctttaatctcaacccgaagaaaactaggataagaaaccaggatagccgacaggaagtaaccggcctagtcgtcaacaagaagccgaatgtaaattccaaatactggagaacagtgaaaagccagtgtcatcttctgttcaagtcggggacgtttgtcgacataatcgacgacaaacccgccccaggaaatatcaatcagctggagggcaggttgaacttcatagaccaagtggactactacaaccggttgcgcgataaagcacccctcaaccctgagtacatgcctcacaagccttcaaataatacacgcaggcttctgtcaggtagagagctgacattcagcaggtttctgtattttcgctccttctacgctaatgaaaaggtgacaattatatgcgaagggaagactgacaatatttatcttaaggccgcgattaagaaactcagccctgcttacccgaaattggcaaagcctaaatctgccacaagtgcataccaactgctcgtctctatctttaactatagtgctcgtacccggtttctgatggaactctatggcgggaccccatacctgaaggattttatcgctgagttcaaagagaatcacaagttctacaaagcacccaagccagctaatccagtgatcattattctggacaacgataagggattcaatatcgtggagtccctcctgaggggagataaggtccaggccacaccatatcctcgaacacccggtcagtttgagttccggggggctaacttcatccatgtgacggaaaacttgtatcttgtgctcactcccttggcgccaccccctgatcgccaaactgcaattgaggacttgtttacccaggacacacgtgacgagcaggtggacggcaaaatactcagcttagaaaaggaattcgataaggccacgcattacgggaaagatgcgtttgcaaataaagtggttctggttaagaagtcatccattgatttctcagggttcaatgttatcttaaaccgcattatgcaatgcattgagcattatgattctatcaagtga

SEQ ID NO: 8374 - RNA, 1836 nt, synthetic construct
  source 1..1836: mol_type = other RNA
atgaaaaagatcgacgccctccgggctgttaggacaaaacctgagctggctttacttctgggaattaaagcctcttcactgacctaccttctatacgttttaaaacctagtacccagtactcgagcttcgagatccccaaaaaatcaggcggcactagaacgattcactctcctagtgagcgcttgaaatctctgcaaagtagtctcagcatcctactgcaggattgcattgaagagattaataaggacaagcctgctagggccaacaagaccaagtttatcaccactaagaaggataaggccagcgactcaaagaagtctaagtttatagagtacgccttcatgtcaaccctggcgcacgggttcgtgcggaaaagaagtattatcacaaacgccatgatgcatctgaataggaagaacgtgttgaacgttgatataaaggacttctttgactcattcaactttggccgagtgagaggatttttcatcacgaataatcacttccgtttagatcccaacatcgcaactgtgattgcccagatagcctgctatgacaataagttgccacaggggtcgccatgctcccccgtgatcacaaatctgatcacccatatcctggatatccggttggccgcacttgcccaggcaaattcctgtacatatagccggtatgccgacgacattactttctctacacgtgagaaattattccccacacagctcatgtctgaggagggtggcacctacattgcaggcaacgaattaaagcgtgaaatacagcgcgcaggattcgagctgaacgcgaagaagaccagaatacaatatcaatccagcagacaggatgtcacagggctggttgtgaataaaaaacctaacgtcaagtccgaatattggcgcaccgtgaagtctcagtgtcacctgctgttcaagtccgggaagtttactgcgaaaaagggtgatgagattctggagggtaatatactggagctcgaaggacgcctgaactttatcgatcaggtcgacttttacaatcggcttaggcagaagccacacctgaatccagaatacgctcttagcaaacatggactcaatacccgccaactcctgagcggacgggaaagaacttttagcagattcctgtactaccgatcattttacgccaacgacaaacccactattttgtgtgaagggaaaaccgacaacatttacatgaagtctgctataagtagcctggctactgattatccaaaattggcgaggcccaaatccgccactagcccgtaccagttgctcatcagcctcttcaaatataatgagaggacaagattccttcttcagctctatggaggcacctcctatttgaaggattttatcgaaacattcgctatgcactacaaattttacaaagccccaaagcctaacaacccggtaattatcatccttgacaacgacggagggtttgactccatcaacgctctgctgaatggcgataagactagggcaacctgctaccctaataccccaggcaagaacgagtaccgagatgcagaatttattcacgtgctggagaacctctatattgtcctgacaccccggggtgtgcccgacaaacatacggcaattgaagaactattcacacaaaaagtgcgcgacgaggtggtttccggcaagaccttcaaccacacgaataaaattgatatcacgaaggagtatggcaaggaaatttttgctaaaaaggtaatcctcgctaagaaagggtccgtagatttcagtggttttagggtcctactcaatcgagtggtccagtgtatcgagcattatgactcaatcaagtga

SEQ ID NO: 8375 - RNA, 1830 nt, synthetic construct
  source 1..1830: mol_type = other RNA
atgaaaaagatcgatgccctgcgagccgtgcgaactaagccccagctcgcgcttttactgggagtcaaagcatctgcccttacctacctgttatatgtcctgaagcctgccacacagtattccagcttcgatataccaaagaagagcggcggagtccgaaccatcaatgcccccagcgagcggcttaagctggtccagtcgtccctgagcgaattgctgcaggactgtatagaggaaatcaacaaagcgaaacctccacgggcacctaaagggagattcgccaagaccgagaaggaggctggagggaagcgctcaaaacatgtcgaatacgtgtttacttctaccctttcccatggctttgtgagaaaacgttcaattatcacaaacgctttgctgcacctcaacaagaagaatgttctcaacgttgatataaaggacttcttcgactctttcaatttcggtagagtgcgcgggttcttcatctccaacaacaactttaaactggaccccgggattgctaaagtgatcgcccagatcgcatgctacgacaataagctccctcaaggttcaccgtgcagtcccgtgatcacaaacctgattacacatggccttgatataaggctcgccgctcttgcgaagaagagtagctgtacctattccaggtacgcagacgatatcactttcagcaccagagaacggctctttccaagtaacatcgtgaaggagattgcaggtatttactcatatggggacgacctcaaggctgaatttggaagggcagatttcaaactcaatgagaagaagacaaggattcaatatcacgatagccgccaggacgtgactggacttgtggtcaacaaaaaacccaacgtcaaatctgagtactggaggctggttaaatcccagtgccacttacttttcaaatcaggaagattcctggtgaaagaggatggcaaggttaaggatggcaatgttctggagttagaaggcaggctgaatttcatagaccaggtcgattactataatcggttgcgtcagaagaaacctctgaatccagagtacgccctggaaaatcataaattgaacacacgcaaactgctctctggccgggaaagaacgtttagtcgttttctctattaccggtatttttatgccaacgagaagccattggtgctgtgtgagggcaagacagataatctgtacctaaaatccgctgttaaccggctggtagccgcttatcccagactagccaaggctaagaccgtgaatgcaccttaccacctactcatctccttctttaaatattcagaacgcaccaggtttttgttgcaactgtacggtggcgccagttacctcaaagatttcatcgagagttacgagaagaattattccttttacaaggcacccaagcctagcaacccggtgattttggtatttgacaatgacacggggttcaacagcgtagaggcccttctgaaaggctcgaaaatgaaggaagtcgtggcccacccagttgggtccaagaagtcttcgtttcgaaattctgagttcattcacgtgttttacaatctatacgttgtgctgacgccgttaggcgcggctaaaagcactgccatcgaagacctgtttactaggagtaccctggatgaggtagtctcagggaaaaagttcaacccaaccaaagaaattgacgtggacaaggaatatggaaaggaggtgtttgctaagaaagtggtgctcgcaaagaaaggatctatcgactttagcggtttctgccccctgctggatcgcattgtcaaggtattggaacattatgagtctactaagtga

SEQ ID NO: 8376 - RNA, 1830 nt, synthetic construct
  source 1..1830: mol_type = other RNA
atgagaaaagtcgacgcactacgcgcagtcaggacaaaaccagaattggccttgctccttggcgttaaagctagcgcattgacctacctgctctacgtgctcaaaccctcgacgcagtatacaagcttcaatattgccaaaaagagtggggggatcaggaaaattaattcaccctccgaacgcctgaaagctgtgcaatcctcactctccactcttctccaggactgcattgatgagatcaataaagccaaacctccccgggctccaaaaggtatgtttgccaagactgaccggctatctgatggcaagcgggccaaaagagtggagtacgtgtatacttccacactgtctcacggcttcgtgagaaagcgctccataattacaaacgcccttatgcatttgaacaaaaattcagtgctcaacatagacatcaaggacttctttgagagctttaatttcggaagagtgcgtgggttctttatcaagaacaacaacttccgactgaggcctgatgtcgctactgtgattgcccagatcgcctgttacgacaataagctgcctcaagggtccccgtgttccccagtgatcaccaacctgatcacacattcgctcgatattcgcctcgctgccctggcacgcaaaaactcctgcacgtattcaagatacgcagacgatatcactttcagtacccgggagaaagtgttcccgtcaaacctggtaaggtgggacagtgaagggtatgtttacggagatgacttggagtctgagtttgctagagccgggctcaaactcaacaaaaagaagacgaggattcaatataaggactctcgccaggacgttacaggcttagtcgtgaatcgcaagcccaatgtgaagtgcgagtattggcggactgtgaaaagtcagtgtcatctgctgtttcgtacggggaagtttgccatcaaggatggtgacgagatcaaagatggaagcatcttcgaactagaaggtcgactgaacttcatcgatcaggtggattattacaaccgactgcgccagaaaataccactgaaccccgaatatgctctggcgaaccacaagttaaatacacggggtttacttagtggccgtgaacgaaccttctctaggtttctctattacagagccttttatggaaacgacaagccaacaatactgtgtgaaggcaagaccgacaatgtatacatcagaagtgcgattaatcggctggctgcagagtaccccaagctggctagagccaaaaccagcaccaagccgtacgagttgctggtaagcttgttcaagtacaatgagaggactaggttcctactgcagctttatggtggctccagctacttaaaggattttatagaaacctacgagaagcactacgatttctatatggcccctaaacctgcgaatcccgttatcgtgattctggataacgatactggcttcaactctatcgaggttctgcttaagtctaagatgacaaatgcagctgtctatcccaccggcttgggcgtggcgggatataggaacagcgactttatccatgtcctccacaacctgtaccttgtcctcaccccactgggaacagccaagtcaactgcaattgaggacttatttacccggtccaccctgaaggagattgtcagcgggaagacctttaatcctagcaataaaatggatccagccaaggaatacggcaaagaaatcttcgcaaagaaagtggtacttgctaagaagggaaatatcgactttgtcggattccggcctattctggatcgactggttcagtgcattgaccactacgagagcataaagggttga

SEQ ID NO: 8377 - RNA, 1830 nt, synthetic construct
  source 1..1830: mol_type = other RNA
atgaggaagatcgacgccctacgcgccgttaggacgaaacccgaactggcgcttttgctcggtgtgaaggcatccgccctgacttacctattatatgtgctgaagcccagtacgcagtatagttctttcgaaattcccaaaaagacgggcgggaccagaactatccatagcccttcggaacgcctgaaggtggtccaatccagtctttccatgctgctgcaagactgcatcgaggatatcaataaagctaaacccccgagagctccaaaggggaaatttgccaagaccgaaaaattacccgcaatcaaacgcacaaaactggtggactacgtcttcacatccacactcagccacggtttcgtgcgtaaaagatccataataaccaatgctctgatgcacctcaacaagaagaaagtgttgaacgtggacattaagaacttcttcgacagctttaatttcggccgcgtcaggggtttcttcatcaagaataacaactttcggctggatccaaatatcgctaccgtaatcgctcagattgcctgttacgataacaagctccctcagggctcaccttgttctcctgtcattaccaatctgattactcacggactggacataaagctggcagcgctggccaagaaaaacagctgtacatactctcgttacgccgatgacattacctttagtactcgtgagaaggtgtttccattaaatgtcatgaaggaggaagccgagggctacgtttgcggggacggattaaaaagcgagattggaagggccggctttacattgaacaacaagaaaacaaggatccagtacaaagattctcgacaggacgtgaccggtttggtggttaataaaaagccaaatgtgaagtgcgagtactggcgaacggtaaaatcacagtgccacttgctgtttaagagcggggggtttgtgaccaaaaatggggatgaaatagaggaaggcaatattttcgagctggagggcaggcttaacttcatcgaccaagtagactattataacagattgcggcaaaaggctcctctaaaccctgagtatgatttggccaagcatggccttaacacccgaaatgtcctctcaggcagagaacgcaccttctccagatttctctattaccggtccttttacggaaatgacaaaccaactattctgtgtgaaggcaagactgataatatttacatcaagtccgcaataagtcgactggcggctgtctatcctcggctcgctaaggtcaaagcactcaccagcgcatatcagctgctcgtatcactctttaactatacagagcggacacggttcctgcttcagttgtatggcgggacttcatatctgaaagacttcatcgagacttacgaacagcattataatttctacaaggcacccaaaccgattaaccccgttattatcatcctggataatgacaccggatttaactcaatcgagacactgctgaaatctaacaaaaagaatcaggctgtcgtttacccgattggagtgcgcggagcgggttgcaggaatgccgatttcatccacgttgtgcacaacctgtatatcgttctcacaccactgggcaaggagaagtcgaccgccattgaagatctcttcactaggcccacacttgacgaaatcgtgtctggaaaaaaattcaacccaagtaacaagatggatattaccaaggagtacgggaaagagatctttgccaagaaaatagtgcttgtgaagaagggaagcatagatttttctgggtttagagtccttctatcccggattgtacagtgtatcgagcattacgacagcgtgaagtga

SEQ ID NO: 8378 - RNA, 1824 nt, synthetic construct
  source 1..1824: mol_type = other RNA
atgagaaagatcgacgccttgagagccgttcggacaaaacccgagttggcactcttgttaggcataaaggctagcgcactcacgtaccttctgtatgtcctgaagccatccacacagtatgccaggtttgagattcctaagaagtctggggggacacgaactatctttgctccgtctgagagattaaaagcagtgcagagtagtctgtcaatcctgctgcaggattgcatagaagagattaataaagccaaacctccccgagctcccaagggaaggtttgcgaagaacgaaggtaaaacccgcggccgccgagccaaacgcgtagattatgtcttcacctcaactctgagccatgggttcgtccggaagaggtccataatcactaacgctctaatgcatctgggcaagaagaacgtgctgaacatcgatatcaacaacttcttcgacagtttcaacttcgggagagtgcggggattcttcattaccaataacaattttcggctggatcctaacgttgccacggtgctcgcccaaatagcttgttacgacaataagctcccgcaaggctccccatgcagtccagtgatcactaatctgattgcacatagcctagatatcaggcttgccgctctggctaaaaaaaattcctgtacatactcccggtacgccgacgatattaccttctcaactcgaaaaaacgtgttccctatcgcgatcgctaaagacgtgtcaggctcatacgaatgtgggctggatattgagagagagattatccgtgctggctttaaactcaacgccaagaagaccagggtccaatataaggacagtaggcaggacgtcaccgggctggtagtcaatgagaaaccaaatgtgaagtctgagtattggcgcaccgtgaagtctcagtgccactccttattcaggacaggcgaattcgtgatcaataatggagcagtatctagacgaggaaccctgtttgagttggaaggtcgtctgaactttatcgaccaggtcgattactacaatagattacggcagaagttgcccctgaaccgcgagtacgctttggccgaccataaactgaacacccgcgagcttctatctggtcgtgagagaacattttcccggtttctgtactatcggcacttttacgccaacgacaagcctgttatcatttgtgaaggccagacagacaatatatacattcggtcagctattcattcgctcgccgccgcctatcctaggcttgcgaatgtcaagacgcccgtggcaccatacaaactactcattagccttttcggctacagcgagaggactaagtttttgctccagctgtacgggggagccaattacctgaaaagcttcatcgagcaatatgaacgccactacggattttatcaggcacctaagcccaagaaccccgtcataattatgtttgataacgattcagggttcggaaccacggaaaatttcctgaagggtaagtccagcgctgtggtgtatcccgtagcaagcagaggtgcgggctatcgtcacgccgaattcattcacgtgattcacaatctgtatatcgttctcacaccactcggaggcgcaaaatctactgccatcgaagaccttttcttaaagtccacactcgatgagaaagtgagcggcaagaaattcaacccagacaaaaacattgacactgcaaccgaatatggaaaagaggtgtttgcgaaaaaggttattcttgccaagaaagggtctatcgactttagtggtttttcgacaatcctgaatcgcaccgttcagtgcatagaacactacgatagcatcaagtga

SEQ ID NO: 8379 - RNA, 1827 nt, synthetic construct
  source 1..1827: mol_type = other RNA
atgcgaaaaattgacgctctccgggcagtgcggacaaaacctgaactcgctctcctattgggcatcaaggcctctgcactcacttatcttctatataagctgaagccttctacccaataccataccttcgagatccctaaaaaatctggcggtactcgcacgatccactcacccagtgaaagactgaaagcccttcagagcagtctttcaaacctgctccaggactgcatcgaggatatcaacaaagaaaagcccgccaggacgccgaaaggaagatttgccaagctgtacaagaacctgcaaggtaagcgtggcaaacacatcaattatgtctatatttccaccctcagtcatggatttgtccgggaccgcagcattatcactaatgcactaatgcacttcaggaagaagaacgtgctgaacattgacataaaagactttttcgacagctttaacttcgggcgggtaaggggcttcttcatctcgaacaagaattttcgattgaatgacgagattgctacagtgatcgcgcagattgcttgctacgataacaagctgcctcaagggagtccctgctctcctgtcatcaccaatctgattgcacacagcctggacgtgagactggccgcactcgccaagaagtattcatgtacatatagcagatacgcggatgatctgaccattagcacaagagaaaagctgtttcccccaaatatcatgaaagaagacgctggggtctatacctgcggccgggatctggtatcggagataagcagagcgggcttctccttgaaccacaagaaaacgaggatccagtacaaggatcaccgacaagatgtgaccggcctggtcgtgaataagaaaccaaacgtgaagtgtgaatactggcgcaccgtgaggtcacagtgccatctgctcttccgtacagggaaattccttactaaggtgggggacgaggtgagagatgggtccatttttgagctggaaggccgcttaaatttcatcgaccaggtagattactacaaccgcctgcgccagaaaccagccttgaatcccgagtatgccctgagtaagcatggtgttaatactagggagctcttgtccggaagagaaaccacattttcccggtttctttactaccggcatttttatgctaacgaaaagcccgtgattctttgtgagggcaagacggacaacgtgtatattaaatctgcgataaacgtgctggcggctgcttacccacgtttagccaaagccaaaacagccaactccccctacgagttattggtcagcatgtttaattacacagaacgcacccgatttttactccagctttacgggggcgcctcatacttgaaggatttcatcgaaactttcaagaagcactatggattctataaagccccaaaaccatcaaatccggtgattatcttgcttgataatgataccggcttcgacagtatctgctccctactcaagggcaaatctttcggagcagaagcctacccccctggactcgccatgaatgactgtagggacgccgagtttatacacgttggactgaacctgtacgttgttttaactccacgggtcgcagctaaacattctgctatcgaggacatgttcacaaaggcaactctgggagaggttgtgggagggaaaaccttcaatcctagcaataagatggatagctccaaggagtatgggaaagagatctttgctaagaaagtagttctggcaaaaaagggttctataaacttttccggtttcaacgtcattctgaagaggattgtgcagtgtatagagcactatgataagataaagtga

SEQ ID NO: 8380 - RNA, 1212 nt, synthetic construct
  source 1..1212: mol_type = other RNA
atgagaaaaatcgatgctctccgcgccgttaggactaagcctgagctggccagactcctgggcgtgagggcatcagagttgacgtacgtgctgtacgtactgaagcccccaacacagtatatctccttcaagattcctaaaaagtctggtggggatcggaccattcacagtccaagcgatcggctcaaggccattcagtcttccctctcagatctgctcctggattgcatagacgacataaacaagtcaaaacctggaaaaccccatttagatcgttttgtcaaagggaaaaaggagaagctgcttgatagcaagaagaaaaagccccttgagtatatctttagtcccacattgtctcacggattcgtgagaaataggtcaatcatcactaatgccatgatgcatcttcacaagaaaaacgtcctgaacgtggacttacaaaacttcttcgacagcttcaactttggtcgtgtgagggggttctttatttctaacaggcacttccagctggacgccaatgttgctaccgtaatcgctcagatagcgtgctatgacaataagctcccacagggtagtccgagcagtcctgtgatcaccaatcttatcacccactcattggacatttctcttgccaagctagcgtttgaacatagttgtacttactcgcgatatgctgatgacataacattttccacgcgagaaaagattttcccccctcagatcatgtccgaggagtcgggctcctacactgcaggcagccaactgacgcatgaaatcactaaagccgggttttctctgaatagcaagaagaatcgcattcagtataacagcagtaggcaggacgtgacaggactggtggtgaacaaaaaacccaatgtcaagtgcgaatactggcgcactgtccgcagccaatgtcatttactatttaagagcggctcctttgtcaccaaaatcaatgatgaagaggttgttggcaacatcaacaaactggaaggccgcctcaacttcatagaccaggtggactattacaaccggctgcgacaaaaaccagctttgaatccagaatacaccctgtcaaagcacgcaattaatacaagagagcttctgtccggacgggaaacaaccttctctagatttctatactaccgggccttctatgcaaacgagaaaccgaccattttgtgcgaggggtgtctgctctacacatcctga

SEQ ID NO: 8381 - RNA, 1845 nt, synthetic construct
  source 1..1845: mol_type = other RNA
atgaaaaaacttgatgcactacgcgccgcaaagacaaagcccgaactcgcgcaccttttgggagtaaaaccttcttcacttacattcttactctacaaactcaaacccagcacccagtacagttctttcgacatcccaaagaaaaacggcggctcccgtactattcatgcaccctcaaaaaagttaaagaagctgcagagttctctgtccaactacctgcaggactgtatcgatgagatcaattctgctaaaccagccttttccaacaagaagaagtttatcaagatcgacaaagatagggtattggacggcaagacgaagaattttaccgagtacaagtttatttccacgctgtctcacggcttcgtgagggagcgtagcatcataacaaacgctctgatgcacctcaacaagcgcaacgtgctaaacattgacctgaaagacttcttcgagtcttttaactttggcagagtgcgcggcttttttatctctaacaggaacttctgtcttgatcccgatattgccaccgttatcgcacagatcgcttgctatgacaacaaacttccccaaggctctccatgctcacctgtgatcactaatctgattagtcacatcctcgatatacagctggccgctcttgccaaggctaattcctgtgtctattctagatatgccgatgatatcactttcagcactcgtgaacgcgtgtttcctagtgacatcatgagcatagaggccggtgaatatatagtggggcggaagctcaggggaattataaagcgcgcgggttttagcctgaatgagaagaaaacacggattcaatacaaagactccagacaggatgtaaccggtctggtggtcaataagaagccaaatgttaaaagcgaatactggcggaccgttaaatcccagtgtcattccctgttcaagaatgggacctttacagtgaaaaagggatgtgatatagtggaaggaagcattagcgaactcgaaggtcggctgaacttcatcgaccaaattgatttgtacaatcgaaggagacagcaacctaagattaatcccgagatagctctatgcgagcccgggattaataccaggatcttgctcaacgggcgagaaaagacattctccagattcttatactactgttacttctacgctaacaaaaagcccatgataatttgcgaaggcaaaaccgataatatttatatcaagctggccatgtcaaaattggccactgactatccattactagccaagccaaagtcgagcaactcggcctacgagccacttgtcagtctgttcaagtatagtaagagaactaggtttctcttgcagctgtatggcgggacctcctacttgaaaaacttcatcgaaacctacaaaaagaactttgctttctacaaagcacctaagccctgcttccctattataattatcctggacaatgatgcgggattcaaagacattaattcctggctggacaaatcaaagtatgtgacaccgtacaacatcaacattaaggcctctgagaacaacaaatttcggtatgcagaatttatccacgttgtggagaatctgtatatcgtcctgacacctcgcgagaaccctgataagaacagcgctattgaggacctgtttaatccggagatcctgaaggaggaagtctcaggaaaaacgttcaatccgagtaatagcaaaatcgacatcactaaggagtatgggaaggagatcttcgcaaaaaaagtgattttcgccaagcgaaattcgattgactttagccggttcaaagtcctgctcgatagaatcgttaagtgcctcgaacattatgactcaaataaatga

SEQ ID NO: 8382 - RNA, 1503 nt, synthetic construct
  source 1..1503: mol_type = other RNA
atgagaaaaatcgatgcactccagaaggtcaagacgaagccggagctggctgagctgctcggcattaaggctagttccctgacatacctgctgtacgttcttaagcccagtacccagtactcctatttcgaaatcccaaagaagaatggcggccggagaaccatccatgctccgtccaagaggctgaaaaagctccagagcagcctatctaagttccttcaagactgtatagaggaaatcaacaatgagcgccccgcctcaactcacaagtctcggtttgtgaagatcaacaaagatcgcgtgcttgatgggaagaagaccaagtttatcgaacacaaatttacatctaccctgtcccacggatttgtccgggatagatctattataaccaatgccatgatgcatttgaacaagaaaaacgtcttgaatgtcgatatcgacaacttcttcgatcgattcaatttcggaagggtccggggattttttatcaagaatcgacatttcagcctcgatcccaacatcgccactgttatcgcacagattgcttgttttgataacaaattgcctcagggctctccttgttcacccgtgataaccaatctcatcacacacattctggacattaagttagccgcccttgcaaacgataatagctgcgtttatacaagatacgcggacgatatcacttttagcacacgcgagagagtgtttccaaaagagattatgcgcttagaggacggggtgtacacaccttccgaaaagtttgaacgcgtgattaagaaagcgggattcaaactcaacgagaaaaaaacgaggatccagtataaagactcgagacaagacgttactgggctggtggtaaataagaagcctagcgtaaagtccgagtactggcgtaccgtgaaatcacaatgccattcactctttaaaagtggacactttactgtgaagaaacacgacgaaattattgaggggtctatttctgaactggagggtcggctgaacttcattgatcagattgacctgtacaatcgtctccgtcagaaaccatgcataccccccgaaatcagcatccagcagcatggtattaacactagggagctgctaagtgggagggaaaaaaccttctcccgctttctgtattatcggtatttctacgcccatgacaagcctatgatactgtgcgaaggcaaaaccgacaacatctacatcaaactggccatgaacaaattggctgtagactatcctaagttggcaaagccaaaaaccgccacaagtgcttatgagccactggtgtcgttgttcaagtataataagaggacacgattccttcttcagctgtatggtggcactaattacctcaaagaattcataaccacctacaaaaaacactacttcttcatcaagcaccagagcttagtgatccaactgctactgtcatggataactaccaaggactccacgcttttaacaccatgtctcaaagagattaagagcatgtga

SEQ ID NO: 8383 - RNA, 1761 nt, synthetic construct
  source 1..1761: mol_type = other RNA
atgcgtaaagttgacgctctgagagccgtgaggacgaaaagtgaactggcccttttactgggattcaagcccgctgccttcacatatttgctctataagctgaagccgtcaactcagtatcagtccttcacaatccccaaaaaaagcgggggtactaggaccatatacgccccaagtgaacgcctgaaggcacttcagaccagtctgagcctgctcctccaggattgtagcgaggagatagagaaggcctgggtcggcggctccgattctaaaagcaccctgtctcacgggtttgtgcgtaagcgttctattatcacaaacgccatgatgcatctccacaagaagaatattctgaacgtggacttgaaagactttttcgactcttttaacttcggtagggtcagggggttctttattaccaaccgggagttctgcctcaatccagacatcgcaaccgccattgctcaaattgcctgtcacgataataagctaccccaaggctccccatgttcaccagtgatcaccaatcttatcacaaacatcctggatattcggttggccgcacttgcgcgctcgcattcctgcacctatagtaggtacgcagacgacttgacttttagtacacgcgaaaaagtcttcccttcgcagatcatgaaggaggatgttggatcttacactcccgggaagaagttaaagtccgagattaagagagctgggtttgaactgaaccataaaaagacccggattcaatatatggacagtagacaggacgtgacaggcctcatcgtaaataaaaagcctaacacacggtacgagtactggcgaacagttagaagtcaatgtcactctctgttcaagagcgggagcttcactaagaaagtggatgggaaatttatagaaggcaacatcttcgaactccagggacagctgaactttatcgaccagatagactactttaatcgattgagacagcatcctccgctcaaccctgagtatgccctctccaaccacttgatcaatacccgcaagctcttaactggtcgggaggtggtcttttcccggttcctgtattaccgccacttctacggcaatgaaacggcgacgatactttgcgagggcaaaaccgataacgtttatctgaagtcagctttgaataagctagcgctgaaatatccgcgattagcaattcccaaatctgcagcaaatccatacaagctcctagtgtcatttatgaactacacagagagaacaaggttcttactgcagctttacggcggtacctcctacctgcacgtgtttctaaacagctttgaagagcactacaagttctataacgccccaaaacctaagaatcccgtggtagtcgtgctcgacaatgattcaggcttcaattccattgatggtctgttgaaaggcaaactctcaggaacgccctatcctgacactctgtctaagtctgagtttcgaaaagctgacttcatccatgtaaccaagaatctgtacgtagttctgaatccacttggacctaagggggagttttcagccatcgaaagcctgttctcccctgctactcgcaatattaaaatcagcggaaaaagcttcaaccccgagaacaacatggataaaaacactgagtttggaaaggaaatctttgcgagcaaagtcgtcgtggctaataaggatacaatcgatttctccggattcgacgtgctgcttagcaggataaccatgtgcctggaacattacgatctgattagatga

SEQ ID NO: 8384 - RNA, 1767 nt, synthetic construct
  source 1..1767: mol_type = other RNA
atgcgtaagataaatgcacttagggctgctaaaaccaaacctgaactagcgttgttgctcggagtgaaggccactgccctgacctacgtgttatacgtcttgaagcctgatacacaatattccactttcaccattccaaaaaagtctggggggctgcgaaccatctgttcaccttctgataggctcaaaactatccagtccgctctcagcgaactcctgcaggattgccttgatgagctgactgctgttaaagttaaggagaaccacgattacaaatcaaatctgagtcatggctttctgcgaaataaaagcatcatcacaaacgccattgtacacaccggccagcgcaacgtgctgaatttggacctgaaagacttttttgacaagttcaacttcggtagagtgcgcggattcttcatatccaacaaggacttccaactaaatgaacatattgccactgttattgctcagatagcctgctatgacaacagactcccccaggggagcccatgttcgcctgtgataacaaatctgattacccacatccttgacatcaaactcgcagccctggccgagtcttattcatgtatctatagtcggtacgcagacgacatcacctttagcacaagggaacgactgttcccccccaagttaatgaaagaaattgccggagagtatatccccggtaaaaagctgcggtccgagataagaagggctggctttgagattaacgccccaaaaacaagaattcaatttcaggatagcagacaagatgtgacggggctggtggtgaacaagaagcctaatgtcaaatctgagtactggaggaccgtcaagagtcagtgccatagtctgttcaggacaggaagttttaaaaagaaggtagacggtactttcgctgatgggaatatctatgaactcgagggccagctgaactttatcgatcaggttgattactctaacagactgcgccaaaagccgcccttggacactgagtacgaacagcgcaaatccaacattaaaactagggagttactgtctgggcgtgaaaccacctttagccggttcttatactacaaatttttctacgccaacgaaaagcctacgattatctgcgaagggaaaaccgataatatttaccttaagtccgcgatcagctctttggctgcaaactacccaaagttagcgacaccaaaatcggcaaataatccctatgagctgctcgtgaagttcttcaactataacaaccgcacgagatttctactccagcttcatggcggtaccaactacctacacactttcattaacgattttgagagccactacgacttttataaggcccctcggccaaagcagcccattataataatccttgacaatgactcaggcttcaatggaatcgatggcttgctgaagggcaaagcaagcgccaagcggtatccggtcgcgaaaggaaagaagaaggactttcgcaacgcaaatttcattcacgtcgcccataatctctacatcgtgctgacgccgcccactgctacaggtggacacaccgcaatcgagtccctctttaccgcagccacactgaatgaaaaagtccagaagaagaccttcaatccagagtcaaagattaatactaccacagagtatggcaaggagatcttcgctaaaaaagtaatcctggccaacaagaagacaattaacttctccggctttgacgtgatccttaagcgggttatccagtgtatgaagcactatgaaacagccaaatga

SEQ ID NO: 8385 - RNA, 1770 nt, synthetic construct
  source 1..1770: mol_type = other RNA
atgaaaaagatctccgcattaagactggccaagacgaagcctgatctggccctgctcatggggattgacgcatctttcctcacaaatatactttatcgccttaagccaacaactcagtataccagcttcacaattccaaaaaagagtggcggcgttaggactatttacgcccccagcgatgagctgaagtccattcaatctgcactttctaatctgttgcaggactgtatacaagaaattaacacttccaaagggcctaagttcaaatcaactctaagccatgggttcgttagagacaggagtattctgaccaatgctatcatgcacctgaataaacgcaacgtactaaatatcgacctgaaggatttctttgaccagttcaacttcggcagagtgcgtggctatttcatcagcaacaagatcttccaactagatcccgctgttgccactgtgatcgcccaaattgcctgctacgacaacaagctcccccaagggagcccctgtagcccagtgataactaatctgatcacacactccctggatatccggctcgcctcacttgcgcgcgataattcctgcacctacactagatatgctgacgacatcaccatttctaccagaaaaaaggattttccctccaacctaacatcggatcgagccagtggatacgtgattggctctaggttagccgctgaaattaaacgagcgggattctcagtgaactccaccaagactcggatccagtacgaggatagtcggcaggacgtgacaggactcattgtgaataagaaactcggaactaaatctgagtactggcgcactgtcaaaagccagtgccacgcgttgtttcagacaggcaaattcttggagaactcctcaaatcctccccaggcaggctcgatattcgtgctcgaaggcaaattatctttcattgaccaggtggacttcttcaacagaaaaaggagtaagcctctgctcaatcctgaatacgagcttagtaaacatgggagcaaaaccaggaagctgctgaatggcagggagcggactttttcacgctttctcttctataaacacttctatggaaacaccaagcccacgatagtttgtgagggaaaaacagacaatgtatatctgaaggcagcaatcaataagcgggccgccgcttttccttcattggcgaaagcaaaatcaggcaacgccccatacgagctgctggtacactttatcaactacacaaaccgcacacgttttttactggagctgtacggtggcacaccctacctcaaggaatttatgctcgactacgatgaacagtttaagttttataaggcccccatgccaacccatccagtgataattatcctggacaatgacgatgggtttggaaaaatcgagggagtattgaagggtaataagtactccccgacggtctttcctgtcacccttccggtgaccgactttcgaaacgcagagttcatccacgtggtccataacctgtatatcgtcctgaccccattgaagggcaaaggtaacaagagcagtatcgaagacctgtttacaaaaaagacccgggctaccaagttaggtgggaaggtctttaacaaacagaataagaccgattccgatacggagtatggtaaggaatatttcgctagcaaagtcgttgctcctaacaagcataagatcaacttttctgggttcaatccgctgttgggacgtatagatcagtgcattcagcacttcgctaccgtgaagcttgtgaaaccatga

SEQ ID NO: 8386 - RNA, 1779 nt, synthetic construct
  source 1..1779: mol_type = other RNA
atgaagaagatcagtgcactacgtctggcaaagaccaaaccagatttagctctgctcatgggcatagatgcgagctttctgaccaacatactctataggctaaagcctactacacagtacacttcctttaccatccccaagaaatcctcgggcgtgcgcacaatctatgccccatccgatgagttgaaatccatccagtccgctctcagcacgctcctccaggactgcatacaagagataaataccagcaaaggcccaaaattcaagtcaacactgtttcacgggtttgtcagggataggtctatcctgaccaacgcaattatgcatctgaaccagcgtaacgtgctgaacatagacctgaaagactttttcgaccaatttaactttggtcgtgtgcggggttatttcatttccaacaagatctttcagcttgaccctgccattgctactgttatcgcccaaatagcttgttatgacaataaactgcctcaaggatcaccctgctctcccgtcatcacgaacttaattacccattcgctggacatccgactggcctctttggccagagacaactcttgcacatacaccagatacgcagacgacattacaatctcaacacggaagaagaccttcccaaacaatcttatgagtggacagacatccggatacattataggcagccggctggccgaagaaattaaaagggctggtttcagcgtaaattcagcgaagacacgaattcagtataaggactctagacaggatgtaactggcttggtggtgaacaaaaagccaggcactaaaagcgagtattggcgcaccgtcaaaagtcagtgtcatgcccttttccagacagggaagttcttagagaacagcagcaacccgccacaggccggtaatatttttgttcttgaaggcaaactgtctttcatcgatcagatcgatttctttaaccggaagcgcaataaggctctcttaaatcctgagtacgagctctccaagcacggaagtaaaacacgaaagctgctcaatgggagagaaaggacgttctccaagttcctgttctacaaacacttctatggcaatacgaagcccacaatattgtgcgagggaaagaccgacaatgtgtacctgaaagcggcaattaataaccgcgccactgcttttccaagcctggcaaaagctaagagtggcaatgccccatatgaactgctagtgaacttcatcaattacaccaatcggactcggtttctgctcgaattatacgggggaaccccgtatcttaaggaatttatcctcgattacgatgaacacttcaagttttacaaggcgcccatgccaacacaccctgtcatcattatcctagataatgacgatgggtttggtaaaattgaaggggccctgaaggggaagcgctacaaccccacgatcttccccattactctgcctcccacagacttcagaaacgccgagtttatccacatcgtgcataacctgtacattgttttgacccctcttaaggggaaagacactaaatcttctatcgaggatctgttcactaaaaagttgagagcaactaagctcggaggtaaggtattcaacaaagagaataaaaccgattcagacaccgagtatggaaaggagtattttgcttcaaaagtggtcacccctaataagcacaaaattaacttcagtggctttaatcctctccttggcaggattaatcagtgtatccaacatttcgccaccttgaaacccgttaagcccgtgaagccgtga

SEQ ID NO: 8387 - RNA, 1773 nt, synthetic construct
  source 1..1773: mol_type = other RNA
atgaagatgatttctgctttaagagtcgccaagacaaagccggatctggcactcctcatgggcattgacgcaagtttcttaacgaatatattgtaccggttgaaaccagccactcagtacacttcctttactattccgaagaaaagcgggggggtccgaaccatctacgcccctagcgatgaactcaagtctatccaacgtgccctgagtaatttgctccagaactgtatgcaggaaatcaacacttccaaaggaacgaagttcaaccccacactgagccacggcttcgtgaggaatcgctcaatccttaccaacgcaattatgcacctaaacaaaaagaacgttcttaacatcgatctcaacaacttttttgaccagttcaacttcggtagagtgcggggttacttcatttccaacaagaattttcagctggacccagcagtagccacagtgatcgcccagatcgcatgttatgataataagctcccacaaggatctccttgcagcccagtcataaccaatctgataacacacagcctggacatacggctggcttccctggctaaggataattcctgtacttacacccgatatgctgatgacattaccattagcacccgaagagaagcttttccaaataatcttacttcagacggagcttctggctacatcatagagtcacgcctcgcggctgaaattaaaagagcagggttttccattaaccctgcaaaaacgaggattcagtataaagactcaaggcaggacgtgaccggcctagtagtaaacaaaaagcctgccactaagtccgaatactggaggaccgtccggtcacaatgccatgccctgtttcagacaggcaagttccttgaaaacaatagcaatccgccccagaccggaaacatcttcgtgctggagggaaagcttaacttcattgatcaaatcgacctgtttaaccggaagcgtagcaagcccttgctgaaccccgagtatgaaccctccaaaaataagtcaaagacacgcaagcttctgaacgggcgcgagcgcactttcagtaggttcttgttctacaagtatttctatggaaacaccaaaccaacaataatctgcgaagggaagacggataatgtctacttaaaggccgcgattaataagagagcttccgcatttcccagtctagccaagccaaaatctgggaatgatccttacgagctgctggtgaggttcatcaattatacatcgcgaacaagatttctgctcgaactttatggaggtacaccatacctcaaagagttcattctagattatgacgagtacttcaatttctaccgggcccctgttcctactcaccctgttatcataattctcgataatgatgacgggtttggtaaaatcgagggcgccttgaaaggcaagcggtacaatccaactatcttcccctctacactgccggcgaatgactttagaaatgccgagttcatctatatcgcgcataatctgtatatcgtgctcaccccccgtaaaggcaagaccgagaaaagctcgattgaggagctgtttcccataaaaattagggccaccaaactgggcggtaaagtttttaacaaacagaacaagaccgactctgaaacagagtatggaaaggaatactttgctagtaaagtggtgactcccaacaaggacaaaatcaactttagtggcttcaatcctttgctggagcgcatcaacaagtgcatccagcattttaccaccgtgaaactggtgaagcctttatga

SEQ ID NO: 8388 - RNA, 1824 nt, synthetic construct
  source 1..1824: mol_type = other RNA
atgcggaagtccgcacgcaaaccaccgcattttccggcatggcagcagcgcgttctcaagaaaattgatgacctgagggctgctagaaccaagccggacttggccttgctgctcaagattgattcctctcacctgacaaatgtgctctataggctgcgtccagaaacccagtacaaatccttcaccatccggaaaaaatctggaggggatcggactattcacgcgccatcagacgagcttaaaagcatacagaaagcccttagcactctgctgcaggactgcgctcaggaaatagaaaaaagcaacggccctaaatttaagtctaccttagctcatggtttcgtgcgagatcgtagcattctgactaattccgtgatgcatctcaatcgcaagaatgtcctcaatatcgatttgaaagacttttttgacggtttcaactttggccgcgtgcgcggcttcttcatagctaataggaacttccaactgcaccctgaggttgccacggtaatcgcccagattgcttgctacgataataaattgccccaaggatctccctgttcccctgtaatcacaaatctcatcactcacgcgctggacatccggctggcgagcttagcaaaggacaacagttgcatttatactcgttatgccgatgacatcacaatttctagtcgcgagaaggagttcccccttaccattatggcagagggcgccagctcatatacgcccggaaagcggttgcagcttgagatcaaaagagcaggattcgaaataaatcatcccaagaccaggatccagtataaagatagtcgacaggatgtgacgggcctgatagtgaacaggaagcccggtgtgaagtccgagtattggcgcaccgtgcggtcgcaatgtcactcactctttaataccggggcttttaaggaagatgtatccggcacgcccaccgaaggaaacatctttgttctagagggaaagctgaatttcattgaccagatagacttcttcaatagaaaacggaacaaacctattctcaaccccaattatgagccttcaaaccacggcagtaacacacgaaagctactgagcggccgagaaaggaccctttcgagattcctatactacaagtacttctatggtaatgcaaagccaacagtcgtttgcgaagggcaaacagacaatatttaccttaaagccgccattaacagattagccgtcggctatcccaaattggttcggcctaaaactgtggccgctccatacgaacttttagtccagttcatcaactacaccgggagaactaagttcctgctggagctggccggcggcacagattacctgaaaaagtttgtagctgaattcggttcatacttcaagagctataaggcacccgtgcctacccgacctgtgattctcattctggataacgacgatggctttaacgccatcgagggaatcctgaaagggaacaagtacaaacctacaatctttccatctgggttagccgcgaatgacttcaggaaggctgagtttatccatgtggtccacaacctctacatcgtcctgacaccactggccaagagcggaacaaagacaagtatcgaagatctcttcccacagtccgtgagggacacgaaattgggagagaaaactttcaacaaggagaacaagatcgacataatgaaggaatacgggaaggaattttttgccactaaagtcgtgactccaaagagaaacgagatcgacttttctgggtttaatatcattctgaagagactggagcaatgtattgagcactttgcaaccatgaccctaaccaagtcatga

SEQ ID NO: 8389 - RNA, 1764 nt, synthetic construct
  source 1..1764: mol_type = other RNA
atgatttccgctctgagggatgccaagaccaagccacagcttgccctccttctgggaatcgacgcgagcttcctgactaacgtcctatacagactgaaaccgtcttcgcaatacaagtcattcacaatccctaaaaagtctgggggggtacgaactatctatgccccatcagaagagttgaaaagcttgcaacgtgcactgtccagcctgttacaggactgccagcaggaaatctacaagagcaagggcccgaaatttaaaagcaccctgtcccatggatttgtgagagaaagatctatcatgaccaacgccgtcatgcacctaaacaagaaaagtgtcctgaacatcgatcttaaggattttttcgatcagttcaacttcggaagagtgaggggattttttattagcaacaccaactttcagctggatcccgctgtagccacagtgattgcgcaaatcgcctgttatgacaataaactgccccagggaagtccatgttctcccgttatatcaaacctgataacccactcactcgatataagattagcatccctggccaaggacaacagctgcacatacactcgctatgctgatgatattactatcagcacccgagagaaggactttcccgtgaacctgatgtccgaggaggccggcgaatacagccctggcaaaaagttggagagtgagattcgccgtgctggtttcgaaatcaaccataagaaaacccggattcagtacaaagactccaggcaagacgtgaccggcctgattgtcaataaacggccaggtgtcaagtgcgaatattggcgaacagtgcgatcccagtgccacgctctctttaacaccggcgaattcatcgaaaatgagtcatctaactccgagaagggcaatgtcttcgtactggaaggccggttaaattttatcgatcagatcgactacttcaatcgcaagcggtctaagcctatcctgaatcctgagtatcaactcagtgatcatggttccaaaactcgcaggctcctttcagggcgcgagcggactttctcaaggttcttgtattacaagatgttctacgggaacgctaaaccaaccatcctttgtgagggtaaaacggataatgtgtacttgaaggctgcgctcaatcggctggctgcaggatttccaaaactggttaaacctaaaaatggtaaggatccttatgaacttcttgtccagttctttaactataccgagaggacgcgctttctactcgagctcagcggcggaacaccctacctgagagaattcattgcgtcgtttgatgagcactttaattactttaaggcccctgttcccactagaccagtgattatggttttcgataatgacgacgggttcaaggtgatagagtccgtcttaaaaggcaagaaagtaaagcccgtggtgtaccccaatacattggcagcaagtgacttccggaattctgatttcatccacgttatccataatctgtatatagtcctcactcctagagcagcagccaacggcgacacagccatagaagacctattcccccagacggtgagggacgtgaaactgggggggaaggggttcacgaaaaagaacaatattgacaaggatacagagtatggaaaagagttttttgcctctaaggttgtggtgccaaataggaacaacattgactttagtggcttcgacattttcttgaagcgtattatgcagtgtatcgaacactttgacacagtgaagctcaccaagccgtga

SEQ ID NO: 8390 - RNA, 1713 nt, synthetic construct
  source 1..1713: mol_type = other RNA
atgggcgttaatgcaagtcatctgaccaacgtcctctatagaatgaaacctgagaatttgtacaagagctttacaatcgcaaaaaaaagcgggggagttaggacaattcatgccccagtggatgagcttaagtctattcaaactgccctctccatactactacaagactgtgtccaggaaatcaataagtctaagggggataagttcacatccaccctgtcacacggcttcgtacgtgagaggtcgatacttacaaacgctgtcatgcacctatcccagaagaatgtcctcaacattgatttgaaggacttcttcgagtcattcaactttggaagagtgcgcggcttcttcatcgcgaataaaaactttcagctggacccagctgtggccactgtaattgctcagattgcgtgctatgacaacaagctgccccagggaagtccatgttcacccgttataaccaatcttatcacccacagcctggacatccgattagcaagcctggccaaagagaactcttgcacatactccaggtatgcagacgatattaccataagtacccggaagaaggagtttccctctaacctgatgactgacggtcagcaaggctacagccctggaaagcgcctgcaatcggagatcaaaagagctggcttcgagattaatcgatccaaaacacgtatccaatataaagactcaaggcaggacgtaaccggtctgattgtcaatactaagctggccgtgaagaaggaatactggcggactgtgcgctcccagtgtcattcattgtttcagacaggcgcatttaaggaaaacgcctctgggacccccgaggaggggaatatttttgcgttggaaggtcggctgaactttatcgatcagatcgacctctttaaccgcaagcgcaataaaactgcccctgccctggatcatgatagcagccagaagaagtacaacacaaggagattgttgtccaatagagaacggaccttctccaggttcctctactataaactgttctacgggaacgccaagccgacgatagtgtgcgagggaaaaaccgacaatatctacctgaaatctgctatcggaagattagctggcgcttatcctaacttggccaagccgaaaagtgggaacgatccatatgaactcctcgtccggttcgttaagtacaccgagcgaacaaggttccttctagagttaagcggtggcacgccatatctgaaagaatttatccttggctttgacgaacacttcaaatactataaagcgcccgcacccaagcagccagtgattcttgtgttcgataatgatgatggatttgggaaaattgagggggtgctgaaaggtaaaaaatatagccccaccatcttccctacaactctcccgactgatgcctttcgcaaggctgaattcatccacgtcgcccacaatctctacatcgtgctcactccattaaaagaaaaaggggagcatacgagtattgaagacctgtttcctcaggctgtgcgggacattaagctgggcggcaaaaagtttaacaaggagaacgagatcgatattgatatcgaatacggaaaggagtactttgccaagaaggttgtgcttcccaataagaatgacatcgacttctctggctttaacatcatactgaccagaatggtgcagtgcatagaacacttcgcaacactgaccctgacgaagccttga

SEQ ID NO: 8391 - RNA, 1770 nt, synthetic construct
  source 1..1770: mol_type = other RNA
atgctgaaaattgatgccctcagacaaatcaaaaccaaaccagaactggccctgctgttaggcatcaacgcatctcaccttacaaatgtcctctacataaagcgcctggagactcagtactcttcattcacaattccaaagaagtccggcggagtgagaactatatacgccccatcagacgaactaaagagcatacaagctgcactaagtcatctccttcaggactgtatccaagagattcgaaattccaaaggtgaagtgtccaagagtacattgtctcacgggttcgtgcggggccgctccattatcacgaacgctgtcatgcaccttcgccagaaaaacgttctcaacttggacctcaaggatttctttgaaggtttcaattttggacgggtaaggggctttttcattgcgaacaaagactttcagcttgaccccgtaatcgcgaccgtgatcgcccagatagcttgttttaacaataaattaccccagggatcaccctgcagtcccgtgattaccaacctgattacccattcactggacatccgacttgcatcactcgccaagaagaattcttgtcgatatagccggtatgccgatgaccttactatttctaccagaaaaaaggatttcccgtctaatctcatggccgagggcgtctctggctatagccctggcaaaaaactccaggctgagataaagcgagcagggttcgaaatcaacagctctaagaccaggatccagtataaggatagccgccaggacgttacagggttagtagtgaataagaaaccagccataaagagtgagtattggcgcaccgttaggagccagtgccatgccttgtttcagacaggggcgttcatcgaatccactagcggaacgcctgaggatggtaatattttcgttctggagggcaggttgaatttcatcgaccagatcgatctctttaacaggaaacggaaccgtttcgacttcgtgtcagaatgggattcctcccagaaaaaaatcaatacccggagattgctgagcgggcgtgaacgtaccttcagcagatttctatattacaagctgttctacggtaatagtaagcctacggtggtctgcgaaggaaaaactgataacgtctacctgagatgtgccatggcccaaagggctaacgggtttccagaactctttaagtcaaaagcaggtgatgaacctagcgagctgctggtgcagtttgtgaagtacactgaacggactagatttctgctggagctggcaggcggcacatcctacctcaaggagttcattctgaatttcgacgagcatttcaagtattacaaggcaccagcgcccacgcaccctgtcatcatagtgctggacaatgatgatggatttggaaagattgagggggtgttgaactccaaaaaattcaaggccgttagttttcccgctacactggagggcggaagcttccgccaagccgagtttatccacgtggtacacaatctttatatcgtgttaacacctctacaaggtaagggggagcacacctcgattgaggacctgttcccccaggccgtgagggacattaagctgggagagaaaaagttttccaagaaaaacgagatcgacgcagctacccagtacggcaaggaattctttgcttctaaagttatcactccgaacaagaatacaattgattttagcgggtttgatatcattctgtcgcggatggtcaactgcatcaaacatttcgctagtgtcgacttggctaagtcctga

SEQ ID NO: 8392 - RNA, 1761 nt, synthetic construct
  source 1..1761: mol_type = other RNA
atgtctaagctggaggcgttgcgtaaaatcaaaactaagcatgaactggcaaccctgctaggaatcaagacttccgtgctgacgtacaccttgtatgtgttgaaaccagacacacagtactccagttttacactgaaaaaacgatctgggggtgaaaggacaatcttcgcaccatcagaacggctcaagtccatccagtccaccctttctgagctgctgcaggattgcagggacgagattaacaacaagaagcaggacgatggtaaattcaattccaccttatcccacggctttgttcgccggcattccatcattactaactcaatgatgcacctgaaccagaaaaacgtgcttaatatcgacctcgaaaattttttcgactgcttcaatttcggacgagtgcgtggctttttcatcgccaataacaatttcaagctcgatcctcatatagctaccgtcatcgcccaaattgcctgccacaacaacaaactaccacaaggctcaccatgcagtcccacaattagcaacctcattactcattctcttgacattcaacttgccaatctggcaagaacatattcgtgtaggtatacaaggtatgccgatgacatcaccattagtacacgcgagaacttatttccgaggaaaataatgagacacgaggacggtaagtttattgccggaaagcggctaaggcgcgagataaaaagagctggctttaccattaacgagaagaaaacacgaatacaatacagagattcaagacaggatgttacaggcctggtcgtgaataagaagcctaacattaagtccgaatattggagaacggtcaagtcccagtgtcacgctttgtttagtacggggagcttcaaagataaggaaaatggggagttcattgacggcaacgagaaaatcctggagggccggctcaatttcattgatcagattgaccggttcaaccgactgcgccagaagacacccctgaatcccgattacgccttagctaagtatggatacgacacctctaagcagctctctggtagggagagaacattcagccgttttctctactacaggttcttttatggcaacaaattccccactattctgtgtgaagggaagaccgataacgtttatcttaaatgtgccatccatatgctgaccagtggatatcctcaattagctaaggaaaagaccgaaactgagccttacaagctgcttttgaccttcctcaagtacactaagcgcacccggtttctgttgcagctgcacggaggcacaagctacctgagcttctttataaacagcttcgacaagcattacaacttctataaagcacccaagccaaacaatcccgctatcatcatagcagacaatgactcggggttttcatcaatcgagtctaagctgcgcaaaatcgacagcgccaaaggatatcatgggaagaaagcagggaaaaattacagacaggccgagttcatccacgtagtccacaacctctacatcgtgctcacccctaccacgaagacgaataaggagactgctatcgaagatttgtttgatagtagcactcgcaagattcaggtaagcggcaaatcttttaatccgtcaaacgacatgaacaacgatactgagtacggtaaggaagtgtttgccaaaaaagtcatacaggctcagaaaggaagcatcaatttcaatgggtttaagcctcttctgaatcggattgtggcggcaatgaatcactacgatgcgatcaaatga

SEQ ID NO: 8393 - RNA, 1764 nt, synthetic construct
  source 1..1764: mol_type = other RNA
atgtctaaactcgaagcacttaacaaaagtacctctaaacctcagctggctgcattgttaggggtcaaggctcagttcctcactcacgtcctgtatcggttaaagccagccactcagtacacaaattttacaatacccaagaagtcgggtggcacccgaaccatctttgctccctcagaaaagcttaagagccttcagtctagtttgagcactcttctgctggactgcattgatgagattaacgaggcaaacaccgtgaagtatacatataaacacgcactgtcccacgggttcgtcagagaatgcagtattatgaccaacgctgtgatgcacttgaaccagaaaaatgtgctgaatatcgacctcaaggacttcttcgattcctttaacttcggaagagtgagagggttcttcatcaagaataaccactttaagctggacccacacatcgccacggttatcgcccaaatcgcgtgctacgataataagttaccccagggctcaccttgttccccagtgatcacaaacctcataactcatcctctggacattaaattggctagtctcgcgcgaaagcattcatgtatctattcacgctacgcagacgacatgaccttcagcacaaggaaggcagtatttccttctcaaattatgcgccaggagcatggtaagttcataaccggcaaaaagctgaaaaatgagattaaacgggctggattttttatcaatgacaaaaagacccggattcagtataaagattctcgacaggatgtcaccggcctaatagttaatgtgaagccgaacgtgaagaaggagtactggcgtacagttaagtcccaatgtaacaggctcttccacactggcgcatttattaaaaagacagctgccggagacatagatgggaatattaatgaactagagggccagctgaacttcatcgatcaagtagataggttcaaccgcagtagaaagaaacctccactgaaccatacctacaaactcgataatcacggtattaataagacacctctgctgtctggcagagaaaagacattctccaagtttctctattaccggctgttttacgggaacaccaagcctacgatcctctgtgagggaaagacggataacatttatctgaaaagcgccatcagtatcttagtaaagaagtatccaaacctagcctcaactaagactaataaagcggcctacgaattacttattcgccttgtgaaatacagcaaacgcacgcgtttcctgctcgggctgtatggcggtgcttcgtacttgtcctactttacctctaagtttgacaaacagtacgtcttgtacaatgaggctcccaaaccacagcatcccgtgatcataatcctcgacaacgattccgggagcacaagcgtcaaaaagcagttcgagaagattaacagcgccacagcatatcccgctactctgcccaagaaagattacaaaaacgcggacttcatccatgtgacccacaatctatatatcgtgttgaccccactgactactaaaggaaatgacaccgacatagaatactttttcgatgatcccacaaggctgaagcagcataacgacaaatgctttaatactgccgacaaacgggatgacaaggccgatctgagcaaagaggcctttgccaagaacattatcaaggcccaaaagggctcaatcaatttcgatggatttaaaccgctgcttgacaggattgtggccgttattacgcactatgactccatcaaatga

SEQ ID NO: 8394 - RNA, 1764 nt, synthetic construct
  source 1..1764: mol_type = other RNA
atgtcaaagcttgaagccctcaagcaaatcacaactaagccacgactagcggcgttacttggagtaaaggtgcagacactgacacacgtgctatacattttgaagccctccactcagtataccggcttcaccattcctaagaaaaatggcggtactcgctccattttaagcccttcagataaacttaagtctctacagtcctcactctctaacctgttgctggattgcatcgatgagataaacgagactaagcataagaagaattaccgttacaaacatgctcttagccatggctttgttagagagtgttccattatgaccaatgctcttatgcacctcaacaagaagaacgtgcttaacattgatctcaaagacttctttgacagcttcaattttggacgcgtacgcgggttcttcatcaagaacaatcacttcaagttggacccccacatcgccaccgtgatcgcacagatcgcctgctacgagaataaactgccccaaggtagtccatgctccccagttatcacaaacttgataacgcattctttagatatcaggctggcatccctcgcaaagaaatactcctgcacatattccaggtatgccgacgacatgacatttagtacccgagagagcgtgtttccccggcaaattatggggcaggaagagggacagttcattatcggcaaggaactaaagagcgaaattgaaagagccggattttcgatccatgacaaaaaaactaggatacagtacaaggatagtcggcaggacgtaaccggcctgattgtcaataagaagccaaacgtgaaaaaggagtattggagaacagtgaaaagccagtgtcatctgctctttcagaccggtgctttcataaaaaagaccgtcaatggagacgtggagggcaacattaacgaactgaacgggcagctgaatttcatcgatcaggtggatcgctttaacagaagcagggagaagccacctctcaatccaatttaccagttgcaaaatcacgggcagaataccacgtctctccttagtggaagggagaagacattctcccaattcctgttctatcgtttattctacgcaaatatcaagcccactatactgtgcgaagggaaaaccgacaacatttatctgaagagcgtcatctcaatactggcagagcattatccaaaactggctaaccctaagactaaaaagaacccttatgaactgctgattcagttcgtggagtactcaaaacggagtagatttttgctccagctctatggcggcgcatcctatcttaactactttgtgagtcagtttgacaaacactaccggcactacaaggcccctacaccccaacagcctgtgatcattgtcctggataacgattcaggtagctcatctatcgtgaccaaactgaaagctctggactcggttaaagcctatcccgccacggtcaaaaaggaggactgtgctaaagcagatttcatccacgtcgttcataatttgtacatcgttctgactccgctgaatgctaagaatgaaccgacagacatagaatctctctttgacgacagtatccggctgaagcagcacgacgggaagtgttttaacactcgagataaacgcgacgagaaagtcgatctgtctaaagatgccttcgcgaaccacattattaacgcccaaaagaatacgctcaattttgacaccttgaaacccctgctggatagggtagtggccgctatctctcactacgatagcatcaaatga

SEQ ID NO: 8395 - RNA, 1755 nt, synthetic construct
  source 1..1755: mol_type = other RNA
atgaataaattggagcggctcaagaaaatcacaaccaagccagccctggctaatttactggaagtgaacccgagtttcctgactcacgttctgtacatccttaaacccaacacccagtataccacgttcaccattccaaagaaatcagggggcatccggaccatcaaagccccctcagtaaaactgaagagcctgcagtcaaacttaagcaagctcctgctggactgcattgatgaaattaacaagagtaagtccctggaagagaaaaattacaagcagacactcagccacggcttcgttaggaaacgctctatcatgactaacgctttgatgcatctgaaccagaagaatgtcttgaatattgacctgaaggacttctttgactctttcaactttggccgagtgcgcgggttctttattaagaaccacaactttcagttggaccctgcaatagccactgtgatagctcagatcgcctgcgatgataataaactccctcagggttccccctgtagcccggttattacaaatcttatcactcattcgttggacataaaacttgcgtctttggcccggaaacatagctgcatctacagtagatatgccgatgacatgacttttagcactcgcaagtctgtattcccacaacagataatttgtcaggagggagatcatttcgtgacaggtaagaatatgaactccgagattgtcagggccgggttcagcatcaacgagaataaaacccgcattcagtataaggatagtcgtcaagatgtcaccggcctgattgtaaataagaaaccgaatgtcaagaaggaatattggcgaaccgtgaaatctcagtgccactctctgttccgaactggcacctttacgaaaaaaacagcagcaggtgtggtcgccggcaacataaaggagctggaggggcagcttaattttatcgaccaagtcgacagattcaatcgccctagacagaaagctcccctgaatccaatttaccaatacaaaaactacgggaatgataagactcccctgctctccggacgggagaagacattcagcaagtttctctactaccgtctcttctatggaaacacgaagccaactatcctgtgtgaaggcaagacagacaacacatatcttaagagcgcaatctccattctcgcagggtcatatccaatcctggcttcagcgaaaacgagaggcagcgcatatgagctcctgatcaggacagttaaatactctaaacgtacccggtttctccttggactatatggtggagccccctacttgtgttccttcataaaggctttcgagaaacattacaagttccacaaggcgtcgaaacctaaatgtcctgtggtgattgtgctggataacgattccggctttaagaactttcccaagatcttaaagggaattaagagtgccacccctcatcccacaacattagagtccgatgactacaggaacgcagaattcatacacgtgattcataacctgtatatcgtgctaactcctctgagatctaagggggaagaaaccgatatcgagtacctgtttgacgatgctacgcggctaaagcaacactcaggcaagtgctttaacatcgtggataaaaggaatgacgaaaccgacctttccaaggacgcttttgccaaacacataatcaaagcccagaaggctagtatcaactttgacggattaagaccactactcgacaggattacctcagccatcaatcactataattga

SEQ ID NO: 8396 - RNA, 1806 nt, synthetic construct
  source 1..1806: mol_type = other RNA
atgaaaaatctgagagccttgaaagatatcaggacaaagcccgagctcgctaagctgcttgacgtcacaccacagaatttgacgtatacactatacaagatcgggcggaaaaacctttacatctcatttgacatcccgaaaaggaacggaggtatcaggactatatacgctccagtctgcaatcttaagctgatacagtcaagattgagcaatctactgcaggactgcatcgatgaaattaacaacaagccaaataagtcctccaagctggcccatgggtttgtgcgtaagggctctatcattactaacgctaatgtgcacaagaaccagaaatatgtgcttaacattgacctgtctaacttctttgattcatttaacttcggtcgcgtgcgggggtttttcattaagaatcgaaacttcgaactggatcctcacattgccaccgtgctggcaaatatcgcctgcttcaacaataagttgccccaaggaagtccctgtagtcctgtcattaccaatctgattactcactccctggatataagacttgcctccttagctaaaaaaaactcttgtagctactctcgctatgctgacgatattaccattagcacacgcaaagcggtctttcctaaccagattatggaacagcacgaaaatggtaaatatctcgctggaaaaaagctgactcatgaaattacgagggccggctttagcattaacgaaaagaagacacgaatccaacaccaatacagcaagcaggacgtgaccggactgacagttaacaaaaagctgaacgtgaagaagatctattggcgtactgtccggtcacagtgttaccagctcttttgtaccggtactttttacaaaaccacttataaaggccgcgaacagggcaatatcaatgagttagagggccagctgaacttcattgaccaggtggatcatttcaaccggatccgaaagacctataataagaatctccataacagccatcatagaaagattggcaactcgcgggaacgcctcttcggcagattcctattctttaggagcttttatgggaattcccagcccaccatcctctgtgaagggaagactgatataatctacctcaagtcagccataaaaatcctcgctacagacttcccgaacttagcaagaaataatccaaaaaaaggcggctacaagctcctaatccggttcatcaagaatagtaacaggacgaatttctttatggacctgccaaaagatggggggtacggatgcctggtaaccttcatgaagaaattcaacgagaactctctgggttacaaagccccttccccccaacaccctgtgataattgttgtagacaacgacaagggatttgataattttacgactgcgattaaccaaacaaagaaggagtactcccgcaagaataaaagtaccatcaatcccagcaacccaaccgaggagaaggattaccgtaaaaagggattcatccacgttatccgaaatctgtatgttgtccttacacctttaagagacggcgagtctgcctctgacattgaggccctgtttgatgaggacacaaggttgaaaaaacacgagggcagatgcttcaatacagtactgaacaggaatgacaaggatgatttgagtaagaacgcattcgccacccatataataaagaaacagaagacctccatcaacttctcgaattttaaatgcctccttaatcggatttcaggggcaatcgaccactatgcagagaacggaagcgtggcaaaaagtgtgaaaaccgactatatcttggttctgtga

SEQ ID NO: 8397 - RNA, 1776 nt, synthetic construct
  source 1..1776: mol_type = other RNA
atgtcaaaactaaccaccctgaaatctatcacgacaaagaaggagctggcagacctgctggagataaaacgctccaacctgacctatacgctgtacgttctaaaaccgtcaacccagtatttccagtttcagatacccaaaaagaacggcggattccggaccatcgatgctcccgctaagcggctgaaagatatacagtcaaaactgagcgacctgttcctcgactgcattgacgaaatcaataaaggtaaggagaaaaatcagcataacgagaaacacggcatacacacctatcccatgttatcccacgggttctctaggaagaagtcaatcatcacaaatgccctgatgcacatcaacaacaagaacgtcctaaatctggatcttgacgacttctttgattcatttaactttggacgtgtgagaggcttcttcattaagaacagaaattttgagctccatcccgacatcgctacagttatcgcgcaaattgcatgctataataacaaacttccacaagggtccccctgctccccggtgataactaatctcattacacacagcctggacatcaaacttgccagtcttgcccggaaatattcctgtacatatagccgttacgccgatgatattactttttctacacgcgaagaagtgtttcctcggcagctgatggctgaagagaagggcaagtacactcccgggaaacgacttaggagagagattgagtcgtctggtttcacaatcaatagtaagaaaaccaggatccagtacaaggatagtcgtcaggacgttacaggattgattgtcaataagaagccaaacatcaaaaaggaatactggcggacagctaagagccaatgtcacagccttttccgcactggaacgttctacaagctcacggaccagggcatggccataggcaacattaacgagctcgagggccagctgaactttatcgatcaggtcgacttttttaatcggctgcgccaaaagccaccactaaatcctctgtacaagttagagaatcaccgaaaaaatacctctaatctgttaaccggtcgagaaaagacctttagtaggttccttttttaccgctacttctatggtaacaataagcctacaatcttgtgtgagggcaagaccgataatgtatatttgaagtccgccatcaacgtgctgcaagaccattaccctaggctcgccaaaagcaaatccaaacacggagaatacaaacctatcgtgcatttcttcaactactctaagcgcactagattcctgttagaaatcttcggcggggcagattatttgaaagggtttgtcgaaaactaccagaagaactatagcttttacaaggcgcccaagccaaagaacccggtgattttgctcctcgacaatgatagtgggagcaatggaattatcaacctgataaaaggactgaggactaccaccattcatccatccactaccaagaaaaatgatatcaagaacgccgactttattcatatcatgcacaatctctacctgattctcactcccttgaacggcagcagtgacacggcaattgaggatctctttgacgccactaccaagtcgattaaagtggggggaaagtctttcaaccctggtaagcctgacacttcaaaggagtatggcaaagagattttcgctaatagagtggtaaaggaaaagaagaatagcatcaactttgatgggttcaaaccattgttaaacagaatctccgcagtcatagaacattattctaaacacacatga

SEQ ID NO: 8398 - RNA, 1800 nt, synthetic construct
  source 1..1800: mol_type = other RNA
atgtctatcctaatcaatctgcagaatgcaaagacaaagaaagacctggcagccatcctggatatcaatacgtcaaccctcaccaatgccctctacaggaaaaaagtctctagtctgtacacagagtttaagatacccaagaaaaaggggggcgaaaggataatctacgcgccccagcgagagttgaagatcatccaaaagaaactgtctcttattttgcaggactgtctcgaagaaataacctccaacgatgaaaagatctccaacctcagtcatggatttatgagggagaagagcatttatactaatgcgacccatcacaagaacaagaaaaatgtcctgaacatagaccttaaggacttcttcgattgtttcaattttggcagggtcagaggattcttcattaagaacaagaacttcgaactgcaccaggacattgccaccgtaattgctcagattgcctgttataacaacagcctcccacagggctccccatgctctccgattatctcaaacttaatcactcattcactggacattaaattgtcacaattagcctcccgctatagctgcttctacactcgctatgctgacgatattactttcagtactcgggagtgcatctttccaacccccttagcccggattgagaacaatgaatatgtgatcgggaaaaagctaagacaagaaattactcggtccggctttgagataaatacaataaaaacccggatccagtacttgtcttcgagacaggacgtgacaggattgatcgtcaacaagaaggttaacgtgaaaaaggaatactggaagtccgtgcgggctaaatgcgacttcctgtttaagaacggatattactacgtgctagacgacactggaaaggagataaaaggctcactcagccagctctatggccagctgaatttcattgaccaaattgactacctgaacaagctgaaaaagccaattgagataaatccgctttacatactggcgaaacacggtaacaataaaacccctttgttcagttctcgcgaacgagtgtttagccactttctcttctataaaagcttctacggaaatgagaacacgaccgttatctgcgaagggaagaccgatattatctacatccgctgtgctatcaaatcactttacaaatcttacccatctctggttgataaggatgggatcatcaaattcgatttcttcaagtatacccgaagaactaggtatcttctgtccttgcatggtggtaccacctatatcgccgactttattaagaattaccgtcagtactacagcctgtataaatcggctaaacccacaaagcccgtgatcataatcctggataatgataaaggccttggggatatcatcggaggcctgcaaaaggagagaaaacctcgtctggtaacagcagacggggaaacgactcttaatggcatcaactccctcaagaagagcctgtacgtgcatgtgtgttttaatctctatctgctgattgtccctcacctgaaccagaaggagacgagcattgaaagtttatttgacaagagtgtcctcgatacaaaactaaacgggaagtccttcaccacagagaacgagtttagtcacgagaaattctatggcaaacacgtttttgctacagccgtgattgagaataacaagcacaaagtggactttagcggttttaaccagatctttaaggcaattgagaaaatccaggatgattataaggatgtacagaagaatacagcaaagccccctattaaaggttccacaattaatgccactccttga

SEQ ID NO: 8399 - RNA, 1248 nt, synthetic construct
  source 1..1248: mol_type = other RNA
atggcggagatcctggacattaacacaagcaccctgaccaatgcgttgtaccggaaaaaggtgtcctctctgtacagcgaatttaagatcccaaagaaaaaaggaggagaacgcactatttttgccccgcagagagagcttaagatcatccagaagaaactcagcctgattctgcaggactgtcttgaggaaatgaccagtgaggacgagcggacccctaatctaagtcatgggtttatgcgagaaaaatctatatacacgaacgcttcctgccacaagaacaagaagaatgtgctgaacattgacctgaaagactttttcgattcgttcaattttggtcgggtcaggggtttcttcatcaagaacaagaagttcgaattacatcccgacattgcaacagtgattgctcagatagcctgttataataactcccttccccagggaagtccctgctcccctataatctccaacttgattacccactcattggatatccgattatctcaattggctagcaggcactcttgcttttacacccgctacgcagacgatatcacattctctaccagggagtatatctttcctacctcactggcaagaattgaaaatgacgattacgtcattggcaaaaaactgagacaggaaatcaggcgcagtgggttcgagatcaatagcatcaaaactaggatacagtaccatacatctagacaagatgtcactggtctaattgtgaacaagaaagtgaacgtgagaaaggagtattggaaggacgttagagctaaatgcgagtctctcttccgtacaggcacttactatatactggatgacaacgaaaaagccaagcccggaacgctgtcccagctctatggccaactcaactttatcgatcagattgattactcgaacaaaattcgcaagccaataaaaacaaacccgctgtacgttctggccaaacacggatcaaataaggcacctctattttccagccgggagaagaccttcagccggttcctcttctataaaaatttctatggcaacgagaagactactatcatctgtgagggcaagacagatatcatttacctcaggtgtgccatcaaatcactccataatcttcacccatcactggtagacaaggatgggctcgccaattttgagttctttaagtatacgcgccgaactaagtatctgctgagtttgaatggcgggaccccatacctgtccgactttagccgtgaacttttatga

SEQ ID NO: 8400 - RNA, 1833 nt, synthetic construct
  source 1..1833: mol_type = other RNA
atgctggcagacaaacttgacagcttgaagaacatcaaaaccaagagggagcttgctattctgctgggggtcaaacctagctttctaacacataccttatacattcgaaagcctgaaaattgctattcagagtttgagattcccaaaaagaaggggggctaccgtaagatcaaggccccaaaccctcagctgaaatcgctccaatctaagctgtccgttctgctcctggactgcatggatattatcaagagtatcaatttccccaacgtgattagccacaaacggttgagtgtgtcccgcaatcatctcaagatcaaagtaccaggaagcccacgcaaggaatcaactttatcccatggctttgagagaaaccgtagtatactgacaaatgcggtgatgcataccaatcagaagaacatccttaacatagatctgaaggactatttcgattcctttaatttcgggagagttaggggctttttcataaaaaacaggaacttccaactgcacagcgatatcgctaccgtgattgcccagatcgcctgttttgaggataagcttccgcagggctctccatgttcccctgttatcaccaatctaattacacactctttagacattcgactagcatccctgtctaagaagcactcatgtacttacacacggtacgcagacgatatctctatttcaactcggaagaaaacatttcctgcaaagattgccaaagaggttaacggtgaatatgtcctcgggaagaagcttcgtcaagagataaagcgcagcggcttcaaaatcaataatacgaaaactcgcatccagtataaggactctaggcaagacgtcacaggtcttgtggtgaacaacaagcccaatgtgaaaaaggagtattggagaactgtgcgctcccagtgccatagcctgtttcacaccggggaattcacccagagaaattcagacggagagctggaagaaggcaacatcaatcggcttgaaggcaaactgaatttcattgaccaggtcgatagatacaaccgaatgaggcagaaagagaagatcaatcacttgtacgccctcagcaactacggacacaaaatgagtccttattggtccggcagagagaaaacattcagtaggtttatcttctatcggctcttctattctaacgtgaaaccgactatcctgtgcgaaggtaaaacagataatgtatacctgaaggcagctataaatgaactcgttaaagactatcccaagctggcctctcccccgacgaaggatgaacggtataatttactggtccgattcgtggaacatacgaagcggaccaaattcttgttggagctctcaggaggcagctcgtacatcagcttttttatcggtaattacaagtcccgctatggattttataaagcgccaaaagacaacgctcccgtcatcctcgtgctcgacaacgacagtgggttcgactgtatagagaagaagatcaacaaaatcgattccgtccagatttaccctactaccctgaagaaagacaaattaagggaggccgagttcatacacattacggaaaacttgtacattgtactgacaccaatcagtgccaccgctaaaaaaactgatatggagtccctctttgatgataagaccaggctgattaaatacgacaataagtgcttcaacaccatagacaagagagacgaggataaggacctctcaaaagatagctttagccggcacgtgatcaaaaaccagaagacctctattaatttcgatggataccgccccctattggatagactgaacaaggtgattgaacattacgacaagctgaagtga

SEQ ID NO: 8401 - RNA, 1767 nt, synthetic construct
  source 1..1767: mol_type = other RNA
atggatactatcacgaaactgaagaattgccgctcaaaaattgatctggctctccttttaaactgtaaaccgagccacttgacatacttactatataagcagtccccctctcaaaaatacacccagttctctgtcaacaaaaaaaacggcggtatcaggaatatatctgctcctattagccagctgaaggagctccaaagcaatttgtcgcatctgctgctcgactgtattgacgatattaacgccacaaagagtatgaagtctaccctaagccatgggtttgtgcgcgaaaaaagtatcattaccaacgctgaaatgcataagaacaccaagaatgtgctgaatatcgacctagaaaattttttcgcaagcttcaacttcgggcgtgttcggggcttttttatatcgaataacaacttcctgctgaataaggacatcgccactgttatcgctcaaattgcgtgtcacaataatgagcttccgcagggctcaccctgcagtcctgtcatcacaaacctcattacccattctcttgatattagattggcaaacctcgcaaaaaagtatagctgcacctatagccgatacgctgacgacatcacctttagtacacgaaagacacaattccctaaagagattatgtgcgagcgcgaaaacgtatttaccccatcaagaaggttaaatggtgagattatccgtgcaggattcaaaattaatcctaagaagactcggatccagtataaggactcaagacaagacgtgaccggcctgatcgtcaataaaaagatcggcgtgaagaaagaatatcggcagataacgaagtccatgtgtaatagtctttttcactccggaggttttacaaagcttgtggatggaaaacacgagaaggggtccattgaagagctcgagggacgactcaacttcattgactccatagacctgtacaatcggctgacctttccagagaagcttagcatacactacccccatgtaaagcacgggattaaaactaaaaaactgctgacgggccgcgagagaactctatccaagtttctgttctataagaacttcttcgccaatgagaaaccaaagatcttgtgtgaaggcaaaactgataacatctatctgatggccgcgctgaataatttgtcaagtaactaccccagcttagcatcccctgccacagccacaaagctctttgagcccttggtttctttcctcaactatagcaaaaggactaagtttctgctcgagctcgccggcggtacgtcatacctggtgggcttcatactggattatcacaaatactactccttttacaaggccgagaagtctaataacccggtgattatcatacttgataacgatgatggcctgggtgaagttatcaaggctatcgccaaaatcaagacctgcgtggtggaggcaccagtcatagctgggcagaatatcaacgaccaggtcaaatcctctaggttcgttcatgtgtgccacaatctttacctcgtaatcacacccctggatcaggggaaagacacaatgatcgagaacttattcgaaccacagctgtgggcgaccccaattaaggggcggaccttcgatcctactgaaaaaaaaaagcccactgacaactactatggaaagaacattttcgccacagaagtggtgaaccccaagaaaggacagatcaactttgacggattcaagccactgtttgacagaatggtcgaggtcttggaacactacaaggtgaataggcagccttga

SEQ ID NO: 8402 - RNA, 1749 nt, synthetic construct
  source 1..1749: mol_type = other RNA
atgaactctataacccagttgaagaactgcaatacgcgtgtggacctcgctcttcttctgaaagtgaagcctgccgttctgacttttacgttatataagaaaggcccacagaataactataccagttttaacatcccgaaaaagaatggcggggttagaaccattaacgccccaattggtaagctgaaaactctgcagacaaacctgagcaaactcctactggattgtatcgacgacatcaataaagagcgcgggtttaactcagggctggcacacggctttgttcgtgaacggtcaattataacaaatgcgatcatgcacaagaatagcaagaacgtactgaatatcgatcttgataatttcttcggttccttcaacttcggccgcgtgaggggttttttccagaagaacaggaactttcttctcaacgatgaggtggctacaacaatcgcacagatcgcatgttgtaacaatgaactgcctcaaggaagcccctgctctcccgtgattaccaacctgatcacgcactcattggacattcaactgttgaagctcgcgaataagtactcctgcacttactctcgatatgccgacgatattaccttttccactcgaaaatccaagttccctcccgaaatcatggtggagaacaacggcgtgtataacccaagtaaacgcctgaagcatgaaatcaaacgggctgatttcaaaattaacgacaagaagactaggatccagtacagagattctcggcaggacgtcaccggtttgattgtcaacaagaagattggagtgaaaaaggaatacagacgcacaactaagagcatgtgtaatagtttgttccatacaggctcctacaccaagatagtcaatgacaaacacgtagctggaacaatcaatgaactggaggggagactcaatttcatagacagtatcgacctgtacaaccggattaactatcctgagaaacttagtatccattacacccatcggaattatggatataagacgagagcgctgctgactggcagggaaaagacctttagcaaattcctattctacaagtggtttttcgctccatcaaaacccacaatcctgtgcgagggaaagaccgacaatatttaccttaagagcgctattttccaactagccgcacattatccaaaattggtgaaagctacaccatttgagcacctggtaaattatttctcatacaacaagcgttccaggtttctcctggagctctctggagggacatcttacctagccggcttcatctcctcctattccgatcactacagcttatactcggccccaaaatctggccagcccatcataattatcttagacaatgacagcggattaaatgatattatctctgccctcgccaagatcgacacctgcactgtctacccgatcgataaagccacgggcaatataaaagaagatataaagaccgctgactttatacacgtggtccacaatctttacatagtgctcacacctctcaacgggaaaaatgacagtatgattgaaaacctcttcaatcccgcactgtggagcacccctattcagggaaggacttttgatcccaccgagaagagaacccccaagaactcattttatgggaagaacactttcgccactgaggttattaaacgccaaaaagccaccatcgatttctcggggtttcaccctttgtttgagcgaatgacactggcaatcacacattatgagggtattcggtga

SEQ ID NO: 8403 - RNA, 1767 nt, synthetic construct
  source 1..1767: mol_type = other RNA
atgaatagcattgagaagctcaaaaagtgttcatccaggaatgatctctccattctacttgatgtaaaaccgagtatcttgtcttacgtcttgtttgtggaatcagacgcgagtaagtatcaggaatttacgatctcaaagaagaccggtggagaaagactgatcaaagctcccaacgaccggcttaaagagatccagaaatcattgtccgacttgctgcttggctgcattgacgacataaacaaagagaagaatatctccaacaccttgagtcacggcttcgttaaggaaaaatcgatcataactaacgccgaaatgcacaagaaatccaagaacatccttaacatagatttgggcaatttctttgactcctttaattttggacgcgtcaggggcttcttcatcaagaacaacaactttctcctggatccaaacgtcgctaccgcagtggcccagatcgcatgccataataatagtctgcctcaagggagtccttgctcccctgtgattaccaatctgatcacccactctctggacatctcgctggcgaagctggccaaaaaaaattcctgtcggtatacaagatacgccgacgatatcaccttctccacgagaaaaaatagcttcccagttgaaataatggcagagctggatggggtctataaagccagcaagcgcttagacaaagaaatttctcgcgccgggttcgtgattaacgagaagaagaccaggatccaatacaaagattctcgccaggatgtaacaggtctagtggtaaacgagaaagtgggcatcaaaaaagagtaccgaagaactgttaaggcgatgtgcaactccttatttcacaccggctcttatacaaggctgatcaatgatgagcatgtggagggatcgatcctggaactggaaggaagactcaatttcatagactcagtggatcggcataatcgagtgcactatcccgagaaactctctacccattaccaacaccgtcaccatggtattcggagccgggaagtttggtcaagtcgcgagaagactctgtctaagtttctgttttacaagtggttctacgccaactcaaagactactattctgtgtgagggcaaaacagataatgtctacctgagcagcgccatttataaactgaagggaaagtatccaagcctgatcgacgctaaggccaagagcggggagccaaaatctctcgtgaagttcatggactactcccggcgtaccaagtttattctcgagctggcaggaggaacatcatatctagccaacttcattgacgcttacaaggaacgatacgagttttacaaaagtgagaagcccgaatatcccgtgctgattatactcgataatgacgatgggcttaatgacaacggtggcatcatcgcaaaattacagaagattagcactatgagcatgcaccccacaccacctaagaagggcaacatgaagtctaagattaaaaacagcgagtttatccacgtcatgcataatctttacgtagttatcacccctctcaattctggcaacgacactatgatagagaatttattcgagcagaagctgtggtccacaccactcaacaagcgtactttcgaccccacagagaaaaaggaaccgaaaagcagttattatgggaagaacgattttgctacaagggtcgtgaagaagaaacaggacagcataaacttcaatgggttcattcctcttttggatagaatgcagagggctattgaacattacaaaacggtgtga

SEQ ID NO: 8404 - RNA, 1758 nt, synthetic construct
  source 1..1758: mol_type = other RNA
atggatgccatcgacaaattacagtcatgcaagacaaggcgggatttagcgatcctgttgaattataacccttctcactttacacacctgttgtatcactcaatcccggaacaacgctataagtccttcctcatcccaaaaaaaaacggcggggagcgctccatttcggctccaaatgaaaagcttaaacaactgcagcggaacctgagcaacctgctccttgaatgtatagacaacatcaataagcggaacggcgtgaataactcactgtcccatggctttgttagagagcgttctatcataaccaacgcggagatgcataagaataagaagaacgtgctgaacatcgatctcgagaatttcttcgggagctttaatttcggtcgagtctccggatttttcatcaagaataactccttcctcctagaagaggtcatcgcaaccacaattgcccagatttgctgctttaataacgagctgcctcagggatccccttgtagtcccgttattaccaatttgattactcacagcctagacattcgactcgctagccttgccaaaaaatattcttgcacctacacaagatacgttgatgatataaccttttctacacggaaatccaccttccctatccaaattatgaatttcgagtatggagaataccttccctcacagaggctgctccatgagatcacccgctcgggcttcaatatcaacaatagtaagaccaggatccagtttaaagatagccgacaggatgtcactgggctgattgtaaacaaaaaggtcggtgtcaagagggagtacaggcagttgacaaaggctatgtgtaataagcttttcaataccggtagatttactaaagagatcgatggacaggaaattgaaggatccctgctggaattagaaggccagctgaactttatcgacagcattgattattacaaccgggtaaattacccccagaatctctctatccactacacgcacagaaattttggattccggactaaattattgctcaatgggagagagaaaatactcagtaaattcctgttctacaagaacttctactcatctgataaaccaacaatcctttgcgaagggaaaactgacaatgtgtatctgctctccgctctgcacgccctcagcagtagttttaaaaagttagccactccccccacaaagacgactgacttcaagacagagattaaattcctgaactacacgaaacgcacaaagtttctcttggagctagctggcgggaccagctaccttgcaatgttcatagccaactaccacagtaactacattcaatataaggcccctaagccaaaacatccagtcattatcatcctggacaatgacgagggcctaaaagacattattaacgagctggagaagatcaaaacttgtaccttttcaccacccaagaccaaggggagcaccacacgcgatgcagtaaagacgtctacttttgtgcatgtggtgcataacctgtatctggtgattacgccgctgtctgacggtaacgacaccatgatagaaaacttcttcgagaaagagctgtgggaaaccgtggttaatggacgtaagtttgaccctactgagaaaaaagaaccgaagaatatcttctatggcaagaatatcttcgcaaatgacgtggtgaagttgaaccgtaagaagattaactttgaaggctttaggccccttttttatagactggagaaggtgataagcaactacaacaagatatga

SEQ ID NO: 8405 - RNA, 1755 nt, synthetic construct
  source 1..1755: mol_type = other RNA
atgaacgcgatcacccagttaaagaactgccattctcgcatcgatctggccatactgttgaaatgcaaaccatccttcctttcttacgtgctttataaaaaggcagcctcgagcaagtatcacgagttcgaaattgacaagaagaacggcggcaagaggaagatctgtgcccccgccgacgacctgaagagcatccagcgtaacctctcagatcttctgttagattgtatcgatgacatcaacaaggataagaattactacaacacgctgagtcacggattttcaagggagaagtccatcattagcaatgctgaaatgcatagaggccagaaaaatgtgttaaatatcgacctcgacaacttctttggttcctttaattttggacgagtgaggggattcttcatcaaaaaccgaaatttcgagctgaatgaagaggtcgctactaccatcgcgcagattgcttgttatgagaaccagctgcctcaaggctccccatgcagtcccgtcataacaaacctgatagctcatccactcgacattagattggccaagctggcaaagcagcatagttgcatctatacacggtatgccgacgatattacctttagcaccaggctgaaagacttccccgcaaagctgatggcccaaccaacaccgaacgagtatgtggtgggatctaaactcaacagggagatccaaagagctggttttaacataaaccacgataagaccaggatccagtacaaggactctagacaagatgtcactggcctggttgtaaataaaaagatcggcgttaagagagagtatcgccagctgacaaaggccatgtgtaatagtcttttccatacaggctcatataccaagctcgttggggacaaccacattgacggtagcctggatgagttggaagggagactgaactttatagactacgtggacctgcacaatcggttgcagtatccggaaaagctgtccattcactaccctcatcgcaactacggaagcaaaacccgggccttgctgacaagccgagagacaacacttagtcggtttctattctacaaatactttgtagggaacgaaaaagcgactgtcctgtgcgaaggtaaaaccgataatatctaccttaaggccgctctccgccagttagcggcacattatcctactctccagaacgaatccaatcacgagtgttaccttgatttcctgaactattctaaacggacgaagtttctcctcgagctatttgggggcaccgcttatctggctggcttcattacgtcatacaatgatctgtactcctactacaaggggccgaaagcaaataatcctgtaattatcgtgctcgataatgacgacgggtttgacgcaatcgcatctgccttgaataaaaccaaatcgtgcactattaaccccacccccactcacacgaccgggcataacttcaattccactgagtacaagaatagcaatttcattcacgtctgtcacaacctatacgtggttctgacccctctgaacaatggtagtgacactatgattgaagacctttttgatcgctctttatggcagacatccatctccggccgtactttcgatcccacagggaaactaaaaccctctagctcatactatggaaaaaacattttcgccacagaagtggtcgctccacgtcaatcaagcataaatttcgatggctttaagccattgctcgatcggctcaccgacgtggtgggaaattatgccccttga

SEQ ID NO: 8406 - RNA, 1758 nt, synthetic construct
  source 1..1758: mol_type = other RNA
atgaacaagatcctccagttaaaaaactgccgcaccaggattgaccttgccatcttattgaaatgtaagccctctttcctgacctttctgctctataagacaaaacaggaggatcactatgaggagtttgagattcctaagaaaacgggcggaatcagaaagatctgctcccctaaaggtgacctcaaactgctccagaaacgcctctcactcctcctgttggactgcattgatgacattaacagcaagaacaagataaagaacaccctttcccacggtttcgagagagaaaaaagcatcatcacaaatgccgaaatgcatagagggaaaaagaacgtgctgaatatagacctgaacaatttcttcgacgagtttaattttggtcgtgttcgcgggtttttcatttccaacaaagatttccaactgacacctgaggtcgcaacgaccatcgcacaaatcgcctgttacaagaataaattgccccagggaggcccagccagtcctgtaattacgaatcttattacccacatactcgacgtaattctttctcgactcgcaaaaaagaatagttgcatctataccaggtatgccgatgatatcacattctctacccggaaaaagctattcccctcgggcatcatggaggaaactgatgctaacatttatatcccctctaaatcactgaaccacgagattaagcgggctgggttctcaataaactcaaaaaagaccaggattcagtataaagatagcaggcaggacgttacaggattgacggtgaataaaaaagtgggcgtcaaacgcgaatacaggcagttaaccaagagcatgtgtaattctctttttcatactggagagtacactaagaaggtgaataacgaggatgtggctgggaccttgaaggaattggagggtcgcattaactttatcgatagcattgacttctacaatagaaaaaagcatccgaaaaagctcagtattcattaccaacaaaagaaccatggcctgaataccagactgttgctgtccgggcgagagaaactcctgtccaagtttctgttctacaagaacttcattgggaacgataaagtcactatactttgcgaaggcaagactgataacatttacattaagtcggcgctaaagaccctggtcaataattatccaaagctggccgaaaaaaaggccgaagagccatataagtcctacttaaacatcctgaactatagcaaacgtaccaaatttttcctggaactggcaggaggaacaccttacctgaattttttcatcaagaactacgagaagcactacaacttttataagagtgtgcctgctgaaaagccagtgatcataatactggacaatgatgacggcttcaaactcatcattaatacaatcaaggagatcaagaaccatacttgtctgccatacccgaaccgacggcagacaccaatcgaatacctgaagaacgctgacttgatacacgttacacacaacctatacatcatacttacacccctgagcaatgggaatgacactatgattgagaatcttttccccccagatctgtggaatcaggacatccagggacggaccttcgaccctacagaaaagctaaaacccgaggaaaactattacggcaaaaagacttttgccactgaggtgatcgcgcccaaccgggatcacattaattttgacggctttagaccgttatttgacaggctgactaatgtcatcgaacactatgagaagatctga

SEQ ID NO: 8407 - RNA, 1764 nt, synthetic construct
  source 1..1764: mol_type = other RNA
atgaattctatagaatccttgaaaagctgtgtgactcgaaaagatcttgcacggctgctgtcttgtgcccctagtcacctcacgtatgtcctgtataagttgcccgcggctactaagtacaagcagttccctgtgtccaaaaagagcggcggcgttaggcaaataaacgcacccacgaccgacttgaagaaaatacaacgctgcttggccaatctgctccaggactgtattgagaacattagcgaagaacatgagtacgacaacaaggccgctcatggattcgtgcgcaagcggtctattatatctaatgccgagatgcacaagagacaaaaaaatgtggcgaacctcgatcttgagagcttcttcgacagctttaactttggtagggtgcgtggtttttttatcaagaaccggcattttgcactgtccgaagaagttgccaccactatcgctcagattgcctgccacaatggcgtgcttccacaggggagtccatgctccccagtgattaccaatctcattgctcattctctagatattagactgataaacctagccagaaaacactcatgcgtctatacaaggtacgcggacgatctcacattttcgacaagaaaagcaactttcccacctcagatccttagggaggaggatgggaaaataatccctagtaagacactccggaatgaaattaaacgggccgggttcagtatcaaccataagaagactaggatacagtataaggactctcgtcaggatgtcacgggtctggtggtgaataagaaagtaaacgttagttcagactacagcagattgacaaaggctatgtgccactccctatatacaaaaggtttctacaccaaagaagagaatggaaagctggtacagggcaccatcaaggaactgaatggacgtctgctgttcatcgactcagtcgataaatacaaccggatcaattaccctgacaaattatctgtgcactacaaccacaaaacccacggatatcgcacacgagtccttcataacggacgagagaaaaccttctccaaatttctgttctacaagcacttttttgctaatacaaaggtgtgtgtgctttgtgaaggaaagaccgacaacatctatttgaaatgcgcactcgattcaattggagcccaatttcccaagctgtacacaccggcagggaacggcaaggatgccatcacacacatcgagctcttcaaatattccaagagaactaggttcttaatggagctgtatggcggcagcagttatctcgggggttttatccagtcatacaaagaacggttaaagtcctacaagaaattgccactgactcgccccgttattattcttctcgataatgacgaggggctgtctaaacatatccgaaccgagatgaagagcgcccacgccactatctacattaatggcaagatcgtgactaacttcgataagaatattaagaaggctgactttgtccacattaccgacaatctgtatgccatcttaaccccactgaaagctgatggctcggatagcatgattgaggacttttttgagcctgcagttctgaacagacaggtaaatgggaggacattcgacccgaaggaagagaaaaagccccccgaaaagttctacaacaagaatacctttgcgacccaggtagtcgaagctgacaaaaaaaacatcaacttcaatggcttcaactccatcttcgagcgcatctcactggcaatcaaccattttgagagccgcacgtga

SEQ ID NO: 8408 - RNA, 1854 nt, synthetic construct
  source 1..1854: mol_type = other RNA
atggtcatggatgatgaacactccaaactgctgaaacttgcccgttataatcgccttttctcctgtgacagtcgaagtgaactggcaagcctgttgcacgtctccccagtgttccttaccaacatcttgtacattcaaaaaccagagaatctgtatcggagcttcaatattcccaagaaaagtggagggatccggcaaatagaggcgcctgcagaaagcttaaaggaaattcaaagtaagctcgccaatctgctcttggactgcattgatgcattaaacaccattaagggaaatgacagtaatttgacaggctcattcaataatactctgtctcacgggtttagccgtaagaaaagcataatcactaatgctgagcgccatcgcaacaggaagatcatactcaatacagatatagaggactttttcggcagttttaacttcggaagggttcgggggttctttctcaagaatcggaacttttcactctccgagaacatcgctacaaccatcgcacagatcgcctgttataacaacgctttaccacagggctctccttgctcccccgtgatttctaatctgatctgccatagcatggatgtgaggctagctaagctggccaagagacattccttgtactatacgagatacgcggacgacctgacattctctactaacaagcgcactcttccttcagaaattgccattgagaatggttcgcgctatgaaattggttctgttttccagagggagattcacagatcaggattttccataaatcacaacaagacacgcgtaaactttaaagattcacgacaggtgatcaccggtctgacggtaaacaagaaaatcaacacacatcggaactattggcgcttggagagatccaaatgccactacctgtttatgaccggcgacatcccggacgatgggagcagcaccgatctagcttctaagatcaataggctgcatgggcggctcaatttcattgacaccatggacagacacaaccgggttaacctctcaaagatcgagcagcaccttatcagccataaatcgattaatggcatcctgaaagaggacattgaagagatcttgttgggaaaagagaacggaaagaattcgcgaactaagaagaagttaaactcccgggaggaaacctttagcaagttcctgttttacaagaacttctacaacaaccagaaaccccttattattctggagggtaaaacagacaacatatatatagggtgtgcactggaaaggctattctcacattacaaagacctcatcaagtacgatattaaggagaagaagtacgagaagaatatcaagctgtacgagcacactaaaagggctagatatctactggatatccacgccggcgccgaccatctgtttgagtttgtgagacagtatgataagcgatactcttattacaaggccccgattgacaatcaccctgtgattttactccttgacaacgatacagggccaaaggcgatcatcaacttccttaaaaataccctgctcaaaaggtcaggcatagatcccaagaacgaagatttcgtccatatctgtcacaacctctatctcgtgctgactccactgaataagggaagagacacgtccatggaagatttttttgataaaagtgtgctgggcactacaataaagggtaaaaccttcgatccttccaatgaaaaatccaccggcactacgtacggcaaacacgtgttctctaccgaagtcgtcaaaaaaaacaaaaacaccatcagtttcgccagctttcgtcccatcctggaccgagttacagctgtgattaatgactacgcctctaagaaatctagcagctga

SEQ ID NO: 8409 - RNA, 1848 nt, synthetic construct
  source 1..1848: mol_type = other RNA
atggacgaaaagaaggcccggtcacggaagttggacagatattttaggctgtcaaattgcaccaccagatccgagcttgctagcctcctcaatatcagttctgtgtttctgacaaacgtgatctacattcagaaacccgacaacctctaccgctcgtttaatatcccaaaaaaatctggagggcatcgagtaatctttgcccccgccccgcagctgaaggaaatacaaagtagtctggcccaccttctgttggactgtattgatgccatcaatatcaaaaagggcgaaaatctaaagttgggtaagcctttcatttccaccctgtctcatgggttcagtagaaaaaagtccatcattacgaacgcagagaaacaccgtaatcgccgagtgattcttaacacagatatcgaagacttcttcgggagctttaatttcggtcgggtccgcggcttcttcctgaaaaacaggaattttcaactgttccccgatatcgcaaccactattgcacagattgcttgctacaacaacgctctccctcagggctccccttctagtcccgtgatcagcaaccttatctgtcacaccatggacattcggctcgccaaattggcatctaagcacagcctgtattatacacgatacgccgacgatttaaccttttcaacgaacaaaaaggagatccccgtcgaaatagcaatcaataaaggagggcaatatgaagtgggcatagcgctgaaaaaggagatacatagatccggtctgtctatcaaccacggaaaaactagggttaattttaaggacagcagacaggacgtgaccggccttaccgtgaacaagaaaatcaatacgaaccgacattattggcgtttagaacgctcaaggtgtcattacttattcatgacaggggatataccagatgatggaggttcctacgacctcgagagtaagatttcccgcctgcacggcagactgaactttatcgacactatagatagacacaaccgggttaatctggccaaaattgagcagcatattattagcaacaagtccataaatgggatcctcaaggaagacattgaggaagttcttttaggcaaggacaacaacaagaaaactaagcgcaataagaagctgaactcaagggagatcaatttctctaggtttctgttctaccggaacttctataacaacagtaagccacttataatctgtgaaggtaagaccgacaacatctatattagctgcgctctagagtccctgagcccatcctatccaggattgatcgagcacgataaaaaagagaagaagtacaagaagctcatcaagctgtacgagcacactaaacgtgctagatatttactcgacattcacggcggcgcagaccatcttctggatttcatacggcagtacgaaaagaggttttcctactacaaagctcctatttcgaactctccggtcattctactgctcgataatgacacaggcccaaaggccattatccagtatctaaagaatacattgctcaaaggaacaggaatcgaccccaagaatgaggagtttattcacatttgcaaaaacctgtatctcgttctgacccccttgtctaataaaaaggatactagcatggaagacttcttcgagaacaccgtactgaagacaaaagtgaatgggaaaagcttcaacccttcaaatgatgccgctaccgatactacatacgggaagcatatattttctactgaggtcgtgaagaaacataaaaatagcatcagcttcgatatgtttcgccctatctttgataggatcgtggcggtcattgaacactacgagtcgatcaaaaattcactgtga

SEQ ID NO: 8410 - RNA, 1767 nt, synthetic construct
  source 1..1767: mol_type = other RNA
atgtcgcggttggcattgttaaaacaggctactaccaagagaatgctcgctaaggttctcgatgtaaacccttctttcctgactaagaccctgtacctgaccagcgatgagctcaaatataagtctttcgaaatcccgaaaaggaatggcgatccacggaccatttatgccccaaacaaagaactgaaagacctgcagtccaggctgagcgtcctcctacttgattgcattgacgaaattaacaaggagagaaagatcactcccaaactttcacacggctttgtccgtaaccgttctattataactaacgccaagaaccatatccacaaaaaaaacgtgttgaatatcgacctcaatgatttttttgggtccttcaatttcgggagagtaagaggtttcttcatcaaaaaccagcattttgaacttcatgagcacatcgctacagtgatagcccagatcgcgtgttacaaaaatttcctccctcaaggttctccctgctctcccgtgattacaaatcttatcatgcattccgtggatatccggctggccaaactcgcaaagaagaacagctgcacatatacgcggtatgcagacgatattactttctctaccagagaaaatgtgtttcccaaggatattgcgatagctgacaagaataaagtgcacctgggaaggcgactgtcaaaggagattactgacaacggcttcacgatcaatgagaaaaagacccgcgtccaactgatggactcacgacaggatgtaacaggactcgttgtgaacaagaaggtgaacattaagagcgattattggaggattaccagggcaatgtgtcactcattatttcaaaccggaagttacattaagtgtgagcagaacggccaagccgtggcaggtacactgtatgagctagacggccgactcaattttatcgactacatcgacaagtacaataatgttaaggagaagggaccaatcgataacaggttcagtctgcgcaaccatggactcaactacagggagaagctgaatgttcgggagaaaacattttcccgattcctattctataagtacttctttgggcataacaaaccaactgttttatgcgaggggaaaaccgacaacatttatataaaagccgcgatcctgcgccttagtgagaaattcgagttactgtcaaatgccaaaactgacgagaaggaatacgagctgctggtgaacttcctagagtacaacaaacgcacaagatacttgttggacctttacggcggcgcttcctacctgaagcggtttgttgagcggtatagatctgattattcatactatcgtgctccagccgccacacagccggtgatcattgtggcagataatgacagcgggtcgacagaattaatcagctacctggtcaatcacaagcccctgtatcctgaattgaagaaggataaggctgagtccaataaaatcataaaggaatccagtttcgtccacgtcgagaagaatctgtacattgtatttacccctctgatcgacggaagggacagcttcatggagaatctttttctgccagagacgttgaacatagaagtggatggcagaaagtttagccctcagcaggaagctgacactaagaacagctacggtaaaaataccttcgccacaaaggtggtcagtgccaagaaacactccattcccttttccgggtttgaacctctcctcacccgcatggaagaagccataatccactatcgcacgaaaatcgaaaaaaaatga

SEQ ID NO: 8411 - RNA, 1746 nt, synthetic construct
  source 1..1746: mol_type = other RNA
atgacagagctagaacgcttacggaaagccaccactaaagttgatctggccaagatattgaacctaaatgcgccatttctcacacgcacactctacataaacaagatcgaaaaccagtatacgcaatttcagatccctaagcggtccggaggtcatagaaccattaatgccccaacatcagagctaaaggatatccagtcccgactaagcaaattgctcctcaactgtattgatgagattaatgccagtaagaacgttgagcccagattgagccacggatttaccagaaaaaggtcaatcatcacaaatgcagagaagcacgtccaccagaaaaacgtgctgaacattgatctcagcaatttctttgacagcttcaacttcggaagggtccgggggttcttcatcaagaacaacaacttccttctgcacaaagacatcgccacggtgatcgctaagatagcttgcctgaacgatggactcccgcagggatctccatgctctccggtcatcacaaacctgatctcccacagcctggatatccaattggcatctctggccaagaaaaatagctgcacctattcccgctacgcagatgacattaccttcagtacacggaatcgggagttcaaacccgagctggtcaaagttgatggcgtggacatcttcatcggctctaagcttcttcgcgaggtggagagggccggttttaagataaatgaaactaagacgcgagtgcagtttaaggactcaaggcaagatgtgactggactcgttgtgaacaagaaagtgtctatcaagtccgaatactggcgaactacccgtgcgatgtgtcaccagctgtttattagtggcagctacacaatcaagacctcaacggggacacgcgaggggactattaatgaattgcaggggagactcaactttatagactcaattgaccgctataatcatatgaggccaaaaggcccccccgataaattacacatccctatacaggacaggaagaattacagagaaaaactgaatgtacgtgaaaaggtgtttagcaaattcctctattacagaaacttccacgctaatgagaagcctaccattttgtgtgaaggcaaaactgataacatataccttaaagccgcaattcatagtcttagtaaacaatacgggctcttagccaagtccaaaacgaagactaccccatttgaactcctgatcaagtttttcaactattctaaacggaccagatacctgctggatttacatggaggcggctcctatctgaaggattttgtacagcattatcaggagaatctgaaatactatcagaagaccataccaaaaaaccccgtcattctgctgctcgacaatgactcaggccctaaagagctgattgacctgctggtgcatagtaaaaagttccccgattttcccaatggtaaagacgacattaagaatggggaattcgttcatatcacaagcaacctgtaccttattttaactcctctgaaaggcaacaaggacacaatgatcgagaatttctttgacaagaagaccctttcaatcaaagtcgacggaaggagcttcgattattcgaaggaagctgactctaccactaagtacggtaaaaataccttcgctactaaggtagtgctggagaacaagtcgtccatttcttttaagggcttcaagcctatcttgtcccgaatcgagaaggtgattaagcactataaagcattgtccggtgggtga

SEQ ID NO: 8412 - RNA, 1758 nt, synthetic construct
  source 1..1758: mol_type = other RNA
atgacgaaactcgaacggatacgcttagcaaaggataagaaagactttgcaaaattgctcaaagtgagcacggtgttccttactaatactttgtatcttactcccatagaagatcaatatgaggaattccagatccctaagcggagcggcggatttcgaaccatccacgccccaaccgccgagctgaaggatcttcaaagcagactctctaatttgctgttggattgtatcgacgatatcaacaaagagaaggagattatttccacactaagccacgggtttgtgcgtaaaaggtccattattacaaatgccaggttgcacgtgagacagaaaaacgtcttaaatattgacctcgaagacttctttggatcttttaactttggccgggttagaggcttcttcctgaagaacaacaacttcaaactggataagaacatcgcgaccataattgccaaaatcgcgtgcctcaatgataccctacctcaggggagcccttgttctccagtgatcaccaatctgatcacccacccgcttgatattagattggcccaactggctaaaaagtcctccagcgtttacacacgttacgccgacgacataacattttcaactagggaacgcaacttctctgagaagatagtatccattgaaaacaagaaggttactctctcaaaaaaactgaaagaggagatccgccggtcaggcttcaatattaaccacaagaagaccaggctgcagttcgctgactcacggcaggacgtaaccgggctcattgtcaacaagaagatcaacatcaaaagggagtattggcgtgagactcgcgctatgtgccatagcttatttaagaccggcgagtttaccatcaacgaaaatggaaatcttaggaagggtaccattgatgagctgtacggtaagctaaacttcattgacagcatagacagatacaaccactacaattgcaaagaatctctggaccataggtattccctgaaggacagggggatcgatactcatcgggagaagctgaatggtcgcgaatctacattcagtgatttcctctattacaagaacttcatcgccaacaacaaaccaacgctgctgtttgagggcaagaccgacaacatttacatcaagtacgctcttaaaagcaaatcgaacactagtaacgagctgaaaccgacgaagaatgataatgaccagctagaactcccagtttccctgtttgattacaccaaacgcacaagatatcttctcgacctgtacggcggcggaaactatctgaaattttttagtcagcggtataagaagtccttgaagtactacaatgtgaaaactccacagaatcctgtgattttggtgctggataatgacaatggtcccaacgggctgatcggatggctctcatcacagaagattattttccctaagatcgaagaggataataagaacaacagcatacgaaatagtgactttatccatatcgtcagtaacctgtatctgatcctgacaccccgagacaatgggaatgatagtatgatggagaacctgttcgacgacaaagcactcagttataaaatcgatgggagagagttcgaaccctccaatgaatatgattcgacaacaaaatacggcaagaatacattctctctcaaggtcgtgaaagacaaacataaggagatcaattttgacggattcatccccttacttctgcgaatagcaaaggtgattaagtaccacaaaaagtttgtcaactcttga

SEQ ID NO: 8413 - RNA, 1761 nt, synthetic construct
  source 1..1761: mol_type = other RNA
atggttcatcgacggaactacctgcttttgaaacaggccaaaaccaagcctgagctggctagcctgctggatgttagtgctgcatttctgaccagaacactttataggcctggggagctatcacatgtaaacagtcactaccaccaatttgacataacaaagaaatccgggggcgtaagaaagatcagcgccccatctgatgaactgaaagaacttcaacgccgcctgagtgatctgctgctcgattgtaaggaggtgatccatttcgacaataaggtggaatgcacgctgagccatggctttgagagggagaaatcaattattaccaatgctcgcatacatcggggcaagaaaaatgtcctgaatttagatctcgccgacttcttcgggagcttcaactttggacgggtgcgtgggtacttcatttccaacaaagactttaagcttgatccgcacattgctactacgttagcacaaatagcctgctataaaaactccctcccgcagggttctccttgttcacccgtgattgccaatttaatcaccaactcactggacatcaaacttgcaaagttggccaaaaggaacggatgtagctacactcgttacgcagatgatattacgtttagtaccagaaaggagatctttcccaaggacattctaaaaaacgtggagaataccatcctgggttctaagctgctcggcgaaatccgccggagtggattttccgtgaacccaactaaaacacgcttgcagtttaaagactcccgacaggaagttaccgggctggtcgttaataaaaaagtgtctgtgaagagcgagtattggagacttacacgcgcgatggctcactcactctttaagacgggcaagtttcaaatcattgaacaggatggatcgtacagaaatggtcacctttccgagctagagggacggctcaccttcatcgattccgtggacttctacaacaacttggagaagaagaaaaaaccagaacccaagtatgaacccaaggtgcacactggcataaataagttccgtggcagattgaattctagggagaagatctacggcatgtttctgcagtacaagaattttttcgccaatgagtatccgacaattcttacagaggggaaaacagacaatgtctatctaaaaagcgccctctcgcagctgcaggccctgtatccaaacttggtgaatagcaagagcgctaccaccgaatactcacccaagctgaaatttcctgatctgaaccgaaagactatgtatttactggacattggggatggagcaactccatttgtcaggttcgtgcagcggtatgttgacgacctcaagaacttcgaagataagaaagccaaaaaccctgtcatcctaatactcgataacgacagtggtcctaaagacttactgaatcacttggtaaagtctgtaaagtcttgccccaatgatattctgatgctcaagtctagcggtttcatccacttgttccataatctctacctcatcctgacaccccttaacagtgggggcaaggactccgcaatggaagatttgttcgacagcactacactcgctactgtcattgatggaaaaaccttctccccagaaaaaaacatcgacattaccaagcagtatggcaagcacatcttctccacaaaggtggtgaggtcaaacaaagcgaagataaacttcgacaaatttaagtacctgttcgacgagatcgagaaggtcaaactccatttcctgaccctgtga

SEQ ID NO: 8414 - RNA, 1689 nt, synthetic construct
  source 1..1689: mol_type = other RNA
atgatacatcgccggaattacctgctactaaagcagacaaaaacaaaacctgagctcgcggagattttaggcgtttctgccgcctttctgacccgcactctctataaacccggggtgcagtcccacgtgaattcacactaccatcaatttgatgtggccaaaaaaagtgggggcgtgcggacaattagcgcgccatcagatgagctcaaagatcttcagaggaagcttagtgacctgctccttgattgcaagagcgtgatacatctggacaacaaggtagaatgcagtttgagtcatggctttgaacgagaaagatccatcatcacaaatgctcgcatacacagaggtaagaaaaatgttttgaacctggacctggcagatttcttcggctctttcaatttcggacgtgtcagggggtactttataagcaatagggactttaagctcgacccacacattgctacggtcatagcacagatagcctgttacgaaaaccgcctccctcagggaagcccatgtagtcctgtgatcgcgaatttgattacaaacagtctggacattaagctgtcaaagctggccaaaaggaatggctgctcttatacccggtacgccgacgacatcaccttttcaacaagaaaaaagatcttccccaccgctatcctgaaagacgcagagaacgtcattctgggatctaaactgttaggtgaaatacggagagccggcttttcagtgaatcccaaaaagactaggttacagttcaaggatagcagacaagaagcgaccggcctggtcattaacaaaaaggtatccgtgaaatccgaatactggagactaacccgggcaatggcaaactcgctcttcaaaacgggaaagtttttaattgccgagcaagatggttcttatcgagaagggaagttatccgagctggagggacgattgacttttattgactccattgacttctacaacaacatcgaggaaaagaaaaagcccgagcctaaaagcgagcccaaaattcacaacggtatcaacaaatttcggggtaagctgaatagcagagagaaggtatatgccgagttcttgcagtataagcatttcttcgctaatgagtaccctaccatcttgaccgaggggaaaactgataagagcgattattctccgaaacttaaattccctgacctgaaccgcaagaccatgtatttccttgatatcggagacggcgcaacaccctttgtgaggtttgttcagcgttatgctgatgatctgaagcgcttcgagaataaaaaagccaaaaatccagtgatcctcgtccttgacaatgatacgggaccaaaggatctgctgaagcatttggtcaacaaggtcaagtcatgtccaaatgacatgggcactctaaagtcctcgggctttatccacctcttccacaacctctaccttatcctgactccgctgaacgctgggggaaaagatagcgccatggaagatctgttcgacgctgcaacaatcgggactgtgatcgacggcaaaaccttctctaccgctgatcacatcgacatttccaagcattacgggaaacacattttttccactaaggttgttaggtctaacaaggccaagatcaacttcgacaagtttaagtacatctttgacgaaattgagaaggtgaagctgcactataagaagctctga

SEQ ID NO: 8415 - RNA, 1761 nt, synthetic construct
  source 1..1761: mol_type = other RNA
atgatccaccgcaggaactaccttttactccgcaaagctaaaaccaagccagagctggcttctattttgggcgtctctgctgcctttctgactcggaccctgtatcgctcaggcgtgaaatcacatgtgaactctcattaccaccagtttgacatcgccaagaaatccgggggcgtacgcaccatatccgcacccagcgacgaactcaaagacttgcagaggaaactctccgacctgctgctggattgtaaggaagttatctacctggataaaaaagtcgaatgcttgctgtctcatgggttcgagcgcgagaggagtattataaccaatgcccgaatacacagaggtaaaagaaacgtactgaatcttgacctcgctgactttttcggatcttttaatttcggtcgggtgagggggtactttattgccaaccgagagttcgagttagaccctcacattgcaactgtcatagcccagattgcctgctataaagacagtctcccacagggtagcccgtgttcccccgtcatcgccaatctgattacaaattcactcgatatcaagctgtcaaagctggctaaatccaatgggagtagctacactagatacgctgacgatatcacgttctccactcggaagaaaagcttccccgccgctattgtgaaagacgtgaaaagtataaccctgggcagcaaactgctcggagagattcggagagcagggttttccgtgaacccaaccaaaactcggctgcaatttaaggatagccgacaggaggccacaggcctggttgtgaacaagaaagtgagcgtgaaatcagagtactggaggctgactcgggctatggcccattccctttttaagacggggaagtttcagatagcggaacaggacggcagcttccgtgatggacacctgagcgagttggaaggtagattgacatttatcgactcaatcgacttctacaataatctggagaagaagaagcagcctgagagtaaattcgagcccaagatccacaccggcatcaataaatttagaggcaagctgaattctagagaaaaggtttacggcaggtttctacagtataagcattttttcgcgaatgagtaccctactattttaacagaaggaaagacagattcggtatatttaaagagtgcactcaatcaactccaggcctcctatcccaacttagtaaactttaagtcttcgaaggaggaatatagccctaagctcaagttcccagatctgaaccgtaagactatgtatctactggatattggagacggagctacctccttcctgcgtttcgttcaacgctatacagatgaccttaagtacttcgaaggtaagaaagcgaagaacccagtgatccttgtgctagataacgatgcaggaccgaaagatctacttaatcatctcgtcaaaaaggtgaagtcttgccccgacgacatcgcagtcctgaaaagcggagggtatattcacctcttccacaatctttatctgatcttgacacaattgaacgccgggggcaaggactcggcgatggaagatttgtttgatgcagaaacactttccaccgttattgatggtaagacgtttagccctgcaaaacatatcgacgtttctaaacattacggcaagcacatcttcagtaccaaggtcgtgcgagccaacaaagagaagatcaacttcgataaattcaagtacatcttcaacgagattgaaagggtgaagctccacttttcaaccctgtga

SEQ ID NO: 8416 - RNA, 1806 nt, synthetic construct
  source 1..1806: mol_type = other RNA
atgtcgtacttttttgcactgaccatcgaagaatgcaaccttattcacaggagaaactacctgttactgaagcaagctaagaccaagccccagctcgctagtattttgggagtgtcagctgccttcctaactcggacactgtataagcccggcgttgagtcccatgttaattcccattaccatcagttcgatattaccaagaaaagcggaggtgtacgaactatctccgccccatctgacgagttgaaggatctgcagcgtaaactgagcgacctattgctcgactgcaaagccgtgatacatctcgataacaaaattgagtgtacactgtctcacggatttgaacgcaaaaggagtatcatcaccaatgcccgcatccatcgcaataagaaaaatgtcttgaatctggatctcgctgacttttttggctctttcaatttcggccgtgttagaggatattttatcgctaaccgggattggaagctcgacccccacattgccaccatcatcgcccagatagcctgttacaaggacacccttccacaaggcagcccctgctcccctgtaatagcaaacctaatcaccaacagtctggacattaagctgtcaaagttggccaaaagaaacgggtgttcatatacgaggtatgctgatgatataacgttcagtactcggaagaaagcctttcccaccgccattgtgaaggatgtgaagaatatcactttgggaagcaaggtgttaggcgagattagaagggcggggttcgcagtaaatcccaaaaagacaaggcttcaattcaaagactcccgccaggaagccactggactggtggtgaataagaaggtcagtgtcaagtcggagtattggagaactacacgggctatggcccactctctctttaaaacagggaaatttcaggtggccgagcagaatgggagcttccgggatgggcatctgtcagaactggaaggtaggctcaccttcatcgactcagtcgacttttacaacaaccttgaaaacaagaaccatcctgagccgaaatttgagcctaaggtccacaatggtctaaacaaattccgcggcaaactgaactccagagagatagtatacgggagatttctccagtacaagcacttctttgctaatgaatacccaactatcttaaccgagggcaaaacagacaatgtgtatctgaaaagcgcactgtcccggttgcaaaccacatatcctaagctggtgaatcctaaatccgcaaaagcgaaatacagcccgaaacttaagttcccgaatctgaatcgaaaaacgatgtacctgttagacctgggcgatggagcgaccccattcgtgaggtttgtgcagcgatacgccgatgacctgaagtattatgagtgtaagaaggcaaaaaaccccgtcattttagttctggacaacgacacgggcccaaaagaactcctcaatcacttggctaagaaggttaaatcttgcccagatgatattgcaactctcaagagttctgggttcatccacctcttccataacctgtaccttattcttacacctctgaacgcgggagggaaggattccgccatggaggacctttttgacgcagcaaccctgggtaaaaccattaacggcaagactttcagcacagctaaccacttcgatgatacaaagcactttggtaaacacgtgttcagcacaaaaatagttcgctctggcaaatctagcattaacttcgacaagttcaagtatatcttcgacgagatcgtgaaggtcaagatccacttttcaaagatcaagaattga

SEQ ID NO: 8417 - RNA, 1761 nt, synthetic construct
  source 1..1761: mol_type = other RNA
atgatccatcgcaggaattacttactgctcaaacaggcgaagaccaagccagaactcgcactgattcttggcgtgcccgctgcatttctgaccaatacactctataaaccgggggtgaattctcacgtaaatagccactatcatcagtttgacataaccaaaaagtccggtggcgttaggacgattagcgccccgtccgacgagctcaaggatcttcaacgaagactgtctgacttattactggattgtaaggcagtcatccagtttgataaaaagatcgaatgcaccctgtctcatggttttgagcgagaaaagtcaatcattactaatgccagaatccacagagggaaaaaaaatgtgctcaacctggacctcgccgatttcttcgggtcattcaacttcgggcgggttaggggatacttcattgccaataaggatttcaaactgaatccccatattgctaccgtgattgcccagatagcttgctataaagataccttgccgcagggcagcccatgtagtcctgtcatcgccaatttaattaccaactcgctagacatcaaactgagcaagcttgcaaaaaagaatgggtgtagttacacaaggtacgccgacgacatcacattttccacccggaaaaagtgcttcccaattgccatcgtcaaaaacgtcgaaagcctgactctggggtcaaaacttctgggggaaatcaagcgagcagggttcagtatcaacacatccaaaacacgccttcaattcaaagatagtcgtcaagaggctaccggtttggtggtgaacaagaaagtaagtgtgaaatcagagtactggagactcactagagccatggctcacacgctgtttaagactggaaagttccagataaccgatcaggacggcagcgtcaaggacggcaacataagcgagttggaaggtaggctcaactttatcgacgccgtggacttctacaataacctggagaagaagaagcaccccgagcctaagtttgaaccaaaagcacatactggaatcaataaatttcgcggagtcctaaatagccgcgagaaggtttatggacggttcctgcaatacaagctctttttcgcgaacgaatttccaacgattcttactgagggcaaaacagacaatgtgtacctcaaatccgcattaaaccgtttgcagaacctgtatcccaacctggtgacacctaaatcagccaacattaaatattctcccaagcttaagttccccgatttgaataggaaaacaatgtactttctcgacattggtgacggagctacacctttcactcggtttgtgcagcgctatgctgatgacttgaagcactttgagaataagaaagcgcagaatcccgtaatcctggtactggataacgattctggccctaaggatctgctgaaccatctagtgaacaaggttaaatcttgccctaatgacattgccacacttaagaattccggcttcatccatttgtttcacaatctgtacctaatactgaccccactgaacgtcggcggcaaggatagcgctatggaggacttgtttgataccgccactctgggcagaaccctcaacggaaagaccttctcgactgctaaggattttgacgaaacgaagcactatggaaaacacctcttttctacaaaggttattcggtccgacaaggagaacatcaacttcaacaagttcaagtacatattcgatgaaatcgagaaggtgaaaaaccacttctccaatatctga

SEQ ID NO: 8418 - RNA, 1749 nt, synthetic construct
  source 1..1749: mol_type = other RNA
atgattcacagacggaactatctgctgctgaaaaaggcccagacaaagccggagctagcttcaattttggggatccccgccgcgttccttacacgcgtggtgtacaagccaggcgtctctacacattaccaccaattcaagattccaaagaaatccggcggggctcgctccatctctgcaccatcatccgaactcaaggacatccagaggcggctatccgacttgctcctcgactgcaaggccgtaattcacgtcgataataaagtggagtgtacattatcacatggttttgagagggagagaagcatcataaccaacgccagggtgcacagcaataaaaagaacatcctcaacctcgacttggaggattttttcggtagttttaactttggaagggtgagggggtacttcatcgccaataagcactttaagctccatccacatattgcgactgtgttagcacaaatagcgtgctttgaaaataaactgccacaggggagcccctgcagtcctgctatcgcaaacctgattacaagctcactggatatcaagctgtctacacttgctaaacgctctggctgtagctacacacgttatgctgatgatattacgttcagtacccggaagtcagcttttcctgtggcaataatcaaggacgacgaaaatcttactttggggtccaagcttttaggagaaatccggcgcgccggcttctctgttaatccacgcaagactagactacaattcaaagatagcaggcaggaggccacaggcctggtggtcaataagaaagtatctgtaaagagcgagtattggcggctgacccgagctatggcacactccctgttcaaaaatggaaaatttcacatccctcagcaggatgggacccatagagacggattggtttccgagctcgaaggccgcctgacgtttattgacagtgtggactttttcaacaacctggccaataaaaaacatccggcatctaagtttgagcccagagtccatagtggcttgaatgggttccgaggcaaactgaactccagggaggtggtatacgggagattcctgcactacaagcacttcttcgcaaacgagtaccctacaatactgactgaaggtaagaccgataacgtgtatctgaagagcgccctgtcaatcttacagggtacttatcccaatcttgttaccgcaaagaccgccaccggcccctataagcctaaacttaagttccctcatttgaaccgtaaaaccatgtatctgttagacatcggggacggagccaccccctttgttcgttttgtgcaaagatacgctaatgatctgaaacagttcgaagacaaaaaagcgattaacccagtgattctcattctcgataatgacgacggacccaacgtcctgctcaaccatcttgttaacaaagttaaatcgtgtcccaatgataaggccacgctcaaaaatagcggttttattcacatattccacaatctgtacctcatcctgactcctctgaaggctggaggaaaggattctgccatggaagacctatttgacaaggccactttggctcgaaaagtgggcggcaaaacttttagtacggccgagcactttgataacgcaaagcactacggcaaacatatattctccaccaagattgtccggtcggacaagaacaatatcaacttcgataagttcaaccatcttttcgaggaagtggagaaagtcatccagcactatgaaaccctgtga

SEQ ID NO: 8419 - RNA, 1749 nt, synthetic construct
  source 1..1749: mol_type = other RNA
atgattcaccggagacggtaccttttgctaaaacaggccaaaaccaaaccccagctagcctcattgttgggcgtgtccgcctcgttcttgacgcgggtcctgtataagccaggagctaacacccattaccacaaattcgatatacccaaaaagtctggtgggatcagaaaaatcagcgccccaacatcagagctcaaagacattcagcgaaagcttagtgatctcctcttggattgtaaaatggtgaatcatattgacaacgagatcgagtgtagtctttcacacgggttcgagcgagaaagatccataatcacgaatgcaagagtgcatcgcggcaagaagaatgttttaaacctcgatctggaaggttttttcgactccttcaatttcggccgcgtgagaggatatttcattgccaacagggatttcaaactcgatccacatatcgctaccgtgatagcacagattgcttgctataatgataccctgccacaagggtcaccttgctcacctgtgatcgccaatctgatcaccaatagcctggatattcgcctcgctcgcttggctcgtaaaaacggttgctcctacactcggtatgctgacgacatgaccttttctacaaggaagagcgagtttccatttggaatagtcaaggacgcgggaaatcgtatcctgggagcgaagctccttggggagattagaaggtctggtttcagcgtaaataacaagaagacccgagtccagttcaaagactctaggcaagaagtgacaggcttggttgtgaacaaaaaaattaacgtgaagagcgagtactggcggagcactagggcaatggcccacaatcagttcaagaacggcagctttgaagtcgtaggcatcaatggcgaaagccgtgtggggacgctgtcagaactggaaggccggctgacgtttatagatagtgttgactactacaacaacctgcaaaataaaaagcaccctaaacccatttttgagcctatgaaacataatgggctttaccagtttcgcgacaaattaaacagtagggaggtcgtttattctaggttcctgcactataagcactttttcgcaaacgaactgcctactattctgacagagggcaagactgataacatctatttaaagtccgccctctcgatgcttcagcccatctatcccaacctggtaaaacctaaaaccatcaacaatcaatacgagcctaagctaaagttccccaatctgaatgacaagaccatgtattttcttgacttaggggacggcgcaaccccctttctccgatttgtgaagcgctacgtggaagattataaatattacggcaaccaggaggccaagagcccggtcattctggttttagacaatgacgatgggccggagactctgctaaagcacctcgtgaagaatgtgaagtcatgtccaaacgatctcgtaactctgaaaaaatctggcttcatacatatctttcacaatctttacctcatcctgacacccctgaacgcgggtgggaaagattccatgatggaagacctgtttagcccagccacactgagtactgtcatcggaggaaagaccttctctaccgctaaaaacatcgacattactaaggaatacggaaagcacatcttcagtacaaaggtcgtgagatccaacaagtctacaatctcctttgacaagttcaagtacattttcaacgagattgagaaagttaaggcacattttacatccctgtga

SEQ ID NO: 8420 - RNA, 1764 nt, synthetic construct
  source 1..1764: mol_type = other RNA
atgatcctgatccacaggcgcgactatcagctgttaaagaaagctaagaccaaaccggaactcgcctcactgctcggcatcaccgctgcatttctgacccgcgttttgtaccaccctggcgcgaatgaccactaccaccagttcgagatagataagaagagcggagggaaaaggaagatttctgcaccctccaacgagttgaaggatattcagtctaggttgtcgacccttctgcagaactgtttggatgttatcaggttcgataccgaagtgtccagagaatgcctcgtctcccatgggtttgagagagagagatctataattacgaacgccgccattcacaaagggaagcggaacatcctgaatctcgacttagacgacttttttggacaattcaatttcggtagagtgcggggttacttcatcgccaataagcatttcgaacttgacccccacatcgctactgtgatcgcccagattgcttgctatgaaaactcactaccacagggctctccctgttcacctgtaatcgccaacttgatcacagccagcttggatatgaaactcttaaatctcgccaaaagctgtggatgctcttatagtcggtatgctgatgacattaccttttctacccgcaaaaaagagttcccttcttccattgtcaaagtcctggagccactggaactgggaggaaaactaattggtgaaatccgacgtgccggattcagtgtgaacgccctgaaaacacgactacagtacaaagattccaggcaggaggcgacaggcttggtggtaaatcgtaaggttagtattaagtccgagtattggaggctagtgcgagctatggcctttcgcctgtttaaaaaaggcgaattcgaaatcctggacgtgaacggggagccacggatggggaccctgaatgagctcgagggcaggctggcgttcattgacgcaatagatcggtataataacatcgtagcaagacgtagaccgaaggctccttgggggaccatcaaacatactgggctgaacgcatttaagggacgccataacagccgggaggcggtctactcccggtttctgttctataagtacttttattcctcggaatacccaacaattctgacggagggcaaaaccgataatgtttaccttaaatctgcactttcggagttacagggcagctaccccagtctggtgagtcctaagggtcaagacaacgcttactccccaaagctcaagttccctaatctgaacaagaggaccatgtatctcctggatcttggcgacggcgcaactcccgtggctaagctcgtccaacgctacgagacggagcttgcctattttcacggaaaaaaggccactagccccgccatccttatcctggataatgacagcggtccttctgagctgctaaaggaactggccaagcccaaatacagaagttgcccaaattcagtgactgatatcaagaagagcggattcctgcacatattcgaaaacctctacctgattctcactccacttaactcagggggcaaggacagcatgatggaggatctctttgacgcaaagacattggcaacacccattaatgggaagacattctccactttaagcagctttgatactgctaagcattatggcaagcatgtctttagtacaaaagttgtgagaagctccaagtcatcaataaaattcgaccgatttcgctacatcttcgacgaaatagagaaagtgaaggctcacttcgccaaactgtga

SEQ ID NO: 8421 - RNA, 1734 nt, synthetic construct
  source 1..1734: mol_type = other RNA
atgctcctgcagcacgctcggacaaaacctgacttggcactgatcctgggagtgtcagccgcctttctaacacgcgtgctgtacaggccgggggtcgattcccattatcatcaattcaacatcgtgaagaagtccgggggtactagaattataaacgcccccagtgaagaactgaaagagattcaaagaagattagctactttgctgcaggattgtctggaggtcgttcacttcgacaacaagatcagtctagagtgcacagtgtcccacggtttcgaaagaaataggtcaatcatcactaacgccagcgtccaccaggggaaaaagaaagtgctgaacctcgacctgaacgactttttcggaagcttcaactttggccgcgtcaggggatactttatctccaatcgccactttaaacttaacccacatattgctaccgttatcgcccaaatagcatgttacgacaactgcctcccacaaggatccccctgctccccagtgatcgcaaatcttatcaccaacagcctggatatgaagctctctaggttagccgaacggggcggctgttcctacagcagatacgccgacgacatcacgttcagcacccgaaaaagccatttccctaagtcaatagtcaaggcgattgaaccagtagagctgggcggcaagctgcttggggaaatccgtcgcgccggttttagcgtcaatgccagaaaaacacggctgcagtataaagatagtcgccaggagactacggggttggtagttaacaaaaaggtgtctattaagagcgaatattggcggctcacccgaacaatggctcaccgactcttcaagaagggggcatacgagattaccgaagcggacggcgaacttaggcctggcacccttaatgagctggaaggccgtctagcttttattgatagcgtggataggcataacaatgttgtagattcgagaaggccaaaacctccatatgagatagaaaagcattctgggctgctgggctttaaggcacgacacaattcccgtgaggctgtctacagtcggtttctgttctataaacacttctatgccaatgagtacccaacaattcttacggagggaaagactgacaatgtgtacctcaagagcgcgttgtctgaattacagtcttcgtaccccaagctcgttaatccgaagaccaattctaagccctataagcccaaattgaaatttcctgacctagataaacgcactatgtatttcttagatcttggagatggagctacccccttcttacggttcatcaagagatatgaggccgaaaggtcatacttccatgacaataaggctaaatctcccgtgattctgattctcgacaacgatgatggccctagtacaatcttgaagcatctggcaaaagaggtgaagtcctgccccaatagcgtagacgacatcaaaaaatcaggcttcctccacatatttcagaacctgtacctgatcctgacgcctcttaagtcaggaggtaaagatagtatgatggaggatttgttcgacacaaagactctgaataccaccattgacgggaaaacattttcaactcagagttcttttgacggctctaagcactatggtaagcatgtgtttagcaccaaggtgattcggtcgcagaagtcctccgttaactttgatgggttcaaacacatctttaacgagattgagaaagtgatagcccacttcgagaaactctga

SEQ ID NO: 8422 - RNA, 1719 nt, synthetic construct
  source 1..1719: mol_type = other RNA
atgcttaaacaaatcaaaacaaaaccagagctggctgctttgttgaagatttgtccttcgtttctgaccaacaccctctacataaagaagtcaaccactaactatcatgactttgagattcccaagaagtccggtggggtgagaactatatctgcgcctcccgaagatctaaaggaaatacagaggaagctcgccgacctgctgcaggactgtaagcaggtgattcacttcgataagtcaatcaaatgctcccttagtcacggatttgaacgcgaaaagtccatcattactaatgctagtatccacaagcgcaaaaaaactgttttaaatctcgatctcgaggattttttcggcaagtttaatttcgggcgcgtcagagggttcttcatctcaaacaaagatttccgtctggatccacatattgccacggttgtcgcacaaattgcctgctacaacgacaagttacctcagggatccccttgttctccagtaattgctaatctcatcaccaattcccttgacataaagttatccaaaatggccagaaagtacggctgttcttatacaaggtacgccgacgacattacattttctacgaggaagattgagttcccaaaaagcattatcaaaaacaatgtgccgttagaactgggcggaaaactgctgggcgaaatccgtcggtcggggttttctgtcaatcctaataaaaccaggctgcaattcaaggatagcagacaggaggccaccggactcgtcatcaataaaaaggtgaatatcaagtccgagtattggagagatactcgagccatggcgcatcgcttgttcaagaagggcaaattcgacgtatacgatagcgacggaaacgtgcgcgatggcaagataagcgagctggaaggccgactggccttcattgacagcatcgattacttcaacaacgtcaacagtaagaataaggtggataaacagaaaaacggcgggctcaattcccacctggaaaaactgaatagccgggagcggatatatgctcggttcctgcactataagaacttctttgcaaatgaacaccctactatccttaccgagggcaagactgataacgtttacctgaaggcagcactgtgcaacctccagaacatctatcccaatttggtgagcaagaaaaccgacacgtcacagtacatccccctgcttcgattccccaacctgaactcaaaaaccatgtattttatggatctgggtgacggtgctactccatttctacggtttgtgcaaaggtatacagtcgatttcaattactacgagaatcagaagcccaaaagcccggtgattatgatcctagacaacgacgacgggcctaaaacattgctgaaccatcttgtcaaaaacattaagagttgcccgaatacattgcccgaattgaaaagtaagggtttcgtacacctattcaagaacctgtacataatcctgaccccactcaataccgacggatctgattcaatgatggaagatctttttgacaagaaaacactcggcacagtgttagacgggaaaaccttttctacagagaagagctttgacgagaagaaacattacggaaagcatatctttagttctaaggtggtgagaagcaataaagcaaacgttaacttcgacaagttcacgtatatctttaacgagattgagaaagttagggcccacttctccaccctcaaattttga

SEQ ID NO: 8423 - RNA, 1758 nt, synthetic construct
  source 1..1758: mol_type = other RNA
atgataaggaaaaggcggtacctgctgctgaagcgagcaaccacaaagccagaactagctgatcttatgaacattgacccaagctttctgacccgggttttgtatgttgaaaagacaaagagtcactatacggagttcaagattgacaagaaaagtggaggcttcagaactattttcgcccccagtgctgagctgaaggatattcagcgatccttatcagatttgctgctcgattgcaaagatgtcattcaatttgagaagggcgttaaattcactctgtctcacgggttcgagcgagagaagagcataatcactaatgcgtccgtccaccgcaataagaagaatgtgctcaaccttgacttggaagacttcttcggatctatcaacttcggccgggttagagggtacttcatctctaacaacaactttaacctcgatccccacatcgccacggtgattgcccagattgcgtgtcataacaattcccttccgcaggggtcaccttgttcaccggtgatctctaatttaattgcccaatctctggatatcaagctaagtaagatagctaggaagaatggctgcagctatacgcgctacgcggacgacatcaccttttccacaaggaaagaaaagttctcaaagagcattgtaaaggacgtggagaatgtcaaggtcggttccgtggtcctgaaggagatcaaacgatcgggattttctgtgaatgacaaaaagacacgtgtgttgtttaaggattccagacaggaagccaccggactggtgataaataaaaaggtcagcgtcaaacgggagtattggagggagactagagcaatggcccattctctgttcaagaaggacttcttcgaaatccaggaaggtaattcaaacgctagaaagggtacactgagcgaattggaagggcgtctaaacttcatcgattccattgaccactacaataacatccatgaggagaaaaaacctgcccataagtatgagcttaaaaaacactcagggctgtacgactacaaaaacaaactcaatagtcgggagaaagtgtactcaaagttcctctactacaagtactttattagctccgagttctccaccatcctgaccgagggaaagactgacaacgtatatttaaagttggcattgagctcaatgcgcaatttgtacccaaaactcgttgaagtggacaaagagactaaactgtaccgcccactgcttaaatttcctaacctcaacagcaagacccgttattttctagatttagatggaggcgctagccactttaccagatttgtgcagcgctatgtgaaagagtgtgagtactatggcgaacggaaacctaagagccccgtgatcatgatactggacaacgatgacgggcccaagtctctgctgaaccacctggctaatcatgtcaaaagttgccccaataatatcgatagtatcaggggttctaaacatctgaggctctttaagaacctctacctcattctcactccactgggcgaatattctaaggaatcgatgatggaagacttatttgagcctaccctccttgacacaaaacttgacggcaaagcatttagtcgcaacgataagttcgatagcgacaagtattatgggaagcatgtgttctccacaaaagtagtagccaagaataaagcacaggtgaattttgacggctttaagtacatcttcgatagaatactggaggtgaacaaacactacgcctccctggataaagtttga

SEQ ID NO: 8424 - RNA, 1743 nt, synthetic construct
  source 1..1743: mol_type = other RNA
atgatccacaagcggaactaccttctactcaagctagctaaaacaaagccggagctggcagccttactgaatatttcaccctcctttctcacccgagtgctgtatcacccaggggtcgaacatcactacaattctttcacaattcccaaatcaagcggcggcgccagatccattaatgcaccttcgaaagaactgaaagacatccagaaaagactggcgaatctactgttggactgcaaggatgtcattctgcgggacaacaaagtgaaatgtactttttcccacggcttcgagcgcaaaaagtccattatcacaaacgcggctcagcaccagaacaagaaggttgtgctgaatttggacctgagcgatttcttcggctccttcaactttggacgggtgcgggggtttttcattagtaaccgatatttcaagctggatccacatatcgcaactgtgattgcccagatcgcctgctttaataacagtctcccgcaaggctcaccatgctctccgattatttccaacttgatcagtaatagcctcgacatcaggctgagcacacttgcgcagaaaaatggatgtacttatacaagatacgctgatgatgtcactttttctaccagaaagccaacactgcccaccagcattttaaaagagctaaatcctgtgacactcggatcacgcctgatcaaagagatcgagtctgcaggtttcctgattaatcataagaaaacgcgggtgcaactgaaagacagcaggcaagaggctacaggactgatagtcaacaaaaaggtaaacattcgtgccgaatactggcgtgatgtgcgagccatggcccatagtcttttcaaatacgggtcttacgagatcaaggaaatgaacggcaataaacggaaaggtaccatacaggaactcgaaggccgcttgacctttatcgatcatcttgaccattataacaacattatccgcagcaaaaagccaaagcccatcttcgagcctgccaaacacttagggctgtttcacttcagaaataagctgtcttcccgcgaaaaaacctacagcatctttctgttctataaacacttctatgctaacagctatcccactatcatgacagaaggcaaaaccgacaacatctacttaaagtgtgctttgaactctctccaaaatgagtatccctctcttgcaaagaagaaatccattacgcagcagtatgagcctaagctctctttcttaaacttgaacaagaagacgatgtactttctggacatagagggaggtgcctcccactttcagaggtttgttgccaggtacgagtcagaatttaagtactttaccaatcagagcccttcagctcctgttatcatgatcttggacaacgattcgggcccaaatgccctgatcaatgacctctcaaaaaagcagagctctaatagtgtccctattagaaagcagaggtttactcatatcatccacaatctgtacctcatactcactccccttggtaatagtgaaaacacgatgatggaggacctgttcgataagaacaccctttcaataaagatagacgggaagagcttttccaagaaggataatttcgacattaagaaggagtatggaaaacacatcttcagcaccaaagtgattacccaacatagggacactatagatttccacaagttcaagtacatcttcgatgcaatagtagatgtttgctcccattttagtgggaacaaggggtga

SEQ ID NO: 8425 - RNA, 1758 nt, synthetic construct
  source 1..1758: mol_type = other RNA
atgataaacctcctcccatacttcctgctgaagcaggccaaaagcaaatcggaccttgccagcgctctgggcgttaccccaagtttcttaaccaacgtcctttatcgacagaggcccgaaaacctatacacagactttgacatcaataagaagtccggagggaaacgcaccattagcgcgcctagtgatcagctgaaggacctccaacgcaggttgtcagtcctccttctgaactgcaaagacgctatccactataaccaggggactaagttcacagtgtctcacggctttgagcgagaaaaaagtattgtaagcaatgctgctgtccaccggaacaaaaaaaacgtgctcaatctggaccttatggatttctttggcacgatcaacttcggcagagttaagggcttctttgagaagaatcggagttttgcattagcaccggaggtagccctgactatcgcacagatcgcttgctaccaagggaagctgcctcagggatctccatgttctcccgtgatagctaatctgatagccaacaccttggacatgcgtctggttaagctggccaaaaaatgtggatgctcctacacacggtatgccgacgatataacctttagcacgaggaagtctgcgtttcccaaagaaatagtgaagttcaccgatgggcattcatatgagctgggcgggaagctggtgaacgagattaaacgcgcagggtttgacattaatccagacaagacacgcgttcagtaccaaaactcccgacaggacgttactggactgattgtgaacaagaaggtgaacgttaaaagtgagtattggcgcgaagtgagagccatggcccatcagcagtttaaaaaaggttccttccacatcgctgactcagacggtaagccacgtgccggcgaactgagcgagcttgaggggaagctcacatttatcgaccaagtcgataagtacaataacattcagcggaagaaacagcccaagattctgtttagcttggctcctttgaaactttcagaacacagactgacgcttaattctagggagaagacctattctaggttcctgtattacaagtacttctacgccaataactatccaactatcctgaccgagggcaagactgacaacgtgtatctgaagtgtgccctcaataggctacagaaagattaccctacgttagtggagtctacacattccaaaacaactcagtataaacctaagctcttgtttccgcatctggataaacggacttactactttttggatctagatggtggcgcaacccactttcttagatttattcagagattctccgaagagttcagctacttcgagaatcaaaaacccaagtcaccagtgatcctcgtcctggataatgatgatggacccaagactatcttgacccatctcgccggaaaagtgaagaattgccccaataccgtagatgagattagaaataagcccttcattcatatcttccacaacctatacttagtgctgacacctctcagcgggggcggaggtacagcgatggaagacctcttcacccaagatactttgcagcaggtcgtcgatggaaaagtgttctccaggaaggacaaactggacaccaataaggaatatggcaagcacatcttctcgacaaaggtggtgcgggacaaaatgcaggaagtcgattttgcaggtttcaagcctgtcttcgatgccatcttagcagtaaacgctcacttctcccgcctgagattttga

SEQ ID NO: 8426 - RNA, 1764 nt, synthetic construct
  source 1..1764: mol_type = other RNA
atgagtaagaataagtctctgctgaaattgcaggaggctcagactaagcccgacctcgctaagcttctcggactgaagagccatttcctcacatacatactgtacaaaaccgacatagactctcactacaaagagtttgaagtgaaaaagaagacaggcggcgtgcgagtcatttcggcacccagccctgaactgaaggatatccaacgcagactcagtaaactcttgctggactgcaaggacgccattatggtcaagaacgacattaaaaaagagtgtatgcttagccatgggtttgagaggcacaagtccatcgccagcaacgcttatgttcacattggaaagaagaatgtgctcaacatcgatctggaggacttcttcggcacaatcaacttcggaagggtgcgggggttttttataaagaaccgcgattttcagttggacccagatgtggcgacagtccttgcccaaattgcttgtcacaataataaacttccccaggggtcaccatgctctcccgtgattgcaaatctgatcaccaactctttggacatcaagctctccaaactgtcaaaatccaagggttgcagttatagcaggtacgccgacgacatcacaatttccacgcggaaggcagaattcgacaaaagcattgtgaagttagtaaacggtgacataactttggggaaaagactggtgcaggaaatctctcggtccgggttcagcatcaatcctaagaaaacgcgcgttcagttcaaggatagtaggcaggacgccactggacttgtcgtgaacaaaaaagttagcgtgaaatcagactactggcggacagtccgtgccatggctcattcccaatttaagaagggctcatatgagacagttaataagaaaacgggtctggtgatgaaaggatctctagccgagctggggggtaagctggcatttatcgattcgattgatcggttcaacaattatctgaagaagagtcatcccaagccaatctacgagttagttcagcacaagaagtctgcaagttaccgcaatcgactgaatgggcgagaggcggtatattcaagattcacatattaccgcacattttacgcaaatgagtatccgaccattctgaccgagggtgttaccgatccaatctatctcaagagcgctctgtacggacttagacaaatgtaccctaacttagtgcgtagaaaactgctggataaaacctataagcccaaactactatttcctgagtttgactcaaggactaaatacttctgggatctggatgatggcgccggcaccttctccaagtttctggagcgctttgagtccgaatttcattacttcaagaaccagaagccaaagaacccggtaattctggtgttggacaacgatgacggcgtagggactttacttggcaagttgaccaacaaaaagtatcctaattgtcctgtgaaaaccgaggatatgagaaaccaggaattcactcacatattccacaatctctatatgatactcactccacggaaaaaaggccaggcggaatcagatatcgaggaactttttgatgagaagaccaaggctatcaagctggatggcaaatctttctccaaagaacctaaccccgaaaacgaatacggaaaaaagccatttgccctcaaggtcgtcagagccaatagggatactatcgacttcacgaattttaaacccatcttcgacaccattgaaaaggtgaaactagacttcgaaaaaaggtacagctga

SEQ ID NO: 8427 - RNA, 1815 nt, synthetic construct
  source 1..1815: mol_type = other RNA
atgccagctgcccagggtagcgtgtacaaacccacatttttcttgcctatctatgtgacattcatgaaatcaactcagcaggactcgatcgactgtctgaatgagctgaaaaatgcaaagactaaatctgacttagcccacatcctcgggattacacctagcttcctgaccagagttctttacgtggaaggcacccagaatcaatacgtccagttttcaattacaaagcgcagtggagggacacgcacgattagcgctcctagtattgaactcaaagacattcaatctcggctgtctaaactgttgttggattgcaatgacgcacttaactttagagaaggacggaaaggaggcgcgagccatggatttgagcgcaaaaaatctatcatcagcaatgcggagaaacacaagaaccagaagaacgtacttaacttagatctggaggatttttttgggactgtgaacttcggaagaattaggggttacttcataaaaagcaaggatttcgcactgaactctgacgttgctaccaccattgcccatattgcatgctatgacagaaaactaccacagggctctccatgctcccccgtcattgcaaatctcatcgccaggatccttgatgtgcggctggtcaaggttgctaagaaatatggctgtacttacacacgctacgccgacgacatcacattcagcacaaggaagaaggtatttccctccagcattgtggagtctgtgaatgataaagatgtggttttggggactagtattacgagagaaatcagaaaatgcgacttcaagattaatcacaagaagacacgggtgcagtttaaggatagccgtcaggatgtgaccggcttaatcgtgaacaagaaagtcaacatcaagcgagaatactggcgtgacgctcggagcaagtgtcacaaactgttcacagacggagagttttttaccaaaaactccaatggcgataaagtagttgggaaaatcaaggaattggagggcaccctcacttttattgattccgtcgacgagtacaataacaaacggccgaagggctatgagaagccagttttccagaaaattcacaagcagaagcattaccgaatacgactcaacgtcagggaaaggacctattcagagttcctatattacaagtggttttgcgcgaatgaaaccccaacgattttgaccgagggtaagaccgatgtcgtatacctcaaggctgcactgagtcagctggccagcgattaccctatgctcgccaagtcagaaccatataagcctcagatcaatttctttggatgttctgggaagacaaattatttactgaatctggacggcggtgccgctcattttatagactttgtgaactcctatgagctcaatgcctccatgtacaagaacataaagaagacgtcccctgtgatcatgatactggataatgataccggtcccgtgaacctgcttaaccaacttaaagggaaatacggactcccccaaactgttgacgagatcaggaagagtaatttcctccacatcaagtcgaacctgtatctgatactaactcccctgaatgggtcctcaaagaccgacatggaagacatgttcgaggatcacgtgctgaacgccgaagtcaaaggcaagaagtttaataagtccaacaacatcaacactagtaaagagtatggtaagcatatattctcactgaaggtggtccaagctcgcaaaagtaaaatctccttctcaggcttctgtccgatcttcgatgccattaacaatgtgatcaaccactacgacaaaatgaagtcctga

SEQ ID NO: 8428 - RNA, 1794 nt, synthetic construct
  source 1..1794: mol_type = other RNA
atgcgcaagggtgttccagcctactccaatctttcagaaatcatctacatgaggaacaatatgtccagcttgaacaaattaaagtctgcccgaaataaagtagagctggcaaaggtgcttggagtgagccccgtgtttatcaccaacatattgtacatcatcaagaaggagaatcagtatacaacctttaccattaagaagaagtcaggcggggacagagtcattagtgcccctaatgactccctgaagaacttgcagcagaagctgtctgacgtgttgctcaattgccttgaccaaattcggaaagacgagaacatctctactaatataagccatggattcgaacgcaagaaaagcataattacaaacgcgatgaaacacatcaagaagaaaaatgtgctgaatctggatctcgaagacttttttgattgtttcaactttgggagagtcaggggctttttcatcaaaaataaccgattctcgctgaatgaggaggtagctacagttatcgctcaaattgcctgcttcgataacaaactgccccaggggagtccgtgttctccagttatcacaaatttaatatgcagctccctggacatcaagttgaataaactcgcaaagaaaaacaagtgcacttacactcggtatgccgatgacattacctttagtactaacaagcaatcgtttgacacagagatcgtgtccagcaaatcgacattttcagacatcattattggtaacgagcttgataaagaaatcaaaaagagtgggttcaagattaactccaggaaaactaggcttcagaccaaaaacagtagacaggatgtgaccggcctagtggtcaataagaaaatcaacacaaaggtagagtactctaaaagcgtccgggcaatgtgtaacactctgtttaaaaccggatcctatacactgattgatcgcaaaacgcacgaagaacggaatggaacggtgaatgagctcggcggtatgttgtcatttattgactacattgaccgttacaacaacatcatctacaagaagtcaatagatcgccccataaataataaggtcaagatcgagaagaagctcaacaaacgcgagcgagtgtattccgacttcatctatttcaacaagttccataacaacgatttccctactattattactgagggtcacaccgatcagattcacatcaagtgtgctttaacctcactgaatgggaactataataacctgattgagaaccatgacaaaaactatcacctgaagtttagattcctcaaactgtcaaacaaactcaaatggctactgaatatatccgagggaaccgatcctatcaagaagttcattagcaattacatctgcaactatcgtaaatatccttgcttcaaggctaaaaagcccgtgatcattatacttgacaatgactctggcagcaaaggctctggcgggatactgagcatcctgaccaatggaagtttttctaacattacggaagataggaatagtctgagacggaagaactacattcatgtgtacgaaaacctctacattattttcaccccaatgattagcgataaagattcttgtatcgaagacctatacgacaaggaaatactcgaaacgaagttaaatggcaagaagttcaagaattctaacatcgacctgaaagttgatgagtattccaagaatcacttcgccaaatatgtcatacagaataacatcgagaacatcaacttttccaatttcaaaagcatcctcaatacaatcgatgaaatcattaggatctaccagtga

SEQ ID NO: 8429 - RNA, 1728 nt, synthetic construct
  source 1..1728: mol_type = other RNA
atgagctccctgacgaagctgaagtccgctaagaataaagtcgaattggctgctgttctaggcgtgtctcccgtattccttaccaagactttgtacaagataaaggtggagaatctctacacctcctttaccatcaaaaaaaaatccgggggcgatagggaaattttagcccccgacgactccctgaaagaccttcagcagagactcagtaacattctgctcaattgtctcgacgacatccggaaaaatgaatccacgagcaccaatatctcacatggattcgagcgaaagaagagtattataactaatgccctcaagcacactaagagaaaaatagtgttaaacctggacctagagaactttttcgattgtttcaactttggacgggtgcgcggctttttcattaaaaatgacaggttcctgctgaatgaagaagttgccaccgttattgcccagatttcttgtgtgtataataagctgcctcaagggtcgccttgttcaccagtgatcactaatctgatctgctcaagtttggacataaaactgaacaagatcgcacgcaaaaataaatgcacctacacccggtacgccgatgacatcacattcagcacttctaagatctcttttggtaatgaaatcgtttcccccaatagtacgaataaagacattgtgctgggtaaaaagctgaagaaggagattatcaaatcagggttcacaatcaactacaagaagatcaggattcaaaacaagaattcacgccaggatgtaacaggcctagtggtcaacaataaggtgaacaccaagatagaatatcacaaaaacgtaagagcaatgtgtcacaacctgtttaaaacaggcaactttaacctgatcgatagagagactaaaaaagaacgtattggaaccatagatgaattagagggcatgttgtcgtttattgacaacatcgacaaacacaacaacatcatctacaagaaaaacatcaagaccaacagcaagaagagcaaacttgagaagaatctcaataaaagagagcgagtctattcagatttcatttacttcaggaagttccactctaatgaactgcccacaatcattaccgaagggcatactgaccagattcacattaaatgcgccctcacttcactctactccgactttcctaacttgatcgagatgaagaatgaaaactaccatctgaaattcaacttccttaaactatccaagaagaataagtggctgctgggaatgggagagggcacagatccaatcaggtttttcattagcaactacatcaagaactacaataagtatccgtgctttaaagcaaagaaacctgtcatcatcctgcttgataatgacagcgggtctaaaggctctggcggaatcttatctctgttaacacaagggacctttagtaacataaaagagaatcgtaacgagctccgcaaaaagaagtatattcatgtgtacgagaacctgtatgtgatatttacaccactcatcaagggtaatgatagctgcattgaagatctttatgatcggaaaacacttgagaaaaagctcaacggtaagaagtttaagaatagcaacctcaatctgaagccagacgagtatagtaaaaaccatttcgcgaaatatgtcatccaggataacatcgagaacataaacttcgacaatttcaagcagattctggagagcttggataagattatattggagtattga

SEQ ID NO: 8430 - RNA, 1746 nt, synthetic construct
  source 1..1746: mol_type = other RNA
atgaaaagtcgcagtttggatcttctgagacagactaacaacaaggtggacctcgctaagctcctgggagtgtcgccagtattccttacgaatactctgtaccgtatcaaggttgagactctgtataatcagatcaagatccctaaaaagacgggaggcataaggtacatctattcccctgattcccgcttgaaagagattcagaggaaccttagcaacctcttattaaactgcctagatgagattcgggctgaaaacaaaactaaagcaatcatttcccatgggtttgagcgcgagaagaatattatcactaacgccaagaagcatatcaataagaatattgtcctgaacctcgatctagaaagctttttcgactctttcaattttggccgggtccgggggtttttcatcaagaacaaatacttcctgctgaatgacgaggtcgcgaccgtaatcgctcaaatatcatgccttaatatccaaattggggaacgtaaaatcagcatcctcccccaaggttcaccgtgtagtcctgttatcaccaatctgatatcttcctccatggatattaaactgaatagtctggccaaaagaaatcgatgtacatacacaagatacgccgacgacattaccatctctacaaatctgatgtctttcgggaaacagattgtcaaagacgtggacgagaacaataacgtctctctgggaaataagctgatatcttacatcgaaaagagcggatttgtgatcaatgataagaagacaaggatccagtacaaaaatagtcggcaggatgtgaccggtcttttggttaacaagaaaattaacccatcacgcaaatattcagacattttaaggagcatgtgcaattcactctttaacagtggggaattcgaactgattgacaaggaaaagaaaaaacgcaaaggcacaataaatgaattggagggtaagctttcatttgtggaccagattgataggttcaataacaaagatatcctctctaaaggaggggtgctgttgaaaaatagacgagagaacctatattccaagttcatctacttcaagaagttcatctttaacgacgaagtcaccgtgataactgagggccacacagatcacatttatattagaagcgccgccatctctcggaaggataaatttaatgacctgatcaaggaggacaataagaaaatcaagctgaacttttccttcctcaagatcaacaataagattgagtatctgctggacgtgcgcgaaggcaccagctccattaagaagtttatcgagaggtttcctgagaactactcaaagtataacattggcaaacccaaaaaacccgttataattatcctggataacgattccggtagttccgggtccggcggaatatttcagttgctcatctcggacaagttcaagaacattactaatgataaggacgaaatccgtaacgtggaatttattcacgtgttcggcaacttgtacatcattttcaccccactgaaagatggaaaagacacaagcatggaggacctttttagcgatgagatcttaaacaagaagatgaacgagaagaagttcaatagaacgaacaagaagtgtaaaaacgacgagttcggcaaagattattttgcacggttcgtgatcaaacccaacgtaaaaaccatagactttagcaaattcgacaccatattcaatcgaataaagctcgttattagcgattacgaaaagaaggagatttga

SEQ ID NO: 8431 - RNA, 1758 nt, synthetic construct
  source 1..1758: mol_type = other RNA
atgactagccccttgattaagcttaagtcgtgcaagagtaaaccagatttggcccaccttttgagactggatcctgtttttctgactagggtagtttatatccggaacacagacaatttgtacacggattttagcattaagaagaaaaacggaaccaatcgaatcataagcgccccagactcagaactgaaagaaattcagtccaaactgtctaaattgctgcaagactgcttggatgacatacgcgagtctctgaaactgaacaatacaatttctcacggctttgaacgcaagaagtccatcattactaatgccgagaaacataaacgtagaaagtggatcttgaacctcgacctgtctaacttttttgacgaattcaatttcggcagagttcgcggctacttcctgaagaataaaaacttcagccttgacgagacaatttgcaacctgatcgctaagattgcatgttataagaatcggctcccccagggatcaccttgctcaccagtcattaccaacttaatattactgtcactggaccagcgactgaataagatctgtaaatctgtcggttgtacatacacaagatacgctgatgatatcacaatctctacgaacaaatcgttcttcccgactaaaatagtgacaagttacgacaacgagagtatcgtcctcaacaaaaaattcctgaaggagatcacatcatctggcttctcccttaatgaagataagattaggctgcacaataagacctatcggcaggaagttaccgggctcaccgtgaatcaattcgtgaatgtgaatgcaaagtacgccaggaaggtccgcgccatgacccattctctgttcataaacgggatttttcatttagtggacaagaagactcgtgagatccgagcgggaaccattaacgaattagctgggatgctaggctttatcgactcccttgacaaacacaataataagaacattcgcgataggaccttgcagtatagcaataaggataagaagctagagcacaacaagagggaaaaactctatgccaattttctctactacaaagctttttacgctaataccaggcctatgataattactgagggtaaaaccgacatcacgtacctgcgggtagccctgaacagcctggcaggcagttatccctccctcattgagaaaaagctcgtcggttcagacagcatttgtgattacaaactcacctttttcaagaattccggcaaaacaaagtattttctgaatctggacggcgggacaggacatctaaaagatttcctgagcaaattcgacaagaaatccaaacagtataagggcaacgaaaacatgaatccagtgattatgatcctcgataacgactcaggatctgatggctccggggggatttttagtatcctcaatggtaagagcttccccaatataaccagtagcaaggatgaacttagaaacaaagagtggttatgggtgatccagaacctgtatatcatctttactcctctgaacggagcgaaggattcctccatggaagacctttttgacaaagagacgcttgatataaaactcgggaacaaggtatttaacaagaccaacaagccgtgcactgagaaccagtatggtaaggaggcattcgccactggagtggtgctgaaacaacgggagaacatcgatttcagtggattctccctaatcttcaatagcatcgtgaagatcattgagcactacaacagcatcaagcagatgaattga

SEQ ID NO: 8432 - RNA, 1737 nt, synthetic construct
  source 1..1737: mol_type = other RNA
atgccaactcgcctggaaaaactaaagaaatgtacgtctaaacccgactttgccagactgcttggggttgatcctgtgtttcttacacgtgtcgtatacatccgcaatactgaaaagctctacacagagttcaagataaaaaagaagaacggggatgaccgaattattagtgcaccagacaaagagctgaaagagattcaaagtaaactaagcaaactgctgctggactgcttagataacatcagaagttccctggagatcgacaacaattttagccacggcttcgagaggaagaagagtattatttcaaatgccgaaaagcataagaggaagaagtggatactcaatattgacctgaagaactttttcgatgagttcaattacggtagagtgagggggtacttcttaaagaataactacttctcccttaacgaaaacatttgcaatttgatcgcaaagatcgcgtgctacaaaaataagctcccgcaggggagtccatgttcccctgtgattacaaaccttatcttactcagtttagaccgacgtctcaaccagatctgtaaaaatagcggctgcacatatacccggtatgcagatgacattaccatatcaaccaacaaaagcattttccccaagaaaatcataagctcctatgaggagaattctatcacactcggtaagaaattcatcaacgagattatcagctccggatttaccttgaatgagaaaaagattcggcttcatgatacaacacacaggcaagaggtaacgggcctgaccgttaaccagttcgtgaatgtggagaataagtatgctcgcaaggtcagagccatggtacactcgctgttcaccaagggagaattttacctgatcgataaagttacgcaggaggcgaggttagggaccgtgaacgagctaacaggcatgctgggatttatcgactccctcgataagtacaacaacaagatcctcaagaataccataaagcagtcaaacttcaatatcgagctgaataagcgggaaaagatctatgccaacttcttgtacttcaagtctttctactttaacgctaaacctgtgcttttgactgagggcaaaactgacatcacgtatctgcgggtggcactcgacagcctggcctataaatatcccgacctgatcggatataaagaaaacggccggaacaaaataagggactacaagctaacttttttcaagaattctccaaagaccaagtatcttctgaatctggacggcggctctagccatctgaaggaatttctcaacaacttcgagaagaaggcccgaatatacaagactagcggtgagattaaccccgtcattatcatattggataacgattctggttccggggggaacaatggaatctttgagagtctgatgaacaaattgcgcggaaaaatttcatcgaaagaagaactgagaagcaaaaaatggatttgggtgacccagaatctttacattatctttactccgctgaatgggaaaaaggagtccagcatggaagatctgtttgataaagacaccctcaacattaagttgggaggcaaagtctttaatcgcactaattctaagtgtaccgctgaacagtacggtaaggaagtttttgccaatggagtggtcctcaaaaaacggaagtctattaatttctcaggcttttcacctatcttcgatgctatctcagaaatcataacatatcacaactcctccaaatga

SEQ ID NO: 8433 - RNA, 1722 nt, synthetic construct
  source 1..1722: mol_type = other RNA
atggccactcggttggagaaactgaaagagtgctactccaagcccgattttagtagacttttgggagtagaccccgttttcctgaccagagtcatctatattcgcaatacagacaagctgtactcggaattcacaattaagaagaagaatgggagtgatagagtcatatccagtcccgactcagagttaaaggaaatccagagcaaactaagtaacctcttgcaggattgtcttgagaatattcgggagagcctgaaactggaaaacaatttgtcccacggctttgaaagaaagcgtagcatcatatctaacgcggaaaagcacaaacagaaaaaacgcgtgcttaacctagacctctccaacttcttcgatgaatttaactttgggcgcgtcagggggtatttcttgaaaaacaaccagttcctgctcaacgagtccatctgcaacctgattgcgaaaatcgcttgttataacaacaagctgccacaaggttctccctgtagcccagtcataaccaacttaatcctcctgagtctggaccaacgcctcaacaagatttgtcgtaatgctggatgcacttacaccagatacgccgacgacatcaccatatcaacgaacaaatccattttcccaaagaacatcattacttctcacgaggacgatttagtgacccttaacaaacggttcatcaagaagattacaagcagcggcttttcattgaatgaaagaaagattcggctgctggacaccaaatgcaaacaggaggtgacagggttaacggtaaataaattcgttaacgtggacgacaagtatgcccgaaaggtgcgcgcaatggcccataggctgtttattgacggagaattccacctgatcgataaaaagactcataaaaagagggtaggcaagatcaatgagctggcagggatgctcggatttatcgattcgctggataagcataacaatacatttccgcacaataagaagctgtcactcaataaacgagagaggatttactccaagttcatttactatacagccttttgcgctaacaccattccaacaatactaactgagggcaaaacggatattacttacctcagggttgctctgaatagcctcgccgacaaatatccgaacctcatcggtgataaaaaggtggcaaacgaaactgtgagggactacaaggtgaaattctttaagaatagcgccaagacaaaatactttttgcatctagatgggggtagctcacacctcaaggagttcctggtttcttttgacaaaaaaaccgacggctacaagacggttcggaatagtaatcctgtcataatgattcttgacaacgattctggttctaccgggggaaatggcatcttccaggctctgatcggcaaatctttccctaatataacaatgagccgagatgaacttcggagccagaaatggatctgggccgtgaagaatctgtatatcgtctttacccctctcaacggaagtaaagattcctccatggaggatcttttcgacgtgcctaccttacaaactaaactggaaggaaaggtgttcaatagaaccaatgagaagtgtgctgagaatgaatatggcaaggaggcattcgcaacaggcgtggtcctgaggcagcgcaagtcaatcgacttttccaagttttcatctatctttgactccataatcgagattatcgatcatcacaaggataaggaatga

SEQ ID NO: 8434 - RNA, 1725 nt, synthetic construct
  source 1..1725: mol_type = other RNA
atgacaacacgcctcgagaaactgaaagcatgcaacagcaaacccgatttcgcacggttgttgggcatcgatcccgtctttatgacacgtgtcatctacattaggaatacggacaacctctatagccagttcgccattaagaagaaaaacggatcagatagaatcatatccgcccccgattctgaactcaaggagatccagtcaaagctttctgacctactccaagactgtctcaacaattttagggagaatctgaaggaagataaccacttttcacatgggttcgagagaaacagaagcattataaccaatgctgaaaaacacaagtcaaagaaatgggtgctgaatatcgacctgtgcaacttcttcgacgagtttaattttgggcgcgttagggggtattttttgaagaacaacaacttttccctgaacaccgaacttagtacactcatagccaagatagcatgtcaccaagacaagctcccacagggttctccgtgttccccagtgatcaccaatttaattctggtgtccctggatagaaggcttagcaacctttgcaattcagtgggttgtacgtacactcgctacgccgacgacattaccatttccaccaataaaaaggagtttcccaaaggtatcatccgggatcatgacgagaagagtatcaccctgaacaacaaattcctgaatgagatcacctcatctggattcaagattaatcataacaagctgcgtctgctggataaaaagatacggcaggaagtcacagggttgactgttaatagatttgtgaacgtcgatagaaggtatgctaagactgtaagagcgatggcccatagcctgttcaaaaaaggcgaatatactctgattgacaagaagacccggaaggaacgggttgggaatatcaatgagctaggtggcatgctgtctttcatcgacttcgtcgataagtacaataatcggttaccacatagcataaagtcgtcccacaataaccgagagaaagtatactcggattttctgtactattccgctttttgggccaacaccaagccaacaatcctgactgaaggcaagaccgatattacctatcttagggtggctttggacgctgtgagtgaaaagcaccctaatttgattgggaacaagaatcctggaaacaaaacagttcgagattacggcattaagttcttcaagaacactagtaagacaaagtaccttctcaacctggatggcggagccccccacctgaaagactttatagtgggctttgagaagaaaaccgaggcattcaaagttatcgcgaatcagaaacctgtcatcgtgattctggacaatgacagcggttccgctggagccaatggaatcttccaaatcctcatcggaaaatcttttccgaacattactttaacccgcgatgagttacgcaaccagaaatggacttgggtgacacgaaacctatacattatattcacgcctctaaacggcttgaaagatagtagcatggaggacctctttcacagtagcgtcctgcagacaaccctcgggggcaaagtgtttaaccgtacgaatacaaagtgcaaagacaatgaatatggcaaagagttcttcgcaactggagtggtacttaaaaagaggaagactattgacttctccaacttcaactacatttttgaaagcatctctgagatcatcgaacacaataattcccgcaaaaagtga

SEQ ID NO: 8435 - RNA, 1725 nt, synthetic construct
  source 1..1725: mol_type = other RNA
atgacaacccgcctggataagctgaaatcttgcaatagtaagcccgatctggcccgtctactcgggatagatcctgtgtttatgacccgcgtgatatacattcggaacacagacaatctctactcacaattcaccatcaagaagaaaaatggatccgatcggcatattagtcctccggatccagaactgaaagagattcagtccaaattaagcgatcttctccaggattgtctcaataatattcgggagaattccaaggaggagaataatttttcccatgggttcgaacgcaacaggtcaataataactaatgcggaaaagcacaagtctaagaaatgggtgctaaatattgacctgtccaacttttttgacgagtttaatttcggccgggtgcggggatacttcctcaaaaacaaaaacttctccttgaatactgagctatcaacacttatcgctaagatcgcctgtcatcaggacaagctcccgcagggcagtccatgctcacccgtgataacaaatctgatcttgctcagtctggacagacgactctctaacttgtgcaaccgtgctgggtgtacatataccaggtacgccgatgacatcaccatctcgactaacaagaaggagtttcctcgtaaaatcatcaagtcacacaacgagaactctattgacctgaacaaaaagtttctgaaggagatcatctccagcggcttccagataaacctgaacaagctgaggctgttcgatagaaaatgcaggcaggaagttaccggattgacggtaaaccggttcgtcaatgtcgataataagtatgcgaagaaagtgcgcgctatggcccacagcctatttaccaagggaggctacactctgacagacgaaaaaaccagagaacaaagggcaggaaacatcaacgagctgggtggcatgcttagcttcattgactatgtcgacaagcataataatcgcctgcctcatgccactaaaacctctctcaataaaagagagaacgtgtacagcgattttctgtattatagcgccttctgggccaacccaaagcccacgatcctgacagaaggcaaaaccgacatcacgtatttacgcgttgcactggacagcttgtctgcaaattaccctaatcttattgggaacaagaaaatcggcaacaaaattgtgagggattacggtgtgaagtttttcaagaataccaccaagagcaagtattttctgaacttggacggcggggcttcgcacttaaaagatttcatagtcggatacgaaaagaaaacgaacgcattcaaggcaatcgctgaacaaaaacccgttattattgtactggacaacgactctggcagtggaggttccaatggcatctttcagactctcatcggaaaggcctttcccaatatcactctgtccaaggatgaacttagaaaccagaaatggacatgggtcacaaagaacctctaccttattttcacaccattaaatgggctgaatgactcatccatggaagaccttttccacagttcagtgctgcagacaaagttaggtgggaaagtatttaaccgaactaatgctaagtgtaaggacaacgagtatgggaaagagtttttcgcgactggtgttgtgttgaaacaacgaaaagccatcaactttagcaacttcaactacattttcgagagcattaccgagattatcgatcacaatgcctctagaaaaccatga

SEQ ID NO: 8436 - RNA, 1731 nt, synthetic construct
  source 1..1731: mol_type = other RNA
atgaccacgcctctggataagttaaactcctgcaacagcaaacccgactttgcaagactcctcggtatagacccagtatttctgactagagtggtatacatacgcaacactgacaatctgtactcacagttcacgattaaaaagaagaacggaagtgacaggttcatttctgctccagatgacgagctaaaagagatacagagaaaactgtcgaacctgttgcaagattgtctgagtaatattagggagtccctcaaagtggagaataattattctcatggattcgagcggaataagaacataattacaaatgcggagaagcacaaaaacaagaagtgggtcctgaacttagatctgtccaacttctttgatgatttcaacttcgggagagttaggggatacttcctgaagaataacaacttcagcttaaacgctgagatttcaactttgatagccaagattgcttgccacaacaataagttaccccagggtagtccatgttctccagttattacgaatctgatcctttttagtctggatcggcgtctgtcccggatctgccaacaggtgggatgtacttatacacgctacgccgatgacatcacaatttcaaccaacaagagcaccttcccgcgcaatattattaagtccctcgaaaacgaaaagatcaatctgaatcgtaagttcctgaaggagatcacaagcagtggcttttctttaaaccctgagaagatcaggctccatgaccggaagtgcaggcaagaagtaaccggacttaccgtcaaccagtttgtgaacgtggacaacaagtatgccaaaaaggtccgatcaatggtacatcacctgtttacacagggcgaataccagctcgtcgataagaaaaccggcgaaaagcgtaacggaaaaatcaatgagcttgccggcatgctagggttcatcgacagtctggataaatataacaatagcctgagccacgagcgcaatgcaacacttaataaacgagaaaggttgtacggcgagtttaaatactacactaccttttgggcgaatactatcccggtcatcctgacagaggggaaaaccgatataacctatctcaaggtggccctctccagcttggctgcaaaatatcccaatctgatcggagaaaaaaaactttctaacaaggtggttcacgattacaaaatcaagttcttccgaaacactgccaaaaacaagtattttctagacttggacggcggcacctcacacttgaagaacttcatgatgaagtacaataagaagacagacgcttttaaactggtggcaactcagcagcctgtgattattgtgctcgataatgatagcgggagcactggtagtgacggcatctttaacgcccttgtcggtaaatcctttcctaacatcacggactctatggtgaccctccgcaataagaaatgggtttgggtgaccaaaaacctctacatcattttcacaccccttaatggcaaatctgactccgccatggaagacctgtttgaagatagcgtgttgcagagacaactgggggggaaggttttcaatcggacaaacaagagatgtgaagccaatgagtatggcaaagaggcgtttgcaaccgggatagtcctaaaacagcgggacaatatcaatttctccaagttcagctcgatttttgactccgtgatggaaatcatccaacaccatgctcatcagaagtcatcatcttga

SEQ ID NO: 8437 - RNA, 1743 nt, synthetic construct
  source 1..1743: mol_type = other RNA
atgactactcgtttaaagaagctgcagaattgtaagagcaagccagattttgcacggctgctcggaattaagccggtcttcctcaccagggtcgtctatataaggaatactgagaagctctacaccgacttcaaaattaacaagaagaacggcgacaaacggataatcagttctcctgatccggaattaaaggaaatccaatcacgcctgtccacgcttctccaggactgtttaaccgatatccgggattcccacgaagtgattaataatttgagccatggctttgagagagaacggagcattataacaaacgctgaaaaacataagcgcaagaagtgggtgctgaacctggatctctccaactttttcgacgagtttaactttggcagggtgagaggctatttcattaaaaacagcaacttcaagctcaatgaggaggtgtccaatattattagtaagatcgcttgctacaacaatagattgcctcagggaagcccctgtagtcctgtaattacaaacctaatcctgcatagtttggatcagagactgaaccttatatgcaaaaaggtgggctgcacctatacaagatatgcggatgatattaccatcagcaccaataagtctgagttccccaaaaagatcattgcatcctgtgagtcaaatattgtaaacctgaaccagattttcctgaaggagatcactaagtctggattttcccttaattttagcaaggtccggttacttggtaaaaattgccgccaagaggtgaccggactgactgtgaataagatcgtcaacgtttcagacaaatatacgcggaatgtacgcgcaatggccaataacctctttaaaaatggggaattctacctttttgacaaacagacaaatcagaaacgcctggggtcaatcaacgagctaacagggattttcgggtttatcgactctctggataaacacaacaacaaaatcagccataagaatcaaggttcacttaataaaagggagcgtttgtacagtgattttctctactacaaatccttctgcgccaatgaaaaacctatgatactcacagagggcaagacagatattacctacctgaaggttgccctggacagtttggctaaagactatccaacactgattggagacaaggaagaaagaatgagttacgttcgagattacaaaatatccttcttcaagaactcgatcaaatccaagtatctgctgaagctcgacgggggaactccccacctgaaagacttccttgtgaattacgacaagaaaagtagcaaatactcaaagagcaagaatgagaaaccagtgatcatgatcttagataacgactcaggcagcaacggcgggggcggaatctttcagtgtctgctagggaagtcgtttcccaatatcaccatcgactcaaaaaagtctttgcgagatgaaaagtggatctgggtcaccaagaacctctatatcatttttactccactgaatggcaaacaggagtctagcatggaggacttctttgatgaatctgttctaaagaggacgttgtctaagaagactttcaacaggtccaacaacaaatgcaaagacaacgaatatggtaaagaggccttcgccaaaggtgttgtgctgaaacgacgtaagaagatcaacttcaccaagttttctatcatcttcgactccataaacgagataattaatcaccacgaatctgtgaacaatctgaaaaccattgcttga

SEQ ID NO: 8438 - RNA, 1719 nt, synthetic construct
  source 1..1719: mol_type = other RNA
atgacaactcagctcgctcggttaaagttgtgctttagcaaacctgactttgctcgcctgcttgaactggatccagtatttctcacacgcgtcgtctatatgagggatacagaaaaactctacaccgactttaccatcttgaaaaaaaacaagacccagcgggtgatctcagcccctgacgaagagctcaaagagatccaacggaagatcagcgacctgctactagattgcctgactaccatcagaaacgaaaacaagagcaataacaaattgtcccatggatttgagctgggaaagaatattatcactaatgcggagaggcacaaatcaaagaagtgggttctgaatatcgacctgctaaactttttcgatcagtttaactatgggcgggtgtccggctatttcatcaagaacaagtttttcgagttgcacagtaatattgccaacctcattgccaagatagcatgttacaagaataagttaccacagggaagtccctgttcccctgttatctcgaatctcatattgcagtcgctcgaccaacgactgaacaacatttgtaaaaaaaacgggtgcacttactctaggtatgcggatgatatcactattagcacgaacaaaaagaagttccctaaagcaattgtatctaaccatagtgacaaggaaatcaatctgaataacgggttcattaaggagatactaagggctggttttagtatcaataatgacaagactcggctgcgttttaataccctccgacaggaggttacggggcttacagtgaactctaaaattagcgtggacgataaatattcccgcagggtgagatccatggtgcacaaattattcctttcaggagaatacacgctgatcgataagaagacccgcgaaccgcgttttggcacaatcaatgagatccaaggtatgttaggattcgtggactccatagacaagtacaataacaatctcccaaataactctaagcatacccctaataaaagagagcggcttctggccgatttcatttactttacccgattccactttaacaccaaacccaccataattaccgagggcaaaacggatattacctatttgagagtagccctcaatgccctttgcaaaaagtatcccagcctgatcgagaagaaaaaatcatacaagggcgagattaatgactacaagttctcattcttcatcaagaatgccaagactaaatttctgctgaaactggaggatggcagtagtcacatcaagaacttcattaaggactacgacagaaacattgaaaaatataaggctgatggcggcgtcaatcccgtgataataattctggacaatgattccgggagcacaggttctggaggcatcttttcactgctgctctctaacgtgtttcccaacattaaactctcccgcgaagacataaggaaggtcgactggctgtgggtcactaagaacttgtatgttatattcacaccgcttaaagatggtcaggacagctctcttgaggacctgtttgatacaaaaaccttagcaactacactgaacggcaaggtgttcaacaatacaaacaaggactgtaaaccaaatgagtacgggaaggaatacttcgcaaaacatgtcgtgctgaagaacaaggataccattgacttcaagaacttcatcaaaatcttcgatagcatcgaggaaattatcaagcaccattccaagaaatga

SEQ ID NO: 8439 - RNA, 1716 nt, synthetic construct
  source 1..1716: mol_type = other RNA
atgagtactaaaatagaactgctcaaacagtgtacaaccaagccagatttcgctcgactcctcggtcttgaccccgtattcttaacccgcatagtttataggaaagacacagaaaacctttactcaaactttaccatcctcaagaaggacatgtctgaacgacacatctcatccccagattctaagcttaaggagatccagagaaaggtcgccgatctgctgctaaattgcatagaggatattcgagtgctcacggaatcaaagaatctgctgtcacacggatttgagaaacaacgcagcattattacaaatgcagaacgccataaaagaaagaaatgggttctgaacattgatttgtctaacttctttgaccagttcaattatggaagggtcagagggtattttatcaaaaacacacacttcgcgttagatgagaacattgcaaacatgatcgctaaaatcgcctgttatcagaacaagttaccgcaggggtccccttgcagccctgtaataaccaacctgatactgtcttccctggaccagcggctgaacaaaatctgcaagaatagcggttgctcctatagtcgctacgctgatgacatcacgattagcactaataaaaagacctttcccagcgaaatcgtgaagagctatgatgccgagcacgttgaattaaataagaacttcacgaaggagatcatgagggcaggcttttcattgaatgataagaagactcggcttcagggaagaactcaacgtcaggaggtgacagggctgacagtcaactataacctatctacagacgtgaattacagcaaaaaagtgcgggctatggtgcatcacctgtttatggatgggaactacactctcatagacaaaaaaacaagaaagccaaggaacgggaccatcaacgaggttgagggcatgttgggtttcatcgacagcattgacaagtataacaacaaactggcgtacagagcaaaaggcggcttgaataaaagggagaagctgtatgccaatttcatctattaccggtcttttcatagtaatgaaaaggttacgatcctgactgaaggcaaaaccgacgtaacctacctgaaggtcgccctgcatatgcttaaaggaaaatatcccactctgatcagctccaaaaccgtctctcacaagaccgtgaacgactacaagctctccttcttcaaaaacaacaataagtcgaactacttcctggggctgggcgagggcagttcccatttcaagaattttgtgaagaagtaccaaggcaagatttccgagtttaaggctgtcggtggaaggaagcctgtgattatcatttcagacaatgatagtggcgcaaatgaattgatcagtctcctcaacggtaaaggctttcctcatatcacctccgacaagaatgagctccggaagaacaagtggctgtggatcactgaaaatctatacatcattctgaccccctttgatggaaaaacagatacctcaattgaggacctattcgatacaaaaactctttctcgttccctgaatgggaaaacattcaatcgcaccaataaagagtgtgccttgaatgaatttggaaaggagtactttgccaaacacgtgattttgaaggaccgggacctcattgacttcaacatgttcagttacatattcgatgccatccttgaaattattaaggagcacgatagcaaggtgtcgtga

SEQ ID NO: 8440 - RNA, 1941 nt, synthetic construct
  source 1..1941: mol_type = other RNA
atgtttataaatacacacgtcggccgatttgtcggttgtgagtcccaaccagttgcactgatggcaggtggaatagcctctctgaaatcactaatccagtcttacaccgccggcgtgctttgcgaaggtgtgccagcatgtgtgtcaccctggcccttcttcctgtgggacgaggaggaaatgacaaagacttccaagctcgatgccctaagagccgcaactagtagagaggacctcgccaaaatcttggatgttaagctcgtattcctgactaatgtgttgtatcgcatcggcagcgacaaccagtatacacaatttactattccaaagaagggcaaaggcgtgagaacgatctccgcccctacagatagactcaaggatatacagcggcggatatgtgatctccttagtgattgcagggacgaaatttttgcgatccgtaagatatccaataactactcctttgggtttgaacgggggaagagtatcattctgaatgcatacaaacataggggtaaacagataattctcaacatcgatctcaaggattttttcgagagcttcaattttggcagagtgcgggggtatttcttaagcaatcaggattttctcttgaaccccgtagtcgcaacaactctggctaaggccgcttgttacaatggcacactgccccaggggagtccctgctctcccatcatcagcaacctgatttgtaatattatggacatgaggttggctaagctggctaaaaagtacggatgtacatattcacgctatgcagatgatattacgattagcaccaacaagaatacctttcccttagagatggctaccgtgcaaccggagggcgtggtcttagggaaggttctggtcaaggaaattgagaattctggattcgaaatcaacgattcaaagacgcggcttacttacaaaacgtctaggcaggaagtaaccgggttgaccgtgaaccgaatcgtcaacatagaccgctgctactacaaaaaaactcgcgccctggcccatgctctgtacaggaccggagagtataaagtgccggatgaaaacggcgttcttgtgtcaggcggactggacaaactggagggcatgtttggatttatagaccaggtggataagttcaacaacatcaagaagaagttgaacaaacaacctgacagatatgtcctgactaatgccactctgcatggtttcaaattaaagttgaacgccagagagaaggcttacagcaaattcatctactacaagttcttccacggaaatacctgcccgacaatcatcaccgaaggcaagacagaccgcatctacctcaaggccgcgctgcacagcctcgaaacctcgtatccagagctgtttcgggaaaaaacagattccaaaaagaaggagatcaacctgaacatcttcaaatccaatgaaaaaacgaagtgcttcttagacctttccgggggtacagccgaccttaaaaagttcgtagagcgctacaaaaataactatgcttcctattacgggagtgtgcctaagcagccagtcattatggtgctagacaatgacaccggccctagcgaccttctgaactttttgaggaacaaagttaagtcgtgtcctgacgacgttaccgagatgcgtaaaatgaagtatatccacgtgttctacaatctgtatattgtgctcaccccactgtctcctagtggggaacagacctctatggaggacctgtttcctaaggacattctcgacattaaaatcgacggaaagaagttcaacaaaaacaatgatggagatagcaaaactgagtacgggaagcatattttcagcatgcgagtggtccgtgacaaaaaaaggaagattgacttcaaagcgttttgctgcatttttgatgctatcaaagatatcaaggagcactataagctaatgctgaattcatga

SEQ ID NO: 8441 - RNA, 1482 nt, synthetic construct
  source 1..1482: mol_type = other RNA
atgaagaagaacaagagtattatcctgaacgcctatcgccaccgcaacaagagaatcatcttaaacatcgacttgtccaactttttcggctcatttaattttggtcgagtgagaggttacttcatgtctaataaagatttcctcctcaacccaatcgtggcaaccaccattgccaaggcggcctgttaccgcggagtgttaccccagggctcaccttgcagcccagtcattagcaatctgatctgctctattatggacatgagactggccaagctggccaaacagtatggttgttcgtactcccgttatgcagacgacataacattctctaccaataaaccttcattccctactgaactcgcattgctgcaacccgagggggtcattcttgggaaatacctggtaaatgagattaagcgtgcgggctttgaaataaatgacgcgaaaaccaggctggcttacaaaccgtcccgcctcgaagttacgggcttgacagttaataagattgtcaacgttgagaggcggtatagtgataagacaagagccctggctcatacgctttatacaaccggagaatacaaattaccggacgaaaacggagatgaagtcgctggcagccttgataagctagaggggatgtttgggtttatcgatcagcttgacaaatttaacaacatccagaagaagaagagcaaacaacccgaaaaatatgcactcgcacctgctaccctgcattcgttcaagtctaaattaaatgcccgggaaaaggcctacgggaagttcatatactacaaattctttcacggtaacacttgcccaactatcgtgaccgagggtaagacagatcgcatctatcttaaagcagccctgagagccctgagtaacaactacccagaactgtacagggagcgaaaggacaaaaaagggaaagagatcgacctgaatatccttaaaatcaccgataagctgaattatttcctgaacatttccggcggaacagctgatctgaagaaattcgtggagaggtatagggagcattattcaagctactacggaagtatagctaagcagcctgtgattatggtgctagataatgacactggacccaatgagctgctcaattttctcaaaaacaaggtcaaacagtgtcccgatgacgtaggcgctatccggcggatgagatatctccacatcttccacaacctgtacttggtgctgacacccttgactgagggcggcaatgaaacctccatggaagatttttttcctacggaggtgttgtccattgagctagacggcaagatcttcaacaaaaataatgacggagacagcaagactgagtatgggaagcacgtcttctctgtaaaaatcgtgaaggataagaagcgggttattgactttaaccgattcagctacatattcgatattgtgagggagataaagattgactaccagaagatcctcattaaaaacaagccatga

SEQ ID NO: 8442 - RNA, 1557 nt, synthetic construct
  source 1..1557: mol_type = other RNA
atggtagcaacctccaaacttctccttctgaaagtggcgtcctcccgtgctgatctagctaagcttttggacgtgaagctggtctttctaacaaatatcttgtaccgaattgggaccgattctcaatataaggacttctccatacctaaaaaaggcaaaggggtaaggttaataagtgcgcctgaagacagccttaaggacttacaacgacggatcgccgacctcctgatggattgtagagacgagaacttcaagatcaagaagatcaagaacaactattcctttggtttcgaacggaataaatcgatcatcagtaatgctttcaggcaccgcggcaagaacatcatactgaacattgacctcaaagatttcttcgaatccttcaatttcgggcgcgtgagaggatactttctgtctaatcgggactttctgctgaacccgatagtagccactacactcgcaaaagccgcttgctataaagggtccctcccacagggatctccctgttcacctgtgatcacaaattttatctgtagcatcatggacatcaggctcgccaagctcgcaaaatctctgggctgctcttactccaggtacgccgatgacatcactttcagtacaaacaagaaggaatttccagccgagctggcaatttcactgcccgagggggtggttctgggcggaattctagtttcagaaattaaacgggctggtttcgatattaatgacgcgaagacccgcctcagctataaatctactaggcaggaagttaccggcctgacgatcaatagatttgtgaatgtcgaccgaaaatactccaataagacgcgcgcactcgctcacagcctgtatagcaagggagaatacaaactaccagacgaggatggtaagttagtggtcggctcaattgagaagttggaaggccgtttcggcttcattgatcagattgacaagtttaacaacatccagaacaagctttcaaagcagcccgagaaatatgcccctatccacattaccttgaagaattacagacttaaactgaatgctcgggagaaagcctacagcaagtttatatacttcaagttcttccacggtcatgcttcccctacaatccttactgagggaaaaacagaccgggtctacctgaaaagcgcaattagaagtttgagtactaagtttccggagtttctgaagaaatccgcagatgggaaaaggaacgacattaacctgaatatattcaagtctgacgagaagagcagctattttataaatatgtctggcgggagcgccgatctgaagaaatttatcgagcgctacatggatgaatacagtagttactatggatcgatcccaaaacatcccgtgattatgctgttggataacgattcaggcagcgacgaggtcttgaactttctgaagaacaaggttaaatcttgccccgatgataccgatattatgcgtaagatgagctttatccatgtgttcaagaacctctatattatcctgaccccattaaatgcctcaggagagcagaccgccatggactatagagtgtga

SEQ ID NO: 8443 - RNA, 1776 nt, synthetic construct
  source 1..1776: mol_type = other RNA
atgactgacaccaagaaaatcgatgccttgaaaaatgccagttctcgttcagacctggccaaactgctaaacgtgaacgttattttcctcacaaacattctgtacaaggtcgggaccgacaaccagtataaacagttctccattcctaaacggggaacggggattagggtgatttctgctcctaacgacaagttaaaggaccttcagcggagaatagcaaatctccttatagattgccgccaagagttgttcaattcgaagaagatcaagaacaacttttcctttggtttcgaaaaagataagagcatcatctcaaacgcatcgcgacataaggggaaacgcataatcctgaatctcgatctgagggatttcttcggttcttttaactttggtcgagtgcgtggctattttatcagcaatcgagacttcaaacttacaccggtggtggcaaccaccctggcccaagcagcgtgctataaaggagtactacctcagggatctccttgctctcccgttatcaccaacttcatctgtaacattatggatatgagacttgcgaaactggccaaagaactgggatgtacatacactcgctacgctgatgatatcacttttagcaccaataagaagatctttcccgaagaactggccattccagagctcgaaggggtcatattaggcagtaggctcgtgaacgagatcacaaaagccggctttaaggtgaatgatgctaagacacgcctcgcatataaaagctcaagacaggaagtaacaggtttgaccgtgaaccagatagtcaatgttgacaggcggtatgctaagaaagttcgagccctggcacaaaccctgtactccacaggaaaatacaaattgccggacaagaatggcaacatgattttgggcaacttagctcggttggaaggcatgttcagctttattaacttcattgacaagtccaacaacattgagaacaaaaagaacaagcaacccgagaagtacgtgaaggtacaggagaaactgaatgggtaccgccttagactcaatgctcgggagaaagcctactctaaattcatctactacaagtacttccacggaaatacaattccaactatcctgactgagggcaagacagataggatctacctgacgaccgccctgcactccctatccgccatttatcctaatcttatcgaagagactaacaacgggaagaagattaagctgaatatatgcaagagcaatacgaaagccagttattttctcgacctgtctgggggcaccgctaatctgaagaaattcgttatgcgctaccgggatgaatatgaactgtactatggcacggatgctaagaaccccgtcataattattcttgataatgattcaggcccaaacaaactgctggaccacttaaagaataaagtcgagaattgtcccaacgacgtgaagtccatgaggagaatgaaatacatccatgtcacccataatctctatatcgtgttgaccccattatccgagtcagtgcgggagacaagtatggaagacctctttagtcccgaggtgctcaatatcaccctaaatggaaagtatttcaacaaggcaaacgaccaggacactgagactgagtattcaaagcacatctttagcactaaggtagtcagagataagaatagaaacatcgacttcaaaggttttaagccaatcttcgacgcgattgaagccatcattaaacactaccaggagctgagcaagagcaggataatcaataaagctcgttga

SEQ ID NO: 8444 - RNA, 1761 nt, synthetic construct
  source 1..1761: mol_type = other RNA
atgaaaaatacccccggattggacgatttgaaagcggcgaccacaagacgtgacctcgctaagcttcttaacgtgaagcttgttttccttacaaatgttctctaccgcatcggggtggataatcagtactctaactttccaattcctaaacgcagcgggggagtccgtatcatcagtgctccgtcttccaagttgaaagacctccagtcaaaaattgccaagcttctgatcaactgccgccaggagattttcgccattaacggcatcgaaaacaatctctctcacgggttcgaaaaggacagaacaatcatcaccaatgccttaaaacacagaggcaaaaacgtggtactcaacctagacctctcagattttttcaagagctttaatttcgggagggtccgcggcttcttcctctacaacaaggactttaaactgcacccagatatagctactactatcgctaaggctgcttgttatcagggcagtcttccacaagggagcccatgttcgcccgtgattaccaatctgatctgtaacattctcgatgtgaggctggccatgttggccaaaaagttaggatgcgcatatagccggtatgccgatgacattaccttcagcaccaataaaaaggatattcccgaggagctggcactcaacgtgactgacggagtgacattgggaaggaaactgcgtaacgagatcgaacgagcaggctttgagattaatgacagtaagacaagactatccttcaagcccgctaggcatgaagtaacagggttgacggtgaacagatttgtgaatgtcgatcggagatactcaaaaaaggtgcgggcactggctcacagattataccagaccggttcctataccataaagaatgccgacggagaagtcgatggtacactgcaacaactggaggggatgtttggtttcatcgatcagatcgacaagttcaacaacatcgttaacaagaaaaaccgcaagaaggaaaaatatatcctggcgaaacagtccatccttgagcatcgatccagactgaatgccagggagaaagcctacgcaaagttcatatactataagaacttccacggatctatcatcccaaccataatgactgagggtaagacggaccgggtatatattaaaacggccctgctatctctgagtggcaggtaccctggttttatcattcgcgacaacaagacgaagaaggagaagattaatctgaagattatcaacccgcagtttaaggagaaatactttctggacatagaagacggcgccgcctcctttgaaaagtttgtccgacgctacgattcggaattcaagagcttttacggaactaaggcaaataatcctgttgtaatgatactggacaatgacaccggccccaacgagctcttgaactatatatctagggagtgccctacctgccctaatacagttgaggatattcggaaaatgccatttgtgcacgtgatgcataatctgtacctgattctgactcccttagatgccactgggggaatgaccgccatggaggacctgttcgatgcaaaaactctaggcaaggatctggagggcaggaagtttaatcggggcaaaaaatttaaccccaaaaaggaattcgggaaggacgaattttccattaaagtcgtgcgagatatggcaaaggatatcgacttcaacggcttcaatagcatattcgaagcgctcacagatgtggtcaaacattatcgggactcaatcaaagctccttga

SEQ ID NO: 8445 - RNA, 1326 nt, synthetic construct
  source 1..1326: mol_type = other RNA
atgtttaaacccacgtacctagcccggctgcaagcttgctgtaacaaatttgagctcgccgacctcctccagattaaagtcacttttctgacgaatgtcttgtatcgcattaggccagagaatcagtacaaaaagttcaccatcaaaaagaagtcaggaggcgagcgtgaaattttcgcccccgatgagaagctcaaagatattcagcagcgattgtctgaactgctgtatatttgccaggaagagatctgggcgaaaaataatatcaagcagaatgtgtcccatggtttcgagaagaataaaaccatcatcacaaacgcagagcgccaccgggataagaacatcgtgttcaacattgacatcgaaaacttctttcccagtttcaattttgggagggtgagagggtattttatcgctaaccagaacttcaagttacatcctaacgtggccacaataatcgcccaaatagcttgtctggatggctctcttccacagggcagcccgtgtagtccagtgatcacaaacctgatttgcaggattctcgattttcgcttgagcaaactggccgtgacatacggttgttcctacagtagatatgcagacgacattaccttctccaccaataagaaaaacattccagatgccctagttagcaacgaaaaggagaatgagcctggaaagatcctggtagaagaaatacacagggctgggtttacactgaatcacaacaaaaacagggtgtcacgctgtacctccagacaacaagtaaccggactaactgtcaataaaaaaatcaacgtctcacgagagtatattaagaatacacgggcaatggctcactcgctgtattttgagggctcatacacacttatcgagaaagacgggaaacatcggaagggtacccttagcgaacttgaaggccggtttgcgttcatcgacatgttagataagtacaataacgtggaggcaaagaaaaatgctagacctgagagatacgttgttaagggctttggactcgacttcaagcagcgcctcaatagcagagaaaaagcctattccaagtttctgtactacaaaaacttctacgggaatgaacagataactatattaactgagggaaagactgaccccgtgtatctgaagtgcgcaatcgactctctgtttcttgattaccctcagttggttcgagaagagaagaacactaagaaccgtgtgctcaaggtaaacctgttcaagacgaatgacaagaagaaaattttctctcggttcgtgtggtggagctgcaggctgtttgaggtcttccagaccacttggttcaccttgtga

SEQ ID NO: 8446 - RNA, 1770 nt, synthetic construct
  source 1..1770: mol_type = other RNA
atggaattcaccattatgttcacgcccagttatcttgaaaggctgaagagctgcaaaacaaagttcgaattcgcccgtctgctgcaaatcaaggtgagttttctgaccaacgtgctgtataggatacgaccagaacatcagtacgagcggttcatcataaaaaaaaagagcggtggggatcgtgaaatatttgcacctacagaaaagctgaaggatatccaacgcagactatccgatctactgtacgtgtgccaaagtgagatttggaagacgaataacattacccccagtctgtcccatggctttgagaagaacaagacaattatcacaaacgcggagagacaccggaacaagacgaatgtcctcaacatagatctcgaggacttttttccaacctttaatttcggacgcgtacgcggctactttatcgccaatcagtactttaatttgcacccctcgattgccactattatagctcagatcgcctgttacgatgggaaattgccccaggggtccccatgctctcctgttatctctaatctgatctgcaatatcctggacattcgcttgtctaagctggctttatcaaatggatgttcctattctcggtacgctgacgacattacgtttagcaccaataaaaaccaattcccagactcaatagttatcaacgaaaacagcaatgagttggggcccctcctggtgaacgagatcgagaaagccggtttcaaaatcaacaataacaaaacccggattctgcgacatacatcccggcaggaagtgaccggtctgaccgtcaataagaagatcaatgtcaacaaggactatatcaaaaagactcgggccatggcacacgctttgtataaagagggcgacttcacactgcttgatatttccggcaaacctagaaaaggcactctgaatgaactcgagggccgattcgtgtatattgacatgttggacaagtacaataacattaatgccaaaaagcacactctccctgaaaagtacgtgctgaagaaaaccggcatcaacttcaccctcaaactaaacagcagggaaacagcattttcgaacttcctccactacaaatatttctacgggaacatcaaacctactgtgctcaccgaggggaagacagatcccatttacttaaagtgtgcgatcgatagtctctatctttcttacccagccctggttcgtgtagatgatagaaccaagaatcgcattctgaacatcactctctttaaaaccaacgccaagaaggaatattttctggacctttacggaggagcagctgactatgtgaggttcttccgacgccatagggagcagtgtaaaaagtttgagagacagcctcccaagaatccggttattattgtgttagataacgatactggacctagcgacttcatcaacaatatcatcaaggagtatagccatctcccgaggaaatcagaggatgtacggaaacacaaatttttacacctcgagaacaatttgtacgtgctgcttaccccactgcttgctggagataaacagtcatgcatggaagacttctttaaagacgaggtcttaacaaaaactatcaatggcaagtccttcgacaagagcaacaatcatgattcaaccacaactttcggtaaggacagatttgcaaataacatcattagggagaatagacagacaatagacttttctcttttcaagcccattctggacgcgatggtcgatataaacaaccacttcaagaacctatactatccatga

SEQ ID NO: 8447 - RNA, 1740 nt, synthetic construct
  source 1..1740: mol_type = other RNA
atggtagcacccaccactattgagagactgaggttaataaccacaagacaggagctggccgcactgctgaatctaaaagcacatttcttgacgaacatcctgtataggaatggagtgaacactcagtatagccaatttcggattccgaaaaaggatggttccttcagattgatctcctcaccttctagtaagctcaaggacatacagaaacgccttgccgaactcctgtatgaatgtcaggcgaatatccatttcgagagaaagatcaatcctgtgctctcacacggcttcgaaaaaaacaaaaccatcgtcacaaacgccactaggcacagaaacaaacggattctgctcaacattgacctggagaacttctttgagtcaatcaacttcggccgggtcagaggctttttcatcgctaataatgacttcaagctctctcctctaatagccacaactattgcccagattgcgtgctttaataatagcttaccccaggggtccccctgctccccaattatctccaacctgatttgtaccatcttggacatccgattaagtaagcttgcacaaaagaatggctgtcagtactctcgttacgctgatgatatcacattcagcaccaataaaaaagagtttccacaggaactggttatcgacaacgatgttgtgaatgtgggggccgtacttctgaaggagatagagcgggccggatttcgaattaatcatcgtaaaacacgacttctgtacagcaccagtcggcaagaagtcacaggccttaccgtcaataagaaagtgaatgtggacaatcgctattataaaaaggtacgcgctatggctcacacgctgtacaaggaccaatcatttgcaattatcaaagagaacgccaagccgcagaaggggaccttgaaccagctcgaaggcatgatgagttttattgacagcatagacaagtacaacaacaagcttaagttagccaataagcagccccaaaagtatcagtccttcaattacggtttaaactacgagggaaagttgaacaggagggagaagactctgagtaagtttctgtactacaagtacttccatggactgcatgtccctacaattctggtggaaggcaaaactgatagggtgtatctaaagtgcgctctgcgatccctgtttctcacttaccctactctggttaaaaaaaataacgccacaggcaacattaactatagtctcaactttttccgtgagagcacccggacgtcgtactttctcgacatctctggaggggcggctgaatttgaaaagttcatcactcgctatccagaacagtacaaaagatttaatcacacacctctctatcccgtgattatgattctggataacgactcaggaacaaggaccatcgtccggaaaatctccaaatctctcggggtgacggaggattcaataaagaaaaactcattcacccacatcatacacaacctgtacatcgtgttgacaccactactgcccggggatcgcgattcgtgtatggaagacttgtttgatagcagcgttcttagcaccgtaatagatggtcgcagcttcgataaatctaacaactacaataagtccacccactatggtaaaaacgacttctctcttaaggtgatcaaagtgaacgagaagaatattaacttctccggcttcctgccagtgttgaatgctgttagggactgcctcgtccactataataatatctctaagtga

SEQ ID NO: 8448 - RNA, 1758 nt, synthetic construct
  source 1..1758: mol_type = other RNA
atggctcccctctccatacttgaacggttgcaaaacgccgccaatcggcaggacttagcctccatcctgaacctgaaaactgcatttctcaccgatgtgatctacagacttaaggcggagacgcagtacacccagtttaccattccaaaaaaaaatggcgcacctcgcgttatcagtgcaccaaccactaagctcaaggatattcagaggagactcgccgacgtgctgtatctctgcagagcagaaatctacaagaagtacaacattaaccctgtactaagccacggattcgagaaggagaagagcatcattaccaatgcggaacgccacaggggaaagaccctcttgctgaacatcgatctagaggattatttcgactcgtttaacttcggcagggtcagaggtttctttttgagcaatagggattttcggttaaacaacacagtcgcgacaaccattgcacaaattgcctgttttcagaatggactgccacagggctctccttgtagccccatcattagtaatcttatcagtggcgtgctggacattcgcttatccaagcttgcaaagaaatatgggtgcaattatagcaggtatgctgatgacctgacgttttcaacaaataagaagacgttccccaaggagatagctgacgtggggggcgaaagtgtgacccttagtccgacacttattaaagagatcatcaaagctgggttcaagataaacgataaaaagacgagagtatgctataagacttctcgccaggacgtgacagggctgaccgtgaataaaaaagtcaacgtaggtaaggaatacgctaaagtgacacgggccatggctcactcattgtacaaagatggctcattcgttatcgttaccgaatccgggaagattgagaagggaacctgcgctaagcttgaaggccgattcggcttcatcgattctattgataagtacaacaacttgaagctgaagaatgctcggcaactggaaaaatatcagagcgttaaccatgggctgaactatacggccaaattaaatagtcgtgagaaggcctactcctactttctctactacaagaatttccacggtatggagatgccgactatcctaactgaagggaaaactgatcgtgtgtacctgaaatgcgctctcaaatcactcgccaactcttatcccttgttattcaatagctctgacgattcttcaaaaaacgagtaccgtgtcaacttctttaaagccacagagaaaacatcatacttcctggacattagcggaggggccactgactttaagaggtttatcctgagatatcaagaacagaagaagcggttcgagaaatttaagcctaaacatcccgtcataatgctgctggacaatgattccggacctaaagacctcctgaaccatctgaaggataaggttaaaaattgtcccaacgacgtggatactatccgaaaggcccgatacacacacattttcgacaatctctatctgctgctcacaccactgctgccaggcggaaaagaaagctgtatggaggatttgtttgactccaccgtactatccactgtgctggacggcaaaaccttcaataaatcgaatgacactgacacaaaaacagaatacggtaagcatgtcttctctaccaaggtcatcaaagccaactgtaagaccatctcctttgagaaatttaaggtgatcttcgatggtatagaggagattatagcagactattctaagcgctgcaaggtgtga

SEQ ID NO: 8449 - RNA, 1638 nt, synthetic construct
  source 1..1638: mol_type = other RNA
atgaaaatatccaggcttaaactgcttagctccccatccgagttggcgcagctgttgaatattccccagaaattctttctgtatcacctgtatggacaacaaccaacaaaccagtatatgcagtggagcatccccaaaaagaatgggggaaaaaggaatattacatccccgaatccagagctgaagatgattcagagtaggctcgctaattatcttcaggagtgtcttcaagagattcggtctaaccagaattttcatattaacctgagccatggttttgaagttgacaagtctattctgaccaacgccgaaatccacatcggccagaagtatatcctgaacattgatctagagaacttttttcactccataaacttcggaaggatccgtggcttctttattaagaacgtccactttcagctgcaccctacaatcgcaacatgcattgcccatattgcatgttacaataactacctgcctcaaggtagtccttgcagccctgttatcagtaatctgatctgctccgtgttggatatacgcctcaaaaatctagccaagaagtacaagtgcttctatactagatatgctgacgacctgacattcagtacctatctcaaatatttcccggagcagattgctaaatcaaattactacctgaacgtcgaactgtctgccctgctgatcaaagagatacagaaggcaggttttaacattaatcctacgaaaacccgacttcagcacacaaatatacgtcaggaggtaactggcctaactgtcaataagaaactttcagtgcatacggattacagaaacttgtgtagagctaaagcacatcacttgttttctcacggctactatttcactttcgataaacagacactctcacagcggtctggaagcttaaaggaactcgagggccagctcgcgtttattaactcgttagacaaatacaatcgcgaaatcaacaaagccaaaactgaaaagaccaataagcgggagaatttatacggcaagttcatcttttacaagaatttcctctgtaacgaaaagaccatactgttgaccgaaggcaaaaccgatatccaacacatcaaatgcgctctaattggattaaagctcaacaccctgagcaacagcctgcaattttacaagcactcccctagtaagaccttcttaatgacttacatctgccagcagaagctcaatttctgtgccggatcccccgggctgaaggccttcataaaggcctacaatagactctacaaatccatcttgaaagggaaacataagccttctaaccccgtgatcatcatagtggacaacgatcacgaaggggaggatattaagaagatcatcatgaaggagttcaacattccaatcaatacaaaccagcccacccgcatcatctacaaccttttcatcatcttcctgagcccgccctcatttatgtcatcacatactaacacagcaccacatcgaaacattgagatcgaggacctgtatccacaatacattctcgacacccagctgaacgggaaaaagttcaatcggacgaatcacgaatcgactgacacggaatatggtaaggatagttttgtgtctaaggtgataaagagcaaaattgacaagcccatttga

SEQ ID NO: 8450 - RNA, 1749 nt, synthetic construct
  source 1..1749: mol_type = other RNA
atgaaggaattcaatcagattaaaactcgcaatgagttggccgattttttgaatatcccccgcaagcagctgagttacgtgctatacgtgaagggtattaacaacctgtacaactctttcaagattaggaagaagaacggcgggtttagagagattaatgcccctcttgaagagctgaaaggtatccaacgaagactgcaggaggttctctacaagaagatcgggaataagtggattaataggaacataagccatgggtttgaacgcaatcgcagtattattactaacgcgattgtgcaccggaacaagcggattgtattgaacatcgacctcgaaaactttttcgaatccatacattttggacgtgttcggggctttttcaacaagaataagaacttcagccttcctatcgacgttgctacggtaattgcccagatcgcctgttacgaaggaaggttaccacagggagcgccttcatctccgatcataagtaatctcatctgcgagatattggattatcgcctgctgaagatcgctaaaaagtataaggtcaactatacccggtatgctgacgaccttacatttagcaccaatgataagaacttcctgtttttacaacgagagttctatgaggaaatttcccaagagctgattcgaacaggtttcaagatcaatgagaaaaagaataggctgcaactgagagattctagacaggtggtgactggcctcgtcgtgaataaaaaaatcaacgtcaaccggatctattacaaagaaacgcgtgccatggcttaccagctgtacaaacaaggctcctttaaaatcaacgacgagccggcaaccataaatcagctcgaagggcggttcgcattcatcaatcagctcacttggcataataacctagttgatgggattaccgccaactttaataactttacaagtagggaacagcagtatcaaaggttcctattctacaagtatttctttgccaactctaagcctgtcatcgtgaccgagggcaaaacagacgtcagatacttaaagtctgcactgaaatcactctataaagactacccaaaactgattgtcaaacacaaagacggttctttcgagttcaagatacacttcctaaaaaagacaaagcgcttatcatactttctgggaatctataaggatggggcaaacgccttgaacaatatctaccagttttttgggagcaaaaattcaaagctgaactacctgaactatttcaaaaagatctccggcaactcccccgagaatccagtgatcctcttgtttgacaatgaaatcaagtcaggcaataaaaaacccatcggaaagtttctgaactatgctggcttggatgacgagaaaaagactacactgaagaaagaaaacatggtgaatattgtagactcgctgtacctccttaccgtgccacttataaacggcaaactcgaatgcgatatcgaggacctcttcgataacaataccctgttccttaagatagagggaaaagaattttccaagaaggatagctacgacgtgagcaaatattatggaaaggagattttctcccagcacataagtcagaactacagcgatattaatttcaatcagttcagacccgttctggacaacatcaataagattatcgatgtgtacaccagacagaatgataatatgcttgtcaatctggagctgaaaaaggtagacaagaggaacatgaacaaagtggagctttttaaatga

SEQ ID NO: 8451 - RNA, 1749 nt, synthetic construct
  source 1..1749: mol_type = other RNA
atgagggaattcaacgaaatcaaaaccagaaatgagctagcagactttctgaacgttccccggaagcagctgagctatgtgttatataagaagggcgtagataacctatacactagcttcgagatcaataagaaaaatgggagcgtccggaaaatcaatgcccctttggaagagctgaaagacgtgcaacgcaaactggctgaggtgctctataagcacatgcgcaacaagtggaagaagaaaaatatatcgcatggcttcgagaaaaataagagcatcattactaacgccaagatacacaggaataaacgcctcgtactcaacatagacatcgaaaacttcttcgagagcattcactttggtcgcgtgagaggatacttttcgaagaataacaatttcctccttccaattgaggtcgccaccgtgattgctcagatctcttgctacaaaggtaaattgcctcagggcgccccatcttcccccatcatctcaaacctgatttgtgaaatattggaccatcgtctgctgaaaatcgccaagaagtacaagcttgattatactcgttatgccgacgaccttactttctctaccaacgataaaaagttcttagggctgcaaaaagcattctacaaagtgatctcaaaggaacttataagagcgggatttaagattaacgaaaagaaaaaccggctccagcttcgcgactctcgacaagtggtcacaggcctcgtggttaacaagaagatcaacgtgaatcggatctattataaagagacaagagctatggcccaccaattgtataaagagggaagctttgagattaatggggaacctgcaacactaaatcagctggagggtcgattcgccttcattaaccagctgacctggtataataataaagttgatgggatcaagaccaacttcaataattttacgagccgagagcggcagtatcagaggttcctcttctacaagtacttctttagtaactccaagcccgtgattgtgaccgaaggcaaaacagacgtcacttacctgaagagcgcactgaagtctttgtataaggagtacccaaacttaatcactaaacatagtgatgggacctttgagttcaaagtgagctttcttaagaagacaaagagactcggctattttttgggcatataccaggacggggggtcagccttgaataatatctacaactttttcggctccaagaagagtaccttgaactatctgaacgactttaaaaagatctcaggcaatctcccaaagaaccctgtcatcttaatgttcgataacgagattaagtccggaaagaaaaaaccgattggtcagtttctctcccatgctggactggcagacaaaaagaggctgatactggagtctgaatatatggttgacgtaattgactcactgtacctgttaacagttcccctgattgacggaaagtccgaatgcgatattgaggatctctttgagaaaagtacgctgtcacacaagattgaaggcagggagtttagtaaaaaggatcattacgatacctccaaatgttacggaaaagaaatctttagccagtacatcctgaaaaattacagtgatatcaacttctccgagtttagatctgtcctcaacaacatcaataacatcattgacatctacaagaagaggctggctgatgcggaacacaatctggaggcggaaaatattgataagtcctctgctgacaaaatgctacttgaaatatga

SEQ ID NO: 8452 - RNA, 1746 nt, synthetic construct
  source 1..1746: mol_type = other RNA
atgatggagttcgacgaaatcaagacccggaatgagctggctgattatctgaacgtcagccgcaaacagttatcctatgtgctgtacgtgaaagggataaacaacctgtacacgtcatttgagatacataagaagaacgggggagtgaggaaaattaatgccccccttgaggagctgaaagatatccaacggaaattaacagaggccttacacagtcatatgaagaaaaagtcgaagaagaagaacaacatctcccacgccttcgagatcgataaatccatcataaccaatgcagaagtgcaccgtaacaaaagactggtgctgaacattgatctcaaagacttttttggctctattcactttggcagagtgcggggcttcttcaataagaacaataagttccttctgccaatcgaagtcgctaccgttattgcccagataagttgctttgaaggtaaactgcctcagggtgccccgtctagtccaattatatcgaacttgatttgcgagatcctggactataggttgtctaagatctctaaaaagtacaagctcgactatacccgctacgcagatgacttgactttctccaccaacgacaagaattttctgggactccaggacgagttttacatcgagatctccaaggaactgatccgagccggattctcaataaacgaggacaaaaaacgccttcagttgaaggatagccggcaagtcgttactggcattgttgttaacaataagttgaacgtgaacagagattattacaaagaaacaagagctatggcccatcaattatacaagcagggaaagtttgagattaacggcgaggtagcaacacttaatcagctggaagggcgattcgcctttattaaccagttgacttggtacaacaataagaagaatggcatcaaacctaagagttttaggaatcttctgtcccgggagctgcaataccagaagttcctgttttacaagtacttcttcgctaatccgaaacctctaatcgtcacagagggcaagactgacatagtatacctcaaaagcgctcttaaaaatctccattctgagtatcccaatctgattacaaaaaatagcgacggttcatttgaattcaaggtgagcttcctgaaaaagacaaagcgtctgaagtatttcctaggaatctatcaggacggtgggagtgcactcaataatatctacgacttctttaccggtaagaagaacacgccagacttcctgtcctattttcgcctgatctcaaacacactcccaaagaaccccgtcatcctcatctttgataacgaaggcaaaaataaacctttgggcctttttctgaaccacgctgtcctggatgtgaagaagagggaaattctggatagctcttatatggtggacctaattgacaatctgtatcttctaactgttcccttgatagacgggaaatcagagtgtgatatcgaagatctcttcgaagatatcaccctgtcctatgaaatttctgggagaaagtttacgaaagaggataaatacgataccagcaagtactatggaaaagacatgttctccaagtacattctcaataattacgcggacattaacttcaatgaattcaggagcattctcgacaacatcaatagcattatagggatctatactaacggcatcgtaggaaccgggcaggagctcgaagcaaaaaacattgataagtcaagtgcggataaagtgttactcgagatctga

SEQ ID NO: 8453 - RNA, 1752 nt, synthetic construct
  source 1..1752: mol_type = other RNA
atgagcgaattcagtgagatcaagactaggaatgatttggcagatttcctgaacatccctaggaaacagctaacttatgtgctgtatgtcaagggcataaataacctctacacctccttcgagatttataagaaaagtggaggcgctcgacggattaatgcgccaattgaagaactcaaagatatccagcgcaaactggccgaagctctgtacaaacacaagaaaaggaagtggaagaagaagaacaatatctctcatggtttcgagaaagataagagcattataaccaatgccaaaattcacagaaacaagcgatttgttctgaacatcgacctagagaatttctttgaaagctttcatttcggacgcgtcagagggttttttatcaaaaaccacaatttcctgctccctatagaagtggcaaccgtcatcgctcagatttcttgctatgaaggaaagttacctcaaggcgctccgtcaagcccaataattacgaatcttatatgcgagatcctggactatcgcgtcagtaagatggctaagaaatacaaactgaactacacaaggtacgctgatgatcttacattttccacaaacgacaagaatttcctgcgcctacagaccgaattcttgaagaatatttccaaggaactgatccgagcgggctttaagatcaatgaaaaaaaaacccgtctccagctgcgggattctcgtcaggtggttaccggcctggtggtgaacaaaaagatcaacgtgaatcggatctattataaagagacgagagccatggcccaccagctgtataagcaaggcgaatttgagattaaaggcgaacccgccacattaaatcagctggagggaagattcgcctttataaaccaactgacctggtataacaacaagattgatggagttaagcatcactttaacaacttgacttcccgggaattacaataccagaagtttctcttctacaaattcttcttcgcaaatccaaagcctctcatagttactgagggcaaaacagatattgcatatcttaaatctgccttgaagaatctctataaagaataccccaatctgatctcgaagaatagcgatggcaccttcgagttcaaagtatcctttctaaagaagactaagaggcttaagtactttctgggaatctatcaggacggtgggaatgcgctgaacaatatctacaactttttcgactcaaagaagcccgcacccaactacctgtcttatttcaaaacaatcagcaatactctcccgatgaatccagtcattctgatgtttgacaacgagattaaatcgggaaacaaaaaacccataggtaagtttctgaactacgccaacttagacgctgcaaagagagaaacacttgagaacaactacatggtagacattattgataacctttacctcctcaccgtgcctctgattggggggaaatcagagtgtgatatcgaggacctgtttgaggagatcactttgttgaataagatcgacgggaaaaagttcatcaaagccgacaaatacgacgtgaccaaatattacgggaaggagatcttcagcaagtatatcattaacaactacaccgacatcaactttactaaattccgggccgtgctcgacaagatatccaatattatcgagacatacacgaaggggcttgtggatacaggtcataatttagagacgaagattaaggacaagtcaagtgccgacaaagtaccattggagatctga

SEQ ID NO: 8454 - RNA, 1758 nt, synthetic construct
  source 1..1758: mol_type = other RNA
atgatggagttccaggacattaagaccagaaatgatctggcagattttcttggtatcccccgaaagaagctgtcttatctcttatacaagaaggagattaacacactgtatacctcattcgagatcaacaagaaaaatggaggggttagaaagattaacgctcctctggccgaactcaaggatatccaaaggaagctcagcgaagctctttacaaacacaagaagaaaaagcaagacattaagaacaacctgtctcacgcctttgaaaaagagaaatccatcattaccaacgccaaaattcaccgaaataaaagactcgtactgaatatagaccttgagaacttttttggctccttccatttcgggcgcgtgagaggattcttcatcaaaaataacaacttcctcctatcctctgaggtggccaccgtaattgcccagctgacgtgttatgaggggaaattgcctcaaggagcgccgacatctcccatcatcaccaatttaatatgtgagatcttggaccaaaggctgctgaagatcagcaaaaagtataagcttgactatactcggtacgccgatgatctaactttcagcactaatgataagaactttctggaacggcagactgaattttatgagctgctttcctccgagttgattcgcgctgggttcaaaattaatgagaagaagaaacggctgcagctgcgcgactcaaggcaggtggtgaccggcctggtggtcaacaagaagataaacgtgaaccggattttttataaggaaacaagggctatggcacatcagctgtacaaggaaggcaagtttgagataaatgggaagctagccaccctaaatcagcttgaaggccgcttctccttcataaatcagctgacccggtacaataataaaatcgacggtgataagcataacttcaacatcttgtcatcaagggaaagacagtatcaaaagttcctcttctacaagtacttttatgccaatcccaaacccataatcgtcactgaaggaaaaactgacattgcctatctcaaagctgcgctcaaaaacttacataatgattacccgaacttgatcactaagagttcggatggcagctttgaattcaaagtgagctttctgaataagacaaagcgattagcccactttttgggtatttttcaggacggaggtagtgcactcaacaacatttacaactttttcgacgataaggcaaaaaaaacaaccccttcctatctcgactacttcaaagagatctccaatacattaccaacaaatcctgtgatattgatgttcgataatgagatcaactcaaagaaaaacaagccaatcggcagtttcattaatcacgctaagctgggcgataaaaaaaaaggaatactgctggaacagaacatggtcaatattgtcgacaacctctatttgctcaccgtgccactgatcgatgggaaactggagtgcgacatcgaggacctctttgaaaaaagcacactttctcagaagatcaacggccgtgagttctgcaagaaagacaagtacgactacagtaaatactatggcaaggagatttttagcaagtacattctggacaattacacggacatcaatttcaatgagtttcgttcggttctgaacaacatcaacaacatcatcgatatttacacgaaaggcctggttgacaccggagggaatccaaaggcaaaaagtcttgataagagctctgaagataaagtccccctggaggtttga

SEQ ID NO: 8455 - RNA, 1749 nt, synthetic construct
  source 1..1749: mol_type = other RNA
atggaatttcaggacatcaaaactaggaatgacctagccgattttctgagaatcccgaggaagaagctatcctatctcctatacaaaaagggcataaataccctgtacaccagcttcgagatcaacaaaaaatccggcggtttcaggaaaattaatgcgccactggctgagctaaaagacatccagcggaaactcagcgaagctctttacaaacataagaagaagaagaggaacattaagaacaatctcagtcacgcttttgaaaaagagaagtccatcattaccaatgccaagatacaccgaaataaacgcctggtgctgaatattgacctcgaaaatttcttcggttcgttccactttggcagagtcagaggatttttcatcaagaacaataacttcctgctcccaacagaggtcgcaacggttatagctcaactcacatgttatgaggggaaacttcctcagggagcccccacttcccccatcataactaacctgatttgcgagattcttgatcagcgtctcctgaagattagcaagaaatataagctggactacacacgctacgccgatgacttgacgttctctaccaacgataagaagtttctggaacgacaaactgaattctatgagatcctttccagtgaattaaagcgggcgggttttaagatcaacgaaaaaaagaagaggctgcagtttagagactctagacaagtggtgaccggactcgtcgttaataagaaaattaacgtgaaccgcatctattataaggagacacgcgccatggcccaccaattatacaaaaaagggagtttcgagatcaatggacagcctgctaaattgaataagttggagggacgtttcgcatttatcaaccagctcacctggtataacaataaagtcgaaggaatcaagacgcattttagtaacttcacaagccgcgagttgcaataccagcgcttcttattctacaagtatttcttcgcgaatcccaagccactgatagttaccgaggggaaaaccgatgtgatttatcttaagtccgctttgaagagcctgtacaaggagtatcccaatctcattaccaagcacacagacgggcgatttgagttcaaggtgtcttttctgaaaaagacaaaaaggcttggctattttctgggtatatatcaggatggcggctccgccttgaataacatttacaactttttcgggtcaaagaaaagtaatctgaactacctgaacgactttaagaaaatctcaggcaatcttccaactaatccggtgatcctgatgtttgataacgagatcaaatctggcaaaaaaaagcctataggccagtttttcatacatgccggcctggcagatgagaagcggaagaaacttgagaacgagtacatggtaaacatcatcgactcactgtatctcctcactgtacccctcattgggggtaaacctgaatgcgatatcgaggacttatttgagaagagcaccctgtcacataaaattgaagggaaggagttcagcaagaaagacaattacgatgtttcaaagtactacggaaaggaaattttcagccagtacattctgaagaactattcggacattaactttaacgaattccggtctgtgttggacaatatcaacaacatcatggatatttaccagaagcggctggcagacactgaaagaaatctggaagcaaaaaatatcgagaaatcttccgccgataaagtgttgctggaagtctga

SEQ ID NO: 8456 - RNA, 1752 nt, synthetic construct
  source 1..1752: mol_type = other RNA
atgagagagtttaatgatatcgggacccggaatgaactggccgattttttgaaaataccacggaagcagttgtcatatgtgctgtatgtgaagagcatcaacaatctgtacacttctttcgaaatccacaagaagaatggtggggtgagaaatattaaggcgcccctcgaggagctgaaagatattcagcgtaaattggccgaggctttatacaaacacaagaagaaaaagcagggccgaaaaaataaactctctcatgcgttcgagaagaacaaatccataattaccaacgcagaaattcatcgaaataaacggcttgttctgaatattgacctagagaacttttttgagagttttcacttcggaagagtccgcggcttcttcaccaagaacaaaaacttcttgttacccattgaggtagccacaattatagcccaactgagttgctacgaagggaaactgccacagggcgcaccgacaagtcctatcatctctaacctcatctgtggcatactcgactacaggctcctgaagattacgaagaagtataagctcaattacactcggtacgccgacgacctgaccttttccaccaacgataaaaacttcttgaatgtgcagaccaagttctatgaggaaatttcaaatgaactgatccaggcaggcttcaaaataaacgagaagaaaacaagactccaatataaagactccagacagaccgtgactgggctagttgtgaactccaaaattaacgtcaaccgtactttctacaaagaaaccagggctatggcccaccagctgtacaagcaaggcaatttcaagattaatagcgaatctgctgatctgaaccaactcgaagggaggtttgcctttattaaccagctgacccgctacaataatcagaaggacggcgataagcacaatttttacaatttaagctcccgcgaactgcagtaccagaaattcctattctacaagtactttttcgcaaatcctaaacccctgattgtgacagagggtaagactgacattgtctatctgaaagccgctctgaagaagctttacaatgagtatcctgatcttatcacgaaagacataaacggaacttttgagtttaaggtatccttcctgaagaaaacaaaaaggcttggatattttctgaacattcaggagggtggcactggactgaagaacatcaatgacttctttaatagcaacaacgctaaaaagtctgctatgaactacctaaactatttcaagaccatcagcaatacattaccacagtcaccagtgatccttatgtttgacaacgaaattaagtcaggcaaaaagaagcccattggagattttcttcatcatgcaaaagtcgacaatgagcaagttgatacgcttaagagcgagcacaagataaacatcatcgataacctctatctcctgacagttcctctgattgggaagagtgaatgcgacatagaggatttattcgataatacaaccttgtcccataagatcaatgggaagaaattcatcaagaaggacgactatgataccagcaaatattatggtaaggacatcttctcgaaatatatcctcgataactacctcaacatcgattttaacaacttccgcagcgtgttggacaacatcaacaacatcatcaatatctacatgaagcgggtcgtagacactggaaggaatatcgagacgacaaaaaatatagacgaatctgagaaagtgccgctggaaatctga

SEQ ID NO: 8457 - RNA, 1755 nt, synthetic construct
  source 1..1755: mol_type = other RNA
atgatggaattcaatgacattaagacacgaaacggcctggctgacttcctgaagattccaaggaaacagctttcttatctgctgtatttcaaagacgtcaacaatctctatacctctttcgagattcgcaaaaagaatggcggaagtaggaagatcaaggcccccatcgaagagctgaaggatattcagaagaagctggccgaagcactctataaacacaaaaaggagaaacgagggaaaaagaacaatatctctcatgctttcgaaaaagacaagtccatcatcaccaatgccaagatacatcgcaataagagactggtgttaaatatcgaccttgagaattactttgagagcttccattttgggcgggtacggggctttttcgctaaaaacaatgactttctccttccgattgaggtggcaacagtgatagcccaaattagttgctatgagggcaagctaccacagggtgccccttcaagtcccataatatcaaacctcatctccaaaattctcgatcacaaaatcatgaagatcgccaagaaatacaagctagattacacacgttacgccgatgacttgacctttagcactaatgacaagaagttcctcgaccttcaatcagaattctacgaagagatttccaaagagattaagagggcgggttttaagatcaatgagaagaagaagcggctgcagtttcgtgatagcaggcaagtcgtcaccggacttgtcgtgaacaagaagatcaatgtgaatagggtgtattacaaagaaactagagccatggcgcaccaactgtacaaatatggtaagttcggaattaatggaaagcccgctaccttgaatcagctggagggccggttcacatttatcaaccagctgatctggtataataataagatcaacggggaatactctaatttcaattatctgcactcgagagaactccagtaccagaaattcctcttctacaagtattttttcgctcaccctaaaccactgattgttacagagggtaaaactgacattgcttacttaaagtcagcactgaaaagcctttacaaagaataccctaacctcattaccaaaaaagatgatgggacctttgagtttaaagtttccttcctgaacaagacgaagagactaaagtacttcttgggcatcaaccaggatggcggcagtgcactgaacaatatttacaactatttcgacagcaagaagccagcccccaattacctgagctactttaaacagatctctaataactcccctatcaaccccataattctcatgtttgacaacgaaattgagtccggaaagaacaagcctattgggaaatttctgaaacacgttggattagatgacggcaaaaaggttatcctagaggataaatacatggtgaacttgattgataacctgtttctgcttacggtaccgttaatcgatgggaaagcggaatgtgatatagaggacttgttcaaggacgacgcactgttgcataaaatcgatggaagagaattcatcaagaaagacaagtacgatgtctccaaatattatgggaaggagatttttagccgctatatcagtgacaactattcgaacatcaacttcaagaactttaagtcagtgctgaacaacataagcaacataatcgacatatacactcatcgcctcgtggatactgagcacgatacagaaggcaaaaagatcgacgagtccaacgccaataaagtgccattgtctattatctga

SEQ ID NO: 8458 - RNA, 1758 nt, synthetic construct
  source 1..1758: mol_type = other RNA
atgatgaaattcaatgatattgaaacccgaaacgacttggcggactttcttaagattccgaaaagccagctctcgtatctgctgtacttcaaagacgttaacaactcctacacaagctttgacatttccaaaaagaatggcggtattcggaaaatcaaggctcctaccgatgaattgaaagaaattcagcgaaaactcgcggaggcattgtataaacaccgtgaaaagaagcagaacaacaacaacatttcccatgccttcaagaaggataagtctatcatcactaatgccaaaatccataggaataagcgctttgttttgaacatagatctcgaaaactactttgaatccttccatttcggacgggttcgcggcttctttgccaacaataagaacttcctgctgcccatgaaggttgctaccgtgatagcccagattagctgctatgacggtaaactacctcagggagctccaacatcacccataatttctaatctcatctcagagattctggaccggaggattatgaaaatcgcgaagaaatataagctgtattacacacgatacgctgatgatctgactttttccaccaacgacaaaaacttttcaaatcttcagaccgagttttatgaggagatctcagaagagattacgaacagtgggtttaaaatcaatgacaagaagaatcgcctgcagtttcgcgattccagacaggtggtcaccggcctcgtggtgaataaaaaaatcaacgtgaaccggatttactataaagagactagagccatggcacatcagttgtacacgcatggcaaatttgagattaatggtgagccagcaacacctaaccaactggaagggagatttagctttatcaatcagctgacctggtataacaacaagatagatggtgagaaacacacattctataatctgagttcgagagagctgcagtatcaaaagttcctcttctacaagtactttttcgctaattctaagcctcttatcgtgacagagggaaagactgacatcgcctatttaaaatccgccttgaagaatctatacgcagaataccctaacttaattaaccggaatagcgatgggacattcgaatttaaggtgtcattcctgaaaaagacaaaacgtttggcctacttcctcaaaataaaccaagacgggggatctgcactgaacaatatttacgacttctacaacgacaggaaaagaaataaatccacgcccaattaccttaggatcttcaaggaactgagtaacactagcccagaaaacccagtaatccttatgttcgataatgagatcaagtctgagggcaagaagcccattgggagcttcctcaatcacgctaaactgaatttcaagaagaagaccaagcttagtaatgactacatggtcgatatcgtcgacaatttatacctacttaccgtacccctggtcaagggaaagagtgaatgtgatatagaggacttatttgatgatggcgccctctctcaaatcatagacggaaaggagtttaccaaagaaaatgactatgatcactccaaatactatggcaaagagatattcagcaagtatgtggagagcgactatagtaatatcaacttcgacaggtttaagtctgtgctcgacaatatgaacttcatcatcgatacttacaagaaagagcacctgaataaggagcactcactggataccatcaacactgataactctaacaaggaccaggtgccgctggaagtctga

SEQ ID NO: 8459 - RNA, 1689 nt, synthetic construct
  source 1..1689: mol_type = other RNA
atgagggctttttatgacgtgaagaaccgcaatgaattcgcagatcttctgaagatccctcggaaacaactcagctacgtgctgtacattaaagggataaacaacctgtatgccagctttgagatcccaaaaaaggacggtggcatccgaaagattaatgcccctttggaagagctaaaagtcatccagcgaaaactcgctgaggcactgtacgagcacaagaagagtaagcgaaaaaacaacaatatctctcacgcattcgagaaagacaagtcaatcataactaatgccaaaatacaccgcaataagaggtttgtgttgaatatcgacctggagggatttttcgagtcttttcatttcgggcggattagagggttttttttgaagaacaaggacttcttgctgagtgaggaagtcgccactgtcattgctcagatcagctgttatgagggaaaactgccacaaggcgccccttcatcccccgtaattaccaatttgatctgcgagatcctggatcatagaatctctaaggtggccaagaagtacaaaatgaattacacccgctatgctgatgacctaaccttctccactaatgaccggaagtttttagatctccacgtgaagttttatggggaaatcagcgaggaactgattagggcaggctttattatcaacgaaaaaaagacacgcctccagttcagagattctcggcaggtggttacgggtctggtggtcaataagaagatcaacgtgaaccgcatttactataaggagacaagagcaatggctcaccaactttacaaacacgggaatttcgagataaatggcgagcccgccacccttaaccagttggaagggcgtttcagttttatcaaccagcttacttggtacaacaataaaatagatggctcgaaaaaccatttctccaatctgaagtcaagagaactgcagtaccagaaattccttttctacaagtacttcttctccaatcccaaaccattaattgtaaccgaaggcaagactgatatcgcctatctgaagagtgctctgaaaaacctgtataatgagtatcccaacctcataaccaaaaattctgatggcaccttcgaattcaaggtgagctttctcaaaaaaacgaaaaggttaaggtacttcctaggaattaatctcgatggaggtagcgccctgaataatatctacaacttcttcgacagtaagaaaccggcgcctaactatctcaactactttaagtcaacatcgaatacatcaccaactaatcccgttgtcctcatgttcgataacgagatcatctctggaagagagaaaccaattggcaaattccttaatcattccgcgctcgatacaattaaaaggaagaccttggaaaaggaatatatggtagacgttattgacaatctctatctacttacagtccctctgatagatggtaagccggagtgcgacatcgaagacctgtttgaggatatcacaatctcccatcgtattgacggcaaggaatttacgaaggacaataaatacgacaacagcaagtattatggaaaagagatgttttccaagtacattctgaacaactacagcgatataaactttaacgagtttcgcttagttctggacaacctgaacaatattatgaacaactacaagaacgcgttcgtggaacgggtgtga

SEQ ID NO: 8460 - RNA, 954 nt, synthetic construct
  source 1..954: mol_type = other RNA
atgaaagagttctacaacataaagacaagaaacgagtttgctgattttctcaatatccccaggaaacagttgtcctatgtgctgtacgtgaagggggtcaaaaatctgtacaccacattcgaaattccaaagaagaatgggggaatacgaaaaatcaatgctcctcttgaagaactgaaggatattcaaactaaactggccgaggccttgtataatcataaggagaagggcagaaagaaaaataataacatctctcacgcctttgagaagcagaagaacataattaccaacgcgaaaatccatcgaaacaaacgctttgtcctcaacatcgatctggagaatttctttgaatcattccacttcggaagggtgagaggcttttttaacaaaaacggcaatttcctgttcccaatcgaagtagcaaccgtaatagcacagattagctgctatgagggtaaactcccgcagggcggcccttctagtcccatcatcacaaatctaatttgtgagatcctcgatttccggatcatgaaaattgccaagaagtacaaactgcattacaccaggtatgcagacgacctaacgtttagcactaacgacaagaagtttctgaacctgcaggatgaattctacaacgagattagtaaggaaattgtcagggctggattcaacgtgaatgaaaagaaaacccgtcttcaattccgtgactcccgccaagttgttaccggactggttgtgaataaaaagatcaacgtgaatcgcgtgtactataaggagacgcgggccatggcccaccagttatataaacagggttccttcgagattaacggggaacctgctactcttaaccagttggaggggcggctgtcatttatcaatcagctcacatggtacaacaataagattgacaacatcaagcaccactttaacaatttaagcactagagagcggtga

SEQ ID NO: 8461 - RNA, 1752 nt, synthetic construct
  source 1..1752: mol_type = other RNA
atgggagagtttaatgacatcaagacaaggaatgagttagccgatttcctaaaagtgccgcggaagcaactgagctacatcctgtacgtgaaagggtctaacaatctgtatacaagtttcgaaatcagtaagaagaacggcgggaccaggaatattaatgctccttcaaaagagctgaaagatattcagaagaagctagctgaggccttgtacaatcacaaaaagaagcgcggatctgcggataaaatcagccatgcatttgaaatcgataaggggataataaccaacgcagagaaccataggaataaacgatttgtgctgaacattgatctggaggatttttttgactctttccacttcggaagggtgagaggctttttcaacataaacatccacttctcacttccaatagaggtggccacagctatcgctcaaatatcttgttatgaaggcaaactcccacagggggccccctccagtccaatcatcaccaatctgatttcagagattctggatcacaggctgctgaagattgccaaacaatacaagctggattacactcgatatgccgacgatctaacgttctcaacaaacgataaaaactttcttgagctgcagaccgaattttacatcaaagccagcgaggtgatcattagagctggtttcaaaataaacgagaagaagactcgtttacagcttcgcgactccaagcaggtcgttactggcctcgtagtcaacaagaagattaacattaacagcgtctactacaaagaaacgcgggcgatggctcaccacttgtataaatatggggaattcgagatcaatgataagcctgcgacattgtatcagttagagggacggttcgccttcatcaatcagctcacttggtataataacaagctggacggagaaaaacatcattttcagcgcctctgcagcagagaaagacagtatcagaagtttctgttttacaagtacttcttcgcaaatcccaaaccactgattgtgaccgagggaaaaactgacgttgcctatctgaagtccgcccttaagaagctctacaacgaataccccaatttgatcacaaagaactccaatggcaaattcgagttcaagatctcctttctgaacaaaacgaagagattgaagcatttcatgggtatttttcaagacggtggtactgcactcaaaaacatatatgacttctttgactcgaagaagtctgacaccaccaactatctcagcttttttaagaaaacctccaatactctgccgatcaatcctgtgatcctaatgtttgacaatgagattcactcgggcgataagaaacccatcgggaactttctcaatcacgccaaactcgatgaaaagaaacgtgaggacttaaaacacaagaacttcgtcgacataattgacaatctctatttgcttaccacacctctgatcggggacaagagtgaatgcgatattgaagacctcttcgaggatagtgtactgtctcacaagattgacggcaaagaattcactaagaaggataaatacgacgtttccaagtactacggcaaagaaatttttagcaagtacatccttaccaactatagctcaattaacttcacaaacttccgcaccatattggacaatatcgacaacatcatcaatacacatcggaaaggcggtgcaggagctggacatgacctggaggaaaaaaatatcgatatgatttccgcaggcaaggtcctgcttgagatttga

SEQ ID NO: 8462 - RNA, 1680 nt, synthetic construct
  source 1..1680: mol_type = other RNA
atgggtgaattcaataatatcaagacacggaatgggttagccgatttcctcaaagtcccacgaaaaaagctgtcctacattctcttcgtaaagggcacaaataacctatacagctcctttgagattaataagaagaacggagggacccgtaagatcaatgcgccctccgaggaacttaaagacattcaaaagaagcttgccgaggcattgtataaccacaagaaaaaaaaacagcgcgggtctttagaaaagatatcacatgccttcgaaatcgataaagggattattactaacgctgaaaatcacaggaataagaggtttgttttgaacatagacctggaggattttttcgattcattccactttggccgggttagaggttattttcataagaacgatcacttctctctccccttggaggtggccactgccattgcccagataagctgctatgaaggcagcctgcctcagggatcaccaagcagtccgattattaccaacttgatatgtgagattctggatcatcggattctcaagatcacaaaacaatacagactcgactatacacgatatgctgatgatctgactttttccaccaacgacaaaacctttctcgagagtcagacggagctgtacaagagaatctccgaagaaattaacagagctgggttcaaaattaacgacaaaaaaactcgcctgcagcacaaagatagccagcaggtggttacaggcttggtcgtgaataaaaagatcaatgtgtcaagtgtgtactacaaagagacacgcgctatggcccacaatctttacaagtatggggagttcaatataaatggcaatcttgcgactttgaaacagctcgagggtaggctctcttttattaaccagctgacgtggtacaacaataaaattgacggagagaagcatcattttcaacatctgtgttcccgggaaagacagtaccagaagttcctgttctacaaatatttctttgcaaaccctaagcccctgattgtgactgaaggtaagaccgatgtggtctatctgaaatctgcccttaaaaagctgcacaaggactatccatcactgatcataaaaaaatccaacgaggagtttgagttcaaggtatctttcctgaataagaccaagcgtttaaaacactttatgggcatctttcaagatggcggaacagcactgaagaacatctatgacttctttgctagttcgaaaagcaatattaactacctcagctacttcaaaaagacctctaacaaaagtccaaataaccctgtcatcctcatgtttgacaatgaaatcgagtccggaaataagaagcccataggaaactttctgaatcataccaaagcagatgaccgcaccaagatggacttaaagcagaagtacttcataaacatcatcgacaacctatatctgcttacaatccctctgatcggaggcaaaagcgagtgcgatatcgaggatctatttgaggactctgtgatatcgcacaaaatcgagggcagggaattcactaagaaggatgaatatgacatctctaagtactacggcaaggaaatcttcagcaagtacatttccaagaactatagtagcatcgacttcaccaatttcaggtcaatcctggacaacattgacaacatcatcaaatgtacggggtgcaagtga

SEQ ID NO: 8463 - RNA, 1479 nt, synthetic construct
  source 1..1479: mol_type = other RNA
atgatcacaaatgcacgcaggcacaggaataaaagaattgtctacaacattgacctcgaagacttttttgagacaatccatttcgggcgcgtgcgcggcttctttaacaaaaatcggaacttccagctgcccatcgaagttgccaccgtgctggcacaaattagttgttttaagggcaaactaccacagggatctcctagctcaccaataatctcgaatttgatctgccagatcttagacaatcgactccttaaagttgctaaaaagtacaagctcgtctataccaggtatgctgacgacttaaccttctctacaaatgacaataagttcctggataaccaattcaatttctacaaggacctgagtgaggagattaacagatcaggcttcaaaataaacgagaacaagaaccgaatacagtataaagaaagtcgtcaggttgtcacaggaatcgttgtaaacaagaagctgaacgtgaacagagattactataaagagactcgggccatggctcatcagttatataagaccggcagcttcgaaatttctggggaatccgggaccataaatcagcttgaaggaagatttgcctttatcaaccagcttaccaggtacaataatgagctggataatcagaaacacgacttccataatctgagttctcgagaataccaatatcagaagttcctgttctacaaaaccttctactataatcccaagccagtgatcgtaaccgagggcaaaacagatattctgtacctgaaagccgctctgaaaaatctgtacgatgagtacccgaaactcattacgaagaataacgacggcacgttcaagtataacatcagcttcctgaaaagaactaagcggcttaagcactttttgaacattaacatggatggggcctcagcgttgactaatatctacgactttttttccaaccggaataataagaaggcacccaactatcttaagtattttaagagcctgaacaacagcctgcccaagaatccagtcatcttgctctttgacaatgaattgaacaacaacgaaaagcctatctcccacttttgtaggaaggtcgccaagatcggtgatgagaagatcgaggctctgaaaaccgaattcaaagtaaacctaactgagaacctgtacctcctcacggtgcctttgatcggtgaaaagtcagagtgcgagattgaggatctgtttgatgagtccactctcctagagcgtatagaagggaaaaccttcactaaggcagccaagtatgatgtgacaaagtactatggtaaggagatattctccaaatacattctcaagaactacgcagacgttaattttaatgagtttcgggccgtgcttgacaatatcaacgatatcattgaccagtataacgtggactttgtgacagtgggagataaagcgaaagaggtgcaactgaaacgcagcgatattgacaaagtccctgtggaaatttga

SEQ ID NO: 8464 - RNA, 1728 nt, synthetic construct
  source 1..1728: mol_type = other RNA
atggagcagtttaataatctcaagagcaggaatgagttttcagattttctaaacatccctaggaagcaattgtcatacctcttgtacatcaagaagatcaacaattcttacacgacgttcgaaatccagaagaaatctggtggcgtccgcaaaatcagtgcaccatcagacgagctgaaggctgttcaaaagaagttggtggaggcgctgtacaaacataggaaaagcggcaatgggaataagtttagccatgcattcgagaaacagaagtccatcattaccaatgcacgtatacatcgtaaaaagcgatttgtgcttaacattgacctggagaacttcttcgagagtatccattttgggcgcgtgcgagggttcttcaacaagaacaaaaattttctgctgcccatcgaggtggccaccatcgtagcacaattatcttgctatgaaggtaaactcccccagggcgcccctagttcaccgattatatccaaccttatttgcgaaatcttggactaccggctgtttaaaatcgccaagaagtataagctgaattacactcggtatgctgacgatctcacgttctccaccaatgacaataattttgtgaataaccaggacgacttttataacatactttacactgagctggaaaaatccggcttcaagattaacgaaaaaaagaagcgcttacagctgaatagctcaaggcaagaagtgactggcttggtggtaaatgaaaaactgaacgtgaatagagtgtattacaaggagacaagggccatggcccaccagttatataagcagggcgaatttacagtgaatgggaataaggccacactcctgcaactcgagggaagattcagtttcattaaccagctgacctggtataacaacaaaatcgatgatcgaaaacacaatttccacaatctaagctctcgggagctacagtatcaaaagttcctgttctacaagtacttctttgctaatccaaagcctctgattgtcacagaaggaaagaccgacgttgtataccttaaatccgccttaaaaagcctgtataaagagtacccaaacctgattaccaaaaacaaggacggggcttttcagttgaaggtcagttttctcaacaaaacaaaacgcctgcagtatttcatgggaatctttcgggatgggggtagcgcgctgaataacatatataacttctacgaccacaagaaatccttaccggactatctcaagtacttccagaacatttccaatacctccccctctaaccccgtctttctgctgttcgataacgagattaagtctaagtcaaagaaacctatcggacagtttctcaatcatattagcctgaccgagaagagaaagtccctcctcgagatcgattatatagtcaagctaataggcaacttgtacctcttgactgtgccccttgttaaaggaaaagaagagtgtgacgttgaggatcttttcgacaacactgtcctgtcgcacaccatttctggtagaatctttactaaagaagacaactacgatgtaagcaaatattatggcaaggatatcttctccaagtacattcttaagaactacaacaacatcaacttcaacgacttcaaaccaattctggataatatatctcaggtggttgatagttactcgaaggagacagtcacaaatggagtgctggaaatcagccacaaagataaagttcctcttgaagtgtga

SEQ ID NO: 8465 - RNA, 1698 nt, synthetic construct
  source 1..1698: mol_type = other RNA
atgctcaaatttaacgaaattaaaacgaggaacgagctcgccgaatatttaaatatcccgcgacgccagttgtcctacatcctgtacgtgaagggaatcaataatctgtacaccagttttgagatacccaaaaaaaatggagggagccgtaaaattaacgctccctctggagatctgaaagacatccagctcaaacttgccgaagctttgtacgcccacgtgaagaagaaactgaacaagaagaacaatatcagccacgccttcgagaagaacaagagcatcatcaccaatgcaaaaatccaccggaacaaaagatgggtgctgaacattgatctggagaatttcttcgaatccatccatttcggtcgagtccgtgggttttttaacaagaacaacaacttcctgcttcctatcgaggtggccactgtgatagctcaaattagttgctacgaaggcaagctgcctcagggcggacccagctcaccagtgatcagtaacctaatttgcgagatattagactataggctgctgaaaatagccaagaagtacaagctgaactatactcggtatgcagacgacctcaccttttcaacgaatgaaaaaaaattcccggaattgcagatggacttttataaggagatctcgaaagagattagaagagcaggctttatcgttaacgagaaaaagaagagactccaatatgaggacagtaggcaggaagtgaccggccttgtcgtgaataaaaaagtcaacgtaaaccggacatattacaagaagaccagagcaatggcacaccagctgtataagcaagggtcttttgaaatcgatggcgagccagccactattaatcagttggagggtcggtttgcttttataaaccagctcacatggtacaataacaaaattgacggtgttaaacgcaattttcggaatctgtcatctcgcgagagggaatatcagaagttcttgttctacaagtacttctttagcaaccccaaacctctgattgttacggaggggaaaactgatatagcgtacatcaagtcagccctcaagaacctgcatgatgaatatcccgaccttatctctaagaattctgatggcacattcgagttaaaggtgtccttcctcaagaaaacaaagcgcctaaagtatttcctggggatttatcaagacggaggctctgcgctgaataatatttacgagtttttcgatagccgcaaaccaattcccaactacattaagtacttcaagaagattagcaacagcttgcctcagaatccagtgttccttatgtttgataatgaaatccgatcgggcaagaaaaagccaattggaaagtttatagaccacgtaaagcttggtgatgaaaaaaagggaatactcgagaaagactatatggtcaatatagtcgacaatctcaatattctgacagttcctttaatcaaagggaaatccgaatgtgacatcgaggacctgttcgacgataccgttctgtcccatattattaacggcaaggagttcaataagaaagacaattacgattccagcaaatactatgggaaggagatcttcagtaagcatatcctaaagaactacacctcagtggatttttccgagttcaggtccgtattgaacaacatcaacaatatcgtcaatgatcagaagaaggctcttaaagaaaaatctatggtgtga

SEQ ID NO: 8466 - RNA, 1677 nt, synthetic construct
  source 1..1677: mol_type = other RNA
atgaaagagctgcataacgtgaaaaccagaaacgaatttgctgattttctaaagatcccgcggaagaagctttcctacatattgtacatcaaaaaggtgaacaacctgtatcactcattcgagatctataaaaagtctgggggaatcaggaaaattaatgccccaactgtggagttaaaggatattcagcagaagttagccaaagcactctataagcaccaggctgacaaatggaacaaaaagcggaacaacctcagccatgcctttgagaaaaagaagagcataatcacgaacgctaaaattcaccgaaacaaaagattcgtgctgaatatagacctggagaactttttcgagagtttcaactttggtcgggtgagaggcttcttcataaaaaacaaccatctcttactgcctaatgaagtggcgactgttatcgctcagttgtcatgttatcagggaaaactccctcagggcgccccttcgtcacctatcatcacaaatctgatttgcgagatccttgacctgcgtttactgaaaatcgccaggagatataaggtagattatacaaggtacgcagatgatctgaccttctctacaaataaaaacagcttcctggaacaagaaacccgcttcctcgaagagatttctaaggaactaaagcgctctgggtttgagatcaatgaaaagaaaacaaggcttcagttcaaagacagtaggcaagtcgtgaccggattggtggttaataagaaggttaatgtcaagcgggactactacaaaaataccagggcgatggcacacactctgtacacacaaggcaaatttgagattgatggcgaggaggctacaatcgaccagctcgaagggcgcttttccttcataaatcaattggactggtctaataacatgaaaatcaaccggaacaacaaggactacaaaaatcgctttgctagttttaagagctcagagcgagagtaccagaagttcctgttttataagtatttctacgccaactccaagccactcattattaccgaaggaaaaactgacattgcctatctgaaatccgccctgaaaaatctgtacagcgagtatcccgacttgattacaaagaagaatgatggcacgttcgagttcaaaattagcttcttgaagaagagcaagcgtctcaattactttctggatatcaacaaggacggggcagaggggctgaagaagatctataaccttttctgcgaaaaaggtgatgtacgcaactactccaagtacttcaataagattagtgacacctttcccaacaaccctgtcatattggtttacgataatgagccatcaaatggcaaacccctgaatcagataatcaactatgcaggtctagagagagaaacgatccgagacaaactcatgatcactatagtggataatctgtaccttcttactgtccccccagtgaatgaaccgtctgagagtgatattgaagacctctttgatatcaagacccttgaacacaagatcaacggcaaaaccttcaataagaataatgagatggaccccactaaacattatggaaaggagagatttagccagtttatttccgaaaactactgtgatatcaactttgacaacttcaagcacattctgaataatatctccgacattgtcaaggaatacaaaaagtga

SEQ ID NO: 8467 - RNA, 1710 nt, synthetic construct
  source 1..1710: mol_type = other RNA
atgaaaaagttcaatgacataaagacaagggacgatctttcagacttcttaaaaataccaaccagcaagttaacctatgtactctacaagaagaaaacctcaaatctgtatacctctttcgaaattcccaaaaagaacggaggcatcaggcatatcaaagctcctctcaaagaccttaaggaaattcaaaaaagactggccctctccttgtggactcatcaaaaatatatctggaaagagaacggcattaatcccaatatctctcacgccttccaaaaggagaagagtattattacaaacgctcagattcacaggaacaagcgctttgtcttgaatatagacctcgagaactttttcgattcatttcattttgggcgtgttaaaggtttctttgagaagaacaagcattttctgctgccacaaggcgttgcaactatcatcgcacagctcacctgttacgagggcaatcttcctcagggggctccgtctagcccaattataaccaatctgatctgcaacatactggatatgaagctgctcaagatatccaagaagtacaagctcaattacacgcgatatgcggacgacctcaccttttccaccaatagtaagcagtttctggttcaacagtcagacttccacgaggagatctcaaaaatcatcgaaaaggcaggattcaagattaatgagaaaaagacacggcttcagtttagagatagtaagcaggaagtgactggtttgatcgtcaacaaaaagattaacgtggacagaaactattacaaggccactagaagcatggcgcacagcctatatacaacagggacctttcagattgatggcgaaactggcacgatcaatcagcttgaaggacggtttacgttcataaatcagttggaccagtacaataacaagattaacaagagtatcgacaagacaaccaagctggggttccatcacctgaatagtcgggagaaacagtaccagaaattcctgctgtacaagtatttttttgtgaacaacaagccgctgatcgtgacagagggtaagacagatattgattacatcaaatccgccctcaaaaatctgtacatccattacccaaacctagtgaccaaaaatagcgacgggacttttgaattcaaggtatctttcctgaataggactaaacgcttgcgatattttctagatattcagcaagacggagccgataccatgaagaacatctataactacttcaacaacaacggcaaggacagctaccccaatcactttaaaaaatttcaggagtctggattcactcctgcaaaccctattatctttattctggataacgaactgtcgaacaaggagaaacccctgaagaatctcacaaatcacatcaaattggacaaagataccgccaagaaagacttcttcaaaactaacttctacatcaacatcacatccaacttatatttgctgacacatcagcttgtcaaggaacttcccgagtgcgagatcgaagatctgtttgatgacttaacgctcaatcagactataaatggaaaacggttcgagcgcgataccaaaatcttcaacagcgctctacactgttctaaagccaaattcgccgatcacattagccagaattacgaaaagattgacttcaacaacttcaagtgcatgctggataatctgaacaccattgtgtcctcctatggtaataattga

SEQ ID NO: 8468 - RNA, 1707 nt, synthetic construct
  source 1..1707: mol_type = other RNA
atggacaaattcaataatatcaagaccctttacgacctgtcttatttcctgaaaatcccaacgaggaaaatcacctacatcctctataaaaagggaattgacaatctgtacacaagcttcgagatccctaaaaagaacggaggggtgcggcacattaatgcccccagtaaagatctaaaagacatacagcgcaaattggtgttgtctctctgggctcatcagaagcacatctgggaagaatcaggcaagaatttaaacgtctcgcacgcattccagaaagagaaatccattattaccaatgctcaaattcaccgcaataaacgttttgttctgaacatcgacctggaaaatttttttgagtctttccactttggcagggtacgcgggttctttgagaaggacaaaaacttcttgcttccaaagaaggtggcgaccatcatcgcccagctgacttgttatgagggacatcttcctcagggtgcccccagctcacctattatcaccaatctgatctgcaatattctggacatgaagttgctgaaacttagtaagaaatacaagctgaactacactcgatatgctgatgatctcacattttccacaaacaacaaacattttctcgatcaacagtctgatttctatgaggaaataagcaagatcatcgaaagagctggtttcaagattaacgagaagaaaactagacttcagttccgggactctaaacaagaagttacaggtctggttgtgaacaaaaaggtgaacgtggatagaaattatcataagatcactaggagcatggcccacagtctctacacgaaggataattttcaaattgatggggagtttggcgaaatcacacagcttgaggggcggttcagctttataaatcagctcgatcggtataacaatttagtcaagaaggaccgagacaaaaatgtgaagctgaactttcgaaacctgaattcacgggaaaagcagtatcagatgttcctgttttacaagtacttctacaaaaacaagcgcccgctcatagtcactgaggggaagacagatatcgagtatctgaagtctgccctgaagaatctgtataaggactatcccaacttgatcacaaaaaaaagcgacgaaaccttcgagtttaaagtttcctttttgaggagaaccaaacgtctgagctacttcttagatattaaactcgacggagccgacaccatgaagaatatttacaactactacatcggcaaagaaaacaacggttacccaaacttcgtgaaaaagtttaaagacctcggatcgatcccaaataaccctgtgatttttatactcgacaacgagctgaataattcaaataagcccctgaagaagatcatgaaccatatgggcttaaacaaaggcgtcagcaaatcaagtttcttttccgaagattactacattcacataacggagaatctatatctactgactcatcagctagtcaaagatctgcacgaatgcgagatcgaggatctcttcgacgatagtatccttaaccaaaagattcatgggaagaatttcgagagagatgataagaagttcaacattaacaaccactatggcaaggcaaattttgcagactacatatccaagaactataggtccattaacttctccaagtttaagtgtatgttggaccacttaaactctatagtaaccttcaagtccaattga

SEQ ID NO: 8469 - RNA, 1716 nt, synthetic construct
  source 1..1716: mol_type = other RNA
atgaataagttcaacgaaattaagaccaggaatgatcttgcagacttcttggatatcccccggtcaagattgacatacatcctgtatggcaaaaagattgaaaacttctacacgagctttgaaatactaaaaaagaacggagggactcgacagattgacgccccgaataaggagctgaaaatcgtccagaaaaaaattgcgaatgccctgtggaaccactataagggtctggccaagaaaacttcctcaaagaccaacttttcccatgcctttgagaaggaaaagagtatcattacaaacgctaaaatccatcggaataaaagattcgttctgaacatcgatctcgaagacttttttcacagtttccacttcggccgcgtgagggggttcttcgagaaaaataacaatttcaccctgcctaaagaggtagccacagttatggcacaattagtgtgttatgaaaagcatctgccacaaggagctccttcctctccaatcatcaccaaccttatatgtaacatcctcgatttccgtatgctcaaactgagccgcaaatataaatttgactacacccgatacgcagatgacctcacattctcatccaataacaagtatttcctggagaagcaccaggagatctatgacgagattagcaatgagattgaacgggccggatttagaatcaatgagaggaaaacaagactccagtatagggactctaaacagcaagtaaccgggttagtggtgaataagaaaattaacgtggatcgcgtgtactacaagaaaaccagagctatggcatttagtctctatagctgcggaagctttgagattgagggcgatcagggttctattaatcagctcgaaggtaggtttgcttttatcaatcaactagatcgctacaacaacaaactgtcaagcgagaaaaacgattttcggacactcaacagtcgagaaaagcagtatcaacagttcctgtattacaagtacttctttgctaacaagaagccccttatcgtgactgagggtaagaccgacgtcagatacctgaaggccgcaatgaagagcctgtgcgacgagtaccctaatctgatcacgaaatcctctgacactgaattcgaattcaaagtctcgtttctacgccggaccaagcgtctgaattacttcttgaatataacccaggatggagccgatacgatctcaagcatttataaattttcccaggcgaataatgagaagggctacatcaactaccttgaatacttcaagaaaatcagcaacactaaccctaagaatcccgtcattcttatcttcgacaatgagttgaatggagatcagtccaaaggcaagaacaataaaaataagcccttgcagaagttcatcaacctcattaacctcgataatgaatcccacgagaaattcaagaactcgctttcttacaacattctgggcaattttcacttactgactaaccagttagttaataacaaggatcaatgcgagatagaagatctgatagagtcaaaagtgtggaataataggatcggggggaagacttttagtattgacaaggagtttgacttggacaagcattttggcaaggaaattttcagtcagtacatcgaacagaactatgagacaatcgacttcgagaactttaaaccaatactggacaacatatctcagattatagacgagtataacgtcaagtcttga

SEQ ID NO: 8470 - RNA, 1701 nt, synthetic construct
  source 1..1701: mol_type = other RNA
atggacaccattgacaaagtaaaaagtcgcaatgaactggcagacttcctggatataccacgcaagaagttgagctacatactgtatatcaaaggcgtggacgacctctacactagtttcgaaattcccaaaaaaagcggcgggttccgccatatttatgcaccacagaaggatctcaaggttatacagagaaaactggccgaagctctatacaactgccagaaagagatctggaataagtgcaacgtcaacccaaatatctcacatgctttccagaaggaaaagtcctttatcaccaatgctaaaattcaccgtaataagcgctttgttatcaacattgatctggagaatttcttcgattcttttcactttggaagagtgcaagggtatttcctcaagaaccggtcttttcagcttccgtctgaagtggccaccgtcattgcacaattaacatgttaccaggggaaacttccccagggcgctcctactagtcccatcatcacgaacctgatctgcaacatcttcgatgttaggatttccaagctggcaaaaaaatatcgactggattatacgcgatacgtggacgatctgaccttttccacaaacaataaggagttcctcaacatcaaaaacatttttttcgaggagctcgaaaaagagatcattaatgccggcttctccattaataaaaaaaagacccgaatccagtacagagatagcagacaggaggtgaccggtgtggtggtgaataagaaattgcacgtcagccgtgattattacaaaaggaccagggccatggcctatcagctttacaagtctggcgaatattttatcgaaaacgagatcaaagggacaatcaatcagctggaaggtcggttttcattcattaatcaactggagtggtacaacaacaagttgaatcttgaggggaaaaaacttacctacgagtacctgaacggtcgggaaagggcgtattcccagttcattttttacaagtacttcttcgccaatcccaagcctttgatagtcacagagggtaaaactgacgtcacttacctgaaagccgcgcttaagaatctgtggaaggaatatccaaatctggtatctcggaattcaaagggccagtttgagtataaggtgagctttttgcaacggtcgaagaggtttgcttactttctcaattttaagaaggacggggcagacactatgaacaacatctataagttcttcagcgaggaggggggagagaagtatcccaactatattgagatgtttaagaacctgggatcaactgtacccctaaacagtgttatattactcttcgacaacgaactcaacaacaaaaacaagcctatctacaagtttgtgtcgaacaaaataagtgatgacagaaagaagcagctatgcacgaggacctggataaatctgctcgaaaatctctacctgatgataacaccgctggtcggcgagagcgaggaatgtgatatcgagatgttattcgatgaagccacattatctcatgaaatcggaggcaagaaattttgtaagaaggacacatacgatacttcaaaattctatggcaaggagatttttagccagtacatcatgaagaactactcctccatcgacttcggaggattcaaacctctgttgaataatattgacgtggtgatcaaggactataaagagcgcattcaatga

SEQ ID NO: 8471 - RNA, 1698 nt, synthetic construct
  source 1..1698: mol_type = other RNA
atgaacaccatcgacaaaatcaaaacccgaaatgaactggcagatttcctggaagtcccccgtaaaaaactgtcctacattctatacgtcaagggggtggacaatttgtatacctcttttgacatcccgaagaagaatggcgagagtcggcatattcatgccccacagaaggacctgaaagtcgtgcagaaaaaactggccgacgccttgtgtacgtaccagaaggaaatttggaaacgccgtaatatcaatcctaatatatcccacgcgttccaaaagggaaaaagctttatcacgaatgcaaaaatccacagaaataagcgtttcgtggtgaacattgatctggagaacttcttcgactcttttcactttggacgcgtgaggggctttttcttgaagaatgatgacttccagttctccgtcgaggtggccaccgttattgcccagttgtcctgttaccaggggaaattacctcagggagctccttgctcccctatcatcactaatctcatctgcaacatattcgacattagactcctcaagctcgccaagaaatattgtctggattataccaggtatgcagatgacctgacatttagcactaacgatgtaaagtttcttgagatagaagagctgttcttcgagaaactggaaaaagaaattaactcagcaggttttcggatcaacgagaaaaagactagaatccagttccgagatagccggcaagaggttactggcgtagtagttaatcggaaactgcacgtcagtcgcgtgtattataaaaagacacgggcaatggcttataacctttacaagacaggagagtatttcatagaaaaggatactcaagggaccattaaccagttagaaggcagattcagcttcattaatcaactggagtggtataataacaagctgtatccaggtaacaagaagctcattttcaacaatctgaatggcagggagcgcgaatattcccagtttgtcttctacaagtactttttcgcgaatccaaagccccttattgtgacggagggcaagaccgacgtgatatacctaaaggctgctttgaaatcattatggaaggagtaccctgagctggtttctagagataagaacgggcactttgagtataaaatcgctttcctacgaagaagtaaaaggcttgcctactttttaaaccttaaggaggatggcgccgacaccatgaacaacatctacaacttttttagcaagaacgggggagaaaagtatcccaattacatagaggtgtttcggaagcttgggaataggtttcccctgaatcccacaatcttgctctttgataatgagttgagcaacaaggaaaaaccggtgtgtaaatttaccaaaggtaaaatctcggaggagcagcgcgaagaactcaattcgaagacctggatccatatgacagaaaatctgtatctcctcatgacaccactgatcaacgaaaggaacgaatcagatatagaaatgcttttcgacaacttcacactctcaaaggagatcgacggtaaaaagttctgcaaaaaagatcgctacgacactgacaagttttacggaaaagagattttcagcaagtacatcatgaagaactactctaacattgatttcagtggctttaagccactgctgtctgacatcaaaattatttgcgagaactacaagaagaagatgtga

SEQ ID NO: 8472 - RNA, 1764 nt, synthetic construct
  source 1..1764: mol_type = other RNA
atgagctccattctggttggctatctttcagcctcacataatgagttgccacacgtgcttttctatgttctcggggattctatgaacaattttaaagacgtccgcacccgcattgcccttgcgaatctcttgggcgtgcccgagaataagctgacctatgtcctctatattaagaagattgagaacctctacacttcttttagcatccccaagaagaatggagaatcgcgccatatcaatgcccctcagaaggaccttaaagatatacagaaaaaactggcggactgcctgtacgaatatcagaaggagaataggatcaacaacaacattaagaccaatattagccacgcttttgagagagacaagtcctttattaccaatgcaaaagttcacaggaataagagattcgtgtacaatgtagacttagagaacttttttgggagctttcacttcgggagagtcaaaggcttcttcgaaaagaataaggacttccaactgccatccaatatcgccacggtcatatcacagatcgcttgttatcagggcgagttgccccaaggtgccccttccagcccgataattaccaacctgatttgcaacatctttgatatcaggctgatcaaactcgctaagaagtacaaactggactatacaagatacgccgatgatttaaccttttccaccaacaataagaagttcctagacactatttcagactttcactctgaacttagtaaggagattaaacaggctggcttcgagatcaacaataacaaaacacgtctgcagttccaggatagtaaacaggaagtgacaggtcttaccgtgaacaaaaagctgaacgtggataaaagttacttcaagacaacacgcgcaatggctcaccacctctacacccagggatctttcaaaatcaatgacaaggacggaactataaatcaactggaaggacgttttgcatttattaaccagctggaccggtataacaataagctggataatgggagtcataacattagggaactcaattcccgagaaaggcagtaccaaaaatttctcttctacaagtacttctacgcaaacaacaaacctatcatagtcacggagggcaaaactgatattttgtatctgaaagccgccatcaagaaattccattcggaatatcctgcgttgataaacaaacgatcagacggcaaattcgaatttaagattagcttcctgcggcggacaaagcgcctgaactactttttagacctgcaaaaggatggggccaatactatgaagaagctgtacaatttcttcagtaataaggaatctcggcactttcccaactactctgcatactttaaaaaaaacagcgtggttccaccaaagaatcccgtgatttttgtgtatgataacgagctcaagaataagaagaagcctatcatcgacttcttgaattacgctaacatcaaaccggagaaaagactcgaactagctgagatcctaagtatcaagatcatcaacaacctgtttctactgaccaatcctttgatcgtagaaccagagtccgagatcgaggacctgtttgacgagaagacattatccatcgtgcttaacggaaaaactttctcccggaatgacgatagcaacgataaagagcattatggtaaggagatcttctcaaaacatattagcagcaactactctaagataaacttcgataacttcaggcccatgctcgatcgaattactgccataatggagacgtatgaaaaatga

SEQ ID NO: 8473 - RNA, 1665 nt, synthetic construct
  source 1..1665: mol_type = other RNA
atgaaaaagttgaaagagcttcaaacaagggaggacctcgcactgtacctcgccataccactgcagaagcttacctatattctgtacaaatctaagccggattcctactacgacaccttcgagatccctaagaaaaacggagagtcccgccaaattcatgccccttcaggagatctcaagcagttacagagaaaactggcccagaggctctgggatgtgtatcgggaatttatagaagagaacgaaattcaggacaatatctcccatgcctttcaaaaaggcaagagtattatcaccaacgctaatattcaccgaaacaaacggtatgtgttaaaccttgacctgaaggatttcttcgatcactttcactttggcagagtgaggggattcttcatgaaaaacaagaatttcgagctccctgtggagattgccactatgatcgcacagttgacgtgctacgagggcaagctcccacagggtgctccaaccagccccattatcacaaatctggtgtgcaacattttggatatgcgtttactgaagatcgcgaaaaaatacagggtagtctatactcgttatgctgacgacatgacattttctactaacgataagaagttcctcgagaaccaggagaacttcatgaaatcgataaagaaggaaatcgaaagctttgggtttgagattaacgataaaaaaacccgcctgctgttctgtgacagccgtcaggaagtgaccgggctggtagtgaataagaaaatctctgtcaatagggagtactgcaaaagaacaagagccatggcggatgctttttatcgaagggggatctttgaaatctgtggggaagagggaagcgttaatcagctagaaggacgaattagtttcattaaccagatagactgctacaataataagaatgaccgggaacagaagcataccttctggactttaaatgcacgcgaacgccagtaccagaaattcctgttcttcaagtatttttacgcaaatacgaagccactaattgttacagagggaaagactgacatcgtgtatctgcgggcagcccttaaaaagtactataaggaatatcccgaactgataaagaaacaagatgacaacttcgaattccaggtcacctttctgcgcagatccagcagactgaaatattttctcggcatccaaaaggacggcgctgataccatgaagaacatctataacttctactctggcaagaacaacgcccccaaactctattcatggttcgcccaaaattcttgtaaaaagtcccagaaccccgtgatttttatcttcgataatgagcaggtatccgatcggcctttgaagaagttcttgaaccacctgaacaacaagggccttctggagagtagcaattataaccatatccaagacaatctctacatattgacaaatccgctggttaatgggaaaaaggagtgtgaaattgaggacctttttgatgatgtcgtgctgtcacacacaatagacggcaagatcttctcacggaaagaaactgacaatgagaagtactacggtaaagctattttttcccagtacgttgagcgccagtacgattctatcgactttagcaattttaagcccatgctagaggacatcaaaagtatcgtcggtagcaaaaagcaggggtga

SEQ ID NO: 8474 - RNA, 1659 nt, synthetic construct
  source 1..1659: mol_type = other RNA
atgctcaagtttaacgaaatctcctatcgagatgagctggcagagtttctgaatatccccttgaaaaagctgacctatatattgtacgtaaagaaagtggactcttattacacatcctttcagatcccaaaaaaaaacggggactacaggtccatagatgccccgtatggcgacctgaagtatatacagaagattctggccattaagctctgggagtatcacaacaaatacaccagtgataacaacatcaatatgaaagtctcacatgctttcgaaaaaaagaagtccattatcacgaatgccatcattcacaaaaataagcggttcatactgaacattgacttatctgacttctttgcctcattccactttggaagggtgagaggatttttcgagaaaaacaaggagttcaatcttcccatagaggtcgctacgattattgctcaactaacttgctataaagggcatctgccacaaggtgcacccagcagccctatcatatctaacctcatttgcaacatcttggatatgaggttactgggcatttcccaaaagtacaaacttgattataccagatacgcagaggatatgaccgtgtcaaccaacgacttcaaattcatttacttagttgacgacttcatgaaagagatcactaaagagatagagaaatctgggttttctatcaacaacaaaaagaccaggtttgttttcaatgattcacgtcaggaggtgactgggctggtggtgaacaagaaaattagcgttaatcgggattattgcaaaaagactcgggccatggccgatagcctttacagaaagggtgaatatgttatcaatggcagtaagggaactattcaacagctggagggaagattcgcctttataaatcagatcgaccgcttcaataataacttcaactacgtcaagcacaaaatctgggatttcaattcccgcgagaagcagtaccagaagtttctgttctacaagtatttctacgccaatacaaaacccttgatcgtcacagagggaaagacagacattctgtatattaaggctgctctgaagaagtactattataagtaccccgaactaattttcaagaaggacgaagactacatctttaatatctctttcctcaagcgatccagctttctggagtattttctgaatatctatcaggatggggcggatgacatcaaaaatatctacaacttctacgtgggtaataaccattacccaaacctttacgaattttttctcgaaaagtcaagtctcaaacctaaaaatcctgtgatcttgatcttcgataacgaacagaattcggatcggccgcttaagaaatttctcaaccacattaagatcgacagcaaaaatttcaagagcggccagtgtatatacgcgaacatatacctaatcacaaatccactggtaaagggcaaagcagaatgtgaaattgaggatctgtttgaagagacaattctcgaaaacgtcatcgaagataagaagtttagccgcgagaaaaagtatgacatcaataagttctacggcaaagacattttcagtaagtatatcaacgacaactacaaaaccatcaattttgacggctttattcctattcttgacgatatcaacaaggtggtgaccaacatggacttctga

SEQ ID NO: 8475 - RNA, 1686 nt, synthetic construct
  source 1..1686: mol_type = other RNA
atgaagaaactgatggaaattaagaccagaaatgagtttgccgatgtgctcgagatccccaggcagaaactgagctacatcctgtatgtcaagcacgtggacgaaatgtacacaagcttccaaatcccaaaaaaaaatggcgatttccggaatatcaacgcgcctattgaggatctcaagaatctgcagaagaagctttccgaacttctgtgggagtgtcagaaggagattaggatgaacaatgggatagattcaaacatgtctcacgcattcgaaaaagaaaagagcatcattacgaacgctatcatccatcgcaatcgccggatcgttctgaatatcgatctggaagatttctttggcagcatccattttggccgagtgaaagggttctttgagaagaatcgggattttaaacttagttctgaagttgcaaccatcattgcccagttggcctgctatcgcggagtgttgccccaaggtgcacccagtagccctatcataaccaacctgatctgcaacatgatagacatcagacttctcaaaatagctaccaaatacaaggtaaactacacgaggtatgccgacgatctgactttttctaccaataacaaaccctttctagacaagcagtccgagtttttatcagaggtgactaaggagattgaaagaagtggattcaaggtcaataataagaaaacgcggatcctctttagagactcccggcaagaagtaaccgggctgatagtcaatgagaaaatttcggtgaacagaaagtattacaagaaaagcagagcgatgtcttatcagctgtataaatctggcagctttgagatcgacaatgaggagggcagtgtcaatcagctggaaggacgatttgcctttatcaatcaactcgactggtataacaacaagcgcgatggcttagaacacaatttttggagcttgaattccagggagaaacagtatcagaagttcctgttttacaagtacttcttcaacaacaacaagccgttggttatcacagaggggaaaaccgatatcgattatattaaggccgctttgaaaaacctgtacattgagtatccggacctggtaactaaaaactccgacggtacatttaactttaaagttagtttcctccggaagagcaaacgcctgaggtacttcttaaatattcacctcgatggtgctgacacaatgaagaacatttacaagttctactccgacaaagagaataacaagttccctaacttctgtaagtacttcaaagagctttcaggtaacataccaactaagcccgtgatcctgattttcgacaacgaacttacaaacaaagaaaagcctctatacaagttcgtgaattatgccggcttaaacgggttgtctcagtgtattaaggagaagctgaatactaagctcacagataacctctatctcatgaccaatccacttgtctcaaataagacagagtgcgagattgaggacttgtttgaccgtgaaaccctatcgcatgaaatcaatggaaaattcttctcaaggaacaagacttccgacaacaataaattctacggaaaggaagtgttcgctaaatacatatcctcaaactaccgtgagattgattttgacaacttcaaaccaatactgaacatgctgaatgacattgtgtctctgcgaaagcaggcatga

SEQ ID NO: 8476 - RNA, 1713 nt, synthetic construct
  source 1..1713: mol_type = other RNA
atgaagttcaatgagatcaaaagtagaaacgagttggccaactttttaggcattagcatcaggaaattaacctacatcctctattctaagaagactgaatcttgctatacgagtttcgatatcccaaagaaaaatggaggcgtgagaaacattaatgcccccactgaagatctcaaacatattcaagtcaaacttgcaaatgcactttgggaatacaagaaatccatcatcaaggagaagaatatcaatgttaagatctctcatgctttcgagaagagaaagtccattataacaaatgcacagatccatcgtaagaaacgcttcatcttcaacatagacctagagaatttcttcaattccatccactttggccgtattagaggatactttgaaaagaacgagaacttcaagtttcctattgaaattgccactataatcgcgcaactgacctgctataatcactgtttgccccagggagctcctagctctcccattattaccaacttcatctgcaacattctggatatgaagctgctgaagatcgctcgaaagtataaaatggactatactcgatatgccgacgatatgacattcagtacaaacgataacaactttctcaacgaaatctccacattttacgccgaaattgaggagaagatcaatcagaacgggtttaccataaatggcaataaaacacgcctggcattccaaaattctaggcaaaccgtgaccgggctcgtagttaataataaaatatccatcccacgggagtattataagttaacacgggccatgatttactcattgtataagaacggggaatttacggctaatggcgtgaattccaccatcagacagctggaaggacggctagccttcataaaccagattgacctctacaataacaggattaccgatggccctcacagcatgcggactctgaattcacgcgagaaacagtatcagaagttcttgttctacaagtacttcttcatcccgcagaagcctctgatcgtcacggagggtaaaaccgatatagtgtatctgaaagctgccctgaagaaatactactataagtatcccgatctgattaccaaaatcggagataagtttatcttccacattagctttctgaaacgcactaaaaggctggcttacttcttgaatattaatctagacggggcagataccatcaagaatatctacaacttctacacaggtatagactcagtgccgaacatatgtaaatggtttgacgagaaaactaacgtcaggcgcattaatcctgtgatacttattttcgacaacgagcaggaaaacaacaagccactcaaaaagtttatcaatcacatgcagaagagccggcagaacaaagagatcaagctggagaaccccaggtacaaaaacatcattgacaacctgtaccttctcacaaacccactcatgaaaggtaagaatgagtgcgaaattgaggacctgtttaataaccagactctttcgcataagatcaacggtaaatctttttgtcgaaatggcaagtttgatagcgaacaatattacgggaaggaaaaattttcacagtacattgcctccgactacgagagtattgacttcaaaaattttcaggagatgctgaacgacataaacatcaccatcaacgaatataagagcgcgaatgagaacgaagagccaatcaaaaaggtatgtaaatga

SEQ ID NO: 8477 - RNA, 1683 nt, synthetic construct
  source 1..1683: mol_type = other RNA
atggatggctttaccaacattgctagcagaaatgaactggccgatttcctacgtatacctcgcaagaaactgacccacatcctatatatcgaagaggtcaacaatctgtacacatcattcgatattccgaagaagagcggggaaaagcgccacattaatgctcccacagacgacctgaagagcgttcaaaaacgcctcgcctacgctctttgggaacaccagaaaaacgtttgggaggagaaggatgttaatcctaacatttctcatggctttgagaaaaacaagtccatcatcacaaattctcggattcatagaaacaagcgcctagtgctgaatatagaccttgagaacttttttgactctttccactttggccgaatcagagggttctttgacaagaacatcgatttcaaagtgccgattgaggttgcaaccgtgattgcccaactgtcctgctataaaggatgtctgccccaaggagcgccctcctcccctattctcaccaatctgatcgggaatattctcgatatcagactcttgaagctggccaagcagtataagctggattatactcgctacgcagacgacctgaccttctcaactaacaatagggacttcctggctaactatcccacctttatcaaggaactaagtatcgaaattgagtcttctggattcaggatcaatcatcagaaaacccgattgcagtaccgggattcaaaacaagtggtgacaggactgatcgtcaaccagaagattaatgtggacaagtgttactacaaagtgacaagggccatggctcacagtctctattcaaaaggcggactcactataaacggtaaggagggaactatcaatcagctggaagggcgatttagttttatcgaccagatcgagagatataacaacaccatagatgaggacagccatgacttccggaatttgaacggccgggaggagcagtatcggaagttcctttttttcaagtacttcttctccaactccaagccactcattgcaacggaagggaaaacagatgtagcttacctcaaggcagccttgaaaaatctgttcgcgttatatcccgatcttatcagcaagaccgaatcggatgacttcgaatttaaagtaagtttcctgcgtaggaccaagaggcttaggtatttttttgggctgtccttggacggggccgacacgttgaagaatgtctacaatttttacactggcaaagaaggcctgccaaactacctgaagtacttcaatgtcatgtcatctgacaagcctaaaaacccagtcatcttattgttcgacaatgaactggccaataagaacaagcctctgtataaactcgtgaacaacaatggtctgaatgagacacagaagaaagacctcagcgacaaattaaatgtgaagataagcgagaacctttttcttttaacccacccattggcagagggtaaagacgaatgcgagattgagaatctgtttgatatagagacactctcgcatgtgatcgagggtaagactttatcccttgatagcaaatttgacaacaacctgtactatggcaaagaaatattctccaaatacatctctagcaactacaaggatatcgatttttcaggcttcagacagctcctggataaactcaacgagattattacgactttcaatagtacttga

SEQ ID NO: 8478 - RNA, 1785 nt, synthetic construct
  source 1..1785: mol_type = other RNA
atggctagttttaccgacataaaaacccaggatgacctgtttaagctgcttaacattcccaagaaaaacatgacgtatctgctgtacaacaaagaggagaaaggccctgagaatgcttaccacactttttccattctgaagaaaaatggggacaagcgcgaaatagatgcgcctaacgacgagctcaaatttgttcaaaagcggcttgcaatactgttgtgggccaatcaaaaaaagtcatggcgcctcaataacactaaaccaaacatctcacacggttttgaggagtctaagtcgatcattacaaatgccaaaatccacaggaacaagaaaatcgtgcttaacctggatttagaggatttttttcccagcatccattttggcagagtgaaaggcttttttgagaagaacaagaatttcaaggtgccaaaggaggtagctctggtgatagccaggctcgtctgctataaaggaaggcttccccaaggtgctcccaccagcccgatcatcagcaatttgatttgtagaatcctggacttccggctcttgaagctggccaaaaagtatcgactggattatacacgatatgctgacgacctgacatttagtactaattcctctagtttcgtggatgaagaacagttcttcctcgacaagttagaaaaagaaatcattagagcagggttcaagataaatgccaagaaaaccaggttgcaattttccaattccagacaggaggtaaccggacttaccgtcaataaaaagttgaatgtcagcaaggagttctataagaatactcgggctatggcacataaactgtacaccacaggagagtttttaattgatggtgaatcaggaacgatcaatcagcttgaaggccgattcgcctttatcaaccagctggacaagtataataacggcctagagtacgagatttccctgaataaaaacaatatcgagtaccagaagttcctgctgtccaccattaaagtcgagaataaccatcagatcatgttactgaatctgaacagcagagaaaaggaataccagaagttcctatactacaagtatttttacgggaacgaaatacccacgattgttacagaaggaaagactgatattcgctacctgaaagcagccctgaaaaaaatgtacaaggattatcctatcctgatcgaaaaaaacgggaacgattataaattcaaggtgcactttctcaagcgtgtgaataaaaagggcaacaaggacatttctcgtctgaagtacttctttaacttgccaatcgatggagccgacgcgatgaagaatctatacaatttcttctccgacaagaacaataagttatatcctaactacctggagtatttcaactttctctctacatcaaagcctagcaatcccacttttttcattttcgacaacgagctcaataatgacaagaaaccgctgcgggggttcatcaactacataaacgagaagaagaatatgcagagtcttaaggataacgggagtctccgggtgaccgaaaacctctatgtccttacaaatcagcttatcggtgaagcagaagaaaacgaaattgaggacttgttcgataaaaaaaccttggagcacaaaatcggcgggaaatcattctcgaagaaatccattagcgagaaaaacaatttctacggcaaagagattttctctaagtacgttctcgacaattttgaaaacatcgacttcgagaacttccgcccaatgctaaacaacctctctaggattatcagcgattatggcaagtga

SEQ ID NO: 8479 - RNA, 1749 nt, synthetic construct
  source 1..1749: mol_type = other RNA
atgaacgttttcaaagatgtggagaatcgcgacgacctctttgaaaggcttggaattagtaaacaactggccacttatctgctgtacggtaaaggcattgataattgctactcaactttcgtcatcgagaagaggaacggcgatccccgggtaatcaatgccccaaataaggagttgaaaagcgtgcagaaaagattggtaaacgcaatcctgctgcaaagaagctgtaataatcaaaacgggaaaagcctcaagatagcgcacgccttcgagaagaataaaagtattatcacgaacgccaaggttcatcggaataaaagattcgtactcaacgtggatttagaagacttcttcacttcctttcactttggccgtgtgcggggctttttcgagaatgataatacattcaaggtccctcgcaaggttgcaactgtgatagcccagttgacctgctataagggagtgctcccacagggagctccttctagtccgattattacaaacctcatctgtcgcatcatggacctgagaattttaaagctctctaagaagttcaacctaaattacacgcgatacgccgatgatctgtgtttttccactaatgaccagaagttcctgttggacgaacaggtctttttatctaaattaaccagggagatctgcaaagccggcttcaagattaactctaaaaagaccagactgcagttcagggacagccgtcaaaaggtgacaggactagtcgtgaaccgaaaacttaacgtcccgagagagttctataagaataccagggccatggctaataagttgtatgcaaatagtgagttcaccatcgacggcaagaaaggctccatcgatcagctggaaggccgctttgcttttatcaatcagattgacaggtggaataactcccttgaattagaacagagtattaccagcaatatgctcaattaccaaaagctactgcttcggtcaaagtatcagaacaaagagatctttggtaggctgaacgcccgggaacgagaataccagaagttcctgtactataagtacttttacgggaacgataaaccaatcgtggtgacagaggggaagacagacattctctacattaaggcagctctgaagaatctctatcagtcgtatcctgacctggtggagagaataggtaatgactataagttcaaggtcagctttttcaagaagtccaagaataacaaggagatcccccgcatcaaatactttttgaacatccctcaggatggggcagactctatgaaaaacctgtactcatttttctcggataagaactcctgctatcccaactatttggactacttccagaaaaaatactctagcaagccccttaatccagtgatttttatcttcgacaatgagattgagaacaataagaaaccagcgcgaaactttgttaaccatattaaaatccgcggggctctgtcagaactgcgtgacaagcagaggctacggataataggaaatctgtacatgatagtcacacctctggtaaactccctcaaagagactgatatcgaaagcctttttagctcacaaaccctggggcacaaaattgatggaaagtctttcaaccggaacgggggtaaagaatactatggcaaaggcatatttgctcagtatgtgtccaaaaactatgagaacattgacttcaccaattttaagccccttctggataacctcaacaaagttatcatcgactacaaagatggatga

SEQ ID NO: 8480 - RNA, 1785 nt, synthetic construct
  source 1..1785: mol_type = other RNA
atgtcaaacttgagtgagattaaatctagagaagacctctttcgcctgcttaacattcccaagaagaacatgacatacctgctctataacaaagacaaaaagggcactgagaatagttataccactttcaccatcaagaaacgaaacggagaagacagaatcatttgtgctccgaataatgagctcaagttcgtgcagaggcggctagccaatctgttatgggtcactcaaaaaaagatatggcgggaaaataacatcaagtccaccatttctcatggcttcgagaagaataagagcattattaccaatgccagaattcacaggaacaagaaattcgtgttgaatattgatctcgaggacttctttagtagttttcactttgggcgtgtcaaagggttttttgagaaggataggaattttaaggtgccacaggaggtggctctggtgatcgcccagttaacttgctataaaggtgtcttgccccaaggagctccgagctcacccatcataaccaaccttatctgtaacattatggacttgcggatcctgaaactggccagaaagtataagctcgattatacgcgctacgccgatgatttgaccttttccactaacgacatcgttttcctgcattttgaaaaggaattcctgatcaaactagaaaaggagatcgttcgggcagggttcaaagtgaatccaaaaaagacccgtattcaattttcgaattcacgacaggaggtgacaggacttgtagtaaataagaagatttccgtcccaaaggagtattataagaagacacgggcaatggcttacaatctgtacaagaacaaagagtacttcattgataacgtaccaggaacaatcaaccaacttgaaggccgctttgcgtttatcaaccagatagataagtggaataacgtgctcgagtacgagacatccttagacaacaataatctggaataccagaaacacctgctgactatcaagagaaaggagaaaaaccactataatatgctcaagcttctgaatcgccgagagagagagtatcagaaattcctgtattacaagtacttctacagtaacgagaaatccacaatcgtcacggaaggcaagacggacatccgttatttgatggcagccctgaaaagcctttataaggattaccctaacttagtggagaaagtgggcgaaaacttcaatttcaaggtttacttcctgaaacgctctaaaaaaaaagacaagagggaagtttcaaggtttaagtacttcttcaatctgcctattgacggtgccgacgcaatgaagaacctttacaatttctttagcgacaaaaacactctctgccccaattatctgaagtatttcagcagctttgagagcagcaaacccgcttctccaaattttttcatctttgacaacgagatctctaataaggacaaacctctgaaaaccttcataaattatgtgtacgccaaatcacagtctgcaaaggcggaagagatgaaggaaaaactgtacctcaaaatagaagagaatctgtacatagtcacacaccaggtgctagacggatgcaaagaaaacgagatcgaggatctatttgatgaaaaaaccaggggccatattataggggggaagaccttctcgcctaaaggtgattccaacaaccattatggcaaagagatcttttccaagtacattctcaagaactacaagtacataaacttcgaaaacttccggcctatgttggataacatcaacaagatcattaccgaatacaagaattga

SEQ ID NO: 8481 - RNA, 1719 nt, synthetic construct
  source 1..1719: mol_type = other RNA
atggactatttttctgacataaaaactagggaggactttttcaacattttgaacatccctttgaagaatatgacctacctgctgtataataaggagaaaaaaggaaccgaaaactcctatcacagctttgaaatcaaaaagcgtaacggcggcgtcagagtgattcatgctcctaacaaggagctaaaatttgtacagcagagattgctgaaggctctttggagaaaccagaccaaggtgtggcacgacaaaaaaataaacccaagtataagccatggatttcagaaaggccggtcgattatgactaacgccgaaattcatcggaataagaagttcgtgctgaacgtcgacctcgaagatttttttaacagctttcacttcgggcgggttaagggatttttcgaaaaggacagggactttaaagtccctcaggctgttgctctcatcatcgcccagctggtgtgttataaaggggcactgccccaaggggccccaacttctcctctgatcactaatcttatatgccgaattatggatctgcggctgctgaaactcgccaagcgttacaagttagattacacacgctatgccgacgatctcacatttagcacaaatgacagctctttttctaggctgagtcaagaattcctgctcaaactcgagtcagaaattaaacgagcgggattcaatctaaatcctgaaaagacgcgtctgcaatataagaacagtagacagtcagtgactggactcgtggtaaacaaaaaacttaacgtgcccaacgagtattataaaaagacccgcgcaatggcgcacaccctttataccaatggttcttttctgatcgatggcgtggagggtacactcgcccaattggaagggaggctgtctttcatcaaccagctggagaagcgcaacaatttaagcattaattccggctccaaggactataagaatctgggacggagagagaaggagtaccagaagttcatttacttcaagtacttctatgcaaacacaaggcccacaattttaacggaggggaagactgattcaaggtacctgaaagccgctctcaagaaattgtacaagaattacccgaatctgattgagtataagaacggcgagttcgtcttcaagatactcttcctgcacagggcagataaggagaaaccaaataaaacgacccggctaaaattcttttttaatattggcccccacggggctgatagccttgcagagctttactacttttcctccaataagaagtcaaaagttcccggttacatcaattaccttgagtacttcaagaaactgaaccagaacatgctgacaaaaccaaccattatcgtcttcgacaacgaactgagctccaatggaaaaccgttgcgcacctttatcaatagtttgaaagatgaacaggagatgcatatttctaacatccgccgcgatctgtccacccaggtgactgacaacctctacatccttaccaataaactagtgggcaccagaacagaggccgaaatcgaagatttgttcgacgacaaaactcgaaataaggagattgacggcagaacgttttcagccacagatataggtgagcaatattacgggaagaatatcttcagtctctacatcctcaagaattataaggaggttgatttctcgaacttcaagccaatgctggacaagttaaacgaaatcatcatcaacttcaagtga

SEQ ID NO: 8482 - RNA, 1797 nt, synthetic construct
  source 1..1797: mol_type = other RNA
atggtttcctattccgatatccagtctagggacgatttcttcaagctgttaaacatttcaaagcagcacatgacatatctactgtataacaaagacaagaagggaaccgaaaattcatactacaccttcgagatagaaaagaaaaacggtggcgtgagggtcatccacagtccaaacgacgaattaaaattcgttcagaaaagactcgcgtctgtgctgtggaacaagcagaaggaaatatggaataagaaagggatccatcccaatattagtcacgcctacgaaaaaaacaaatccatcattaccaacgccaaaattcacaggaataagaagttcattctcaatgtggacctggaggacttcttttcttcatttcattttgggcgtgtcaaaggcttttttgaaaaggacaataacttcaaggtcccctcggaggttgcactgattatcgctcaattgacatgctataaaggggttttgccacaaggagcacctagcagtcccattatcacaaacctcatttgcaagattatggacttccgcatactgaagatagccagaaaatacaggctggattacagccggtatgctgacgatctgacgttttcaacaaatcgaacatcttttttggacgacaaagaggcctttatgaagattttggagaaggagataaacagagccggatttaaacttaacgagaataaaacgaggctccaatataatagttcaagacaggaggtcaccggactgatcgtgaataaaaagctatctgtaccacgcgagtattataaacagacacgggctatggcacatactctgtacaaaactggtgagttctttatcaacaatgagaaaggtacagtgaatcaactggagggccggtttaccttcattaaccaacttgataaatggaacaacaagttggaatacgacaccacccttaacaataacaatttcgaacaccagaagtttctcctgagcctgaaccgaaaaggtgatggcggcgtgcaggagaaactcaaattactgaatacccgggagcgcgagtaccagaagtttctctactacaagtatttttacggcaatactaagcccacgatcgtgaccgaggggaaaactgatatacgatacctgaaggccgcgttgaagaaaatgtatcaggactaccctaaccttattgagaagaagaacaacaagttcatcttcaaggtatatttcctcaagcggatcgggaataaggaaacctcccgtttcaagtatttttttggccttgaaaaggatggcgctgacactatgaaaaacctgtacaactttttcagcgacctgggcaatgaaaaactctacccgaattaccttaagtatttcaacaccttcgataaacaccctctgaatcctacaatctttatcttcgataatgagatcagcaattccaaaaaaccattgggaagcttcatgaactatgccttcaataaaaagaagaaggtgaagcagtctaagatcgattgtctgaaagaaaacctcttcttaaagatcgaagaaaacctatacgtcgtgactaatcagttactgcccgagaaagatgaaactgagatcgaggacctctttgatgagaagaccctgcatcatagcattaacgacaaaactttcagcaaaaagggagatccgaatctgaactatgggaaggagatattttccaagttcattctttccaactacgaagaaattaacttcgagaactttagacctatcctgaataacatcaatcagatcgtgcgcaattttagtaagaatctatga

SEQ ID NO: 8483 - RNA, 1776 nt, synthetic construct
  source 1..1776: mol_type = other RNA
atgcccagcttttctgatataaaaaccagagacgacttctttaaacttctcaatatcccaaagcagcacatgacgtatctgttgtataataaggagaagaaaggcaccgagaatagttactatacattcgagcttgaaaagaagtcaggtggggttagaataatcaacacccccaacgatgaactgaaatttgtgcagaagcaactgacttctctgctgtggaaagcccagaagaatatttggaacaactcgtcattacatccgaatatctctcatgccttccaaaaagagaagtccatcattactaatgctcagatccataggaataaacgctttgtgcttaacattgacctggagaacttttttaactcattccattttggccgggtcaaagggttttttgaaaaggacaagaacttcaaagtgcctccggacgtggctctcatcattgcccagctgacctgctatcagggggtacttccccaaggtgccccctcatctcctatcatcactaacttgatctgtaggatcctggatttgaggatactgaagcttgcgaaaaagtacaagctggattattccaggtacgcggacgatctcactttttccacaaacatcaggtcctttgatgctcaggaaaaagaattcctatccgtactcgaaaccgaaattaaacgagccggatttaagatcaataccaaaaagacgcggcttcagtttaataattcacgtcaggaggttacaggactgatcgtgaataagaagattaacgtgcctaaggaatattatcggaatacacgtgcaatggctaattccctgtacaagaacgagaagttcttcattaacaacgagtggggcactattaatcagctggaggggcggtttgcttttataaaccaactggacaagttcaacaatagtctggagtacaactcgagcctgcgaaaaaactccattgaataccagaagagcctcctcagcactcagctgaaagagaactcaaatcacaatatgctgttattgctgaacgcccgggagaaagaataccagaagtttctcttctacaaatacttctacgcaaatcagaagccaaccattgtcactgaagggaaaacagatattcgctatttaaaggctgcattgaaatctttgtacaaagactatcctgaaatgatagagaagaaaggtaccaaatacatcttcaaggttagcttcttcaaaagaagtaagcgctttagatacttcttcaatttcagcctggatggcgccgatagtatgaagaacctccataactttttctccgacaacaacaataagctctatcccaattattggcaatatttcgatgccctaaacagctccagttctgtcaacccaattttcttcatcttcgataatgaactcagcaataagaacaaacccttaagaaactttgtcaatcacgtgtgcagcgtggagaaggagaacgcagacgcccaactaaagttgctgaaagagaagcttaatctgcagttaaaggataatctctacctgttgacaaatcagctgcttgatggatttaccgagaatgagatggaggacctgtttgatgcaaaaacactgaaacacatcatcaaaggcaagacgttctctaagaatggagacaacaaagaccactacggcaaagaaatcttctctaagtatatcctagacaactacaccaagattaactttgagaatttccgcctcatactcgacaacatgaatgaaataattcacgactacagtccaaactga

SEQ ID NO: 8484 - RNA, 1050 nt, synthetic construct
  source 1..1050: mol_type = other RNA
atgagattgaccgagattgaagataagaacatcttttttgaggagtttgacatatctaagcggagtatgacccatctgctgtatgtcaaagggactgatagcttctatgagagctttgaaatcccaaagaaaaatggaggattccggaatatcgacgcgccaaaaggaaagctgaaatatgtccagaaacgactagcggagattttatgggagacacagattgatgtgtggaagaaatacgccaacacctatgaatataatctctaccagaagaatctcaaagatgggattagataccgcgtcccgatgatctcacatgctttcgaggtaaacaaatccataatgacgaacgccaagatacacaggaataagaagttcatcatcaacgtggacttaaaagactttttcaagtctttccacttcggtagagtgaaagggttttttgagaaaaacaaggacttcaaagtgcctaccgaagtggccgttattatcgcacaactgtcttgttataaaggcgttctgccccagggagccccttcatcccctattatcactaacctcatctgccagattatggattacaggattatgcagctggctaaaagattcaagctaaactacactcggtacgcagatgaccttacgttctccactaataacgtccaaatcgtaaatgaataccagacattcttgaagaaactcgagaagaaaatagtgaaggctggttttgaaatcaatgaagacaagacccgcctgcagttcaataattccaggcagaccgttactggcttgatcgtgaataagaagctgaacgtcccccgagagtattacaaggacacccgtgcaatggccaatacactttataagacaggcagctttgatgtgaacgaacgcacaggctcgatcaatcaacttaatggcaggtttgcctttattaaccaactcgacaagtacaacaacaaactggagaacaatgctagcataatgaagaacaacatcgagtaccagaaatacctgctgagtgtggaaaagaaggagaagaatatttga

SEQ ID NO: 8485 - RNA, 1722 nt, synthetic construct
  source 1..1722: mol_type = other RNA
atgatcttcatcaacaagtttaacgccatcaatagccgaaacgaattgtttgagttcctcaaagtgaagaaggagattatgaactacatattgtacgtgaagaagacagagtgtagctacaattcattcaagattgagaagaagtctggagggtttagagagattaacgctcctgacgatgagctgaaagttatccagaagaaattagcccttagtctctggctttatcagaaggagatctgggacgaaaagggcatcaatcccaatatttcacatgctttcgagaaggacaaatccattatttccaatgcgcgtattcataggaacaagaaatttgtgctgaacctggacctagagaacttctttaagagtttccacttcggtagggtcaagggcttttttgagaaggatagagactttaaagtccctcccgaagtggccgtagtaatcgcacagttaacatgctatgatggctacctgccccagggcgctccatccagtcccatcataacaaatctgatttgccgtattctggacttccgaatccttaagctggccaaaaagttcaaactcgattatacccggtatgccgacgacctgacttttagtactaatcgcaaaggctttctggcagattacatagacttcctggaggagctgtccaaagagattctgagggctgggtttaagataaatgatagcaagaccagaatgcaatattctaacagcaaacagattgtgacgggcctgatcgttaacaagaaaatcaacattgacagcacctattaccggaagaccagggctatagcacacactctctacaaagggaaggaaattgaaataaatggcaagaaagcaacgatcgataatttagaggggcgctttgccttcatcaaccaattggaccggtataataatgctatcaacgctgaaattaccgtgggtaaaaaaaagaagtttgccttcaatggaagagaaatgcagtaccgcaaattcctcttttacaaatacttcttcgcgaacactaaaccactgatcgttacagagggcaaaactgatataaagtatatcaagtccgcactgaagaaactctataaggattacccgaatcttgtctcaaaaacgtctgatggaatctttgaatacaagatttccttcctgaagaagacaaacaggctaagatatttcctcggaatccagaaggatggagccacagctctgactgaaatctataaatactacgcaccatctaatgggcttaacgacccttacatcaattatatggatgagttcaaacggattagcgattctcaggccgaaaagccagtttttctgctcttcgataatgagatgggtaaaaagtctgacaagcctttgaagaaatttgtgggttgtgcgaaaattaacgaggacaaaatctccgaactgaaagataccctcaaattgaagctaatcgacaatttgtacgtgttgaccaacccgctcgtgagtaataaagaagaatgcgaaattgaggacctgttcgacaagaaagtccttgagacagtcataaaagggaagacctttcaacgcaacgaaaaaaagtttaacaaggaaaagcactacgggaaagaaatattcagcacctatattgccgagaattatgagtcgattgacttctcaaactttaagaagatccttgataacatcgagtcaatcagccagaaattcaagttaggatga

SEQ ID NO: 8486 - RNA, 1731 nt, synthetic construct
  source 1..1731: mol_type = other RNA
atgtgcgagatcaataatattaagaccaaaaaggacctggtgaaaattctggacattagcataaagaagctcacatatatcctgtatgtcaagaaagtagacaatatgtacttctctttcgatattcccaagaaaaatggaggtgttcggaaaataaatgctcctgaaaaaacgttacgcttcatccagcgcaatctggccaaagccctgagtaattacaagaaaaacatctgcgagaatgaaaagattagcaatcgtgtgagtcacgggttcgaaaagaacaagagtttcatcacaaatgcaaggattcacagaaataagctttatgtgatcaacttcgatctgaaagacttctttgactgttttcattttggccgagtgaaagggtattttgagaagaacatctacttcaagttgcccaaagagattgccattattatagcgcagttgacttgttaccacggatatcttccacagggtgctccgacctcccctgtaattaccaacctgatctgcaatatttttgacatgcgtatcttaaagctggctaagaaatataagctagattacacacgctacgccgatgaccttactttctcaaccaatgagaaagaattcatcaaagtgtacagcaatttctacaaggatctcgtcaaagagattgacaaaagcgggtttaaaataaatgagaagaagagccggattcaatattcgaattctaggcaggaggtgaccggggtagtggttaacaaaaagctgaacatcaatagagagtattacaagaagaccagagcaatggcagattctctgtataaaactggccgattctttatagatggaaaggaaggaacaatcaaccagttggaaggcagattttcactcatcaatcaggtggtctggtataacaacaaaattctcaaggaaaaggagaagcataataagtacatcaagaagaacgtcgaaatctacaagaagtcttgtactcgggaaagagattatgagcgcttcctcatttacaagtactttgtcattaacaaggagcccctgctgatcactgaaggcaaaacagataaactttacattcaagctgccttgaaatccctctataaagaataccctaaactgatcatcaagaacaaaaatggcaactttgagtataagatcgatttcttcaacaggactaaacggataaactatttcctggatgtgaataagacaggggccgataccctcaagaacatctgcaactactattttgacaaagttaagaacggatacgagaactacattgaggactttttcaagatcataaacatcaagcccaaaaatccagtaattctcctttacgacaatgaatttgacacctccggtaaaaaaaataacaagcctgttgccaaactatttaataatgacaggctctcaaacaagaaagactacatcataaagaacaggtttctgaagatcaaggagaatctgtacgtgatggtgataccattggtgaacgacaagaagaactgtgaaattgaagatctattcaaggatgagttgctgaaacagaaaatcgacgaccggatctttgaccgcaaatccaatgataatgagacaaagattggcaaagatacgttttccaagtatgtcaaggcgaactataaagatatagacttcagcaacttccgactgcttctggacaccatcaagaacatcttaaacgactacaaaaacaacgagtga

SEQ ID NO: 8487 - RNA, 1749 nt, synthetic construct
  source 1..1749: mol_type = other RNA
atgtgcgtgatcgatcacattaaaacccggaaagagctcgcgaatatcttaaatatctccgagaaaaagctcacgtatatcctgtatgtgaagaaaatcgacaacatgtatagaactttctctattcccaagaagaatggcgaaacaagggagattaatgcaccagagaaaatgctgaacttcgtccagaagaacctcgccaaatttctcctgaattaccggaatggcatctacaagaccgaaaacattaataacaaggtatctcacggcttcgagaaagagaaatcctttattaccaatgcggaattgcataagaacaaacgatacgttcttaactttgatctcaaggacttctttgattgtttccattttggtagggtgaagggttatttcgaaaagaacagatacttcaagctgtcaaaagatatagccactatcctagctcagctgacatgttataagaagtgccttccacagggagcaccaacatcacccataattgttaacctgatcttcaatatggtggatattcagattatcaagcttgccaagacctacaagttgaactacactagatatgcagacgatatcacctttagcactaatgacaagtttttcttggaaaagtactctgagtttgagaacaagtttctgtacatcatagagaagtatggcttcgtggtcaataagaataaaacgcgcctccaatataaggattaccggcaaaaagtgacaggcttagtagttaataagaaaatcaacgtgacccgcgagtactataaggagacacgagccatggcccatcagttgtataagaccggatcattttttatcgaagagaacaaatctgggaccataaaccaactggagggacgtttttcctttataaaccagatcgagaagtacaacaacatcatcgacattaagaaaggcggcaaaaaacacaggattgtcacgttgtcgaacaaagagaaagaatacagcaagttcctgttctataagaacttcttcaacatgggtaagcctattatatttaccgaagggaaaactgacgtgatgtacatcaaagctgccctcaagaatctctacaaaaaataccccaatctaatcgaggagactaaaactggcttcgattacaagatcattttcttcagaaagtccaagaagatcaggtatttacttaacatcgaagctaacggagctgacacaatgaagaatattgccaatctgtatagtgggagcgaaagtttccctaattacatcgaatacctcaagtctataagcaaacagaaacccaacaatcctataattctgctgtttgataacgagattgaaagcaagaacaagccgattaaaaatttccttagttgcaaagccgtgaagtccttctataaagatgacatactagagaaacagctgaaggaaaaaaactacgcatgtcttaaggataatctgtatgttcaggtcacaccattgatagggaatatcaaagagggggacattgaaacactgtttaaaaaagaaaccctggcacacaagattaatggaaagtcattcatcaagaaggacaaatacaacaacgaatattactacgggaaagagatcttttccaagtatgtgtatgacaattaccggaatattgacttcagcaactttgtctatctgctggacaatattaacgacatcattaaggactaccaaatccgcaaggctggaaatgatatgcaccctaaatattggacctactga

SEQ ID NO: 8488 - RNA, 1668 nt, synthetic construct
  source 1..1668: mol_type = other RNA
atgtctaactataacaatgccagggaatccctgagtaatttccttaacattagtctgaagtacctgacatacattttgtacgtgaaaaagatcgagaatctgtacacgacttttaaaatcccgaaaaagaatggcggctgcagagaaattaacgcaccccaaaacgagctgaagatgatacagaaaaagctcgttttctttctagaagaaaagatgaaggacaagttcaagactatcaatatttctcatggctttgtaaaggagcggaatattattaccaacgctaagatccacaaaaataaaaagatcgtcctcaacctggacctcaaagatttttttgactcttttcacttcgggcgaattaaaggcttcttcgagaagaacaaggatttcaaatttagccccgagctggcaacccttattgctcaactggcttgttataatgggaagcttccacagggtgccccttcctcaccattgatcaccaacttgatttgtaacatctttgacatccgggtgctgaatctcgccagaaaatacaaacttaattactctcgctacgcagatgacttgactttctccaccaattataaggggtttatcaaaaatctggaggagtttaaggaagacattttgcttgagataaagaagaacgggtttgaagccaacatgaaaaaatatcgcctgacttttcagaacagccgacaggaggttactggtctaaccgtgaataagaagataaacgtcagcaagatttactacaaaaacactcgcgcaatggcctattccctgtacaagaatggcgaatttaaaatcgacggaattaaggacggaacaattaatcaactggagggaagattctccttcatcaaccagttggatatctacaataatttcgagaagaaccggacaaaaaaagaaaagggaaaaaaggacggtatcaaatcctggaatatttataactcgcgtgagaaagaataccagaaattcctattctacaagtacttcttcatgaatcagaaaccactcatagtgacggaaggcaaaaccgacatcttatatatcaaggcagcgctgaaaaatctgtataatgattatccctcactcatcattaaggaggagaacaaattcatcttcaaggttagctttctcaaaaggaccaaactcctgaagtattacctaaatttagccttagacggagccgataccattatgaacatatataaccacttcgtcgatgcttatagctcgttctataactacaacgattacttcaagaagctgacaaaaaaacaggcgtttaacccagtggtgttaatatttgataacgagatcgagacagaaaaacccctgaaaaagtttctggcccatgcttttcctaagtctagggagatcaatgagaagaaggacataatcaagaagaattgcaagctcaatatcatcgataatctgtatctgctcacaataaacctcgtagatgatatgaaagagtgcgagatagaagacttgttcattaaggacattcatgaaaggtttagcttcaataaagacaaccctgacaagaacaaattttcaaagaacatcctgaagaactacaagaacatcgatttcagtaatttcaagccttttctgaacaatcttgccagtattcttaaagaatacaactga

SEQ ID NO: 8489 - RNA, 1680 nt, synthetic construct
  source 1..1680: mol_type = other RNA
atgtttaattttaagaatgcccgagagatcttgagtaagatcctcaacattcatctaaactatctgagctatatcctttacgtgaaaaagatcgagaatctctacacaactttcaaaattcctaagaagaacggcggctatcgggagattaatgcaccccagaacgagctcaaaatgattcagaaaaaattcgtctccttcctggaagaaaagatgaaggagaagttcaagacaattaataccagtcatggtttcgttaaagagaggtcaatcatcaccaatgcgaaaattcacaagaacaaaaagatcgtgttgaatctggatttgaaagactttttcgactctttccactttggtagagtaaagggattctttgagaagaacaaagacttcaaatccttttttcctgaactgaccagcgagctaagcactctgatagctcagctagtttgcttcaatggcaaactaccacaaggtgccccatctagtccactgctgacgaatctcatatgtaatatcttcgatgtgagagttctgaagcttgccaaaaaatacaaacttacttactcccggtatgccgatgatctcaccttttcaacaaactacaaagggtttattaggaatcttgagaagtttgaggaagacattttactcgaaatcaagaagaatggattcgaggcgaacatggaaaaatatcggctcacatttcagtcttcacggcaggaggtcacagggttaacagtgaataaaaagatcaacgtaagcaggaagtactataagtacacgcgcgccatggcctatagtctgtataaaaacggagagtttaacatcgatggcattgatgggactattaatcagctggaggggagattcagcttcatcaaccaattggacaagtataacaattctgaatcggaaaagcgaaaaaaattcatcgcacgtaatgtgctgaacagccgcgaaaagcaatatcagaacttccttttctacaagtacttcttcatgaacgaaaaaccgctgattgtgactgagggcaaaaccgacatactgtatatcaaagctgccttgaaaaacctctataatgaatatcccaacctgatcacgaaagaggagaacgagtttatctttaaaatctcctttctcaagcgcaccaagctgcttaaatacttctttaatctctctcctgatggagctgactctatgaagaacatttacaactactttggggacaagaatagcaaattctacgacttctacaactatttcaagaaactgacaaacctggaagctttaaatcccgtgattttagtctttgacaacgaggcaactgagaattccaaaaaaccccttaagaagtttctcaatcacattttctccgataaaaacgacaacgacaaaaagaacctcatatcatatgtcaggaccaagtttaagctgaagatcatcaataacctgtacttgttgaccataaatctggtggatggcctggaggaatgcgaaatagaagatctgttttttgaggatacctacaagaagtttagcttcgacaagattaatccaaacaaggacaagttttcaaagaacatcctgaagaactacaagaatatagacttctccaaattcaagcctttcctgaataaccttgaatcgattttgaaggagtacaataagaaggattga

SEQ ID NO: 8490 - RNA, 1701 nt, synthetic construct
  source 1..1701: mol_type = other RNA
atgaaactgagcgaaatccggtgcagagaggacctcgcttgcctcctgaagattaaaaccagcagtctgacatacgttctctatcgtgccaaagtcaactccttctataaaacctttgatatcccgaaaaagaacggcggcgtcagacaaataaacgcccctaccgacatcctgaagatcatacaagagcgcctggcaagcgccatttactcgtacatgaaaaatctgaggacagagaaaaatatcaacgtgaatatagcccacgcctttgagaagaaaaagtccattattaccaacgctcaaattcacaagaacaagtatatcgtactgaccttcgacctagagcactttttcgatagttttcatttcgggcgggttgccggtttttttgagaaaaacagagactttcaccttccccataatatggcaattatattagcccagttgacgtgttataacgggcatttaccccagggggcacctacgtctcccataatcacaaatctgatattccagatttgcgatatgcgcatcctgaagttagcaaagaagtacaagctggactacactcgatatgctgacgatctgaccttctctactaacaatcatagcttcatcgacgaaaaagaatcctttcagcgagaacttgaacgagaaatcggcaaagctgggttttcaattaaccaaactaagactaggatgtcactccgcaattctagacaggaagtgacaggactagtggtgaacaagaagatcaatgtgaatgcggggttttacaggaaaacgcgtgcgatggctcatcagctttatcagaatggatctttcaccatagatggtaaggagggtagcatccagcagctggagggacgctttgcctttattgatcagctggatcactataataacaaaattgacggcaagatccactcattccgggatcggaacggcagggaaaagcagtacagcaagttccttttctacaagttcttttacgcaaatgagaagcctctcatcgttacagaaggaaaaacagacatcagatacctgaaagccgctcttaagtcgctgtatctggattatccagagcttatatccagaaacaagaacggctcctacacattcaaagtgcaattcttgcacaggactaagcggttgtcttattttctagatatcgcggtagacggcgcaaaaccgctctacaacatttacaagtacttcatcaaagggcgcgacagtgcctaccccaactattataagtttttcagtaaggacggagagaagaaaccacgcaatcctgtcgtcattctgctggacaacgagatgaagcccaacaagccactaaaaggcttcttagaccagatcaagtcaactgaatccgagaaaaatgatctgcagcagaagttgtcactccggctgcttgctagtggcaacttatatctgctcactaatcctttggtggataataaagatgagtgtgagatcgagctccttttcaccgaggaaaccaggggaattaaactggagggtaagtctctctgtttggaagaagaaagctttgagaaatcaaattcctacgggaagaacatctttagcaattacatcctccagcactacaatgagattgacttctctaggttcattccactgctcaacgccttgagttccattatcaaaaactatagcgctgaaatgagaaattga

SEQ ID NO: 8491 - RNA, 1707 nt, synthetic construct
  source 1..1707: mol_type = other RNA
atgaaaactttcgccaatataaaaacactggatgacctatcaatcattctgaaaatcccaaagaagaaacttacctacattctctacataaagaagcctaacaacagttacaaatctttcaagatcccaaaaaagtctggtggtgagcggactatcaatactccatcaacagatctgaaagatattcagagaagtatactgaagatcctttggaagcagcagaagatcttatgggaagaacacaaaatcaaatcgaatatcagccacgcctttgtgaaaaagaaaggcatcctcactaacgcacgggtgcacaagaataagaggtatgtcttcaatatggatttggaagacttcttcgacagtttccactttggaagggtccgcggcttcttcgagaagaacagagattttttattcccgcagaatattgcgaccatccttgcacagttaacttgttataatgggtgtctcccacaaggggctcccaccagccctattattactaacctgatctgcaacatcttggatatgcgactgctgacagtggccaaagaatttaaactcgactatactcggtacgctgacgatctcaccttctccacgaatgatgagaaatttgtagagaatttggaggatttcaagactaaagccaaggaaattatcaaccatagcggatttaagatcaacgagaagaaaacaaggctgcagtataaaaatagccgtcaggttgttacaggtctggtggttaacaaaaaagtcaatgtgaaccgcgatttctataaggagacaagagcgatggcaaattctctctacaagaatggggagataaaaattaatgagaagagtgccaccatcaatcaactagaaggaaggctctcctttataaatcaaattgaccgagacaacaacaaggtcaacaagaaaagcaataagaagttccattctcatctgtcaaccctgaacggaaaagagaagcagtaccagatgtttctgttctataagtacttcatggccaacaataacccttgcatcattacagagggcaaaacagacataatttacatcaagtatgccctgaagaaaatgcaccgtgactaccccaaactgataaaaaagaattatgacggcacctttcagtacaaaattagttttctcaaccgcaccaaacggctcaaatatttctttaacttggagcttgatggggctgacacgatgaacaagatctacgaattttactcaaacaggaacaatgattcctttcctaattacaacgaaaagttcgagaaattcggcgtgagcccggagaaccccattatttttatacttgacaatgagctgtcgtccaaggagaataagcccctaaaaaaactgatttcacaagtggctctggataagaccaaaatcgcttctttcaaggaaaacaacttcatcaacattacctccaacctgtatcttacaacccatcagctggtgaaggacttgaaggaatgcgaaatagaggacttgtttgataatgatacgctgaacgtcaagttaaataacaagtccttcgaacgcgattctaaaaagtttaacgacaagatccactatggcaaggcaatttttgccgaccatgtgtccaagaattacaagaacattgacttcagcgaatttagacccctccttgacaacttgaataacatcatcaccaattacagcgtaaattga

SEQ ID NO: 8492 - RNA, 1704 nt, synthetic construct
  source 1..1704: mol_type = other RNA
atgcaaacgtttgaaaatataaagacgctggacgacttatctatcatcctgaagattcctaacaaaaagctaacatacatcctgtacattgttaagcctgacaacagttacaaatcattcaagattccaaagaagagcggaggcgagagaacaatcaacactccatctaccgatctgaaggatatccaaaggagcattgtcaaaatcctctggaaacagcagaagatattgtgggaggaacacaaaatcaagtccaatatctctcatgccttcgttaaaaaaaagggcattctgaccaatgccagagtccacaagaataaaagatatgtcttcaacatggacctggaaggattttttgattcttttcacttcggtcgtgttagagggttctttgagaaaaatcgggatttcctgttcccaaagaatattgcaaccatcctcgcccagctgacgtgttacaatggctgccttcctcagggggcacctactagtcccattatcacaaatctgatctgcaacatcctcgatatgaggctactgaccgtggccaaggaattcaaactcgactacacaaggtatgccgatgatcttaccttcagtacgaatgacgagaagtttgtggagaatttggaagacttcaagaccaaagctaaagagatcattaatcacagcggcttcaagataaatgagaaaaagacacgactccaatacaagaactcgcgacaagtagttactggcttagtggtaaacaaaaaagtgaatgtgaaccgggaattctataaggagacaagatccatggcgaatactctctataagaaagggaaattcgagattaatggaaagactgctacaattaaccagttagaaggacggttcgcttttattaaccagattgaacggtacaacaacgggatctataagaacaacaatgcaccactgaaactgtgtgacttgaacggtaaggaacgccagtaccagatgttcttattctacaagtacttcttcgggaactccaagccttgcatcattactgagggtaaaaccgacattgtctatatccagagcgccctaaagaatctctatgagtcctatcccaaactggtgaaaaaaaaagctgatggcacttaccagtttaaaattacatttctcaggcgttcgaagaggttgcggtattttcttgatttccaacttgacggagcagatacaatgaccaaactgcacaatttttactgcaacaccaataacaactcctatcccaattatccggaaaagtttcgcaagctaggtactacccccaaaaatcccgtgatcttcgtgctggataacgagctgcataataatgagaaaccattgcgcaagctgatcaaaaacgtcaaacttgacaagaatctcagcgaatttgactcatccaaggagaagtaccatatcaacataacctctaacttgtaccttagtactcatcagcttgtgaaaggcctgcaggaatgtgagatagaggacctctttgatgataataccctgaacaccaagatatatgataagacctttgaacgcgatagcaaaaagtattcagacaagaagaactatggaaaggcggcctttgctgactacatctcaaagaactacaaggacatagactttgagaatttcaaaccgctgctgaacaacattaacgagataatcacaacatacagcttgtcttga

SEQ ID NO: 8493 - RNA, 1707 nt, synthetic construct
  source 1..1707: mol_type = other RNA
atgtatactttcaagaacatttccacgataaccgatctggccaagattcttaagattccaaagaagaagcttacctacgtgctgtacattaagaagaccgacaattcctataagtttttcaagttgcccaaaaaatccggtggagagaggacaatttacaatccaagtgacgacttgaaggatatccagaggtcaatagtgaatttgctgtggacacagcagctaatcatttggaaggagaataacattaagcccaacatttctcacgcattcatcaaagaaaagtccatcataaccaatgctcgagtccataagaataagcgatatgtctataacatggatctggaagacttctttgattcatttcacttcggccgcgtcagagggttcttcgagaaaaacaaagacttcttattccctcaaaacatagccacggttttggctcaactcacctgttataatgggtgcttgcctcagggagcccctactagccctattataactaatctcatctgcaacatcctggacatgaaactgctgcagattgcgaagaagtttaagctggattacactcgctatgctgacgatctgaccttttctactaatgatggacactttcttgagaacatagaggaattcaagattcagaccgagcgtatcataaaatacagcggcttcaagatcaataaaaaaaaaacacggctccagtatcaaaattcaagacaggtcgttaccggacttgtggtgaataagaaggtgaacgtgaatcgtaaattctataaagagacgcggtctatggccaacaagctttatgtaaacggagaatttaagatcaacggcaaaaaagcaagcattaatcagctggagggtcgctttgccttcatcaaccaaatagacaggtacaataactccatcaagatcaacaacaacaaaatccaaagcaagacaagaaatctgaacggcaaagaaaaacagtaccagatgttccttttttacaagtacttcttcgccaacaataatccctgtatcgtgacggaagggaagaccgatattttatacatcaaatccgctctgaagaatctgtatgaagagtaccccaatctgattcagagaaattctgatggtaccttcaactacaaaatcagttttctgaatcgcacaaaaaggctgaggtactttttcaattttgagttagatggggccgacactatgaatcagatttacaacttcttctccaacaagaataacgacaaatatccaaactaccaggagaaatttcggaagcttggctcttcgccaaataatccggttatctttattctcgacaatgagttgtctaaccgggataaacccctcaagaagctaatcaaaccgctggaactcgaaaataactcactcaagtttaaccacttcaaagacaacaactttgtaaacctcactagtaacctgtatctcctgacccatcagctcgtgaaaaacctaactgagtgcgaaatcgaggatctatttgacgaaagcatcctgaacaccacactgcacaataaaacatttgagaaagacagcaagaagtttgatgacaaactgaattatggcaaagcagcattcgcggattacatcagtaagaactacaacaaaatcgactttacagagttcaagttactgctcgacaacttgaatgaaattatcacaagccatagttcaaagtga

SEQ ID NO: 8494 - RNA, 1707 nt, synthetic construct
  source 1..1707: mol_type = other RNA
atgaatacatttgagaacatcaccacactcgatgatcttagccggacgttaagaattcagaaaaagaagctgacctatatactgtatgtcagaaggatagagaactcctatacttacttcactataccgaagaagagtggtggagaacggaccataaattcccccagcactgacttgaaagaaattcagaagtcaatagaccgcctgttacgcaaacagcagattatcttttgggaggagaacaatatcaagcctaatatatctcacgccttcaataagaagaagtcaatcatgactaacgcaaaggtccataaaaataagcgttacgtctttaacatcgacctcgaggatttctttgatagctttcattttggccgggtgcgagggttcttcgagaaaaataaaaacttcctgttccctcagaatattgctactattctggcacagctcacctgctataacggctctttaccacagggggccccaactagtcccatcattaccaatctcatatgcaatgtgctggatatgaagctgctgaaaattgcaaagaagttcaagcttgattacactagatatgcagacgatttgacattttccacaaataacaccaactttttggaaaacttcgaagagttcaaagaccgcgtcgaggctgtgatcaagtacagcgggtttaagattaatgagaagaagaccaggcttcaatataaggactcgcgccaagtagtgacaggcctcgttgttaacaagaagatcaacataaacagggatttttacaaggagacacggtccatggccaacaccctctataagcacggagaattcaaaattaatggcgagcaggcaaccctgaatcaactggaaggcaggtttgcctttatcaatcaaatcgatcgtttcaacaacgatatctacatcaagaacaacaccgtgaaacccaaactgtgtgacctgaacggaaaagagaagcagtaccagatgtttctattctataagtacttcttcggaaacaacaagccgtgtatcattacggaagggaaaaccgatagtatctacattaagtcagccctcaaaaaactgtataacctgtatcccactctaattaagaaaaatcaggacggttcttacaatttcaaagtgtcttttctgagaaggactaaacgattgcggtacttttttgactttcccctggacggtgccgacagtatgaagaagttgtacaacttctactgtaatacaaacaacgattcattcccattctacgctgaaaagttcaaagaacttaatgttgtccccaaaaatcctgtgatctttattctcgacaacgagcttgagaacaattccaaacctatctccaaactgattaaagcgacaaaactggaaagcgataaacagaagcttgccttcttcaaatctaaatattacgcgaacatctcatctaatctctatctgagcacccaccagctagtgaaagaaaagaaagagtgcgagatcgaagacttatttgatgttaatacgttggagacaatcatcaacaacaaaacgtttgagagaaatagcacaaagtacaaggaccaaaataattatggcaaagctgtatttgccaattacgtgagtaagaactacaagaagattgacttcaacaatttcaagccactgctcgacgctatcaacgaaattgtgtccaattataccacaacctga

SEQ ID NO: 8495 - RNA, 1716 nt, synthetic construct
  source 1..1716: mol_type = other RNA
atgaaaacttttgaaaatatcagcacccttgacgagctgagtcaaattctgaaagtgccaaagaagaagctaacttatatcctgtatgttaagcgtatcgaaaacctctacacttcttttgagatccccaaaaagactggtggagaaagaacaatttcttcacctagcaccgatctcaaggaaattcaaaaaaacatagctgagctcttgcgcaagcagcagaatatatttctagaggagaacaacatcaagccaaacgtggctcatgccttcaacaagaagcggagcattatgacaaatgccaacctccataaacacaagaggtacgtgctgaatattgacttggagaacttctttgactcttttcattttgggagggtgcggggatacttcgagaagaataagaactttctgtttcctcagaacgttgctactattttggcccagctgacctgctataacggcaagcttcctcagggggcacccacgtcccctatcataactaacctgatctgtaatgttctggacatgaaactgctcaagattgccaagaaatttcgattagtgtactcccgatatgcagatgacttaacctttagcaccaatgatcgcaatatattagaaaatctggaggaattcctggcgcaactggagttcattgtaaataagtctggcttcacaatcaataagaagaagacacggcttcagtataaagattccaagcaagtcgtgaccggtttagtggtgaatgaaaaagtcaacgtcaatcgtttgttctataaagagacacgctccatggccgacaccctctataagaccggcgaattcaggataggagacgataaaggtaatctcaatagactggaggggaggttcagtttcatcaaccagatcgacagattcaataataaaatcgggaagggcaaaaatatcggcaacaaggagtcaaaaaaactgaacggtagagagagacagtatcagatgtttctattctacaagtacttctactgcaataccaaaccatgccttattactgagggaaaaacggacattatctacattaaatcagccctgaaaaagatgtatctttcatacccaaacctgatcgagaaaaactctgatgggacatttcactttaaattcctcttcctgcgccgatccaaacggatgcggtacttttttgaactcaagctggacggcgctgatacgatgagtaagatatacaacttctactgtgacacaaacaatcacaactatcccaattacgtaaaaaagttcaccgagaagtcggtgagtccgattaacccgacaatcctcatatatgacaacgaattgaagaacaaggataaacctttatcgaaggtcacaaatactacgaaaattaggcaggatgaggaaaaatataactttctcaagaccaaccactatgtaaatgttacaagcaacctatacgtccttacccaccagcttgtgaagggactgcccgaatgtgagatcgaagatctgttcgacagcaatactctctccgtgacaatcaacgacaagaccttcgaacgcgatctgaaaaagtttgacgagaacaaaaactatgggaaagcgatcttcgcaggctacatttctaagaactacctgaatatcaacttcgatgagtttaagcccctgttggataatcttaatactattgtcacctcctacaatttgaaaagccagacctga

SEQ ID NO: 8496 - RNA, 1695 nt, synthetic construct
  source 1..1695: mol_type = other RNA
atgaagaccttcgataacatcaagaatttagagcagttgtcccaggttctgaaggtgccaaagagaaagctaacttatgtactgtatgtgaaacgcattgagaatctgtacatggactttgaaataccaaagaaaacaggaggcaccaggaaaatctcgtctccatccaaggatctcaaggaaatacagaagaatattgccaagctccttgagcgtcagcaggaaatcttcctgaaagagaacaatatcaagtcaaacatcagtcacgcgttcactaaggaccgctccataatgaccaatgctctcattcataagcggaaaaagtatgtcttgaacattgacctggaaaacttttttgatagcttccattttggcagggtcgccggatacttcgagaagaacgagaatttccttttccccaagaaaacagctgtgattctggcacagttgacttgttataatggcaaactcccccaaggttcccctagctctccgatcattactaacttaatctgcaacattctcgacatgaaactgctcaagatctcaaagaaattcaaggtggactatagtagatatgccgatgatttgaccttctcaacgaacaataacaaattcattgaggagctggacatttttttgagccagctggaaaaaatcatcaacaagagtggctttgaaatcaataaaaagaagacacgcatccaatacagagattccaagcaaatggtcacgggacttgtggtgaacaacaaagtgaacatcaaccgaaaattttacagggagactcgggcaatggccatcagtcaataccacacaggaactttcaaaattgataatgaggaagggaacttgaaacgtctggaaggaagattttcatttataaaccagatcgaccggttcaacaagaagattacctctaaaaataccgtggttggcaaaaaaaccaatatactgaatggcaaggagaagcagtaccagatgttccttttctacaaatacttctactgcaactcaaaaccatgtatcgttaccgaggggaagacagacataatgtatatcaaagctgcactcaaaaacctatacaaattttaccccaagctcatagagaagaaaagcgatggtactttccactaccgaatttcttttcttaagagatccaaacgcattcggtatttttttgacctgagcctcgacggggccgacacaatgatcaagatctacaattgttactgcgatgtgaataacgtcaactttcctaactatgccaaattctttgaaaacaaaggtgtcctctatacaaaccctacagttctgatatacgacaatgagcggtccaatacagaaaagcccctgtacaaggctcttaaagccaccaagattaacgaaaacaaggaaaaattggagagcctgaagagcaattactatacgaacattactagcaatctgtatatcctgacccatcagctagtgaatgggctggccgagtgcgagatagaagacttattcgactctaagatcttagagatgaagattgatgggaaatcttttgagaggaaccttaaggattttaatgataccgagcactatggcaaagcaatcttcgctgattacattctgaagaattatcacgcgatcaatttcgacaattttaggcctttcctggactgtctgaataagattgtagaaagttga

SEQ ID NO: 8497 - RNA, 1728 nt, synthetic construct
  source 1..1728: mol_type = other RNA
atggacacatttgaagatatcaattccctggaggagctggccaagattctcaaaattcccaagaagttcttaacgtatatcctgtataagaagaaggtggagaactcttatactaatttgctgatccctaagaagagtggcggtcagcgaaacatttcaatccctatgaaagagcttaaagacgtgcagaggaatatcgtcaaggtgatgcttacacagcagaacatatttcagtttgagaacaacatcaagtctaatatctcccatgcttttaccaaggacaaatccatcattactaatgccgagattcacaaaaacaaacgcttcgtcctgaatattgacttggaagacttcttcaagtcatttcattttggtcgcgtccaaggatactttgaaaaaaacaagagcttcctgtttcctaaaaatattgccacagttctagctcaacttacctgttacaatggtagcctgccccagggagcccctagttcgccaataatcaccaatctgatctgcaacattctcgatatgaagctgttaaagattgctaagaagtacaagcttgactatagtcggtacgccgacgatttgacctttagtactaacaacaagaacttcgaagaaaaaagcgaggagttcttttaccagctcgaaatcatcataaagcagtctggctttaaaatcaatccaaagaagactagactgcaatacaagacaagccggcagatcgtaactggcctggtagtcaacaagaaagtgaatgtgacacgagaattctacaaaaacacccgtgctatggctaattccttatataaaaccggagcctttaccattaacgatactaaaggcacattaagacaactggagggccgctttagcttcatcaatcacattaataaggtgaacaacaagaagagacagatcaatgataaagaaagtactctgaacttcaggtgcttgaacggacaagagaaggagttccagaagttcttgttctacaagtatttcttcaacaacgagaaaccatgcatacttaccgaaggccccaccgacatactgtatctaaaaagcgcgctgaagtctctgtatgaagactaccccaaactcataaaaaaagtgaatggcgagttcatcttcaagattttttttctggagaggtctaagaagaaaaaaacacagaaggtatccaaaatggagtattttttcgggctcaaagagaatggggcagacacgatgatccagatatataattactacgtcagcaacaaacagaagaagcattgcccgaattattcagaactcttcaagaagatgaacgtgactagcaaaaacccctgtattctcatactggataatgaactgtcagtgaaggagaaaccccttaaaaacctccttaattacatggggattatcgatgggtgcaagatcgcggaactcaaagagaagtgttacctgaattctacatccaacctatatgttgccacgaacccgttggttaatgaactcaaggaatgtgagatcgaggatctatttgaggaggccgtgctgaagaccgaactcaatgggaaaacatttgagaaatccgaaaaagcattcaacgatacccggaattacggaaaaagagcactgtcaaagtacgtgtggaataactacgacaacattaatttcgagaacttcaggccattattggatgcaattgaccagatcgttacgaaatataaccactga

SEQ ID NO: 8498 - RNA, 1752 nt, synthetic construct
  source 1..1752: mol_type = other RNA
atgaatacgttcgaagatataaccagtattgataacctctcaaacattctgagaactcctaaaaaaaagctgacctatatcctctacatcaagaagatccagaattcttacaccacgtttcaaatatcaaagaaaagcggaggacagaggattattaacgtgccatcaaaagatctgaaggacatccagcggaatatagtaaatatgttgctgaaccagcagaaaaagttctactatgagaacaagattcggttgaacatcgcccatgcgtttacaaaagagaagtctattatcaccaacgcaaagatccacaaaaacaagcgatttgtgctcaatatagacctggagaattttttcgagtcctttcactttggacgagtccagggatatttcgagaagaacaagaactacttgtttcccaagaatattgccactgttctggcccagctgacctgttataatggatctctgccccagggcgcaccttctagccctattattaccaacctgatctgtaacatcttggacatgaagatcttgaagatcgccaagaaatacaagttagattacacccgttatgcagacgacctcacttttagtacaaataataagggtttcgacgaaaaatcagaggagtttatctcgcagctagaaatgattatcaagcaaagtgggtttaagatcaataggaagaaaactcggttacagtacaaacaatccagacaagtggtaactggcttagtggtcaacaagaaagtgaatatgccccgtaatttctataagaatacacgcgctatggctaattccctctacaaaaatggctccttcacaattaatggggttgaaggcagcctcaagcaattggagggcagattctccttcatcaatcacatcaataaggagaacaacaaagagaagaaaaagattgacaagaactccaaactcggttttaggaatctgaatggtcaagaaaaggaataccagaagttcttgttctacaagtacttcttcaacaatgagaaaccatgcatccttaccgagggccccacagacataatctacctcaaaagcgctcttaaaaacctttatacggactatcctaaactgatcaaaaaggtcaatgacgacttcattttcaagatctcttttctgaagcgcggggaagatcctaaggcttcaaaagcgcataagaaaattaaagggcagaaaaccagcaaactgcagtacttttttggtctggagaaggatggggccgacacaatgaaacagatttacaacttttacgtgtctgataaacagaagaaagattgcccgaactatagtgagatcttcaagaacatgaatgtcaacagtaagaatccatgcatattcatcctagataacgagttaaacaacaaggacaaaccgattaaaacccttactaactatatggatctgaagccagataaacttgacgaactgtgcgataagaactatctgaagataatcagcaacctgtacattgttacaaatccacttgtgaatgagctaaacgaatgtgagattgaagatctgtttgagctcgacactctgaagaccgaactgaatggcaaaacattcgaacgctgtgaaaaaaaatacaacccctccgagaattatgggaagagggcctttagcaagtatgtgtggaaaaactacgaggatataaacttcgaaaacttcagaccccttctcgacaacataaatcagatcgtcacgaactataatgactga

SEQ ID NO: 8499 - RNA, 1701 nt, synthetic construct
  source 1..1701: mol_type = other RNA
atggatacatacaaggacattacatcacttgatgatttgtcacggattctcaagacacccaagaaaaagctgaccttcgtattatacatcaagaaagcagagaattcctataccagcttcaagattcctaagaaatccggaggtgagcgagtgattaatgcaccatctaatgacttgaaagatatccagcgaaacatagtaaaaatgcttcttaagcagcagagagttttcttgtttgagaacaacatcaagtccaatattgctcatgccttcactgaagacaaatctatcatcacaaatgccaaagtccataaaaataagcgttttgtcctgaacctggaccttgagaatttttttgagtcctttcacttcggcagagtgaaaggctatttcgaaaagaacaagaactacctattccctgagaatatcgctactgtgttggctcagctgacctgctacaatggttctcttccacaaggggccccgtcctctcccataatcaccaacctgatttgtaacatcttagacatgaaactgctgaagactgccaaaaagtacaaactggattacacccgctacgcagatgacttaaccttctcaacaaacaacaagaatttcgcggaccagctcgaggaatttaccaagcagctggaggtaatcataaaacagagcggctttaagatcaacgagaagaagactaggctgcagtacaaacaaagtcggcaggtcgtgacaggattagtggtgaataagaaggtgaacgtcaagaaagatttttacaaagacacaagggccatggttaattcactgtataagaatggctccttcaccatcaatgatagcgaaggatcgcttaaccaattggaggggaggtttagcttcattaaccacataaacaaagagagcaacaaagagcggaagaaaattgacaagaacctaaagctcaatttcagaaatctgaacgggaaagagaaggaatatcagaagtttctcttctacaagtacttcctgagtaataaaaacccctgcattcttaccgagggtccaacagacataacatatctgaaaagtgctctgaagaatttgtataccgattatcccaaccttatcgaaaaagttgacgagaacttccactttaaaataagctttctcaagcgcacgaagaaaatgaagtattttttcgacctggaagaagaaggagccgataccatgaagaagatttacaacttctacactgtcaacaaagaaaagaatgattgtcccaactacagtgaaatctttaagaacatcaacgtgctaccaaagaatcctctcatttttattctcgacaacgaactagctaatgacaacaaaccgctgaagaatctcgttaattatatggcgctcaaaaaggagaagattcatgagctgcagacgaagaattatattaatgtgacgagcaacctctatatcgtgactaaccaactggcagataacgtgaaagaatgtgagatagaggacctgtttgacgcagaaactttggacgctaaactgaatggcaaaacgtttgaacgcgacaagactaaatataccgatgccgccaattacgggaagaaggccttcgcctcttacatttggaaaaactacaaggacatcaatttcgagaatttcaggcctctgctcgattgcatcaacctgatcgcgaaagattatatcgattga

SEQ ID NO: 8500 - RNA, 1698 nt, synthetic construct
  source 1..1698: mol_type = other RNA
atgggaagctttgagaacattaaaaccagaggggaccttgccgggctgctcaatattccttcttccaagctctcttacatactgtacatcaaaaagatcgagaacctctatagctcctttaagctccccaagaagtcgggcggacacagggtcattaactctcccgaagaagatttaaaagatatccagaagagcttggctaaatttctgtctcgtcaacagaagatcatatgggatgcaagaggcattaaccagaatattagccacgcctttattgaagggaagaacattatcagcaatgctgaaaatcacatgaataagcggttcatcctaaatgttgacctcgaagacttcttcgattcattccactttggccgggtacgcggttttttcgctcagaatagggactttagatttccgattgacatagccacaataatagctcaaatctcatgctacaatagaaccctgccacagggcgctcccagttccccaatcattactaacctcatttgcaacatcttagacatccgccttctgaagattagtaagaaatatcgggttaactacacgcgctacgccgacgacttaacattttcaacgaacgacaggtccttcagtgacaaatacatgaaattcttagtggagatctcattggaaatcaaacatgccggcttcatgatcaacaataaaaagaccagattgcagctcaaggatagccggcaggaggtgactgggctgatcgtcaataaaaaggttaacgtcaagaaggagtattacaagaaaaccagggcaatggctgataatctatacaggcataaaacctttgacatcgatgggaagcctggcacaattaacaaactggagggccgcttcagctttatcaatcagctagatcgacgaaataacgagataaaccggaaaagggtggaactgactcaaaagtccaacagcaggcattgtctgaacacacgtgaaaaaggataccagtacttcctgttctataagtatttctttgcatgccctaagcctacaatcatcaccgaaggtaagactgatattcgctatctgaaagcggcactgaagaacctgtatcttgaatttccaaagttgatcgaaagaaaagccgacggaacattcgagtttaaggtgtctttccttcgtaaaaccaaacggttgaagtattttatggagttgcagctggatggtgcggatacactgaaaaacatctacaacttctacaacgaaaagggacgccagcccaatctgagcaaatacttcgaaatgaagtccaagactaagccggacaacccagtaataatggtgttcgacaatgagatctcaaataaaaacaagcccctatatactttcaccaattacgccagtacccaacccgagtccaaacaaatgttgatgaagaacctgtccataaatattaccaacaatctgtttctcctgactcaccagctcgtgggtcagcgaacagagtgtgagattgaggatctctttaataagaaggccctggacaccaaacttgacggaaaatctttctcaaaaaaccctgatacgaaacaagagtacggcaaggagtatttttctagttatgtgctgaagaactaccagaatattgagttcgataatttcagaccaatgcttcaggcacttaattcgatcattgagtcctatagtaaagggtga

SEQ ID NO: 8501 - RNA, 1692 nt, synthetic construct
  source 1..1692: mol_type = other RNA
atgaatcagcgaggctctgggatacaagataagagagacttatgcaggaagctaaggattcagtacagactgctgacatacatattgtacaagaaaggaatcgactcattttacgagcagttcaagatttcgaaaaagtcgggcggcatccgcattatttctgcacccaagcggccactcaaatttgtacagaaaagactggcccagatgctccaaacattttatgatgggtcaactacgaaaaagaataacatcgctcacggttttctcaagtcacgaagcatcattacaaatgccaggaatcacagaaacaaacggtatgtgatcaacatcgacttggaaaatttctttgacagctttcactttggcagggtgtgtggcttcttcgaaaaaaacaagaacttcctcttccctaaggaagtggccgtgacgctggcgcagcttacatgctacgaagggagtcttccacaaggagcgccttgtagtcctatcataaccaacctcatttgccagatactcgattatcgcgtcctgcggatcgccaaaaagtttaaacttaactacaccaggtacgccgatgatctgactttttcaaccaatgaccgcaaatttgtaaacgagtatgacgagttcatcaagcaggtggaagctgagattatccgagctggattccgcatgaataccaaaaagacccggttcatgtataaggatagcaggcaagtggtgacgggcctggtcgttaataagaagttaaacatcccacatgagtatattagacggactcgggccatggcacactccttgtacacaaagggagaatttaacatcgatggggtgctgggctccattgagcagttggaggggcgtcttagctttataaactacatcgacaagtacgccagcacatacgctgagtataaacgatataaccgtttcactcctaaggaaatgtccggaagggagaggttgttccaacagttccttttctacaagtacttctatcataacgagctgcccgttattattactgagggtaagaccgacaaacgctacattaaagccgcacttaagtccttatgccaccattaccccgctttagtgactgccgttggcaacggacggttcaaattccatattagctttctacgcaggagtaaaagactggaaagattcctggggattcagcacgatggggcagattctatgaaggtgatctctaactattatggtagtcccaattctgagggtctgccagactattactcttacttctcaaaatactcctgtgaggctaccaatccggtatttctgctctacgacaacgagattagtaacaaaaacaagcccatcagaaagatgctgaatttttggaagcaaaaagtcgaagatatcgtcaatatcgtcgagaaacagcagtactgttgcctgcagggcaatctgtatatattgaccttccctaccctcaatggaatggcagagaatgaaattgaggatctcatcctgaaagataacccactgatacagatcggcgggcgtaatttctccagagaggaacgatatgacataagcaagttctttggtaagaatgagttttcccagtatgttctggacaactacgacaaactccgcttcgacagctttcggccgctactagacacactgaattccatcatcaaggaatataaggaatga

SEQ ID NO: 8502 - RNA, 1704 nt, synthetic construct
  source 1..1704: mol_type = other RNA
atgaagaagttttgtgacattcagtcaaggaatgagctggcggattatctcggcatctctcacaaaaagcttacccacatactctatattaagaagccggacaactactatactacgtttgagatccccaaacgcaatggagaaagccggaccatctgcgcccctagcgggcatttgaaagctttacaagtgaagctggccaatatgctatggtgctatcaaaagagtatttgggaggaaaaaggcgtgaagccgaacattagtcatgcattcgagaaagaaaagtccatcatcacaaatgcgaagattcacaggaacaaaagatttgttttgaacctggatctggagaatttctttgacagctttcatttcgggcgcgtgcaaggctacttcgagaagaataacaacttcaaactgccttatgacgtgtctgtcatcttagcacagcttacttgctaccaaggacgactcccacagggagctccttcaagcccaattatcacaaacttaatttgccagaccatggatatctatctcctaagagttgccaaaaaatataagctggactacacacgctatgctgatgacctgaccttctcaacaaacgatagacattttgtggaaaatcaagagaagttcctggccgaagcaatagccgctatcaagagagctggtttttccattaatgagaagaaaactcggctgcagtttcgagacagtcggcaggaggtaacgggcttgattgtcaacaaaaagctgaacgttaatcacgcctatgtcaggaaaactagagcaatggcgcaccagctgtattccaccggggagtacctgatagatggagttcctggtacgatcaaacagctcgaggggaggttttcctttatcgaccatctggatcaccataataatatcctggacccacaggagattaagcacgatgcgtttcacctcaacggacgtgagcgacagtaccaggcttttatattctacaagtatttgtacgcccacaccgtcccagtgatcgtaacagaaggtaaaacagatatccggtatattaaggccgcactgaagtctctgtacaccaaatatccacggctcatacagaaggacgctgaagggaatttcatctacaactttagcttcttcaagcgcaccaagcggtggaaatacttcttcggcatttccctcgacggcgccgatgccatgaaaattttgtaccattatcatgctggcaatgggaagaagatcccagcttatcactcctactttcgtcagctgtctgggctggagcagcacaaccctgtgatccttttgtacgacaacgagtctaaaagcgaaaggcccctgaaaaagtttctcggagaaggagtgcacgcaactgccgaacagaaagcaactctcaagtcggacctccatataaggttaattcccgatagcaaactattccttgtaacaccccctctggtcggtagcaaagaggaatgtgaaatcgaagacttgttcagtgacgagctgctgagtcttaatctagatggcaaaaccttctgtcgcaaggacaagtttgatgattctaagtacttcggcaaggagatcttctcccagtacgtgtacgagaactaccaaactatcgacttttcaagattcattccccttcttgatgtgatagacaccattatcgccgaagccgagtcacccaagaaatga

SEQ ID NO: 8503 - RNA, 1701 nt, synthetic construct
  source 1..1701: mol_type = other RNA
atgaagaagttctgcgatattcaatcaaggaatgatcttgcagactgcctgggaatccctcacagaaaactgacccatatactctacggaaaaaagccagactcatattatactacgtttgagatccctaaacgcaatggcgatcctcggacgatttgcgctccctccggagacttgaagactctacaggtgaagctgacaaacctgctctggtcgtatcagaagtcaatttgggaggagaaagggatcaaaccaaatatctcccatgccttcgagaaggagaaaagtataatcactaacgcgaagattcatcggaacaagagatttgtcctgaaccttgacttagaaaatttcttcgactcctttcacttcggcagggttcagggttacttcgagaaaaactgtaacttcaaactgccacatgaagtggcagtgatccttgctcaacttacttgttaccagggaaggcttccccaaggcgctccgtccagtcccatcattaccaatctaatttgtcaggccatggatatctatctgttgcgcgttgcaaagaagtataaactggactacacccggtacgcggatgacctgacgttttctaccaaagaccgacatttcgtggagaagcaggaaaaatttctggccgaagccatcgctgccattaagcgcgccggcttttctattaacgagaagaagacccgacttcagtttcgggatagtcgccaggaagtcaccggcttgatcgtaaataagaagttgaacgtaaaccacgcatatgtgaggaaaacacgcgcgatggctcaccagctgtactctactggcgagtatctaatcgatggagtgccaggcaccattagacagttagagggtaggtttagctttattgatcacctggaccattacaataacatcctggaccctcaggaaatcaaacacgacgccttccacttgaatgggcgtgagagacagtaccaagccttcatcttttacaagtacttgttcgccaatgataagcctttaatcgtaacagaaggcaaaaccgatatccgctacataaaggctgcccttaaaagcttatatgctcgataccccaggctcgtgcagattggagccgatgggaacttcacttacaatttcagtttctttcggaggacaaaacgttggaaatacttctttggtataagcctggatggggctgacgctatgaagttcctgtacagataccatgttggcaagaatcacgttccagaatatctcaaatatttcagacagctatcaggttgcgagcagcacaacccggtgatattgctctatgataacgaactggaacacaaaaaacctctcaagcagtttctcgccgaagaagtccatgcaaccgaagagcagaagacagagctgaagtctcacctccaactccacctgatacccgatagcaagttatacgtcgtcacaaaccccctcgtggactccaaggacgagtgtgaaattgaggatctgtttgcagaggaggtgcagaacattaatctggacgggaagactttttgcagaaaagactccttcgataatagcaagtttttcgggaaagacatcttcagcaagtatattctcgagaactataagcaaatcgactttagccggttcatacccctgctgaatgcaattgactctatcatcgcccagacacaaccaaccgagaaatga

SEQ ID NO: 8504 - RNA, 1701 nt, synthetic construct
  source 1..1701: mol_type = other RNA
atgaaaaagttctgtgacatccagtcacggaacgaactcgctgactatctcagcgttccaagaaacaagctgacccacatactgtacgtgaaaaagcccgattcttattatacgacctttgagatccctaaacgcaatggagagactagaaccatttgcgcgcctagcggggatttgaaaacactgcaggaaaagttgtcaaatatgctctggttataccaaaagtctatctgggaagagaaaggcatcaagccaaacattagtcacgcattcgagaaaggaaagagcatcataacaaacgcaaagatccatcgcaataagaggtttgttctgaatctggacctggagaactttttcgacagattccactttggtcgtgtccaaggctacttcgagaagaacaataacttcaaactacctcatgatgtagcagtcgtgctggcccagctaacgtgttatcagggcaggttaccacagggagccccatctagtcccatcatcaccaaccttatctgccagccccttgacacctatctcctcaaaattgccaagaagtataaacttgactacacaaggtatgctgatgacctcactttttcgaccaacgatcgacatttcgtcgagaatcaggagaattttctcgctgaagccaatgccgccatcaaacgtgcctccttctccatcaatgagaagaaaacccgattacaatttaaggatagccggcaggaagtgactgggctgattgtgaacaagaagcttaatgtgaatcacgcatatgtgcgcaagactcgcgctatggctcaccagctttattccacaggagaatatctgatagacggcgagcccgggaccattaagcagctggaaggcagattttcctttatcgaccagttggaccggtacaataacgtgctggaccctcaggaaattaaacatgatgcgttccacctgaatggaagggagcggcagtatcaagcattcatattctataagtacctctttgcccataacgctcctgtaatagtgacagaagggaagacagacattaggtacataaaagccgctctgaaaagtctgtacgccaagtacccacgcctgattcagaaagacgcggagggaaactttatctacaagttcagcttctttaggagaacaaaacggtggaaatatctgtttggaatttccctggatggcgcagacgcgatgaagatcctgtaccgttaccacgtcggcaacggtaaaaaaattccggcttacttaggctacttccggcagctcagtgggggggaacagcataagcccgttatcttattgtacgataacgagcctaactcggaccgcccccttaaaaaatttctaggcgaagatgtacaccccaccgccgaccaaaaggccgcactcaaagaaaatctccacatgagacttataccagacagcaaactgttcgtggtcacgccgcctctggttggtgataaggaggagtgtgagattgaggatttgtttgctgatgaactactgaagctgtcattggaaggtaagactttctgccgaaaggacaagtttgacaattcaaagtacttcgagaaagagatcttcagccagtacgtgtacgagaactatcagaagattgatttttccgggttcatccccctgttggatgtgatcgattctattattgcccaaactgagtctgcagaatga

SEQ ID NO: 8505 - RNA, 1704 nt, synthetic construct
  source 1..1704: mol_type = other RNA
atgaaaaagttttgtgacatccagtcccggaacgaactcgctgactacttgggaattccaaggagcaaactcacgcacattctatacgtcaaaaaaccggatagctattacacaacatttgaaatcccaaagcgcaacggcgacactagggcgatctgcgctccatctggcgatctcaaagtgctacaaaagaagctgtctaatatcttatgcctgttccagcgaaacatctgggatgaaaatgggatcaaacctaatatttctcacggttttgagaaggagaagagtatcattacgaatgccaaaattcaccgtaataaacgctacgtactgaatcttgatctggccagctttttcgatagctttcactttggtagaatccagggatacttcgagaagaacaaccacttcaaactacctcatgacgtagctgtgattcttgctcagctgacctgttatcaaggaagactgccccagggagctccttcctcacctataatcaccaacctgatatgtcagagcctggacgcacatctgctcaaagcagccaagaagtacaagctcgactacacacgttatgcagacgatctcaccttttcgaccaacgataggcactttgtcgagaaccagaagaagttcctcgccgaagcgattgtggccattacaaaggcaggcttttccattaacgagaagaagactagattgcagtttcgcgattcacgccaagaggtgactggcttgatcgtgaataagaagctgaatgtcaaccatagttatgtgaggaaaaccagagccatggctcaccagctgtattcaacgggtgaatatttgatagacggcgttcccgggagtattaaacaactggaaggcagattctcctttattgatcagctggaccattacaacaatattttggacccccaggaaattaagcatgacgcctttaacctgaatgggcgcgagaaacaataccaggccttcatcttctataagtaccttttcgccaatgacacacctgtaatagtgacagaggggaagaccgatatccgctatatcaaggctgctttgaaaaatctgtataacaagtatccacggctcatacagaaggatgccgaaggaaagttcgtttacaccttcagctttttccggcgaaccaagagatggaaatacttttttggcatctctttagacggagccgatgcgatgcggattctctacaggtatcatattggctctaacaaacggattccgccatatctctcctacttccagaaactttcagatcacgagcagcacaatcctgttatcctgttatacgataacgagagcaagagtgagcggcccctgaagaagttcttaggtgaggacgtgcatgcgaccgttgaccagaaagcagagctgaaagccaaacttcacatgaggctgataacttcgtccaagctgttcgtggtcactccccccctgatcggcgataaagaagagtgcgaaatcgaagatctattctccgacgaactgttgagcctcaatttagaggggaaaacattttgcagaaaggacaagttcgacagtaacaagtatttcgggaaagagatcttctctcagtatgtctacgagaattacaggactatcgatttctcccgatttataccacttcttgacgtgatcgacatgataatcgcacaagcagaatcacataaacagtga

SEQ ID NO: 8506 - RNA, 1692 nt, synthetic construct
  source 1..1692: mol_type = other RNA
atggagaagttctgcgatattcagacacgcaatgagttagcagactttctgaagatcccaaggtctaagctcacccatctcctctatatcgagaaacctgagaatgattataagaccttcgaaatcccaaagaaatccggaggcacccgtgaaatctgtgctccctcgggttccctcaagagtatacagagcaaactggcagaggccctttgggaataccagaaaagcatttgggccgaccgaaaaatccacccgaatatttcccatgcgttcgagaagggcaaatctataattacaaatgctcgcatccacagaaataagcggtttatcctaaatcttgatctagagaacttcttcaacacatttcactttgggcgggtacagggcttcttcgagaaaaattataacttcatgctgccacataaggcggcagtggccattgcccaaatcgcttgctacaaaggcgtattgcctcagggggctcctagctcccccattattactaatctgatctgccaaatactggacacccggctgttgaaaatcgctaaaaaatacaagctggactacacaaggtacgccgacgacctcacctttagtaccaacaatagatttttcatggacaatcacgagaaatttctaactgaggttgccctggagattcgaaaggctggtttcaccatcaaccacaaaaagacaagactgatttttagagactctaagcaggaagtgacaggtctgattgtgaacaaaaaaatctctgtggaccgcaactattataaggagactaaggcaatggcccataggctctatacccagggagagttcgagattaataagcaatcagccactatgcagcagttggaggggcgtttttcgtttattgaccagttggtccactataacaacaagctcgacggcggcacacataatcctcatacgctgaacgggcgcgaaaaggaatatcaagcattcctttactacaagtacttctttgcaaacgatcggcctcttatcgtcactgaaggcaaaacagatatttgttacctcaagtctgcactgaagaatctgcatgccaaataccccaatctcattgaaaaagattcaaagggaaagtacgtgttcaaaatatccttcttcaaacgctcagaaaggtggaggtacttttttggaataggacttgacggggccgataccatgaagaacctgtaccacttttttaccagcaaaaacgatgctcctgattatttaactcgcttcaggaagctgtgtaagtgcagtccgcgtaaaccagtgatcttgctgttcgataatgaaacggagagcagtcggcccttaaaaaagttcctctgcgaaaacaagataaacgatgaagacaaaaagcaacttgaacagaacctacacatcagattgatccccgagtccaaattgttcctcgccacgacccccctggtttctgacaagctggagtgtgagatcgaggatttatttccagacgaagttctgaaacacaaagtggatgggagaacttttacccggaaggataattatgacaagaagaagtactacggtaaggagatcttcagcacatatattgcggccaactatgaaaaaatagactttagccgattcgaagagctgctgaacactctttcaatgatcgtcaagtccgaagaggctccacaggattga

SEQ ID NO: 8507 - RNA, 1716 nt, synthetic construct
  source 1..1716: mol_type = other RNA
atgaagaatatcaacgaccttaaaactagatccgagcttgccgactacctagggatttcccgtagacgactcacatatattctcttcattaaaacacccgactcatactaccaaacctttgatattcctaaagccagtggtggtgttcgaaatatttgcgcccccacaggcatccttaagagactgcaaacaatcctggcgaaaagactgtggctgaaatatgtgtcagataaagtcaggaacaagatagaaaacaccaacattagccacgcctttgaaaaacgcaagtccattattacgaatgcccgaatccatcggaacaaacgctacgttattaacttggacttagagaacttctttgactcgttccattttggaagggtactcggatatttcgagaagaacaaaaacttcatgcttccccacgaagttgctgtggcgctcactcaactggtctgttatcagaaacacctgccacaaggcgctccgacctctccgatcatcactaatcttatctgccagatactggactttcgtcttctgaagattgccaagaaatacaagctcaattttacacgctatgcggatgatctgactttcagcaccaatgataagaagtttctggacctgaaagaacacttctttaaggaaataaccacagatatcctgagagctggctttagtgtgaataacaggaagacccggattgagtttaaggactcccgccaggaagtgacgggcctgacagtcaataagaaggtgtcaattaaacgcgagtatgtacagaatacccgggcaatggctcatcatctatatacccagggccacttcagtatcgatgggcaagacggtgacatcagccagctcgagggacgtttcagcttcataaaccagttggatgtgtacaataacaggctgttgctgcagttcctgaagatcgacaagaacaacgatctgaagctcaataaacgggaaaaggaataccagaaattcctcttctataagtacttttacgcaaacgaaaagcccttgattgtgactgagggtaagactgatgtgttgtatctcaaagctgccctgcagaatctctatgcacggtatcctgagttaatcgagaagaatgataaagggcatttttcctacaagatcgcctttttcaatcggtctgacaagtgggagcgcttgtttaaattcgttaaagatggggcagacagtatcaagaatctgtacttttgtttctcagaaaagaacaacagctccttccccaactacttcaaatactttctcaaactgtccaatgagaagcagaagaattctgtcatccttctgttcgacaacgagatcgactcagagaataaacctcttaagaaattcctaggcgtgattaaagccagtaatgacgctaaagataccctgagaaccagctatactttgcagttaatcccagatggaaaactgtttctagttactaacccattagcagtggataagaaggagtctgagatagaagatttatttccagtggaggtcttgaacataaagatcgaaggaaaggtcttttgcagggacgacaagtttgacaaaacgaagtactatggcaaacacattttctctaagtacgtatacaagaactacaagatgatcaacttcacagggttcatccctctgctggacgtcattaggagcataaccgtgaatctctctgatcagaaatga

SEQ ID NO: 8508 - RNA, 1755 nt, synthetic construct
  source 1..1755: mol_type = other RNA
atgaaagagttcagcgacgtgaattctcgcgaggaactcgcattggcactcagggtgccactgtcaaaactgacctacatactttatgttgctacagtggatagttgctacaggaccttcgagatccctaagaagaacggcggcacaagggttattaacgcgccacaacgggacttgatggacattcaaaaaaaccttgccaagttactgtatgaacatcggagtaacattaagaacttcaacaatgtgaagtgcaatattgctcacgccttcgagaaagaaaagggtataattaccaatgggagcgtccaccgaaacaagcgaatcgttctcaattatgacttggagaactttttcgattcttttcactttgggagagtcaggggatacttctggaaaaatcggtatttcaggatgaatctggatgtcgctacgatcatcgcccagttgacatgttatcagggcaaacttccgcagggagcccccacctcacctatcatcaccaatatgatctgtgagatattcgactttaagctcttacgccttgccaagaagtacaagctggactacacacggtacgctgatgatttaacgttttcaactaacaatgcagagttcgagaacagaattgacgaatttactgaagagctcagtaaagaaatcgacaatgcgggctttaaaatcaatcgcgacaagacaagactgcagttaagaaagtccaggcagactgtaaccggcctggtcgttaatgagaaagtgagcgtggatcaccgctattataaagctacacgcgccatggcccataacctctaccgggaaggaggttttgatatttgcggagaagagggcagcctggaacagctggagggccgattctccttcgtgaaccagattgacaagtacaataacaaactggagatgtctggtcgtatcggccgaagtggacgcgcttcaggaagggccggagcaggagctggcggtaatgaaaaaaagaaacacgatttccgtcatctgaacgggagagagagagagtatagaaagttcctgttctacaagtactttgtggctggggaacggccaatgattgtaacagaggggaaaaccgatattctgtacatcaaagcagctctcaagtccttttataaagaatatcccgagctaattgagaagaggaaggacgggactttcgattttaagatcgattttctgcgccgatccgaaaagctcaaatatttttttggactcaccgcagacggcgccgattccatgaaaaatctgtacaactacttctccgatatgaataacaacagcttcccgaactacgccgaatatttcggcgagaagatgaagtgtgcaccccttcatcctaccatactcatcttcgataacgaactggaggggaaggataaacctctaaagaagtttactgaccacattaagatgcaggaccgtaaagagtctctgaaaagggacctagccatgcacatcagcgggtcgctgtttattgcaactttgaaattgccagagggtaagaaagaagccgaagccgaagacatgttcgcccccagcgtcctggagcatgagatacgggggaagagattttcccgctctgacgagtacgacaaatctaagttctacggcaaaaatgatttcgcgcaatatgtgttctttaactacaaggagatcgatttttcaggttttcggcccatgctggacagtatccttatgataaagcggaagtatagatacatgtga

SEQ ID NO: 8509 - RNA, 1710 nt, synthetic construct
  source 1..1710: mol_type = other RNA
atgggaaactttaaggacatcgcaaccaggaatgagcttgcagactttctggggtttcctagacggaaactgagctacatcctttatgttaagagcactgatgcgtactaccagagttttactataccgaagaagagcggcggagaacgctgcatcaatgcccccaccggggacttgaaggacatacagaaaaagttggccatggccctgtggaagcatcaactcgatattcggactagtaggaatattagaacgaacatatcccatgctttcgagaaggggaagggcataatttccaacgctcaaattcatcgaaataagcggtatgtgttaaaccttgaccttaagaactttttctcatcatttcacttcgggcgggtgaaggggtatttcgagaaaaatcgcgattttgaacttccaaatcaagtggcaacagtaattgcccagctcacctgctttcagggctgtctgccccagggtgctccaacaagcccaatcatcacaaacatgatctgtcagattcttgacatgaaacttctgcggatcgccaagcgctataagttagattacagccgttacgccgacgatctgactttctccacaaataatagggcttttctgggcatgcagagtgaattctatgaagacgtggcaaaggaggtcaccagcgctggatttaccattaacgaaaagaaaaccagactgcagtacaaggattccaaacaggtcgttaccgggctgatcgtgaacaaaaaactcaacgttgaccgaatctacgcccggaaaaccaaagccatggcacacacactctatacaaatggcgagtacaccattgacggtaaaataggaactctgaagcaattggaaggtcgttttgcctttatcaaccagctggacaagtataacaacaaacgtgatggcaaaggtgagcataagggatggaacctcaattcaagggagaaacagtaccaaaaattcctgttctacaagtacttcttcagcaattcgaaaccaatcatcgtgaccgagggaaagacagatgtcgtgtacatgaaagcagcgctacggaagttacacgccgaatatccttgcttgattgagcgcaaacccgacggaacttttgagtaccatgtgtccttcttgaagagatcgaagcgcttgtcttactttctccacatttctcaggatggcgctgatacaatgaagaacctcttcaatttcttctcacctactagtgataacaaaagggtctatcctgactatctaacttatttcatgaaggctgggaactgctccgcgcagaacccggttatactggtgtttgataatgagctgagtagcaagaataagcccatcaaaaagttctctgaccacgtaaaactggacgatgtgaggagagagacgctcaaacgaattctccacctcaagctgattgataagggtaatctatatctgctgaccaaccccttagtggacggcaaggacgaatgtgaaatcgaggatctgttcgacgaaaacacgctgtctcaggtcatcgatggcagaacattctctagggacatcaagaaaggagatacgcagcactacggcaaagaaaccttttcaatgtttgtatcccgcaatcatatgaatattgacttctctcgattcagagagatgttgaatatcctaaacgagattatcgggctgtaccacaaacctgaggtctga

SEQ ID NO: 8510 - RNA, 1719 nt, synthetic construct
  source 1..1719: mol_type = other RNA
atgtcctttttccagcacatcgagacaaggaacgaactcgccgacttcctgggcataccaaggaaaaaactgacacacctgttgtatgtgcagcggatcgagaattgttaccacatgttcgaggtgcctaagagagctggtggcactagagtcatctgtgcaccaactggcgatcttaagtccttgcagagatcactggccaggaggctgcaggagcattgtctccgttgtcgggaagaacggggattgtccgtaaatatagcacatgcctttcagccccgacggggaatcataaccaatgcttacatacatcgaaacaagcgatatgtgttcaacaccgatttggaggacttctttggtagcatccatttcgggaggattagaggttatttccagaagaacgagtatttccagatgcctgccgaggtggccaccatccttgcccagctgtgctgctaccagggtaagttacctcaaggagcgccaacaagccctgtgctttcaaacttaatttgcgagattctcgattttcggattttgaagattgccaagcactacaagctagactatacccgttacgcggacgatttgacatttagcacgaatgataaaaccttctgctcacgctatgacgctttctatcagcaactgcagaaggagatcagacgtgccggtttcgccgtgaacgaaaagaaaacaaggcttgagtatcgtgacgcaaggcagactgtgaccgggctcgtggtcaatcgcaagttatccgttgaccgctgttactgccgcgaaacccgggccatggctcacaccttgtataaaaccggagaatacaggatccaaggcgcagcagggacaatggcgcaactggaaggccggtttgctttcatcaatcagctggacagatacgaaaataagcacagtctctctaaacctagagactttaagaccctcaacgggagggagaggcagtaccagaaatttctgttttaccggtatttctacgctaatactcaccccttgattgtgacagagggcaagactgatatactctatctgaaagccgccctgatgaatttacatagaagatacccggaactcgttgtccgccaaccagacggcacgttcgccttccaggtcaggtttcttcatcgcagcaagcgactgcggtattttttcgatctgagcctggatggggccgatgcaatgaaaaacctgtacgagctgtatactggcaaaggagcacactggaagacggcttactatccttactttctcgcactttctggcaagaaaccacagtggccggtaattctagtctacgacaacgaaatcaacgacaaaactagacccatctcgaagctgctacattcaattgggatgggggaggaaggcaaagaacgcctgaagaagagtttaaaagaacagctggttgcaggaggcaacctatacctcgtcacacaccccctcgcggaagggaaatctgtgagcgagatcgaggatctgtttgctgaacgaacccgagctgtggttatcgatggccgcgggctgagtcttcgggacgactacgacccccaggtaagttacggaaaagatgccttttctaagtacgtgctctcccactatcaaactattgatttcgtgcggtttattcccctgctggatagaatccgcgacgccgttgctgagacacaagcggctgagcaggagccagagggagtctga

SEQ ID NO: 8511 - RNA, 1863 nt, synthetic construct
  source 1..1863: mol_type = other RNA
atgaccgcatttaagaatattaaatcccggtctgaccttgccgattacctcaacatccctcctagcaagatcacttacattctcttcaagcgaggcgtagactcatattacaccgagtttgagatacccaaaaagtcgggcgatccacggagaatctgtgctccgactggcgatctgaagggagttcagagacagctagctgacgccctatgggagcatcagaagtccatatacgaggagctgtggatcaaacccaacatctcacacgctttcgaggagggtaagagtatcatcactaacgcaaagatacatcgaaataaaagggttgttgtgaatgttgacctcaaggactttttcgattccattcacatcgggagagtgtgcgggttctttgagaaaaacaagtatttcaacctgccacacgaagtcgccgtaaccatagctcaactggcctgctatcagggaaagttattgcagggagcacctaccagtcccatcatcactaatttgatctgccaggtgcttgacatgcatctgctctctctcgcgaagcgttacaaactctactacactagatatgctgacgatatgacattctccaccaacgatcggagcatcttagagcggtgggattcattctacgaggagctggataagaaagtgaaaaaagccggctttagcattaatgaaaagaaaacccgcattacctatagagattcaaaacagatagtcacgggacttgtagtgaataaaaagatatctgtcgatcacagttactgtcgcaaagtccgtgccatggcccactccctgtataccaacgggtcttaccaagccgatggtgtggaaggcacagccagacagttagaaggcaggttcgctttcattgaccagatcgaaaagtacaacaacacttgtgacagcaccgggaagcacgatgcatttgttttgaatgggagagaaaagcagtatcagcagtttctgttttaccgctatttcttcgatgtcgacaaaccactgattgtgacagaggggaagacggacgtgcgctatatcaaagccgcgttgaggaatttatacacagagtacccagagctaattgaaaaggacgcaaaggggaagttcatctacaaggtgaatctgtttaagaggtccaagcgattcaagtatcttttcgtgctagcgctggatggggccgactcactgacatacctgtataatcactttgtcagtacaggcaaagataataggattaactacttggactacttcctcaaaatcacacaaagggtgcctcaacacccggtgatcttcgtatatgataacgagatcaccaacagcaaaaaaccactctataagtttgccaaccatgccaagcttgataacaatcagcgagctctcctgggtacggaactgtttttgcggttaaccccccgtggtaacttgtttctcttgactaaccctctggtggaaggaaagaatgagagtgagattgaacacatgttcaccgaagagacacggggagtcgaactgggcggaaaaaaactttccctggaaagcaagtttgacaacgctaagttctttggaaaggaccatttctctaactatgtgctggagaattatgcaaaaattgacttttccggctttcgcccctttctgaatactatcagaacggtgctccaggaatacgaacgctctattgctaaagagcaaacaacacctatgcgcacaaagattctcataggtgtttgcttcagctgccagcccctgccacattcgaaacaaaggaaagacagcgcagaaaattgtgacgagaagactaaaaacgcagagattgcgggcttcctgcggaggaatctgctttga

SEQ ID NO: 8512 - RNA, 1698 nt, synthetic construct
  source 1..1698: mol_type = other RNA
atgaccttcgaatacgtttgtactagaaatgaccttgccgacctcctggaaattccccacggaaagctgacacatgtgctgtatgtcgccaaggtagacagcttctacaaaatcttcgagatccctaagaaaagtggggggacacggaaaatctgcgcccccaccggtgacctcaagcagatccaggagaaattgtatagtatcctgctgcaccaccaacaattcctgcgtaaacagaataacatcaggacaaacatatctcatgcatttgagaagggaaagagtattatcactaacggtgaggtgcacagaaacaagcgcatagttgtaaacattgatctgcaggactttttcgactctttccattttgggagggtgtgcggattctttgagaaaaatagagacttcgccctcccgcatgagctggctatcgtcatggcgcagttaacttgttatcagggaaaactgccacagggcgctccaacaagtccaattatcactaactatatctgtcagacctttgatatgaggattattcgcatcgccaaaaagtaccacctggactatactagatatgccgatgatttgagcttttctaccaacgacaaaaagtttatagagcagtgggagcctttctataatgaacttacacacgaagtagagagggccggtttcaaggtgaataccaagaagacctcagttcagtatcgggattcccgtcagactgtgaccggactggtgataaataaaaaactctctgtggatcacagatactataaacaagttcgggccatggcagatagcctttacaagacggggtgttttgacaataacggggtggagggcaccgtgtctcagctcgaaggcaaatttgcttttattgaccagctggacaaatacaataatatcaaggacgtttcccaacagcactcggtgttttgcctaaatggccgagaaaaacagtaccagaaattcttgttctaccgctatttctttgctcatgagaagcctgtgatcgtcaccgaagggaagactgacataaagtacataaaggcggctctgaaaaacttatataccgaataccccgaacttatcgagaagacacctgaaggccactttgaattcaaggttagctttctgaaacggtcaaaacggtttaagtactttttccatatgtcacaggacggggccgacgccatgaagaatctctacaatttcttctccgataaaaaccccaaatacacgaactacttcaaggtcttttcaggctgcagtgataagaacctatgtaacccagtcattctgattttcgataacgaactttccaacaagtgtaagcccctgcattccttcgtgtcccacataggactatcttccagcgataaagatcgcctcaaggaggacttgtgcatgaaaatcattgacgagggcaatttgttccttgtcacaaatcaactggtcgatggcaaggctgagtgcgaaatcgaggatttattcgacgataccactaggaatcatgtgattgctggtaaaacgttcagctcaaacgataaggcagataaggagaagcactatggcaaagaaatctttgcaaatttcatccaaagcaactacaagagcattaactttgacaactttcgaccgatgctcaataacattgtaaaggtgattgcagagtttgcaggaacagagggctga

SEQ ID NO: 8513 - RNA, 1563 nt, synthetic construct
  source 1..1563: mol_type = other RNA
atgctcaagaaagacggcaacattcggaccataaaagctccctctagtgagttgaagagcatacagaagaaactggccagcaaactggagtcatgccaaaggaatatttggaccggaataggagttaactcaaatatagcacacggattcaagaaaggcaaatccattgttacaaatgctcagattcatcggaacaagaagtatatccttaatatcgatctgcaagacttctttgattcatttcactttgggcgtgtgcgcggttttttcgaaaaaaatcgcaactttgccctgcctatcgaagtggctactgtagtggcccaattgacatgtttcgagggatgcctgccacagggagcaccaacttctcccatcataaccaatcttatctgccagattctagacaaccgactgctaaagttggccaaacggtataagctcgattacactaggtacgccgacgatctgacatttagtactaatgataaggcctttgtggaacgcaaagacgagtttctttgcgccattcagaaggaaatcgaacgagccggcttcaagatcaacgagaaaaaaaccagactcgtttataaggactctcagcagaaggtaacaggtttggtggtcaatcagaaagtgaatgtcgcgcaggattactatagaaaaaccaaggctatggcacatagcctgtataaaaagggtgaattcacgattgatggccaggcgggcactatcgaacaactagaagggaggttctccttcatcaaccagctcaactgttacaataatcaacacgatggagagaaacatgaatttggtctgctcagcggaagagagcgcgagtttaagcgcttcttgttctacaaattcttctatggcaacgacatccccatcctggtgactgagggcaaaacagatgtgagatatttaaaagcggctctgaagagcttatacaatgagtaccctaatctgatcaccaagtctaaagacggcaagttcagatttaagttttcgttcatgaagcggaccaagcgtcttaggtactttcttggcgtgcaggctgacggggcagatacgattcagaacatttacaagtactttgtcggcggcaaagggagagaatccaagaattatcctaactacttcgcctattttctccgtatggggacgcagccaaaggcaccagtaatccttctcttcgataatgaactggaatccaagaggccgctccggaaattcctgaacgaacagaagttctcagagacacagatcgaccagctgaggaacgagctgtgtctcaaagtctttaatagtgggaagttatacctgctcaccaaccctctcgttctggagaaaactgaatgcgagattgaggatttattttctgaggagacactgaacttgttgataggggggaaaaacttatgtcttaaggacaaatacgacaccgagaagtattacggtaaggagatcttcagtcaatatgtcctgaaccactttgagcaaattgacttcagcggattccgacccctgctagacaagctgtccctgattgtgcggcagtga

SEQ ID NO: 8514 - RNA, 1686 nt, synthetic construct
  source 1..1686: mol_type = other RNA
atggctcagttttgtgacattgcctctcgcaatgaactggctgatttccttggtataccccggcagagaatgacctatgtgctgtatgtgaagaaggttgagagttattacaccagtttcgagatcccaaaaaagaatggagaaactcggactatcaaggcgccaacaggtgaactcaagttcatccaaaagaaactcgtctctaagctagttcaataccagcgggaaatatggcggtctaaagggatgaaacctaacatatcacacggctttgaaaaaggaaagtccatcgtgaccaatgcaaaaattcacaagaataagcgttacctgctgaacatagatctacaggacttttttgacagctttcatttcgggagagtccggggcttctttgagaagaacagagatttcgccctgcccttggaggtggccaccgtgttagcgcagctcacatgctttgaaggctgcttgcctcaaggcgcccccacaagcccgattctcaccaatctcatatgtcgcatcctagacaataggctgttaaagattgctaagcgctacaagctcgactacacccggtatgcagacgatctgactttcagtacaaatgataagactttcgctgggctcaaggatgaattcctttgtacaatccagaaggagattgaaagggctgggttcaagattaatgagaagaaaacgaggctcgcatgcaagaatagtcagcagaaagtcacaggtctaattgtaaaccagaaggtgaacgttgcccaagattactacagaaaaacgaagtccatggcccactcattatatacgaaaggcgagtttacaatcgatggccagacgggaaccctggagcagttggagggaagattttcctttatcaatcagctggactggtacaacaacaaactggataacgaaacccatgaattcggagtgctggcagggcgtgagcgggagtttaagaggttcttgttctacaaatacttctacggaaattccaccccgatcattgtcaccgagggaaaaactgatgtccgttatcttaaatctgccttgaagagcctgagcaaagagtatccaaacttgattaccaaatctaaagacgggaagtttgagttccgagttactttcctgaagcgaacaaagcgattgcagtacttcctgggtattaggctcgacggcgccgatacaatccagaacatctataggtatttcatgggtggcaaagggagagaaagcaagcgctatcctaattacttctcgtattttctgcgaatgggcgccaaacctaagaaacccgtgatcttactgtttgataacgaactggagtccaaaaggcctctcagaaagtttctgaccgagcagaagttatcagaagcacagatcgaggatcttcgctcaaagctttaccttaaaattctcgacaatggcaaactgtatcttcttactaaccccctgatttctggagagaaagaatgcgagatcgagtacctcttcagcgaagaaacaaggaacctgaagattgaggggaaatccctctgtctgaaggacaagttcgacactgagaagtactatggcaaagagatctttagccagtacgtgtcggctaactttgaacaaatcgacttttccggtttccgcccactgctggacaaattggacctgatagtacagcaatga

SEQ ID NO: 8515 - RNA, 1686 nt, synthetic construct
  source 1..1686: mol_type = other RNA
atggcgaagttttgtgacattaccagtcggaatgatctcgccgactttctggaaataccacgcaaggttctaacctacgtcctttacgttaaaaagaccgagaatttctacgctagcttcgaaatcccgaagaagaacgggggcacccgaacaattattgcccctagtggcgagctgaagtctatccagaaaaaactggcccgagagttagagagatatcagcaagacatatgggcctcaaagggcatcaagcctaatttatctcacggcttccagaaaaagaagtccatcgtgacaaatgctagaatccaccggaataaaaagtacgtcctgaacattgacctgcaagattttttcgattcctttcatttcggacgggttagaggattcttccataagaataaagactttgctctccccattgaagtggcaaccgtgctcgcgcagctgacctgctttgaaggacggctcccacagggtgcaccaacgagccctgtcgtcaccaacctgttgtgccagatcctcgataaccgtctgctggggatcgctaaaaagtacaagctggattacacccgctacgcagacgatctgacatttagcactaatgacaagatgttcgtggaacacaaagacgagttcttgaggacaattcagaaagagatcgagcacgccggattcaaagtgaatgaaaacaaaacccggctagcctataaggatagccagcaaaaggtgacaggactggtagtgaacgagaaagttaacgtagcccaagaatattatcgccgtacaaaatccatggcccattccctgtacaaaactggggagtttacaattgacggggaggtgggcactcttcagcagcttgagggacgattctcgtttatcaaccagcttacgtggcataacaacagacaggatggcaaggaacactcttttgggactttgagcgggagagagcgcgagtttaagaggttcctgttctacaaattcttctacggaaatgacatacctatcattgtgactgaagggaaaaccgatgtaagatatctaaaggcagctttaaaggccctgcacaaagattatccagacctcattgaaaagaataaggacggcaagtttgaattcaagatcgtcttcttcaagaggacagaaaggttacgttattttttggggattcagttggatggcgctgacgcaatgcaatctgtgtacaaatattttgtcggcggcaaaggtagagagtccaaaaactaccctaactatttcgcgtattttcagaggatgggagcccagcccaagaagtctactatcctgctttttgacaatgagacaaaaagtaagcgcccgctcggcaaactcctgactgagcagaagttcactgaggaacaaataaggaaactgaaacaggaactacatttgaaagtgctcgacaaggggaatctgtacttgcttacgaaccccctggtgcccggcgaagaggagtgtgagattgaatacctgtttagcgaggagacaaggtcaactctgatcgacggtaagagtctgtgcctcaaggataagtatgataccgagaaatactatggtaaggaaatcttctcacaacacatcaccgatcactttgagcagatagatttctccggttttcggcccttacttgacgctctcacgtcaattgttcgccagtga

SEQ ID NO: 8516 - RNA, 1683 nt, synthetic construct
  source 1..1683: mol_type = other RNA
atgaacaggttctataatattaagaatcgccgggagctggcttcttttctaggaatacctttgaaaaagctcacttacatcttgtacaagaaaggcgtggactattactatgagacattcgaagtgcccaagcgcaattcaggcgcccggataatcaacgcccccagtggagatctgaaaacgttgcagaagaaactgtccaagattctctacgaacatcagattatccacatacagaatcacaagatcaagaacaagatttcacatggctttgaaaaagagaaggggattattactaacgccgagattcatcggaataaacgctttgtcatgaatgtggacatcaaagacttctttgaatcatttcacttcggccgtgtcaaaggttttttcaacaagtcgaaagcgtttaacatgagcgaggaggtggcaattatcattgcacagatcacctgcttcaatggaaaattgccacagggggcacctaccagccctataatcaccaacctgatttgcaatatcctcgatatgaggatactgtccatctgcaaggaatataaactggattacagtagatacgccgacgacctgactttttctaccaatgacaagcacttcattaagaataagaacggtttttacgacaacctgaagagagagatccaagggtttggtcttctgataaatgagaagaagactcggatagagtataaagactctaggcaagtcgtgaccggactgaccgtaaacaaaaagatctctgtcaagagagagtattacaagaatactcgtgctatggctgataaactttatcgaacgggagaattcacaatcggggagaaagccggtacaattaggcaattggaaggcattttctccttcatcaaccagattgactatttcaataacaagaaggacaacaacaagaaacacaacgtgaacaatcttaattctagggaaagagaataccagaaatttctattctaccggtattttctctccaatagcaaaccacttatcgtgacagaaggcaagaccgatgttatgtatattaaagcggctctgaaaaagcactataaagagtaccccaacttaattgaaaagcatcgagatgagtttgagtttaagatcagtttcctgaatcgaaccaaacgcttaagattcctcatgggcatccagatcgatggagctgacacattccttaacatctataacttctacacagggaagaacaacttcaataactacttcaagtacttcaacgacaagtataagataacgccaagtaatcctgtgattctcatctttgacaatgagcagaaagaaaagaataagcccctgtacaaattcaagaaagccgttaaaatgaacactatcgatctcagcagcgagataatcgcaaatctgtttctgctgacagttccgctgtgtaataacaaagaggaatgtgaaattgaggacctgtttgatgagaaagccttgaaccataaaattggcgggaaaaagtttagccgcaaaaacgaaaacaataagaagtattacggcaaagcagacttcgccaagtatatctacaagaactacaaggatatcgatttttccaatttcaagctcatgctcgatgagttaaaccttgtcgtgaataaccacaataataactcaagcctatccaccgtaggagtttga

SEQ ID NO: 8517 - RNA, 1689 nt, synthetic construct
  source 1..1689: mol_type = other RNA
atgaagaatctgagtgaggttagcacaaggaatgaactcgctgactttttggggatacccatcaaaaagctgactcacattctctatgtgaaaaagccagacacgttttataagcagtttgagattcccaaaaagagtggagagccacgcattataaacgcccctacgggcgccctgaaaagcatccagaagagactattattcgctattgagaaaaccatttgcgatgggtcatctaacaaatcaaacatttctcacgcatttgagaagaacaagagtatcatcactaatgcgaagatacatcggaataagaaaattgtgatcaacttcgacctgaatgacttctttggaagtttccatttcggtagggtatgcggattcttccaaaagaaccgatgttttaacctgccatatgaagtagcggtggccatcacccagcttgtctgctttaatggcaccctgccgcaaggtgcacccacgtctccaatcatcaccaatctgatctcacagattatggatgtcaacctgctgaagctggccaaaaagtataaactcgactttactcgctacgccgatgatttgaccttttcaactaacgacaagaagtttctggagaagtacgacgaattttacgatcagctgtccagaaccatatccttcctgggattcgaaatcaatgagacaaaaacacggctacagttctgtgattctcaccagaccgtcacggggcttactgtgaataaaaagatccaggttccaagaaactactataaaaagactcgcgctatggcacactctctctacaagtccgggagctatacaattgacggcgaagagggcacaattaatcagctcgagggcagattctcctttattgaccaactgaccaagcataacaacaaaattgatggacagaagcaccgactcggaacattttgcgcccgggagacagactatcagaagttcctgttttacaagtatttctttgccgcggagaagcctttgctggtcactgaaggtcagactgatatcacttaccttaaagcagccttaaagaatctgtatctcgaatacccttcactgatttccaaaaaagaggatggcacctttgagttcaaaatcagcttcttgaatcgtaccgacaggttaagctactttctgggattttctaaggacggcgctgatgctatggggtgtctctataacttcttcatcaaaagtaagtccaaggaacacccgaattattacgagtacttcctcaagacaagcgggtccaaagctcactatcctgctatattcgtgtttgacaatgagctggaaagcaaagggaaacccttgaaaaagtttttcgacaactacgtcaaggacgaagaaaccaaaaaagagatcaagacacaattgtacgttcacctgataaagagcgcaaacatctatcttgtgaccaaccccattcttgagtcgagcagtaaggaggccgaaattgagcatcttttctcaaaggaagtgctagaaacaaaaatagatggcaagcctttaagcctttctggtgactacgataaatccaagtactacggcaaagtggccttctccaaatacatcatgaacaactacaagtctatcgatttctcgaatttcaggatcatcttggataacattgacaaaatcctcaaggagtataatgaacattga

SEQ ID NO: 8518 - RNA, 1701 nt, synthetic construct
  source 1..1701: mol_type = other RNA
atgatttcatttagcgagattaaaagccgcaacgactttgccgatgcactgcagatccctcgaagtgtactcactcacgtactgtatatcgctaaaccagagtcattctatgagtctttcaccatacccaaaaagaacggtgaagataggatcatcatggctcccaagggcacactgaagtccattcagaccaagttaagtaagcagttagtcgaatacagagcctcgatctcacaaaaggggcaggagaagagcaacataagtcatggattcgaacgtgaaaagtctattattacgaacgcccagatccacaggaacaaacggtatgtgataaattacgacctgaaggacttcttcgattcttttcactttggccgggttgtgggattttttgagaagaacaagcatttcctgttgccgtatgaagtggccgttattatcgcgcagctgacatgctataatgggagactcccacaaggagctcctacctctccagtgattaccaacttaatttgcgagattcttgattaccgtgttctcaaaatagcgaagaggtataaacttgattacactagatacgcagacgatctcaccttctcaactaattacagccgatttctcgaagttttcgactcttttgccaaggagctgctccaggagatatctaattccggttttaccatcaatcagtccaaaaccaggctcttgtatcgagactcaaggcaggaggtgacgggtctagtggtcaataaaaaaattggcgtcaatcgggagtacgtgaagagtacacgcgctatggcccaggctctgtatagcacaggggaatttactatcaacgggatcccaggtactatcaagcaactggaagggagatttggctttattgaccagctcgatcactataataacgtcatcgacgacgccaaacatgatgcctacagtcttaatgggcgcgagaagcaattccaggaatttttgttcttcaagacgttcttcttcaatgagtaccctctggtaatcaccgaaggaaagacagatatccgttaccttaaggcagcgctgaaaagcctgcaccagaagtacccagaacttatatgtaaagaagacgatggcacattccggttcaaaatcagcttctttagaagatctaagcgctggaagtatttcttcggcatttcaaaggatggagccgatgcaatgaaattgctctacaggttctttaccgggcagaaaggtgtgaagaattattaccggctgttcgctgagaagtataaagcagtgcaacggaaccccgtgattatgctgtttgacaacgagatggagagtaaacgccctctgaacaagtttatcagcgaggaggtcaaaattccctcctcggaacagcagttgtttaaggagcaactgtactatcacctaatacccggcagcaagacttacctgatgactcatcctcttccgcccggcaaaacagaggccgaaatcgaagacctattcccaaccgaagttctgggcgtcaaactggacgggaaatccttttccactaaggataaatttgacacatccaagttctacggaaaggatattttctcttcctacgtgtatgagcattggaaatccatcgactttagcggcttcatccctttgctggacaaaatcaacatgttagtgcagaatgagaagaaacccggactcaacacctga

SEQ ID NO: 8519 - RNA, 1695 nt, synthetic construct
  source 1..1695: mol_type = other RNA
atgataaagtttaccaacatccaagacaaaaaccagctggccaatgtgctcaacatcaagcccaaatatctgaactatattctgtacgtcaagaaagtggacaattattacaccgagtttgaaattcctaagaaaaatggagagatgcgcaaaatccacgccccaacgggaatactgaaatctatacagaagaatctcagtattctgttgtctgaataccagtcatacccgtattccaagaattacaaggggaataaaatcagccatgcatttgagaaaaacaagtccatcattacgaacgctaaaatccaccggaacaagaaatatatactgaacatcgacttggaatgttttttcgactcttttcactttggtagagtgaaaggcttttttgagaaaaacaacttcttcaagctcccttctgaaattgcacttatcttggcgcagatgtgctgttataaaggctgcctgccacaaggagctcccacgtcacccattatcaccaatctcatttgtaagatcttggatattcggctgcttaaaatcagcaaaagcttcaaactggattatacacgatacgccgacgatctgaccttctctacaaatgataatgcctttctcgaaaacaagacaaagttcatgaaactgctgacaaaggagattgagcacgccggctttaaattaaatacaactaagactcgcctgcagtataataccagtcgtcaggaagtaacggggctggtggtcaataagaagatcaacgttaagaagagctattacaagacaacccgagctatggcgaatactctatataggaccgggcagttcactatcgacaataacagtggcacaattaatcagttagaagggcggttttcctttattaaccagatcgacaagtacaataactccctcatcaaaaagaaggatttctttaacctgaactctcgcgaaaaagagtaccaaaagttcctattctacaagtacttcttctcaaacgaaaaacctctcatcgtgacagagggcaagaccgatatcgtttacataaagtcagctctcaaaaacttgtacaccgagtatcctaatctgatccttaaaaaagatgacggtagctttgagtttaagatttccttccttaagagaactaagaggctcaactacttctttaattttgcacaagatggtgccgatagtatgaaaaacctgtataacttcttcgacaagaataagtccaataatagctatccgcattatagcaactacttcagcaaaatatcgaataggaaacccaatttcccaatcatattcatcttcgacaacgagttaaacactaagaacaaacccttacataagttcatcaactatatcaacctctgcgagtcaaaatccctaaaattccaggagtactacaaagtcaatctggtggacaatctttacctgcttacaaatcagttgattcagcacaagagtgaatgcgaaattgaggacttatttgataatcaaaccctcactcatatcatttcgggcaagacttttaatagaaacctgaagaagcttgatggaaccaatcactattccaaagagattttcagcaagtacatttctgagaattacaagaccataaacttcgacaactttaagccactgctgaacaacttgaacgaaattctaaaggactacatatccgatatctga

SEQ ID NO: 8520 - RNA, 1719 nt, synthetic construct
  source 1..1719: mol_type = other RNA
atgttatttaagaaggaagattgcattctctcagctgaactgcagaaatttgcgaacttctttaacatcaaggcaaacattatcagctatgttctctatgtgaagagaacggagaattgttatacagcctttgaaattctgaagaagtacaagaaggaaacaaggataatacacgcccctaataaaactctgaagaatatccaacgcaatatcgccaaaaaattgcacgaattacagcaagacatagactctaagaacaacattaagaccaatatcagccacggtttcgagaagaacaaaaatattgccactaacgctatgattcacaaaaacaagagatacatcctcaatatcgacctggagaattttttcaactcctttcattttgggcgagtaatggggtatttcaacaaaaaccggtatttcaacttcgacaagaagatgtctattataatcgctcagctgtgttgcctgaatggcgctctaccccagggagcaccaactagtcctatcatcagcaatctcatatgcaggatcttcgactacagaattctgaaaatcaccaagaaatacaagctgaattacacacggtatgcagacgaccttacttttagcacaaacgacaactttttcttacaccactacgataacttcttaaaggatattagctccgagattcagaaatcgggctttaaaatcaataagaacaagacacgactccaatacaaaaattcaaaacaagtcgtcaccggcttggtggtgaacaaattcattaacaccgaaaagatgtactacaaaaccacccgcgctatggcctataatctgtataagtctgggtcctttaccattaatgacaaggaaggagaacttaatcagttgcagggcagatttaacttcatcctgaacatcaagagttattcacctgtaatccagaaagataccaagaacaatatactgcatagcaaagagaaggagtatcagaagtttctcttctacatcttcttctacattaacaccaaacctctgctcatcaccgaaggtaagacggatattttgtacattaaagcagcccttaagaatatgtacaaaaattatccccggttcataatcaaaagtgacaacaaattcgactacaaaatcgccttctttaaacgtagttctaaaaacatcgaggagtacttgaacattaagaaagatgggggccatgaactcgtgaagatcatcatttactacttcaacaagaagtacttcgacttcttttacaacctgaacaagaacataacgccaaataaccccgttattatacttgtggataatgagaaagcgaaggataaaccactggagactctgaaaaagaatataccgcaggcttaccggaatgatctaaactttaaagagaagccctggtttcgcattggagacactaatctgtatatcctgacctacaggtcaaatccaaatctgaaagatatagaagtcgaggacctcctcgaggagtctttcattaaagagctaaagatccagaatagggtgtttgacaaaacagcaaataaggattccgagctttacttttccaagaatacattggccaattatgtgtacaagaattacctgaagatcaacttcaacaacttcaagtttatcttcgatgacatccaagatattatcaacgatcacaacaaccattatccgattaatcagacactgcatactctttga

SEQ ID NO: 8521 - RNA, 1647 nt, synthetic construct
  source 1..1647: mol_type = other RNA
atgtctcttggcaaaatcaaaaatcgtaatgaactggcgaggctgctggaggtgccgactaagttcctcacttacatcctctacattaagaaaacagacaacctctactcccggattaacattctgaagaaaaatggggatgagcgaataatatatgcccccgagaaggagctgaagagcatccaaaaaaagttagcctctattctgtatcaggagcggaaggcttatttcgaaggtcgggggatcactcctaatatatcacatggctttgagcagaaaaagagcataatttccaatgcaagaatccactgtaataagcacgtaattttcaatttggacctggaagatttctttggttcattccattttggaagggtgaagggctactttgaaaaaaacaaccagttcaagttggattcccagatagctattttaattgcccaaatcgcatgttacaaaggatttcttccacagggggcccctacgagccccatcattacaaacatgatctgcagcatcctcgactatcgcctcctgaaactggccaagcagttcaaactggactataccaggtatgcagacgatctgacattttctaccaacgacaaaaaattcctggacaataaggacgtgttctacaaaaagataaaccgtgagattgagaaagcgggttttaaaatcaactgcaagaaaaccagactccaatttaaggactcccatcaagaagttacggggctaaccgtcaataagaaggtgaatgtaaagaggttctactacagacagactcgagctatggcccaccgcctgtataaaaccggcgagtttgaaatcgatgggaagcgaggtactgtggaccagctcgagggacgcttcagctttatgtatgaagtcgcatcatacggatctactaagaagaactattgctacaaggaatacaagaagtttatcttctacaagtacctttacatgaacgataagccagtggtgatcaccgaaggaaaaaccgatattatttacctaaaggctgcactcaaaaatttgtatgaggattatccttccttgattagcaagcagacagacggaacgttcaagttcaaaatcacattcttgaaccggaaaagtgagaggctaaagaaacttcttaatttgcagaaggacggcgctgatggcatccggaccttcattaacgagcactttctgtgtaagaatcccactgccaagtattttaagaacatagatgggccactgtctaagaatgctgtgatttgcatctttgacaatgagatcgaagatcaggataaacctctgagacacgtctggaacggctttaaaaaagattcaaagcgcaaagaggccctgaaaaataatcagaatacccattgggttgacaacgtttacattcttacaaaccccctcgtctcgggcaagaaaatctgcgaaatcgaagacctctttgatgaacagacattaaaccagcaaattatgggcaagaaattcgatagaagtgaggagaaccacaaacatttcttctccatgttcatcaacaagaactacaacgacatagattttacccaattcaaaccaatgctggacaatctggacaagatcatctatgactatgggaacagtatggataagtgtcagtga

SEQ ID NO: 8522 - RNA, 1707 nt, synthetic construct
  source 1..1707: mol_type = other RNA
atgggaaaactcaatgagataaataatcggtctgactttgccaatctcattaatgtgccaattcagaaactcaccttcattctgtacaaaaagaaggtggagaatctctattcgtcatttagcatcccaaaaaagtctggggggtatcggcgcatctattccccacacgaggacctgctcgatatccagaagaaaatcgcacgactgcttgcgacccagaaaaacgtcttccaggaggaaaacaggattaaattgaacatctcccatggtttcgaaaagaacaagagcattatcactaatgccaaaattcaccgcaacaagaggtttgtctttaatgttgacctggaaaacttttttgagagctttcactttggcagagttaaaggctacttcgaaaagaacaaaaacttccagttgcctaccgaggtggctgtgattctcgcacagctttgctgttatcaaggcgtcctcccacagggtgctcctacttctccaataattacgaacttgatctgtaacatcctggacctacgccttttaaaacttgccaagaaatataggctggattacacccgatacgctgatgatctcacattttccaccaatgatcgccattttctagacctaaagtcagcattttactacgagttgaacggagaaataaaaaaagccggattcaagctcaacgagaagaaatcaaactttcagtacaaagactctcggcaaatggtgactggcctggtcgtgaataagatgatcaacgtggacagaaacttctataaggaaacacgtgctatggctcaccgcctttaccaaacaggaagcttcacaatcgataacgaagaagctgatattaaacagttggagggccggttcgccttcatcaatcagattcagtggtataataaccgaatcgataacgagaagcataatttcaggtcactgaatacaaaggagaagcaataccaggccttacttttctataagtacttcttcgccaataacaagcccttaatcattaccgagggcaagacagacattaaatacctgaaatccgccttgaagaagtactataacgaatatcctgagctggttactaaagacgaaaagaataactacgacttcaagatcagttttctgcgtagaagcaaaaggctgcggtatttttttgacctgagtctggatggggccgacactctgaccgacttctacaagagatttatgtctaacagttaccccgagaagggggcaatcaactacctgatgcacttcaaaaaaatgagcgagaataaacccaagaatcccgtcatttggatttttgataacgaaatagcgaacaaggataagcctatctgtaaattcatcaatggagtaaagctaacagaatataagaaggaatgcctcaagtcttcccagcaaaccctgctgcatgacaacttatttctcttgactaatcctctgagtaacggcgcagaggagtgcgagatagaggatcttttttcggaagacgtgctgaaaaaggaaataaatgggaagacgttctgcagagataaaaaggtagacccggagaaatactatggtaaggagatcttcagcaatttcattgtgaatgagtatgaacggatcgatttcgagaatttcaagccgatgctggacaacctgacgctgatagttaggaattacagatccgattccgtgatcccctga

SEQ ID NO: 8523 - RNA, 1683 nt, synthetic construct
  source 1..1683: mol_type = other RNA
atgattaaactgaaaaacgtgaagaacaggaaagaatttgctgaattcatcggtgttccactccaaaagcttacctatgtcttatacatcgccaagatcgacaatctgtatacctcattccagattcccaagaggtctggcggcgtgagaactatcaacgccccacagaaagacctcctagatatgcagaagaaactggccaaactgttagctacccacaaatcaattgtacaggaagagaaccacattaagttgaatattagtcacggcttcgaaaagaatcgaagcattatcaccaacgccaagattcatcgaaacaagagattcgtgttcaatgtcgacatcgagaactttttcgattcctttcattttggcagggttaaggggtacttcgagaagaacaacaattttgagttaccttcagaagtagctacgataatagcccaattatgttgctataaaggagtgctgccgcagggagcacccactagcccaattattacgaacctgatctgcaatatactagacatccggcttcttaagctaggtaagaaacataacctggattattctcggtatgctgacgatctgactttttcaacgaatgacaggttgtttcttatcagcgagtctctcttctacgacgagctcactaaggagatcgaatctgcaggctttaaactgaatgagcagaagtcccgcctgcagttcaaagactcgcgtcaaaccgtgacaggactcgtcgtcaacgagaaaattaacgtcgatcgaaggtactataaggagactagagctatggccaacaaactgtacaagacaggtatctttgagatcaataatcaaagcgccaccatcaagcagttggagggccggctgaccttcataaacaacattcagcgttacaacaattctattgatgggaagaaacacgatccttggagtctgaatagtaaagaaaaacagtacagggcgtttttgttctataagtactttttcgcgaacgagaaacctttaatcgtgacagaagggaagaccgacgtgaagtaccttaaggctgccctgaaaaaatattgggagctgtatcccaatctgatcagtaaagattccaaaggagacttctcgttcaaagtttcctttctcaatcggaccaagagactgagttacttctttggtattaaccgcgacggagcggatgccttgaagaatctgtacaacttcttcacaagcagcagccaaaacaatccacctaattacctgtactacttcaagaagatatccaatcgcaatcccgcaaacccagtgattatgatttttgacaatgagctcgtgaacaagaaaaagcctttgtccaagtttgcaaatcactgcaaacttaatgaggattcccgcaacaatctacagacacagctctatatacggctgcaggataacctgtttctcatgacaaacccgctcgttgaagggaaggaagagtgtgaaatagaggatctgtttggggaggacgtactcaacactaagatctcaggaaaaatcttctctcgcgaaaaaaaagcagatcccaaggaacattatggcaaagagattttcagcaacttcatcacaaatgaatacgaaaagatcgacttcgagaattttaagcccatgttggacaatctttccagaatcgtggaaaactataagtga

SEQ ID NO: 8524 - RNA, 1683 nt, synthetic construct
  source 1..1683: mol_type = other RNA
atggagaatctgaaaaaggctaagaaccggaaagattttgctgaattgatcaatgtgcctttgcacaaactgacttatgtcctttataaggccaaagtcgagaacttatacacctcctttcaaatacctaagaggtctggaggggtgagaaccatacacgccccccaccaggatttaagagatatccagaaaaaactggccgacctcttggtcaagtacaaaaatataatccaggccaccaataacatgaaactgaacatctcgcatggcttcgagaagaacaagtcaatcattactaatgcacgaatccatcggaataaaaggtttgtctttaatgtggacctggaaaattttttcgagagcttccacttcggccgcgtgaaaggtttctttgaaaagaacgagcattttatgctcccaagcgaaatcgctgtgattatcgctcagatttgctgctataaccgaaaattgccccagggggcgccgacatctccagttattaccaacctgatttgtaacatcctggacatcaggatcctgaagctcgcaaaaaaatacaagctggattactctcgttatgcagacgacttgtccttctccactaatgacaaaaacttcctgaatagcaaggatgatttttataacgagctggtgaaggagattataaaggctggattccgggttaatgacaaaaagagtcggctgctttttaaagatagtcgccaagttgtgaccggacttgttgtgaacgagaagatcaacgtaaataggatgtactacaaggagacacgggccatggtgaactccctctacaccacgggctcttttgagattaactcaaagattgccaacatcaagcagctggaaggtagactgtcttttatcaaccatatcgagagatacaacaataacatcgacaagaacaatcacgacttcaggaaactgtcatcaaaggagaaacaatatcgcagcttcatcttctataaatacttcttcgcgaatgaaacaccagttgtgattactgaggggaagacagatatcaagtacctaaaggctgccctgaagaaacattataaggagtaccctgccctcgtattgaaggagtctgacggtacattttcctacaaggtcaccttcctcaggagaactaaacgattacagtacctcttcggactttttcgcgatggcgcacccgcacttaaaaacctctataacttcttcagtcctattagcaataaggatttccccaactatctggactatttcaagaagatttccaactccaatcccaaaaatccggtaatcatgatctttgacaatgaattagccaataagaccaagcccctggcaaatttcgccaaccactgcaagcttgatgaagggactcgtagtatactaaaagagaaataccaggtcaagctgcaggacaatctcttccttatgacaaatccactagtggaaaataaagccgagtgtgaaatagaagatctgtttcacgatgctgtcctcaaaacgattattgggggcaaaatatttagccgggaaaagaacgcggaccctaataagtactatggcaaagagattttcagcaactatattatgcgcaactacagcaacatcgacttttcaaactttaagccaatgctggaaaatttgaatgagattgtgggaagatacaagtga

SEQ ID NO: 8525 - RNA, 1689 nt, synthetic construct
  source 1..1689: mol_type = other RNA
atggtgaaaatcaatgaggtgaccaatcgcgatgagatcgcctacgccctgggaataccaaagaagaaactgacctatatcctgtacgtcaagcgtactgagaacctctattactcattcgagattcccaaaaaaaacgggggatttagacggatcaatgcacccgacaaagacctcagagatatccagaagagcttagctgatatcttggttaaataccagaaagccatttgggatcgcaagaatataaaaccatatatctcgcacgggtatgaaaaggataagggaatcatgaccaatgcagaagttcataagaataagcgctttgtgttcaacgtggacttgaaggacttcttcgattgttttcatttcggtagggtacggggcttttttgagaagaacaaagacttttgccttcctatcgaggtcgctacgattattgctcagttgacatgttataatggcgtgcttcctcaaggagctccgacttcacctgtgattaccaatctcatctgcaacattttcgacatgagggtcatgaaggttgccaagaaatacaaactgaattacacccgatacgtcgacgacctgacgtttagcactaatgataagaacttctttctcaacaaggagttattctttgagaatctaatcatcgaagtggaaaacgcaggattcaaaataaacgataagaaaactcgcctccagtttaaagattcacggcaaacagtgactgggttggtcgtgaacaaaaaaattaatgtggacagacgattctacaaggatacaagggccatgctggacagcctgtttagaaatggctcctttgaaattgacgggtatttaggcgacataaaacaactggagggccggttgtcttttattaatcagatcgagtggcacaacaatcttaaggataattccaagcacaacgtatataacctatcctctaaggagaaacagtaccaggccttcctgttctacaaatatttcttcagcaacaagaagccaatcctggtaacagagggtaagaccgacattaagtatattaaggcggcacttaagaagtattacctggattatcctgacctgattatcaagaatgagaagcaggagttcgaatttaaaatcacctttctgaagaggactaaacggctgcagtacttctttaacctatataaagacggcgctgatgccatgcttcacatatacaactacttctatgacgttaacaacgacaaattcaccaactacgtaaacttctttacagcccgatgcaaaaggaaacctgccaaccccacgatattcatattcgacaatgaaatcaacgtgaaaggtaaaccattgaaaaagttcgtcgacaatgtcagtcttaatgcgctgaaagtgtctaaactcctcgaagacaattatgttgacatcgctggctccgcatatattctcgttaatccgatcattgatcgttccaagaacgaaagtgaaatagaagatctgtttacacccgagctgctgagtcataagatcaacgggaagacattttgtagagataagtcattcaacagcaataagcattacagcaaagagattttcgcgaaccacgtggtgaagaattaccgctctatcgattttaccaactttaagcccatgttagataacctcgacaagattatcaagaactacaataagtga

SEQ ID NO: 8526 - RNA, 1683 nt, synthetic construct
  source 1..1683: mol_type = other RNA
atggagatcaacgaaattaagaatagaactgaactggcctggaaactgggcattcccaaaaagaaattgacctatgtgctctacattaagggaaccgatcagctgtacactaccttcgaaattccaaagaagagcggaggggttagaaaaatccatgcgccggagaaggatctcaaagagatccagaaaaacctggctaacatcctggttgactaccaaagtgagatgtggaaaaaaaggaagataaagccgaatatttcccatgggtttgagaagaataagggaatcatgacaaatgccgaggtgcacaaaaacaaacgctttgtcttcaatatcgatctggaaaactttttcgagtctttccactttggcagagtgcgggggttcttcgagaaaaacaagtactttgaattgcctctggaggttgctaccattattgcccagctaacctgttataagggcacattacctcagggttcaccatgctctcccataataaccaatctgatatgcaacatcttcgatatgagaatcatgaagctagccaaaaggtataggttaaattatagccggtacgtagatgatctcacattctccacaaatgacaagagatttatcgacgacaaagaatatttcttcgaagagctatctggcgaagttgagaaagcaggcttcaagattaatgagaacaagacaaacctgaggtataaggatagtaagcaaattgtcaccggacttgtcgtgaataaaaaaattaacgtggaccgttgctactataaaaaaactcgcgcaatgctgaattctctgtataagacggacacctttgaaatcgagggatccactgggactgtgaaacagatcgaaggtcgattaagttttatcaatcagatagactggcacaacaaccagattgatagcaacaagcacgggttcaggaaccttagcgcccgcgagaaacagtaccaggcttttctcttctacaagtacttcttcatcaacgacaagcccattgtgattactgagggcaagaccgatatcaagtatatacaagcagcattgaagaaatactaccttaactatcctgacctgatcgtgaagaatgacgagcataagttcgaatacaagatcatgttcttgaaacggaccaagcgtctgaattacttctttgggcttaatcaagatggcgcggacgccatgcagaacctgtatcactacttttacgactacaacaacaacataacggccaactatatgaagtactttaaggacatctcaaagaagctgccccgcaatccaactatctttcttttcgacaatgaattggcaggcggtgagaaaccagtacggaaatttgtgaaacatatctccctggataaagcccagtatacaaaactcgagaaagaggaatacgctcgattgcacgagtcagcttatctgctggtcaatcccctggtggattcaaaaaaggagtgtgagattgaagatctttttctccccgaaacgctcgaacacaagataaataataagaccttctgtcgggacaaaagcttcaagtctgacgtccattatggtaaggagattttttccaactacatcatgaagaactacaagaccatcaactttaagaactttcagcctatgctcaataatctcagtggaattatctcgagctataagaaatga

SEQ ID NO: 8527 - RNA, 1257 nt, synthetic construct
  source 1..1257: mol_type = other RNA
atgaaaacactgaaaaatatcgaagacaggaaggatttggccgattacctcaatatccctattaagagactgacgtatatcctctatataaagaggaccgagaacctgtactattcttttgaaattcccaagaagagcgggggcgtacgaaatattgatgcgcctaagagcgaactgaaagcccttcaaaaaaaactggcagctagcctgactaagtatcaggagattctccagaaaagcaaacggaaagcccccaacatcagtcatgggtttgagaaaggcaagtctattatatccaacgccaaaatccacaggaacaagaagatagtgtacaacctggacttggagaattttttcgaatcattccatttcggacgggttagaggcttcttcgaaaaaaacaaagactttgaactgagtactgaagtcgctactattatagcccagttgtcctgctttaacggcgcattgccccaaggagcaccaagttctccaatcatcacaaatttcatctgccgtataatggacatgagaatcctgaagcttgctaagaattacaagcttgactatacgagatatgccgatgacctgacattctctacgaatgacaagaaattcattgaccaaatcgactacttcctccacaagctgacaaaagagattgagaaagctggtttcaagctgaacaagaacaagaccaatctaaacttcaaagattcacggcagcttgtgaccgggttagtggtcaacaaaaagatcaacgttgatcgtcgatactataaagagacaagagcgatggcacaccgcttgtataagactggggagtttcagattgatgataagaatggaactctgaaccagctcgaaggccggttttccttcatcaatcaggtgcaaaggtataacaatgtcatcgattcatcgaagcacgactttaataacctaaatgcctttgagaagcagtaccaggcgtttctattctataagtacttctacgccaacaataagcctcatatcgtaaccgagggtaagaccgatataaactacattaaagctgccctcaaaaaacaccatctggagtttccaaacttaattgtgaaaaaagaggacggagaatttgatttccgcgtggcttttcttaaaaggaccaatcgcctcgcatacttcttaaatatcaagaaggacggtgccgacaccatgaagaacatctgtaagtactttctcattctgaagattatgcgctccccgatcatctga

SEQ ID NO: 8528 - RNA, 1701 nt, synthetic construct
  source 1..1701: mol_type = other RNA
atgcgtaaattctgcgacgccgagacacgtaatgagtttgccgactttctgaagatttctcgctctcaactgagctatgtgctgtttgtgaagcaccctcattcctactataaaactttcgagattccgaagaaatctggcggtacaagagtcatcaacgccccttatggggaattgaaatttatccaggagcagctgaacaaacggctggctgagtaccagaagtacatctgggaggtcaaaggtgtgcggcctgctattagtcacgggtttgaaaaggggaaaagcattatcactaatgctaagatccacaggaataagaggtacgtggtaaacttagatattgagaacttcttcgggaccttccatttcggcagaattgtgggctttttcgagaagaatcggtacttcaggctgccccacgaggtcgccatcacgatcgctcagataacctgctacaacggtaccctcccgcaaggtgcacccagttcccccattatcaccaattatatctgtcaagttctcgacagacgacttttgctcctggccagagaatatcggctagattacactagatacgccgacgatattacgttcagtactaacgacattcactttacagacaagtatagggcttttctggacgccgtcgacaccgagatacaacgagcgggctttcgaataaattccaaaaagacccgcctgctttttgagtcaagccgacaggaagttacaggcctcaccgtgaacaaaaagattaacagcaacaagcagtttcgcaaagaaaccagagcgatggcccaccacatgtatgctaatggcgaattctcgattgcaggcgactccggcactctggagcagctggagggaagatttagcttcattgatcagatcgagcattacaacaattcactgtcaggaaacaagaagaactaccataatctgagtgggtgcgaacgcgaataccagaaattcttgttctacaagtacttcttcgctaatcagcggccattaatcctaactgagggaaagaccgatgtgaggtatctaaaagcagcccttcggaatctttataacgaatatcccacacttatcaagaaaaatgaagacggctccttccaattcgaagtgtcattcttcaaaagatcgcggcgctgggagtactttttcgggttatctagcgacggggcagatacattgggtaacatctgccagtgttacttctccaaacgcaacactggactcccacaggtgtttgactatatgaagaacatatccggacgtcagccacagcacccagtcatatttctcctcgataatgaaatgaagagcgataagcctctcaagaaattcctgcagaagcagcggattacagacgagaaaaggcgccagcttgtagcacgactttacatccaaatcatggacggaaccaacctctttttggttacaaatcccctcgcgaatggggatgaagagagtgctatcgaaatactgttccctgaagaggtgctgttacatgaaatcgatggaaagaagttttctctggagaacgattatgacacggcaacctattatggaaaagagttgttttccaagtacatcgaggccaattacgaaagcctggatttttctggctttaggccactgctgaatgctctggcagccgccgttgagacatataggttgtcatgtaacacttga

SEQ ID NO: 8529 - RNA, 1143 nt, synthetic construct
  source 1..1143: mol_type = other RNA
atgaacccgtttagcttcgtgagatccagggccgacgtggcggatgcaataggtattcagctgaaatccttaacgtacatcctcttcgtcaaaaggatagaaaactgttactcaacgttcctcatcccaaaaaagtcaggaggcaaccgcactatctgtagtccttgcgatgagctgaagctgatccagaaaaaacttgctgatgcgctgtgggaacagcagcaggacatttggaagaaggccaacatccacccaaacctgtcccacggctttgaaaagggcaagtctatttttagtaacgccaagaaccatgtcaacaggagatttgtgctgaatattgaccttgagaatttcttcgacacattccactttgggcgtgtttgcggattctttgagaaaaatcggtacttcatgcttccccacgaggcagcagttacaatagcccagattgcctgttataatggaaaactaccccaaggttctccctgcagccctattattaccaacatgatatgtcaagcactagatattcggttgttgcaggtagctaaaaagtacaaactcgattatacccggtatgccgatgatctgaccttttcaaccaacaataggcatttcttagactgctatgaacgcttttacaaaagtttactgcgagagatccaacatatgggatttagcgtgaatgaaacaaagacccgcctgctgtatcggaactctagacaaacagtcaccggcctgactgtaaaccagaagatcaacatcaattgcgactactataaggctaccagggctatggctcactcgctctaccagaaaaatgagttccaaatcaatgggagccctgccacaatcaaccagctcgaggggagatttgccttcatcgaccagatcgaccactttaataataggaaggatactttcccacataatgctcggaatctcaatcgtcgagaacgagagtatcaggcattcctctactataagtacttcttcactaacgacagagtgctgatttttaccgaggggaaaactgatgtgctttatttgaaggctgccctgatggcgctttacacagagtaccccaatttggtgcagcgcgacgaagccggcaagttcctgtttaacgtttcctttttctga

SEQ ID NO: 8530 - RNA, 1647 nt, synthetic construct
  source 1..1647: mol_type = other RNA
atggagaactttaatgacctgaaaacaattaaggagttcgctaagttcatagataccccactgcaaaaaataacctatatcatccacaggcagaaaatcgaaaacttatacaatagcttcgagattcccaaaaaaaacggcggcattagaactatcgacgcaccacatgacgacttgaagcagatccagattaagatcaagaatatgctgtggaagcatcagaaaaagatctgggaaaagtacaatcagaacaagatacctaacataagccacggatttgaaagcggtaaaacctttataacgaatgccaccgtacacaagaacaaaagattcgttctgaatatcgatctcctggatttcttctattttttccatttcggccgggtcaagggcttctttgagaaaaacaagtactttaaggtgccctctgagattgcgattaccatcgccagactggcgtgttatcagcaaaggctgccccaagggtcaccatgctcacccattatcacaaacctcatctgtaatatcttggatatccgactgctcaaactgggcaagaaatacaaacttgattatacgcgctatgccgatgacttgactttcagcaccaataacaagatatttccaaagcattacgacgagtttctatttgaaatcacatccgtcattgagaaagccggattcaaaatcaatgacaagaaaacacggctgctgtataagaactcaaagcaggaggttactggactagtagtgaataagaaactgaatgtgtctaacgattactacaaaactacaagggctatggctaatacgctgtacaaggatggttcctttaccataaacggcgcagacgggacaatcaatcaattagagggtcgctttgcttttattgaccgtctttcaaagcacaataataaactcgacactaacaaacacgatttctggcatctgtcgggccgggagaaagagtaccagaagttcttatttttcaagtacttcctacagaacacaaagcctctgattatcaccgaggggaaaactgacatcgtgtatattaaatccgcactcaagaacttatacaagaattatcctcgactgattatcaaggaaggtaacaacttcaagttccatatttcctttctcaacaaaaccaagaggcttagttactttctgaatatcaacattgacgggggatctgttatgtccaatatctacaagaacatgtacaacaatgagaattctcttgccaagctcttcaaagacaagtataagaccgaggccaaaaataatgtgatcctgttagtcgataacgaacaaaaaaacgaaaacaaaccgttgagacagctcctcaatagtgccaagattaatctgaaccagaacatctctagccacattacacacaatctgtaccttctaactcatcagcttgtggacaataaaaaagaatgcgaaattgagaacctgtttaccaatgagactctcgggacaaagttgaacaataaaagtctcaacctgaaggaaaaagatttcaacaaggagatacactatggaaaggaaatattttcccagtatgtgcgcaagaattataagcacattgacttcagcaacttcaagcctctcttggatgaactgaacaacttgctttga

SEQ ID NO: 8531 - RNA, 1707 nt, synthetic construct
  source 1..1707: mol_type = other RNA
atgctatctcttaaagacgtgaaaacccggaaagatttcgcagtttttttgggcattgagctgaaactcttaacctatatattgtaccacatcaaggttgagaacttgtacacgactttcgaaattcccaaaaaaaatggtggaacccggattattaacgcaccagacaaaaagattctgaagaagatacagaaccgacttatgaataagctctacaactatcagaacaaaatcaagaaggacgagaatatcaaaatcaatatctctcacggattcgaaaaggggaaatctattataacgaatgcccgtattcatagaaataagcggttcgtgctgaatatcgacctgaaggacttttttgcctcctttcatttcgggcgggtggtgggtttcttcgaaaagaacatcaattttcgcattcctaaagacattgccattattatagcacagctgtgctgttataaggggtcactgccacaaggcgcacccacctcaccaatcatctccaacattatctgtaacatcttcgatatgcgaatactgaaactggcgaagaagtacaagctggattatactaggtacgctgatgatctgactttttccacaaataacaaggatttcctcaacatctacaatgagtttttgctttgcatatccaaggaagtggaaaaagccggcttttgcatcaatcaaaaaaagacacgcctgttctataaggatagtaggcaggaggtaaccgggcttgtggttaacaaaaagattagcatcaaccacagctattgcaagtatacacgcgccatggctaattccctatacaagaacaaatcgttcaatatcgacgggaaagacgcgacaatgaatcagctcgagggcagatttgcatttatcaatcaaatcgacaggtacaacaacatcatcaatatcaacgacaataagcacaatgatggcaaaaagagtaacgacaagaagttaaactgtagggaaaaagagtaccagaagttcattttctacaagtacttctttgctaaccagaagccgttaattatcacagagggtaaaactgatatcctgtatttgaagtctgccataaaatctctctatgcctattttcctgacctcatcaagaaaaactcaaacgatgaatttgagttcaaggtcagttttctcaggcggactaagcgtctcgaatattttcttaacttcgtgaaggatggagctgacagcatacaaaatatttaccgcttttttgtcggaagagaagtcgtgaactatagcgagtacttcaagaagataacaaaggatattgccgctaatcctgtgattctgattttcgacaacgaaattcccaataacaaaaaacccgtccgaaaattcatcaacttcacgaacaaaaaggaattcgagaacattctagagaaaaagctgtacgccaacattgtcgacaatctgtttatcataaccaatcagctcgtgagagataaaaaagaatgcgagatagaggatctgtttaatgacaagacccttaaccataagatcgatggcaaggttttttgtagagattccgctatctttgataagcagaagcactatagcaaagagattttctcgaagtacatcagcaaaaattacaaagacaaggacatcgacttcatcaatttcaaacctatgctgaaaaacatcgtagagattatcaccaattacaaatga

SEQ ID NO: 8532 - RNA, 1509 nt, synthetic construct
  source 1..1509: mol_type = other RNA
atgcaaaagtccatcgtcttcaagattctggaccatataagagagactgaaaaggacaagtacatcaagaccaatataagtcatgcctttgaaaagggtaagtcaatcattactaacgcgaaaatacaccggaataagaaattcatcctgaacatcgaccttaaggacttttttgactcatttcatttcggaagggtggcaggctattttgaaaagaatcgggagctcaaattttctagagaaacaagcatactcctggccaaaatcttttgttgtgatgggaaattaccacagggagcaccatctagtcctattatttccaacctcatctgcaacatctttgatatgaggatcctgaagttggctaagaaatttaagctggattatacccgttatgccgatgacctgtcgttcagcacaaacgataagaacttcataaagttctacgacgattttatgacgaagcttaacaatgaagtcaaaagagccggttttaacattaatgacaagaaaacccgcctcctctataaggactctagacaggaagtgacagggctcatcgtgaataaaaagatctctatcaagcgagaatacgtgaagtctactcgcgcaatggccaatacactgtacaataatggctcctttcacattaatgaaaaggaggcgaatctaaatcaattggagggaaggttcaattttattgatcagatcgatcggtataacaacaagatccaaaaaaccaacaagaatcaccggatgttaaactcacgtgagaaagagtaccagaaattcttgttctataagtacttctacgccaataacaaaccgctgatcctaaccgaggggaaaaccgacattctgtatataaaagccgctctcaaaaacctgtattccgagtatcccaaattgattgagaaggtaaacaacaagttcaacttcaaaatctccttcctggaaaggtcttcacgcctcgagtatttttttggcattaccaaagatggcgctgatagcctgattaatatctacaactactacagcggcgaggatgtgaaactgaacctgctgaattttttcgagaaaaaagagacgaagagttgcaaacctgccatccttctgtacgacaatgaacttcacaaaatcaatggtattgagaagcccctgagcaaatttattcgaaagagtgttaaggagaaccaggacaatttcaagaagattatacagaagaacctctacaacaaactccttgggaacttgtatttggcaactatccccattgtcgacacaaataaacaggaagctgaaatcgaggatttacttaataaggaggttctagaacacaagattaataaccgctcgttcagcaaggaccctaaaaatggaaacgagtatggcaagaacgaactgtccaaatacgtgttcaagaattacagcaacattaacttccagaatttcaaaaagctgctggacactttacagaacatcattgaagagtacgagataaaaatctga

SEQ ID NO: 8533 - RNA, 1671 nt, synthetic construct
  source 1..1671: mol_type = other RNA
atgattagtatcgatcaggtcgagacaagagatgaactcgctgatcttctgcatatccgtcataacctgttaacttacgtcttgtatattgccaaacctgattcctactaccagacattctatataccaaagaagaacggagaaagtagggaaatccaggctccgagaagggagctgaagcgcattcaaaagcgcctcgctcttgagctgtcagtctaccagcaatctatgtacaagactttcgacattaacactaacattgcgcacgcctttcggaagggtagaagcataattaccaacgccaagattcacaaaaataagcgctacattgtaaacatcgaccttaaggactttttccatagcatccatttcggaagggtgaagggcttcttcgaaaagaatacattttaccagctgccctctaccatcgcgaccatcatcgcccaactaacctgctacaatgggcgcttgccccagggagcaccatctagcccagtgattacaaatttaatctgtcaggtgcttgactatcacgtgctgagaatagccaagaaatataggctagattacacccgatacgccgacgatatgaccttctccaccaacatgacagagttctggaatgagcgagagacattcctgtcagatctcactcgggagatcgatcgcaacggttttcgcattaatgatgctaagaccaggtttattaagagggaatcaaaacagaccgtgacagggctaactgttaacaagaagattaatgcagacaggatctattacaaggagacaagagcaatggccgatcggctctacaaaaccggcagttttaatatcaatggcaaaccggggactatatcaatgttagaagggcgtttctctttcatcgaccagatcacgaagtttaataacaaaaaggacggtaaaacccacgacatcagaacactgtgtgcccgggagagggactatcagaagttcctcttctacaagtatttttacgctaacgaaagacccctgatcattacggaaggaaaaactgatatcatctacatcaagagcgccctgaagaaactgtacgatgtgtatccccagttgattaagaaaaactctgatggcagcttctgctataaaatcagcttttttcaccgaacgcctcggatgaagtatttctttaatatctccatggacggcgcagacactatcaccaaaatccatctcttttattccggcaataataaaatgcccaactattaccaggagctgagtacgaatcagaagatgaagaatgcagtgatttttctgttcgacaacgagacaaagtcggaccgaccattgaaaaagttcatcggatattgcaaactggacgacgcacagaaagaggagctgcaagagcaatgtttcactcggctgattgatggctccgagctctatcttgccacagttcctcttgttgaaggggatgacgaaagcgaaattgaggatttgtttcctaaggctgtaaaagacatacggatagaaggcaaaatgttttaccgtaagaacgactttaacccaaaaatacactatggaaaagaggtgttctccaagtacatctataataactacgatgccattgacttttcggggttcatacctctcctggacgcgattgtcaaagctataaaaaccaaatga

SEQ ID NO: 8534 - RNA, 1665 nt, synthetic construct
  source 1..1665: mol_type = other RNA
atgaagctcattaatgacatttcgacaaggtatgagctggcagatctcttgcatatccgtctgcgccccttggcctatgtgctgtatatctccaagcctaattcttactacagaaccttttacatcccaaagaagaacggcgatttgagggaaattcaggcaccatgtgggaaactcaagtacatacaacagagacttatggctgaacttaacaactatcaggactacttgtccaagacccagggaataaagactaacatcgctcacgccttcataaagaagaagagcatcatttccaatgcgagtatccataagaacaagcggatcgtaatcaatgtcgatcttaaagacttctttcataccatccacttcggccgcataaagggcttctttgagaaaaatcatttctatcagctgcctagcgatattgcaaccatgattgcacaaatcacctgttataatgggcacttaccccagggagctcccagtagccccgtcattactaacttaatttgccaggttctggactataatatcctcagaatagctaaaaagcaccggttagattatacaaggtacgccgacgatctaaccttttccacaaataagggagattttatggacaattaccagtcctttatgacagagcttagtaaggaaattgaacgtaatgggttcattatcaatgagaacaagacacggctcgtgcgccgagaatctaaacagacagtgactgggctcaccgtaaacaagaagatcaacgtcgaccggtccttttataaactgactagggccatggccgactgcctgtataagaccggaagctttgacatcgacggtgaacctgggaccattaatatgctggaaggtcgattctctttcatagaccaaattgtgcactacaataacattaacgatggcaagaaacatgactacaggagtctgtgtgccagagagcgcgaataccagaagttcctgttctacaaatacttctatgcaaacgagcgcccactgatcataacagaaggaaaaaccgacgtgctgcacctcaaagctgctttgagaaaactttatctgcagtaccccgatttaatccagaaaaaacaagatggcagcttcgagtataaaattagcttttttcggaggacaaagcgcatgaaatatttcttcaacattagcccagacggtgcggacacgatgaaaagcatataccagttctacacgggcagaaataacgtgccgaactatttccagaccctctcagcccgtaatatggagaatgccgtgatcttcctgtttgataacgagacttgctcagaacgaccacttaagaagttcatggactgggccaaactgcagaccgcacagcgaactgagctgaaatccaagctgtacgcccaactaatcgatgacagtaagctctacctggccacgactcctctgttggctgagaaaaaagagactgagatcgaagacctgtatccggagtctgtccagaacattaaactctcaggtaaggagttttgcagagcatctgtttttgattctgagaggtactacggcaaagacatcttttccaagtatgtttacaaccactacgattcaatcgatttttcagggtttgtgcctctactagatgcgatccggaacgctattcaatcgtga

SEQ ID NO: 8535 - RNA, 1662 nt, synthetic construct
  source 1..1662: mol_type = other RNA
atgattgatattgtggaaactagagacgacctggcagatctgctcaatattaggcattcacttctcacatacatcctgtatgtcgccaaacctgactcctattacgagacattctctattcccaagaaaaatggggaccttcgggaaatcgaggcaccccagagggagctgaaacgcttacagaagagactcgcgaacgagctgactgcctatcagcattacatgtacaagcagtttgagattaagaccaatattgcccacgcttttatcaaaggccgaagcattatcacaaacgctcgcatacacaagaataagaagtacatcatcaacatcgatcttaaagacttcttccacacaatccacttcggaagagtaaagggtttttttgagaagaacgagtactataagctacctagtgatgtggccacaattatcgcacagctgacatgctatcaagggcgccttccccaaggcgctcctacaagcccagtgatatctaacctgatatgccagatcttcgactatcgggtactgggtattgctaagaaataccggttggattatactagatatgcagacgacctaacatttagcactaatagaagcgaattctggaatgaataccaggcctttctgagcgaactcgccaaggagataaagaagaacggattcgctattaacgatgccaagacccgtatagtgaaacaggagtctaagcaaactgtcactgggcttactgttaataagaagattaatgtggaccgaaccttctaccgcaatactaaagcaatgaccaactgtttgtacaaaatcggatcattcactatcgatggacagcccgggacactcaacatgctggaggggaggtattcatttatcgaccagatcacgaggtataataacaagattgaaggcaaaaagccagagagtcggaagctaaatgctagagaaaaagattaccagaagttcctcttttacaagtactttttcgcaaacgagaggccgctgattgtgacggagggcaaaaccgatatcctgtatatcaaagccgcattgaagaaattgtatcgcaaatacccacagctggttatacgtaatgccaatggaaacttcgagtaccgtgtgagctttttccgcaggacttcgcggatcagatatttctttcagataagtcaagacggagccgacgctatcaccaccatctatcagctgtacgctggtaaagacgatgagcgaaactactataaaaaaattgccaaccagaccatgagaaatgccgtcatatttctgtttgacaatgaaacgcagaacaagaaaccactcaaaaagttcatagatgttgccaagttgaacgatacccaaaaagacaaccttaggacgaagttgtacaccaggctcttagataattccaaactcttcctggcgacaacccctctgcctgcgggcaatcgaaaatccgagattgaagacttattcacagaagcaacccggaacaccattattggcggcaagcggttttcagccaacgatcagcatgataccgcgcaattctatgggaagaagattttttccgaattcatctacgaccactacgacgccatcgatttttccggctttatccccctgatcgacgctattaataacgctatccagtctaaatga

SEQ ID NO: 8536 - RNA, 1269 nt, synthetic construct
  source 1..1269: mol_type = other RNA
atggaaatccaaggcctccagtcacgacggcagatcgctgaactcctgggtgtacctttgaaagaactgacttacatcctgtacgtccaaaagccagagactttctaccgtttgtttgagatacccaagaaaaatggcgggttcaggaagattgacgcccctgaggggcctctgatttatatacagcggatgcttgctcgaagattaacagcatggatcctcgagaaaaaattaaatacctcagtcagccacgccttcaagaaggggcgcagcattattacaaacgctcgggcacaccggaatcggcgcttcgtgctgtccgtcgactttcgcgacttctttaacaacattcatttcggaaggatcgaagggtttttccgcaaaaacaagtatttcggcttttcccgagaggcggccattgtgattgcccaactgacctgctaccacgggagccttccccaggatgcccctacttctcgggtgttgtctaacttgatctgtcagattatggatagaagaatactagaactggcatcgaaatatagagtgcattacagcaggtatgccgatgatctaacctttagtaccaactgggctaattttggaaacgagtccaaaaatttcctctcagagctcaccgttgttataggacagtcgggattccaaattaatgagagcaagactagactgcagtacaaggatagcaggcaggaggttacggaacttatcgtgaacgacaaggtcggtgtgccaaagcggtttgttaaaaacacacgagccatggcgaatacactctacaagaccggtcagtttgagattaacggcaaacagggctctataaaccagctggagggccgctttacctttatcaatcagatcgattggtataatcacagggtaatcgacggcgtggaaccaacacattccagcacaagagcaaggctcatgaagctcaatagtcgtgaacgccagtacagacagttcctggtgtataagtattttatttccaactcccagccacttatcgtgactgagggaaaaaccgatatcccctatatcaagagtgctctgagatcactgaaccagcaatttcccgatcttgtcacgttcaatgacgagggcgaatacagtctaaaaatttctttcttcgagcaagggatcaggctggaccatggaaggtctggtaacaagaagaatcagcgtttgccgtacttcttaggcctgaaaatggacggggccgacgaactgcagcacatctacgactattga

SEQ ID NO: 8537 - RNA, 1755 nt, synthetic construct
  source 1..1755: mol_type = other RNA
atggagaagtttagcgacatcatcacgagaaagcaactcgcacaattcctggaagtgaaattatcccagctgacctatattttgtataaacaggggatagacagcaactatcactctttctccattctaaaaagggatggcggcttccgacggatcgatgcccccaagaatgtactcttgaagattcaaatgagtctagttaacaggttatgggaagtccaggagtctatttgggagaataaaggctaccgctctaagacagcacacgctttcatcaaaggcaggggaattatcactaatgccaagatacatcggaaaaagaggttcgtcattaatctcgatctggagaatttttttggttcgattcacttcggacgagtgaagggcttctttcagaagaacaagtacttcaatatgctgccagagattgcgaccatcattgctcaactgacctgctataaaggatgccttccccaaggggcaccttccagcccaatcatttctaatctgatatgtcagatcctcgatttgagactgcggaaaatcgctaaaaagtacaggcttgattacaccagatatgccgatgacctcacatttagtacaaacgccgattttatcagcgtagagaaggactttttcagcgagattaaggtggaaatagaacgggccggatttcatatgaatgacagaaaaaccaggattcaggattatcatcatcggcagaatgtcactggactcgttgttaacgaaaaactgaacgtgaattcagactactgtcgccagacaagggccatggcacacaatctatacaccaagggtacttttaccatcggttcaattgagggtacgatggaccagatcgaaggccgctttagttttattaaccagcttgactggtataacaaccaggccaataacaaggctaacaagaagaaaaacaactttctgggtcgtgtagacgcctttaacaaacgcgagaaagagtatatgaagttccttttctacaagtacttctggcagaataagaaacctttaatcataactgagggcaaaactgatgtccgataccttaaatctgctttaaaatctctgagcctggagtatcctgaacttgtgaacgtggaggacgatgggggggtgaaatttctggtgtcattcttgaacaaaactaggagactggagtacttcctcgggatcaaccgggacgggggagatacgctcacaaatctgtactccaactacttcgacattaagagaaacgaacgcgaagcaggcacaaatgggcgaaacaacaagagtaagttcgggtacatcgagtacttcaagaaatatagctcaaccgagcggaaggcccccatcatactctttttcgataatgagctgagcattcgtaacaaaccactcaacaagttctccgtgaagctgaattcagaagagaagaatcggttgaagactaatggctacatccagttgaattctgacatgaagctgtttgtgatgaccatgaaactggctgaaaatcaaaccagttgcgagatagaagacctgttcgatgagagaacactgtgccacgaggacgcgaaaggaagatccttttcccgtgaggaccgcccggatctaaacgaattttacggcaaggactatttctcgaagtatgtctgttccaactataaacagatcaacttcgagaagttcaaggaagtttttaatacaatccgcagcatcatggatgaatgtaattaccaggaagaatga

SEQ ID NO: 8538 - RNA, 3030 nt, synthetic construct
  source 1..3030: mol_type = other RNA
atgaataagttttgtgagattggcactcgcaaggagtttgccgagtttattggagtatccctgaagaagctgacttacctgttatacgtgaaacacgtggataactattaccactctttcgaaatccctaagagatctggtgggagtcgacagatagacgctccaattggagacttgaaaaaaatccaatactccttagctgacaagttatgggaacaccagaagatagtgtggagggagaataacatttacccgaaagtgtctcacgcatttattaaaggaaagtcgatcatcacgaatgccaaagtccacaggaacaggaggttcgtgatcaatctggacctggaggatttcttcggaggattccatttcgggcgcgtgaggggtttctttcagaagaatcggtatttcagcctgccgatagagatagccacaattattagccaactcacatgctataaggggcacctgcctcaaggagcccccacttctccaattatcaccaattttctctgtcaaacacttgattatcggctcataaagctgagcaaaaagtacggcttgaactacaccagatatgccgatgacctgaccttctctacaaataggaactttgtggatattcagggaaacgtgctactggaaattgaacaggaggttggaaagtttggatttcacctgaatcgtaaaaaaactcgcatccagttcaatgacagtcgacaagtcgtcacgggcttggtggtgaataagaagattaacgtggatcgcaattactatagagaaacacgcgccatggccgacaagctgtataaaacgggttgcttttcgataaacgacagttacggggacatcaagcagctggagggacgtttcagttacatcaatcagctaaactggtacaataaccagttggacgatgaaaaacataacctatacagccttaaagggagggaaaaacagtaccagaagttcctgttctacaagtatttttgggggaacgaaaaaccactaatcattacagagggcaagacggacattatctaccttaaaagcgcgttgaagaagctttacaagcagtaccccaacctggtgaataaaaaggatgacgtctttcagttcaacctctctttcttgaatagaaccaagcgcctcaaatatttcttcggaattgagaaggatggcgctgataccatggccggcgtatacaataagttttggtcctcagacaaaaacaagaacaccatcgattacatcaattactttcggacctatgcgaagcagaagactaataaacccataattctgctcttcgacaacgagttcaaaaagggaaagccactgtataaattcgccgagagtactggtctgaaaaatcggatccaaggtatgctcaaagataaaaagcgacggctgttgtacataaagttgagagaagactacaacctgtttctgctgaccatgaagctgcctgaggggaaagaagagtgcgagatcgaggatctcttcgacgagaagaccttaggtcacgaggacaagaatggcaaaaacttctcacggggttcaaagttcgataattccaaatactatggcaaggcctgcttttcccagtatatcctccagaactaccagaacatcaatttcgacaagtttcaaaacatgctggagtctatccagcaaatcgtgtccggctatagagtggctatcagggatctgggcgtccacggggaggggataggttcagtggatggctttacaatctttgttccgggcgctttaccaggcgaaaccgtgactgcagaaattactctgctgaagaaaagctacgccctgggggaactcttatccatagaatgggagagccctttccgcgtggtccctaaatgtccagtctatgagaactgtggcggctgccagctcagccacttgacctatgaaggccagttagacatgaagtaccggagagtgaaggatgtgatcgaaagaattgcaggagagagcggggatttggtgcgccccgtactgccagcagcacatccattcgcctacagaaataagatggcagtgcctgccggccttgtgaaaggcaaggctgccctcggctgctatagacaaggcagtcatgacatcataccagtttcctcttgtgctatccagaaagaggagaacaataggcttctgcagtttgcgagacgatttattgaaaagtaccgcatctcagtgtataacgagaaaacacggaaaggtaatctgagacatgtcatgggccgtgtcggggacgacggcaaagtgatggcggtcttggttactgcctccgaaactcttcccgaagaaaagaggtggatcgaggagattaaaaaggaactcccggaagtagtatccctgtggcacaacatccaaccaaagcctgggaatacgattctcggagccaagattaggcatctctggggtcgcgagacactcacagcctcactttgcggcctgcggtttgaagtttccccctacagctttttccaggtgcataaagagcaggctgaggtgctctatgagaaggcactggagtacgcagacctcaaaggaggagagactgttatcgatgcatattgtgggacaggcacaatcagtctttgcttggcgaaaaaagcaaaacgagtaatcgggatcgaaatcgtgaaacctgctattgaagatgctaagaagaacgctaaaaagaaccacatggagaacaccgaattctatgctgctgacgccggaaagctaatgcctcagctgtatcgaaaagggcttgtgcccgatgttattgttatggatcccgttcgggcgggttgcagcggagaggtacttaaggccgccgccggtatgaagcccaaaaggattgtttatgtctcttgtaaccccgcaaccttcgcacgggacgctaagattctaaaaagcgaggggtatgagataaagaaagttcagcccgtcgacatgtttcctcagaccatgcatgtcgaaaccgtcgccctgatgatccgtgggaagtcaaagtga

SEQ ID NO: 8539 - RNA, 1701 nt, synthetic construct
  source 1..1701: mol_type = other RNA
atggaatacactaagatcaagaaccggagagatctctcactagcccttggtgtcccgccatctgaactgacctacgtgctttacaaaaagggggtggaccaatattactcttctttcctgatccctaaaaagagcgggggtaatagggaaattgatgcctccaaaggggccctcaaatacattcagagaagactggtggggctgctgtgggaaaggcagaatactgtatggtcagaggagacaatcttacccaatattgcccacgcgttccagaaaaagaagagcattatgaccaacgccaatgtgcacaagaacaagaggtacgtcgtcaacttagatcttgaaaacttttttggcagcatacacttcggcagagtgaaagggtttttcgctaagaatcgctatttttgtgttggtgaagaagtggcgacggtgattgcgcagcttgtgtgttacaagggccggcttttacagggagcacccagtagcccaatcattaccaacttaatatgtggcatcctggatatccgactgctgaaactagcaaagaagtataggctggattatactcggtatgccgacgacatgactttttctacgaacagtgttacagccgaggactaccttaacgattttattgccgatttggctatagaggtagagcacgccggttttaagatcaacgagcgcaaaaccagagtgatctatcgcaactcccgacaggaggtgaccggactggtggttaataaacgaatcagcgttaagagagattattacaagctgacccgcgccatggcagcaaacctgtataaggagaatgagtttaccatcggagggacacgcggtaccataacacaactcgagggcaggtttgctttcataaaccagatcgataagtggaatcggaagatgggcgtcctcagcaaggaactgacttcacgggaggagcagtacaagaaatttctcgtctacaagtacttcttcgctacagaaaggccggtcattatcactgagggaaagacggacgttcagtacttgaaagccgctttgaaagctaacgcagaaaaatatcccgacctcgtgtctaaaaccgacaacgacaagttcaagttcaagatatcctttttcaaccgcaccaagcgtattaagcacttctttggatcggccgaagacggagcggacgcaattaaaccttttgtgctgatgtatggcagtagtaaagatgctatgatcgagtggtttaaacaattcacaggcaataatccatgcaaaccagtaatcctaatctttgacaatgaggactcaaaagaaaagcctttgtccaagatgattgggacactcctgaatgacaaagtgttgcgtaataaacggaaggcaaatgatatgagatgcgagctcaacgagcatgggaaaatgcatgtgaaagacaatctgttcttcgctaccacacctaagaacgccaacaaagactgcgaaattgaaaatctgttcaacaaaaacgagctcgatggaattaggattaatggccgtacttatcatgagggcttcgagaaatccgcaggctgggatcccgctaaacacttctcgaagaatgtactgagcctgtacgttctcaaggactacaagaacatcaacttcgaaggatttatccccttgctggatgccataaattccatcgtcaagaatgacgatcattattga

SEQ ID NO: 8540 - RNA, 1680 nt, synthetic construct
  source 1..1680: mol_type = other RNA
atgaatctcaataaaatcaatgacctgaaggacctggcttcatatatcggggttaaaccatcttatctggcataccatatctatcataacccgcgcattaaacttaaccagcactataccgaattcgagatctctaagtcctctgggggttctaggattattgcaactcctaacaagaacctgaaaatcatacagaagaaactagcctttaagctcaatcaacacctaaagagcttgggcttttatcgcaataacaagatactgcacgcgtttataaaagagaataagccgtaccaaaggggctttataagcaactcgaaaattcatcgcaagaagaactacatacttaatgtggaccttgaaaatttcttcgagtcaatacactttggccgggttagaggttacttccagaaagatgataagttcaacttcaacaaagacgtagccactatcatcgctcagatttgcacatataaaggttctctgccccagggagctccaacctcccccatcattagcaatcttattggaaatctgctggattccaaaatcctgaagctctcaaagaagtacaaattgcactacactcgatatgccgatgacatgacctttagcacgaatgattacaaattcgtgcgaaacatcaatcagttcaacaaggagctggaaaacatcattagcagcgccggctttaagattaatactagtaagactcggttgcaatataggacaagccgtcagcaggtcaccggcattgtggttaatgaaaagctgaatatcccccgtgagtactataagaaaacaagagctatggcccataacctttataaaaacgacgagtttgagattaacggcgaaaaatctacgctcaatcaactggaggggcggttcagttttatcaaccagctggaatggtacaacaacaagaacaacaagaacaagaagaaaccctatctgaaattatcctcaaaagaaaccgaatatcagaggttcatcttctacaagtacttcataaagaacgatttggcgacaatcatcacagaaggcaaaaccgacgtcctctacatcaaggccgcactgaaaaaaacatggaaagagtaccctaagttgattactaaggataacaatgggaacttcctgtttaagattaagttcctcaataagaccaagcggctcaattactttttggggattggcattgatggaggtgattccttaataaatgtgtacaaccactacaaggggaaagataatgtcaatgacctgcgcaagtactttaacaagttcaactgtaactactccaatcctattatcatgctcctagataatgagattgatgtgaaaggaaaacctctgaacaagatgatcaatatcatcaagtttgagaaggacgaattagaaagaaatttgtatgtcaacctggtagagaatctttatctctcgacaatcccaaagactaaagaaaagaacgagagtgaaattgaggacttatttaatgaagagacgctgaataaaggaatagagggcagacccttcaccaagaaagacaattacaacaaaaaggagtactgcggaaaggacgagttctccaaatacgtgtataacaactataccaacatcgacttcaagaaatttcatccacttctgaaggcactcagtgagatcgtgaataaaaaatga

SEQ ID NO: 8541 - RNA, 1677 nt, synthetic construct
  source 1..1677: mol_type = other RNA
atgaatttcaatcaaataaacgacaggaaggacttagccaaatttctaggggtgaagccatcattccttacgtatcacatatatcacaatccacagatcaagctgaatcagcattacacagaattcgaaatccctaagagatcaggtgggattagagtgattgccgccccgaacaagaagctgaagatcatccagaaaaaattggctttccagctcaacgagcatcttataagtctgggattttatcgtaagaacaaatctatacacgccttcattaaggagaataagagtaacaaaagggggataatatcgaatagcaaaatccaccgcaataaaaaatacgtcttcaacatcgacttggagaattttttcgagtctatccattttggccgcgttaaagggtattttcagaacgacgataagttcaacctgagcaaggatatagcaattattctagcacaaatctgcacctataagggctccttaccccagggagcaccaacttcccccatcatctcaaatctgatcggaaatatccttgacagcaaaattctgaagctcactaagaaatacaagcttcactatacgagatatgcagatgatatgacattttccaccaatgactacaaattcctggaaaatatggccggttttaaccgtgaactggagaatatcatcgaactgagtggctttaagattaatacctccaagacccggctccagtaccgaacaagccgacagcaggtcacaggactcgtagtgaatgacaaggtgaacatccccagagattattacaaaaaaactagggcgatggcgaataatctgtataagaacggaaaattcgagatcgaaggaaaagaggctactctgaatcagctcgaaggtaggttttcgtttattaatcagttggaatggtacaacaacaagaaattcaagaacaagaagaagcctcacatgaagctgagcggcaaagaaatcgaatatcagcgcttcatcttttacaagtacttcatcaagaacgagttcttggtaattattaccgaggggaagactgatcctctgtacatcaaagccgctctcaaaaaatattggaaatcctatccccagtttattatgaaagactctgatggccattttctgtttaagatcaagttcctcaacaaaaccaaacggttgaactacttcttcggtataaataaggatggcgccgattctctcattaacctttacaaccattacaaaggaagcaatggggtcaataatctcagtgactacttcaagaagtttaactgcaaatactctaaccccttgattatgctgttcgacaatgagctgaatattaaggggaagcctctcaagaaattccacaatcacattcagtttaacgaacctgagctgcaaaacaatttgtatgtgaatctagtggagaacctgtatatcgttacaaccccattaatcgacaaaaagaaagagtcagagattgaggatctgcttccccaaaaaattcttgatgagggcattgagggccggagctttacaaaccaagaaaactacaacaagaacaagcattgcggcaaagacgaattctccaagtatatctacaacaactacaacgagataaactttgagaacttcattccgttactggacgctctgtgtaagatctgtaatgattga

SEQ ID NO: 8542 - RNA, 1677 nt, synthetic construct
  source 1..1677: mol_type = other RNA
atgactaactttaaagacattaagactcggaatgaattggcagaatttattgggattccaataaggcacttgactaatgtgctctacaagataaatgtcgacaacatgtattcttcctttaagatcccaaaaaagtcaggcggtgaaagggtaatccagagtccaaataaggacctgaaaaacatccaggtgaagatcgctcagagtcttgacgtgcacatcaccaagcagcagaaatacgacaataatatttcacacgcgtttaagaagaacaaagggatcattacgaattctaaagtgcaccgaaataaacggattgttgtgaatatggacctggagaattttttcgaatctatacactttggacgcgtccggggctacttcaacaagaatgatatgtttaagctgccaattgaggtggccaccatactggctcagttaacatgctacaaaggcagcctacctcagggcgggtcaaccagcccgattataagcaatctgatatgtgaggtcctggactatcgaatcttgtcccttgccaaaaagtacaaactgaagtacactcgctacgcggatgaccttaccttctcaacgaataacaatgaattcgtgaacctatatagccagtttagcgatgaaatttcaaaggtgattctgaagtcgggattcagaatcaaccagaaaaagactagactgcaattttggaatagccgtcaaacagttacagggctcgtcgtgaataaaaagatcaacgttcctcgggagtattataagaatactcgcgcaatggctaaccagctctataagaccggagagtatgtaattgatggtgatctgggcacaattggcaggcttgagggccgattcacatttattgatcagctgaccaagtacaacaattctttggatgatgacatcaaacataacaggtttcatctctctggaagggaagtcgagtaccaaaagtttctgttctacaagtacttcttcagtaacagtaaaccgttacttatcactgagggcaagacagacgttagatatctgaaagctgcccttaaaaagcattccctggagtatcccgaactggttgagaaagacaccaacgacaactttaatttcaagataaccttcctcaagaagaccaaaagaatgaaatacttcttcggtatcgtgcccgatggagcctccgccctcaataacgtatacaatttctataaaggggtcaacttagatcccaaccattacgagcacttcatgaagatcagcgaaaatagacctacaaaccctgtggtgttactgttcgataatgagattaccaaggaaaaacctctgaacaagttcatcaaccacgcaaagatcaacaacaagaagtctatcatcaaacaaaacctgaccctcaatgtgatcgggaacctgcacttacttacaactcccttgatggataatcgtctggaaggcgatattgaggatttgttcaagacaagtgagctcgcaatcgtaatcaaaggtcgcaaattcgacaagacggaaaaactagataaatccctctattacggaaaagaccagttttcgaagtatgtcctgctaaactacgaggagattgactttgacaactttaaacccctcttggacaagctctccgacctgatccggaaccattccgtggccagcaagtga

SEQ ID NO: 8543 - RNA, 1674 nt, synthetic construct
  source 1..1674: mol_type = other RNA
atgaaaaagttcaacgagattcagtcccgaaatgattttgcggatctgctgaaaataccattgagcagtctcacctacctgctgtatgtcctcaagccagataactgctacaacgtatttagcatacctaaaagatctggtggcgagcgcgagatttcagcgccaaataagcggcttaagagcgtccagacagccgtcgcaatggaactttggcgctatatcaagaatatacccgattttaaccgatccgcagtgtctcatgcctttactaaaaagaaaggcattatcaccaacgctgcaattcaccggaacaagagaatagtggtcagtttcgacctgaatgactttttccccagtatacactttggaagagtggtagggttcttcgaaaaaaatagacacttcaaactgccgcatgctgtctccttgattattgctcagattgcgtgccataacggatccctgccccagggttcaccttgtagtccaatcatctccaatctgatctgtcaaatccttgattaccggattttgagactggcaaagaagtataaattggactacaccaggtacgcagacgacttaacatttagcactaactggaaggggtttgttgacgctgagacgtgcttctattccgatctctctgtgttaatatctaaagccggcttcacaattaatgaagctaaaacacgaaccgtgtttaggaattcccgtcaaactgttactgggattgtggtgaacaagaagctcaacatcaatcgggaatactacaaggaaactaaagccatggcgcataacctatatagcaaagggtcgtttgtgattaacggtaaggagggtaccatcaatcagctggagggcaggtttgcctttatagatcaaatcgagctctacaataacagaattgacgggaatcgccacaattatcgcaatctgtgcgggcgggaattagaataccgtaaattcctcttctacaagtatttttacgctgctgacaaaccgacactgatcactgagggcaaaagcgatgagttgtatatcaaggccgccctaaggaagatgttcctgatgtacccttcccttatcaacaagaaggcagatggaagatttgagtataaggttaggttccttaaacgttcgaaaaggcttcagtatttctttggattctctcctacaggcgctgacgccatgaccgaactcaggaagtgtttcatcgacgagtcaaactctacaagcctgttctcattcttcaaccgcatttgtgcctcaggacagatccaccccgtgattttcatctttgataatgagactgagcgggacaagccactcaagaagtttttaaatcagaaacctgccaccagtgaagttgacaaagagttcctccagaataacctatacctgaacataattaagggctcaaagctcttcattatcaccaacaagctggtgagtggaaaaagcgaggccgaaatcgaagatctgttttcagaaaataccctgagcaccgaaatcgggggcaaatctttctgccgcaaggacaattttgatgagagcaagttttatggcaaggccttcttctccaaatacatctacaaaaactacgagtccatcgacttttctaatttcatccccatgttggacgcactgaacaacatcattacgacgtattga

SEQ ID NO: 8544 - RNA, 1683 nt, synthetic construct
  source 1..1683: mol_type = other RNA
atggagcagggctttaataccatctcaaatcgaaacgagttagcggattacctggggattagtagatcatccttgacgtatgtgctgtatgtcaaggggattgacagtttttacgtttcctttgatgtgcccaaaaaaagcggtggcacacggactatccatgctccgcagggcacactgaaaggcatccagaagatcctgctcatcaagctctataattaccggtataccatcaacgaaaatgagaacattaagctgaacatttcccatgcctttgagaacaagaagtctataataacgaacgcccgtatccacaaaaacaagcgcttcattattaacttcgacctaaaagacttcttcgaatcgttccattttggaagggtgaaggggtacttcgaaaagaataagtatttctgcatgccggaagacgtggctagaattattgcccaactgacctgttattccggcacactgccacaaggagctcctacctcgcctatcatcaccaatttgatctgtcagtctctggattacaagatacttagtttagccaaaaagcaccacctggactacactagatatgctgacgacctgacattttccactaacgacaagaaaatcttagaaaactacgacacgttttacaaatcattggtgaacattatccacgggtctggctttgagattaatgagaagaagactcgctttgtgtacaaacatagcaaacaaattgtgactggactcgttgtgaataagaaagtaaacgtcgactccacttattatcgtaatgtgagatcaatggcacaccacctctatactgagggaaccttttgggacaatgggaatgaatgtaccataaatcagctagagggaaaactgtctttcattaaccagattgacaagtacaacaacaaactgtgcgaggaaaagaaaaacctcgcaaatcttaacaggcgggaacgcgaataccagcgcttccttttttacaaaaacttctatggcaaccctcagcccgtaatcataacagaagggaagaccgacatcctgtacataaaagccgctcttaggaaatactatcttgattacccagaattgatcgaaaagagtaactctggccaatttcattacaagctgacattctttcgacggagcagcatcaagcaattcttctttggaatgagctatgacggagccgacgcaattaagaagatatacaacttcttcaccgataatgatagcggcaggtttccaaattactatgagaagttcaatcagatcagtgcaattaagacctcatcccccattatccttctcttcgataatgagctgaacaataagaataagcccatcaaaaacttctgcaattatgtcggtctgaaacctgagactgtcgattgcatcaagaatggtgggtttatcccaatcgtcgacaacaaattatttctgctcacacaccagctagttaatgatctcgcggaatgtgagatagaggacctgtttgatgagatcacattgaaccataccataaatggcaagaccttttcaaggcagagcgatttcgatattgataagcactatggtaaagagatcttctccaaatacatcatctctcactacgagagcattgatttcagcaacttcaaacccctgctcaactctattaatcagttgattgcccattga

SEQ ID NO: 8545 - RNA, 1443 nt, synthetic construct
  source 1..1443: mol_type = other RNA
atgaagaaaagccccttctaccagattagcacgcggcaagaactcgccgatgccctcaatatgagactgaaaagcttgtcatatgttctgtataagctcgatccgcagtctttgtacactatattctcgatctcaaagaaatccggcgggaaacgcgagatcactgctccaaagaaacctctggcaaacatacagtccaagattgcgaacgtgctgatgttgcagcctgaaaattctgcactgagatccaaggcctcccacgggtttatcaagaacaaatccatcctgacaaacgctactgtgcatcgcaataagaattacgttttgaacaccgatatccaggatttttttccatctttcagtttcggacgggttctgggctttttcaagaagaacaacgcattcatgatggaccataaagtggccgtagccctgaccaatctgtgctgttataaaaagaagttacctcaaggtgctcccagttcaccccctattactaacttgattttccacattgtcgactttaagattatcaaactagccaggaaatacaatctcgactacacgcgatacgttgatgacttgaccttctcaactaacgaaaagagcttcccgaaagtcagccagaactttctcaacgaacttaacgctctgattacccatgagggctttaaactcaatgaggacaaaacacacctagagtacaagaatagtcgtcaagaggtcactggggtgattgtaaacaagaagcttaatgtgcacaaggagttttataagaacaccagggccatggccgacaacctgtataaaaacacagaattcaccattgatggcaaattaggaaccatcaatcaattagatgggagatttaactacatcaatcagctggtgcgatacaataaaaagtccatcaaacggaaggtggcgtataaaacaaagtataacgtcgagaagaaggactttaaacatcaaagtcgcttcattcttttctccggaaaagagcagcagtacaggaagttcctcttttatgagtatttcatctacggtaacagctcaattattctgacagaaggtaagaccgacgtctcttacataaagctagcacttagagtgtacaaacaggagtatccccagcttatcactagtcacggtaagaagaccgaatattccgtgtctttcctgaaacacacccagaatacatcgaccaaagggcagaaaaagggcaaaaaaaataaccagatgagccataggatcccatattttatcggcatctctgaagatggcggaacaagcatcgacaatttcctcaattactatagcgagatctctacgacaaacctgaatatgtaccctaattacccaaagtactttatttcagacctgggaaagctgcccgataagaaagtgataatactccttgataaggctgactgcaagatatga

SEQ ID NO: 8546 - RNA, 1119 nt, synthetic construct
  source 1..1119: mol_type = other RNA
atggaaaagagccctttttatcagatctcaacacgacgcgagttagcgtctgtgctgaacatgcagttgaaggcccttagttatgtcctttacaagttaaacccacagaatctctataccagcttttcaatccctaaaaaaagtggcggggtcagaaatattgtggccccgcagaaacccctggccaatattcagaataagattgccaacgtgctcatgctgcaacccgaaaataaagccagcgggtcgaaggcaagccacgggtttataaaaaacaagagtatcctgaccaacgcgaaagttcaccggaacaagaagtatgtcttgaatacggatattcaggacttttttccatccttctcctttggaagagtgctgggattcttcgagaagaataacgctttcatgatggatcacaagattgccgtggctcttaccaacctctgctgttataaacagaaactgccccaaggagctccttcctctcccccaataactaatctgatcttccatatagtcgacttcaaaatcatcaaactcgcccggaagtataagttgacatacactcgatatgttgacgatctaacattttccaccaataatcactcctttctgaagacctaccatgactttctaactgagttaaacgctctcatcacacacgagggcttcaacttgaataacaacaaaacccatctggaattcaaaaattctcgccaggaggtaactggcattattgtgaacaagaagctgaatgtgcacaaggagttctataggaagacaagagccatggcagataacctctataaaaacaacaagttcgtagtggacaatgctgaaggtcggatccaacaactcgacggtcgctttaactacattaatcagcttgtgaggtacaataagaaagtcaagaaaaggggcgcaccttacaagaccaaatatacacatagcagcgaatcattttctaagctggataggttcctttcttttacgggcaaggagcagcagtaccgtaagttcctgttctacaaatacttcgtttacggggattcaagtataatcctgaccgagggaaagactgacgtttcctacatcaagctggcattgaaaaaatactga

SEQ ID NO: 8547 - RNA, 2004 nt, synthetic construct
  source 1..2004: mol_type = other RNA
atggaaatgatgatgcagatgaataaaagcgccttcttcaaaatctcaactaggaaagaattggccaacgccctggatatcagactgaagacactgacttatatcctttataagaagaagccccaaacactgtacacaaacttttccatcccaaaaaaatctggaggtacacgtgacattgtggcccccgagaaacagttggccaatatccagatcaagattgcacagatcttaatgagccagccagaaaacgactcttcccattcgaaggctagccatgggtttataaaaaatcgcagcattctcaccaacgctcagatccacaggaacaaaaaatatgtcctgaacaccgatataaaggattttttccctagtttcagctttgggagagtgctgggcttttttgagaaaaataacgcgttcaagatggagcacaaagtcgcagtcgccttaacaaatctctgttgttacaaccagtctttaccgcagggagcgccatcctctccgcccattactaacctgattttccacatcattgatttccggattataaagttggctaaaaagtaccacctcgactatacgaggtatgttgatgatcttaccttcagtacaaacgaaaatagttttccagtgacctataagaagtttctgatcgatcttaacaacttgatcgaccacgcaggttttagtctcaaccaggataagacccatctcgctttcaagaatagccgccaggaagtaaccggaattattgttaacgagaagctcaatgtgcataatgaattctataagtccacacgggccatggccgacaagctgtacaaaaccaactctttttcaattgatggcactctgggcaatatcaggcagttggatgggcgctttacctatataaatcagctggtgaggtataacaagcaacgaaagttaatccggtatagaaccaaatatagcacacctcacaacgaaaaggagactaaaaacaccataagtaacaaggacagatatcgcttcttcaccggcaaagagcagcagtacaggaagtttagcttctacgagtactttgtatacgggaacaattccattattctcactgagggaaagacggacatcacttacattaaagtcgcacttaagaagtacgctaaaaattatccagacctaatcaaactccaaggaaacaaatacgactttctgattagcttcctcaatcatcaaaagaataaggagaagagaagcaaaaacttcaagcgtaagaaaaccaagatactggcgaatcagatgtctcatcggattcctttctttctggggatttcagaggatggcggcaccacgtactcagattttctatactactacgcagaaatgactattgagaaagagtcgatttcttacaacatgcaacgatcatatcccaattaccctaagtatttcatctccgacctgaacaagctgtacaagaaaaaggtgatcattctgctggacaatgaagggtctaaccacccccttgaccacttcatcaagacatgcgccaagctgaaaatcaagaaaaaagaggacatagagaacgattttaagaataaaggctactcacacctcaaatataatctattcctgttgactatccccaagaagaatacatctaattcccagaattgcgccatcgaatcccttctaaacaaagacgaaatcgaaaagctgaacctgaagggtaagagttttagttccaagaacaatgagacttccaaaaactcattcggcaaacaagctcttgtgaccaaaatcaagtccgcacctacaaattttgacctctctggcttccgcagtttacttgacttgatcagcaaaataaacagcctccagccaataggtaatgagcagtacaaatacaagaagaagaaagttgagacgaataaggaggtgtatatccgaaattcactgggattccggattcctatagaatatcaaagcatcacccagtacaaagatttcgtcaaatga

SEQ ID NO: 8548 - RNA, 1875 nt, synthetic construct
  source 1..1875: mol_type = other RNA
atgtccgatcttatcctgttcctgtatagcggaggcatctttttgtttaaagacgtcaaaagcgtcgaatctttaagccgatacattggcgtgagcgtgaaactcatcaatttcgtcgtgtactttaagggcgtcgactccttttatgaggagttctccctccccaagaagtctggagggtcaagatttatttcatgtcccaaaggtcccctcaaaaagcttcagaagaaattgcagaagaaactgtcggaggagtacgataataagtacggctcttttaatgttagccaagctttcatcaagaaacggaacattatgagcaacgccaaagtgcatcgtaacaaaaagttcatcctgaacttagacatagaggatttcttcgacgaatttaactttgggagagtttacggctatcttcagaagagcaatgacttcaaaatgaataagcagctgagtgtcatcttgtcaaaaatcttcacctataagaacaagctgcctcaggggtcaccatcatccccagtcctgacaaatttcatctttaggatcgttgacttcaagattctgaagctgagcaagaaatacaagctggattacacaagatatgctgatgatatgactttcagcaccaatgactctaatttcaaataccgttacatcaacttcgtggaagagctgaagttccttctctatcgacagggttttaagattaacaagaagaagacaaggctacagtttagcagttccaaacaggaagtaacagggctcgttgtgaataagaaaattaacgtcagtaggaagtactaccgcgatttgcgcgcccaggccttcaatttgtactccgacggaaaatactttatcgacggcaagaagttcgacaagcttaataaattggaaggaaggtttgcatttgtaaatcaggtgaagcggtacaattttctgattgagtcgcgcaaatacgccagaaagagtaaggagtattcaaacttcatcaagtctactacaaagtataggtatgaaccgtatctcgggggatttgacgaacaataccgcaagttcctcttttacaaatatttcatccacgggtctaaacctctgatttttgtagagggcaagactgacatacggtatattaaggccgcaatgatgatgtattataaccgataccccgaacttattcggaacaataacggaacgttcgagttcaacattgattttttcaagcggggcaacgaggatctcttaaaggagaactataaacggaacgaaatagactactctatcaaagactactatctcggattaagtgatgatggcgctagcgtgatgtcaaagatagtggagtattggggtatcgctctggataaaaagaccaaggagaataagaactactacgactactttgtgaataagcttggtaataagtccaaaaaggtgatcttactgttcgacaatgagtacctggacaaaaaaaataaacctctccgctccttcctgaaccatgtttatggcaataaggccactagtcaatatagaaaactcatctccgaagggaaactggtgatagcagataacttgtatctgataaccctaatcaaggacaaaaactataagaaagagctagagaactacattgacgaccacattaatgacaagaacttcaagggaaacaatgatctctccattgacattgaaaacctgatcgatctgtctacgatcacgataaaccaaaaaacctttaataggaacgcgaataaagattccgataaagaattcgggaaacagaccctgtctaagtacgtatataaacactacaacaccgtgggcctgagtggttttattccactgctagatcagcttaaagaattttgcaagtga

SEQ ID NO: 8549 - RNA, 1602 nt, synthetic construct
  source 1..1602: mol_type = other RNA
atgtcatcaaaatataagggaaatagctcacggtttttcattatgaagaaattcgaggagatcaagaaagtagaagatttagccaaagctctgaacattacgataaacaaactctactacttctctaacaacagcaataaaccaaataagctgtacacccagtttactattactaaaaagctagggggtgaaagaaccattaacgcaccaaagaaagaactcaaaaaagccctgaacaagctgttcattattcttaagaatcgccatctcaattacaccaaagagaagaagataaaagacaagatcagctttggcttcaaaaagaataatggcattatcgacaacgccaaaaatcaccggaataaaaaatatgtgctgaacgtggacatcaagaattttttcgatagtttccacttcggccgaatttgcggcttctttatgaaatccaaggagtttaagatcaactctaagaataacgacacagttaaaaagatcagcatcctcatcagcaatttgttgtgctataaacagtgtctgcctcagggatcaccctgttctcccattctgtccaatctgatctttcggacaattgactacgaaatcctcaaactatctaagaagtacaagcttaagtacacccgctatgctgatgatatgacttttagtacgaacgacaacaactttttgaattcctacgagaacttcatatccgaactaaatgagtgcataaacaaaaacgggttcaaaattaacgacaagaaaacccaaatcgagttttacaaatctagacagagggttacaggcctggtcgtgaatcagaagttaagcgttaggagggaattttataaaaacacgaagagcatggcgttaaatttttaccgcaacgggtactttaaaatcaacgataaaatcgggaagctgaatcagctggagggaaggttctcctttataaaccagattgacaagttcaacaacatcgagtcgaataagtatgagaacaagaacaaggatttctattacgtgctcaattcacgtgaaaagcagtataaactgttcctgttttacaagttcttctacaatcccagtaaacctatcattatcaccgagggaaaaactgacatactctacattaaagcagccctcaagaaattctatgagaagtatccgaatatcatccaaaagaaccttaatggtaccttttcctacaaagtgaaatttcttgctaaggagaataagcagttctctaattacaaagaacgactggacaagaacttccaacaaattgagattatcttgaaggacgtcattgaaaacatagacgacaaaaaactggaagacattatacagtatgtcatagatagcatagagaagatcaaggaaatcttcaagagtaagattgtagcaaacaaaacgagttttgagaagatcaagcttaagctgaactatttttgggaagagattgtgaataagaagacttccaaagagttgaatgaaatctggaatgagatcatcaacatttacaagaacatcaagatcaccaatcttaagaaagtgaacaagttcctgtatttcttcaagtattggttctttagaggtttttga

SEQ ID NO: 8550 - RNA, 1785 nt, synthetic construct
  source 1..1785: mol_type = other RNA
atggactggaacgagattaagtcctgccgagattttgctcggtatctcaatattccatataagcacttaacctacctactctacaacaggaagattgacaaactttatgaatccttcgaaatcccgaaaaagaatggaggtattcgtattattcaggcccccaaaaaagaactgaaggaggtgcagcagcagatcctcaagattctcgagaagcgtgccttatcccttgagaaggagaataaaattagctttcgcttatcacatggcttcatcaagtacaaatcgatcataaccaatgcagagaagcaccggaataagaaaatcatcttgaacatcgacatcgagaattttttcccgtcatttcattttgggagaatcgtcgggttctttgaaaagaacaagaatttcaagctgcccaaagaggtggccatattcctcgcccagttgacaacggtggacggctcccttcctcaaggctctccatgttctccaataataactaatctcatctgccaaatccttgattttaggatcagcaaactggccaaagagtataagctgaactattccagatatgtggatgatatgactttctcaaccaataaagagaactttctggactgttacccagaattcttcagcaagctcagtaatgtgctgattaaagcgggcttcagcattaatgataagaaaaccaggattcacttcaataggaacaagcagatagtaacagggctagtggtgaacaaaaagatcaatgtccagaagaacttctacaaaaatacacgcgcgatggctcacaacttatacaagcagggtacctttttcattgacgaaaaggaagggacaatcaaccaactgttgggtagattcaattttatcgaccagctcgagcggtataataacaagaataagaagcagctgagtttgcagaaaaactacatcgaacagcagaaatacttaaccaaagggcaacaggagattaaaggagattttggctatttgggaaagctgtcttctcgcgagaaagagtaccgcaaattcctgtattactttcacttctttagcagcagcaaacctgtcatagttactgaaggcaagacagactctcggtacttgaaagcagcaatgaagaaatgctttaaggatttccccaatctcattcaaaaaaacgaggatggcaccttcctgtttaaagttaagttccttaagcgaacatctctgctgaaatactacttcaagttttacgaagacggtgctgactcaatgaaaaacctatcgaacttttggataactggcgaagaaaacaaacttttccctaactacaacaagtttttccaggagctgactggaagagttgctagtaatcccatcattttcctttttgacaacgaactatccaacaaaaagaagcccatccgcaacttcataaatcatatcctcaagagcacgcctaatgaggcaggaagtctccggaacgagattagtaatgtcaagtacatcaacatcgtggacaacctgtatatgttgacgcacgcctctctcagcggaaatgaggatgaggaaattgaagatctgtttactaacgatgtactgaatcataggatcaatggcaaatccttttccagagagaacgattatgactttacaaagttctacgggaagaacgacttttccaaatatgtcctgaagaattatcgaagcatagacttcaagaatttcattcccctgctgaataacctgaacaagatcatcctggaatataactcaaagctgaccttctga

SEQ ID NO: 8551 - RNA, 1779 nt, synthetic construct
  source 1..1779: mol_type = other RNA
atgcagtgggatgaaattaaaactcgagaagattttgcgacctttatcggggtgccctataagtatcttacctacctgctctataaccagcgcatcgaaaacttatacattgctttcgagatccctaagaaaagcggtggggttagaataattaattctcccgaagaccgcctgaagaagattctgaagaagattatgaggaaacttgaagaacggatggtttttctggaacaggaagggaaaatctccagcaaagtcgcccacgggttcattaagagcaagaatatcataaccaacgcctcctctcacagaaaccgaaaaattgttctgaacgtggacatcgagaattttttcccaagtttccattttggccgagtcaagggctttttcgagaagaacaaatacttcaaagtcccgaaggaggtagctgtgttcattgcacagttgacatgctacaatggatctctgccacaaggttccccctgtagcccaatcatcaccaacctcatatgtcaaatcctcgatttcaggatcatagagcttgctcagaaatataatcttaagtacacgcggtatgccgatgacatgacttttagtaccaatgatatgcagttcgttgacacatacattcggtttgtagaggaactgggagacttactgacgaggtccggtttttcactgaatgatgagaaaacacacatccagttccaaagagaaaagcaaactgtgaccggtctgaccgtcaacaaaaaagtgaacgtctcccggcatttctataaaaatacaagggccatggtgaatacactctacaaaaaaggagagttcatgattgatggcgaacgtggcaccattaaccagctcttcggccgtttcaacttcattgatcaactcgttaagtataacaaccggatagagagggaggcaatcattcgcaacgattatgtgaaccagcagaaaaaccttatcaagagtgtccctgacgctgagaacaagttcgattacttgaagaagctcagtgcccgggaaagagagtaccgcaaattcctgtactactactattttttctcgagcactgtgccagtaatcgtgacagagggaaaaacagattctagatacatcaaggcagccttaaagaatttatatcggaggtatccgaagctgatcgagcgcgatgagaagggaaagtttgtgttcaagatcaagtttctacgtagaactgcattgctgaagtactactttagattctttgaagacggggcagatgctatgaaaaatctcagcaattgctggtttggcaaaactgacgagaaactgtttcctaattacagcgagcttttcaaggagatcactaataggaaagccttgaaaccagttatttttctgttcgacaatgagttgaagaataataagaagcctatcaggaacttcataaatcacgtatccaataataccatccacgacaataaaaccatcgagaacgaaatccgagagaacaacatatttaacgtgattgacaacctgtatctactaacacatccctcagaaacagaggacgaagagatcgaagatctgtttgacgaccctactctcgattaccgcattgcgggaaaggtgtttaccaaagagtcgaagtttgatgtggacaagtattatggcaagaatgacttttctaactacattctgcagaattactcacagattaacttcaagaacttcacgcccctgttggacaacctcaataagatagtcgacgtgtacgaagccaaatataaatcatga

SEQ ID NO: 8552 - RNA, 1968 nt, synthetic construct
  source 1..1968: mol_type = other RNA
atgaataggctcaaacaggtaaccaataaggatgatttcgcaaaattacttggattcaagaactcgcgttatatcaattatgtcctgtattgcatcgggaccgacaaactgtacaaggaattcgagattccaaagaaaaatggcggtgtcagaataatttgtgcacccaaacccgagcttaaactcctgcaaaagaagcttgcctatgtgctctgggattgttttgtagacgatttaagttccaagagtaaggagaagaattacaaaatcccaatgctgagccatgcattcgagaagaacaaaagcatcattactaatgctcaggcccaccgtaataagaagtatattctcaacgtcgatctgaaggactattttgagacttttaactttgggagagtacgcggatttttcatcaaggataaggattttcaggtgtctccagaagtcgccacagtgatagctcaaatcgcttgctaccaaggcaaattgcctcagggggccccctcatcacctattattactaatctgatcacacggatcctggactatcgcatcgttaaaatagctaagaaataccggtttacctatacacgctacgcagatgacctgacctttagcacgaataggaagctgtattcaaataagctgaaggccacaaaagaactggataaatttcttgaagagctggagaaactcattgtgagttctggatttgaaattaactccaaaaagactaggctgagtgacgcgatgcaacgccaggaggttaccggcttaattgtgaacaagaaactgaacgtcaaacgggaatacatcaaaaacaccagggcgatggcctttaagctttataaggacgaaaagtttgagattgatggtaagcagggcacaatcgagcagctcaccggtcgattcgcttttattttccagatagaccagtacaacaattacctcctctataagaagtcacttgtggaaaattccctgaactcccaaaaaaacctactcggacgaaatttgtccaaaaaaagtgacagcaagtactactggaagtatattttctacaacagggacctcagaaaagaactgttctacaataagcagcataaaacctacaatttgccgaaggaattttatgccattagcaaggaggataagaagaactatatggccttttttgactcaaaggagaaagagtacaagaagttcctattctacaagtatttctacggaaatagcaatcccatcatcgtcccagagggcaagacagatcctagatacattaaagctgcgttaaagaacttgtacctgaagtatccagaactgatcaaaaagtcaggtaacaagttcatctttgagattgatttcctaaagcactccaacacaatagaatatttgtttaacgtgcccgagggcggacctgggttccagtattggtataactacttcagcgacaaaaaagactttcccatgtctgataaagagaaactcctgtacccaaactacatcgagtacttttataatcagactagcgcacaccccaaaaaaccaacgatattcttgttcgacaacgaaccttctggcaatcctctgtacgcctttgtgaattacgcaaaagacctggaaattagctcgtctaatctgaaccagattagagggtccagcttttctaaaatcgtgaagaaaaactccctctacattatggccactcccttaattaaaaattggaatcaggggacgtcttccgacatcgaggacttgatagtttccaatgataagaacatcgagcctatccagaacttcatgaagatcaacaagatagatagtcttaacgtgttggacgtgaagaaacataaagaaatcttcagcaagttcgttcttcggaatttcaacaaattcgacttcaccgctttcatcccgctgctggacggcatacgggacaacatcctagattacaaaatgaagaagtga

SEQ ID NO: 8553 - RNA, 1959 nt, synthetic construct
  source 1..1959: mol_type = other RNA
atgaacaaactcaaacagctggacaacaaggacgattttgctcggctcctgggctttaagaatagctcctacattaactacatcttgtacaacattggaaccgacaatctttaccgcgtgttttctatacccaaaaagaatggcgaggtcaggccaatccatgcaccgaagcccgagttgaaatttctgcagaagaagctagtgaatgtgctctgggactgctatattgacgatctgaccgtaaagtccaaggaaaaaaatttcaagatccctatgctgagtcatgccttcgaaaagaacaagagcataattacaaacgctcaacttcacagaaacaaacaatatatcctgaacatcgacctcaaagactattttgagtctttcaatttcggtagagttaggggattttttatcaaagacaaggatttccaggttgcccccgaggtggccactgtgataacccagattgcatgttatcaggggaaactgccacaaggtgccccctcctccccaatcatcaccaatttgattacgcgtatcctggactatcgcatcgtaaagattgctaagaagtacaggtttacttacacacgttacgcagatgatttaaccttttccaccaatagaaatctccggagcaataagctgaaagctacaaaggagctggacaaatttctggaagaactcgaagagctgattgtctcttcaggatttgaaatcaactccaaaaaaacacggttgtccgatgatatgcagcggcaggaagtgacaggcttgatcgtcaataagaaactgaacgttaagcgcgagtatattaagaacaccagggcaatggctttcaaattatacaaagacgagacattcgagatcgatgggaaacagggaactattgagcaattaaccggcagatttgcgtttatctttcagattggccagtataacaattacctcctgtacaagaaatctctggtcgagaataacctggaggcgcagaagaacctactcggtaaaaaatcaagcaagaaatccgattcgaagtactattggaagtacatcttctataacagggatctcaggaaagagttgttctataacaaacagcacaaaacacacaaccttccagaagagttctattctattggaaaggaggaaaagaaaatgtacatggccctgtttgactcaaaggagaaggagtacaagaagttcctattctataagtacttctacggcaatagcaagcctattatcgtgaccgagggcaagacggaccctcgctatatcaaagctgcccttaagaacctatatccccagtatccagaacttatcgaacgggatggggataagttcatattcaagattgacttcctcaagcacagcaacacaatagagtatctgtttaatgtgcccgagggcggggaaggattcaactattggtacaactacttctctaacaaagaagatttcaagatgtctgccaaagagaaattgctgtacccaaactacatagaatatttccagaagttgaccagtcgacaacctaaacatccaactatctttctgttcgataatgaacctactggtcaccccttttaccagtttgcctcctacagcaaagacctcgacatatcgccgaataatctggacactatcagaaaccctatggtcaattatcgaattaaccagaagtcaagcctctacattatgagtacgccgctggtgaagaatgtgaattcagggagtagctcagacatcgaggatctgcttattgcaaagcaaaaaatgcccactctttatctggatggccagaataagaccttcaaaaaaaacggcgggtttaattactatggaaaggaaatccttagcaactacgttttaaagtactaccagaactttgacttcagtgagttcatccctctcttaaatgggattcgcgataatatactggactatcgaaaatga

SEQ ID NO: 8554 - RNA, 1938 nt, synthetic construct
  source 1..1938: mol_type = other RNA
atgaataagctgaaacagctggaatccaaagatgactttgctcgacttcttggattccagaacagcaaatacatcaactacctcttatattccgtggggactgacaacctctataaaacttttagcattccaaagaagggcgggggggagcgaataatcaatgcaccaaaaaaagagctgaaatttctccagcggaagctggccaacgtgctgtgggactcatacatagattctctcaaacttaagagcaaggacaagaagtttaagattcctatgctgagtcacgcctttgagaaaaacaagtccataatcactaacgcccaggtccaccgcaataagaggtacatcattaatatagacctcaagaactacttcgacagctttaacttcggcagggtccgcggtttttttctgaaagatcgggatttctgcgtaacgcctgatattgctacaatcattgcacagattgcctgctatcagggcaaactgccccagggagccccatcatcccccatcataacgaaccttatcacacgcattctggactatcgtatcgtgaagatcgcaaaaaaatatcgattcacatacaccaggtacgcggatgatatgacttttagtaccaatcgggatctgtattctaataaactccaggctacaaaggagttagaaaagtttctgagagagctcaacgagctggtgatttcctccggtttcgagatcaattcacaaaaaaccagactttccaatgagatgcaacggcaagaggtgactggactcgtagttaacaagaagttatcgattaagagggagtacattaagaatactagggccatggcatttagactttacaaggatggctacttcgaaatcgatggcaaattgggtacaatagatcagctgaccggcagattcgcattcattttccagataaaccaggttaacaattacctactatacaagaagtccttggtgaaaaacaacttggaattccagaaaaatctgctggcgcaacaaaccttgaaaaagtctgaatcgaagtattactggaagtatatcttctatgctcgtgacctgcgcaaggagctcttttacaacgagaaacacaagacatataacctgccgaccgaattttatgacatcagcaaaaacgagaagagaatgtacatgagcctgttcgacagtaaggagaaagaatacaagaagttcctcttctacaagtatttctttggcaatgacaaaccaatcatcgtcaccgaagggattacagatccccggtatatcaaagccgccctaaagtctcttcatcagcagtatcctgagttgatcgagaaggtggacgacaagtttatctacaaggtcgagttcctgaatcattcgaataccattgagtacctttttaatgtccccgaaggtggggaagggttcaaatactggtacaactatttctccaacaaggaaaactttcctatggatagcaatgaaaagatactgtatcccaattacatcgactattttcaaaagctcaccattaggaaacctaagaatcctacgatgttcctttttgataatgaaccgactggaagccctctgtacaatttcgctcgctatgctaaagatttggacattaactcgaataacctcaaccagatcagacagcccatgctgaactatcggattaaccgcaagtcttctctgtatctgatgctgacaccattgatcatgggatcaaactcaagtgacattgaggacctcctactgtccaaaaataccccacccattttaaaaggaaagtcttttagcaaaggcgggggcagtaataactacggcaaagacgttttcagcaaatacgtgttgaagaagtattcacagttcgatttcagcgacttttgtcccttgttagataaaatcagagacaatatcctggactacaggaaatga

SEQ ID NO: 8555 - RNA, 1959 nt, synthetic construct
  source 1..1959: mol_type = other RNA
atgaacaaactcaaaaagctagacaataaggacgattttgctcggctgctgggcttcaagaatagtacctacatcaactacatcctttacaacattggaacggataatctttatcgcactttctcaattcccaaaaaaaatggtggaactaggttggtgcacgctcctaagccagagctgaaattcctgcaaaaaaaactggtaaacgtcctgtgggattgttacgtggatgaccttaccgcaaagtccaaggaaaaaaatttcaaaatcccaatgctgtcacacgcattcgagaagaataagagcattatcacaaatgcacaggtgcaccgtaacaagcaatacattctcaatatcgacctgaaggactattttgagtcctttaattttggacgggtgcggggcttttttatcaaagataaggatttccaggtcgttccagaggtagctactgtgattgcccagatagcctgctatcagggcaaattaccacagggcgccccttcctcaccaatcataaccaatctgatcacaagaattctggattacaggatcgtgaaaatcgcgaaaaagtacaggtttacttacacccgatatgctgatgacctcaccttcagcaccaacaggaacctacattcaaataagctgaaagctacgaaggagctggataagtttctggaggaattagaggagctcatagtgtcttccgggtttgaaatcaatagcaaaaaaacacggctaagcgacgatatgcagcgacaggaggtcactggtttgatcgttaacaagaagcttaatgtcaagagagagtacatcaaaaacacacgcgccatggcctttaaactttacaaagacgaagcgttcgaaattgacggcaaacaggggacaatagaacagcttaccgggcgttttgctttcatattccagattggtcagtacaacaactacctcctatataagaagagcctggtagagaataatctggaggcgcagaaaaatctcctgggcaggaatctgtccaagaagagtgacagtaagtactactggaaatacatcttctacaaccgcgatctgcgaaaagaactgttctataacaagcagcacaaaactcataacctgcccgaagaattctactctatcggtaaggaagaaaagaagatgtatatggccctctttgatagcaaggagaaagagtataagaagttccttttctacaagtacttctatggaaactccaaacctattattgttacagaaggcaagaccgaccccagatatataaaagccgccttgaagaacttgtatccccaatatcccgagttgattgagcgcgatggtgacaagtttatcttcaagattgacttcctaaagcatagcaacacgatcgaatacctgttcaacgtccccgaggggggagaggggttcaattactggtacaactatttcagtaacaaggaggattttaagatgagcgcaaaggagaaactgctttaccccaactatattgagtatttccagaagctgacctctaggcagcctaagcaccccacaatcttcttgtttgataacgaaccgactgggtatcctttataccaatttgcatcatactctaaggacttggacatctcgccaaacaatctcgataccataagaaatcctatggttaactatcggatcaatcagaaatcgagcttatacattatgtccactcctctcgtgaaaaacgtgaatagtggctcctcttctgacatcgaagacctgctcatcgccaaacaaaaaatgccgacactgtatctcgacgggcaaaataagacctttaagaagaatggcggatttaactactatggcaaagaaattctctccatctatgtgctgaagtattaccagaacttcgacttttctgagtttattccattactcaatggaattcgcgataacatattggactatagaaaatga

SEQ ID NO: 8556 - RNA, 1977 nt, synthetic construct
  source 1..1977: mol_type = other RNA
atgaataagctgaaacaattaactaccaaggacgagttcgcgaggttactaggatttaaagacacgaagtacatcaactacttgttatacaagatcagaaccgagaatctgtatgaaacttttagcatccctaagaaaaacggaggcgagcgggtcattcatgctccaaagcgcgatttgaaaattctgcagaaaaaactcgcggaggtgctgtgggattgctacgtgtttgatcttgaaaagaagagcaaaaacaagaacgtaaaagttccgaaattgtcccatgctttcgagaaaaacaagtccattatcacaaatgcccaggtgcacagaaataagaagtatgttcttaatctggacctcaagaactacttcgacagttttaattttggcagggtacgcggcttctttataaaggataaaaacttccaggtggtcccggaaatagccactatgatcgcacagattgcttgttacgatggcaagctgcctcagggggccccatccagtcccattataaccaatctcattacaaggattctggattataggattgtcaagctggcaaaaaaataccgcttttcatatacccggtacgccgacgacctgaccttttccacaaaccgagatctgagttcaaacaaattgcgcagcgctaaaattctggagaaatttctatgcgagctcgagaacctgatagtgtctagcggttttgagatcaattctcaaaagacgcgactatctgataatatgcaacggcaggaagtgaccgggttggtcgttaataagaagatcagcgttaaacgcgaatatataaagaacacccgggctatggcctttaaactgtataaggatgaagagtttgagattgatgggaaacagggcaccatcgaccagctcactggaaggttcgccttcatcttccaaatctctcagtataacaactacctgctctacaagaagtcattgatcgaaaataacttcgagagccaaaagaatttgctgggtagaaattccctgaaaaaatctgagtccaaatactactggaagtacatcttctataacaaagacattcggaaggaactgttctacaataagcagcacaaaacatataaccttccacaggagttctattccatcaataagattgagaaggaaatctacatgagcctgtttgattccagagagaaggagtacaaaaagttcttgttctacaagtacttctacggaaactctaaacccataattgtgacagaaggcaagacagacccaagatacatcaaagccgcacttaaaaatctatataggaagtatcccgagctgatcgagaagaagggagacaagtttaagttcaagatcaacttcctgaaacacagcaacacaattgaatatctgtttaatgtgcctgagggcggtgaagggtttaagtactggtacaactatttttcgtcaactatgccctcaaatattttcaaagagaactttcccccaaagtccctcgggcaagacctctatcgcaagatgtaccccaactatatagaatatttccaggggcttactacacgaaaacccaattacctcactattttcctctttgacaatgaacctgccggcagtcctctctacaaatttgtgaatcatgcaagcgagcttcagatcgacaccaacaaccttgaccagatcagagaaaaaaacttctataggatctcgaccaaaaatagtctgtatgtaatggcaacgccacttctgaacaagggcaacagttcagatatcgaagatctgctgttagctcgtaatcagcttcctgtgttaaatggaaagaactttagcaaatccggtggaagcaattactacgggaaagacgtcctctctaagtatgtgctcaaaaacttcaagaagttcgacttcaccgagttcataccgctgttggatggcatccgtgacaatattctggattatagaaagaaccggatctga

SEQ ID NO: 8557 - RNA, 1980 nt, synthetic construct
  source 1..1980: mol_type = other RNA
atgaataaactgaaacagttgagcacaaaggacgatttcgcagagttactaggctttaaaaactcccgctttatcaactacctgctctattccattggtacagataatctgtacgaaacctttactataccaaagaagaatggtggagaaaggattattcatgcccccaaaaaggagcttaagtttttacagaagcgtctggctaatgtgttgtgggactgttatctgtatgacctgaagagtaagagcaaggaaaagaaactgaagatccctatgctgtcgcacgcgttcgaaaagaacaagagtattatcacgaatgcacaggttcatcggaataaaaaatacctgctgaacatagatctcaaagattacttcgactcttttaactttgggcgcgtgcggggattcttcgttaaagataaagacttccaggtgacctcagagatcgcaaccgtgatcgcacagatcgcctgctatcagggaaagctgcctcaaggggcaccaagcagtcccattatcaccaatcttattaccaggattcttgactataggatcgtaaagattgctaagaaataccggtttacctatactcggtatgccgacgatatgacattctctactaatcgcgaactgaactcaaacaaactgcgagctactaaggagctcgagaattttctggccgaactggagcgcctgataattagttcaggattcgaaatcaaccctaaaaagaccaggctgtcaaataatatgcaacgacaggaagtgactggactggtcgttaacaaaaagatcaatgtgaagcgagaatacataaaaaacacccgggctatggcttttaaactgtataaagatgggacctttgagatcgatggtaagcaggggacattggaacagctgactggccgtttcgcgtttattttccagacagacaagtataacaactacctactgtacaagaaatccctcatcgagaacaaccttgacgagcaaaaatacctactcggccgcaacagtagcaaaaagagtgagtccaaatactactggaagtatatgttctacaacagagacttacgtgacgagctcttttacaatcagaaacacaacacctacaatttaccaaaaggattctactctatctctgagaatgagaaggaggtgtatatgacgttgtttaactctaaggagaaagactataagcgctttctcttctataagtacttctttggaaacgataagcctatgatcataaccgaaggcaaaactgatcccctttacatcaaggcggctttgaaaaagatgtaccttaactatcctgaactagtcgagaaagtaggtaacaactttgtcttcaagatcgaatttctgaatcggagcaatacgattgaatatctgttcaacattccggaaggaggctctggcctgaattacttgtacaattacttctccaaccagattcccgccaattttttcaaacagaggtttccaacgaataacgatagaaaggacatttacaaggagctctatcccaactacatagagttcttttcaaacctgacattgaggaatcctaagaacagcacaatcttcctgttcgataacgagccgtcaggcaatccgctctttaagtttgtgaattacgccaaagatctccaagtcgagtccaataatttggaccaaatcagaggcacagccttcaagagaatcactaaaaaggggtccctatatattatggccacaccccttttaccaaatatgaacggcggtaacagctctgacatcgaggacctcatccttagcaaaaataccgcccccatactgaaaggcaaaaccttcctcaaaaatggcgggtcgaatcattatgggaaggaaattttcagcaagcacatacttaagaactacaagcagtatgatttctccgacttcattccattgctcgacgggatgagagataacatcctcgattatagaaagaagtga

SEQ ID NO: 8558 - RNA, 978 nt, synthetic construct
  source 1..978: mol_type = other RNA
atgaataaacttaagcagctggagacaaaggatgactttgcatctctcctcggtttcaagaacagtaagtacatcaactacattctctattctgtgggcaccgataatctgtataaaactttctccatcccgaaaaagaatggaggggagaggattatccacgcccccaaagaaaagttaaaacggctccagagaaagctggcaggcgtcttgtgggattgttatctggaatcgctgaaaatcaagagcaagaacaaaagcttcaaaatccccgctatctcccacgccttcgaaaagaacaagtcaataattaccaacgcccagattcatcggaacaagaaatacatcctcaacattgaccttaaggactactttgatagctttaatttcggccgcgtgcgcggatttttcctgaaggatgctgacttcaaagtcccagaggaaattgcgactgttatagcacagatcgcctgctataaagggaaactgcctcagggggccccaagtagccctatcataaccaatctgatatctcgaatcttagactacagaattgtgaagatcgccaagaaatatagatttacttacacgcgctacgctgacgatatgactttttcaactaactgtgagctgtccagcaataagctacaagcaacaaacgagctggaaaagtttctgaaagaactggagaaggtcatcaccctttcagggtttaaaatcaatccccagaagacaaggctatccaataatatgcaacgtcaggaggtgacaggcttggtggtgaacaagaaagtaggcgttaagcgagaatatttgaaaaatacaagggctatgaccttcaagctgtataaagacgagaagttcgagattgacggaaaacagggtacgatggagcaattaaccggacggtttgcgttcattcttcagattagtcaatacaacaactacttgctctacaagataaattgcaagatctga

SEQ ID NO: 8559 - RNA, 1953 nt, synthetic construct
  source 1..1953: mol_type = other RNA
atgaccaagttaaatcgattggagacaaagactaaaaacgactttgccaggctgttaggatttaagaatgcccgctatatcaattatctgctgtacatcatcaagaccgataacctgtataattcgttcaccatccccaaaaaaaatggaggtgagcgggtcatacatgcaccaaaaaaggagctgaagtttcttcagaagaagctggctgatgttctgtgggaatgtcacttggagtctgttgaatctaagtccaaggataagaacttcaaaacccctgtgctttctcatgcgtttgagaaaggaaaatccatcatcacgaatagtcaaatgcaccggaataagaaatacatcctcaatattgacctcaagaacttctttgattcattcaatttcggccgagtcagaggtttcttcatcaaagataaagacttcgcggtcagtccggagattgccacagtcatcgctcaaatagcatgctaccagggaaaactgccccagggggctcccagctcacctattataaccaacttgattactcggatccttgactacaggatagtgaaaattgccaagaaatatcggtttacttactcaaggtatgccgatgacatgactttttccaccaatcgggagctgaattctaacaaattaagagcatccaaggaactcgacaactttctaacagagctcgaggaggtaattgtgagctcggggttcgaaataaacccccaaaagacccggctgtctaacaatatgcagcgacaggaagtcacggggctcgtagtgaataagaagatcaacgtgaagagagaatatgtgaagaacaccagagcaatggcgttccagctctacaaagacggagcctttgaaattgataaaaagacgggcacactgaatcagttgacaggccgttttgcattcatcttccagatcgaccagtacaataactatctgctgtacaagaaaagcctaatccagaataatctcgacagtcagaaatatcttctcgggcgcaattccagcaagaagtccgaaagtaagtactactggaagtacatcttttacaataaggacctgaggaagaaactcttcgataatactaagcataacacagacaacttgcctaaggagttctatagcattggcaaagaacagaagaagatctatatgagcctctttaattctcgcgaaaaggaatacaagaagttcctgttctacaaatacttctttgggaacgataaacccgttatcattaccgagggcaagaccgatccacgttatatcaaagctgccttgaaaaagctgtatcaaaagtatccagaactgattgagaaagtgaggaacaactttgtgttcaagattgagtttctgaaccgcagtaacacgatcgaatacctttttaacataccggaaggcgccagtggactgagtttctggtatagctatttctcagacataaagtaccaaactgaggaggccaagaagctgttttatcctaactacatggagtatttctcaaaattcacctctagaaaaccaaaaaaccccacaatgttcttatttgacaacgagccgtcaggccaccctctgtttgagtttgctaatcacgctaaggacctgaaagactcttttaagaatcttgacagcaagagaaacacaagcagcaagaaactggcaaaaaaagggtccttgtacattatggctactccactttcccctgatattaattatgggtacagctctgatattgaggacttactactctcacgcaactccgccccaacccttaaaggtaagacttttagcaaagatggaggcgccaaccactacggtaaagacattttttccaagtacgtgttgaaaaactacaaggaattcgatttcacagagttcatccccctgctggatggcatcagggacaacattctcgattacaaatccctattctga

SEQ ID NO: 8560 - RNA, 2058 nt, synthetic construct
  source 1..2058: mol_type = other RNA
atgacgaaactaaataggttagagacaaaagatgactttgctcgtctgctcggctttaagaatgctaggtatatcaactaccttctctacatcattaagactgacaatctgtacgatagcttcactattccaaaaaagaatgggggagagcgggtgattcacgccccaaagaaggagttgaagttccttcagaaaaaattggctgatgtactctgggaatgtcatttggagagtatcgaaagcaagaaaacactccagaaacggctggccgcaatactgtgggaatgttatcttaaatgcctgaacttcaactacatagagaataatctcgccaatgtgctgtgggagtgctttttgaaagttttagagtttcgcccgaaggagaaaaatcccgtgttgagccatgctttcgagaagggtaaaagcatcattacaaacagccagatgcacagaaacaagaagtacattctgaatatcgacctcaaagacttctttgactccttcaattttggacgtgtaagaggattcttcatcaaagatcgagatttcgcagtgtcccccgaaattgcaaccgtgattgcccaaatagcgtgctatcagggcaaacttcctcagggttctcctagcagtcccattatcactaatctaattacccgcatactcgactataggatagtgaagatagccaaaaagtaccgattcacctactctaggtatgcggacgatatgactttttcaactaaccgcgaactgaatagtaataaactacgcgcaagcaaagaactcgataacttcctgactgaactggaggaggttatcatttcatccgggtttgagatcaatcccaataaaacacggttatccaacaatatgcagagacaggaagtgaccggcttggttgtcaacaagaagatcaacgtgaaacgcgagtatatcaaaaacacacgcgccatggcgtttcaactctataaggatgaagcatttgagattgataagaaacctgggacaatcaatcagctgacgggccggtttgccttcatctttcagatcgatcaatataacaactacctcctgtataagaagtctctgattcagaataacctggactcccaaaaatatctgcttgggagaaactcatctaaaaagagtgaatccaagtactactggaagtacattttttacaacaaggacctgaggaaagaactcttctacaacaagaagcacaacacctataatctaccaaaggagttttacagtatcggaaaagaagagaagaagatgtacatgtctttattcaacagtagagagaaggagtacaagaagtttcttttctacaagtacttcttcgagaacgacaaacctataatcgtcaccgaaggcaagacagaccctcggtatatcaaagctgccttgaagaaactgtacaagaaatatccagagctgattcaaaaagtcggcaataatttcgtgttcaaaattgagttcctgaaccataccaataccattgaatatctgtttaacgtgcccgagggcggagaagggttcaagtactggtataactatttttccgataaggaaggagtccagatgtctgacaatgagaaagttctgtacttaaactacatcgactatttcgaaaagctgaccaaaaagtctccaaagaatcccaccatatttctttttgacaatgagccgtccggcaaccctcttttcaagttctttaactatgctaccgacctgaatgtcagctctaacaatctgggccaggtaagaggtacttcatttaaccggatcactaagaagaacaacctttatatcatggccacccctctcttgtcgacacgtaacaatggaaacagctcggatatcgagtatctgctcttgtcaaggaatccctcaccaattctcaagggcaaaacgtttagcaaaggtgggggggccaaccactacggtaaggatatcttttccaagtacgtgctgaagaactacaaaaagttcgacttcacagaattcattcccctgctggacggaatccgagataatatactaaattactga

SEQ ID NO: 8561 - RNA, 2052 nt, synthetic construct
  source 1..2052: mol_type = other RNA
atgacaaaatttaatcagctgcagactaaggacgatttcgctaagctactgggattgaagtctgcgaaatatatcaattacctgctgtacaacatcaaaaccgacaacctgtacaactctttcccaataccaaaaaaaaacggcggcgagcgtgtgatccacgccccaaagaaggaactcaaattcctgcaaaaaaaactcagcaatgtgctgtgggaatgttacctggaatccattgaaagtaagagcaaggataaaaacttcaagactcccgttttgagtcatgccttcgaaaaggggaagtccattataactaattcccagatgcaccgcaacaaaaagtacatactgaacattgatctgaagaacttctttgacagctttaattttggtcgcgtacggggattcttcattaaagatcgggatttcgcagtgtctccagaaatcgcgaccgtgatcgcccagattgcctgctatcaggggaagctgcctcagggagcaccaagttcacccatcataacgaacctcattacccgcattttagattacagaatagtcaagatcgcgaaaaagtatcggttcacttattctagatacgccgacgacttgacgttttcaacaaatcgcgaattgaattccaataaactgcgcgcttctaaagaactggaaaattttctgaccgagttagaagacctcattatttcctcaggcttcgaaatcaatcctaagaagacaaggctgtctaacaatatgcagcgacaggaggtaaccgggctagtcgtgaacaaaaagatcaacgttaagcgtgagtatgtgaagaacaccagagccatggcattcaggctttataaagacggcgcttttgagatcgataaaacaccagggaccatcaaccagttaaccggtagattcgccttcatctttcagatcgagcagtacaacaactatctactgtataagaagtccctgatgcaaaacaacctcgactctcaaaagtatcttttaggcagaaatagcagcagaaaatcggagagcaaatactactggaagtacattttctacaacaaggatctgcaaaaggagttactgcacaacacaaagcatcacacttataatctacctacagagttttacagcattgggaaagaggagaagaaaacctacatgtcactctttaatagccgggagaaagagtataagaagttcctcttttacaagtacttctttgggaacgacaagcctatcatcattacagagggaaaaacagatcctcggtatatcaaggctgctctcaagaatttgtatcagaaatatccggagctcatagaaaaagagggcaacaatttcatcttcaaaatcgagttcctgaacaggagcaatactatcgagtacctttttaatgttccggagggcggcgagggctttaagttttggtacaactactttagcgacaaattctattacaacgagaagaaggaaaagaaattctttgcactgaatagtgaggaaaggatattgtataccaactacatcacgtactttaagcaactcaccaactccctgcctaactaccccaccatcttcttgttcgataatgaaagcaataaccggaatggcaatgataagagtgccctgttcttgtttgcttcccatgcaaaagatcttatgattcccaaaaacaaggatctcgaagactcaaagaatattaagctggaagagaagatctcagacaatctagaaaaggtccgaagggataagccctggaggatcaacaaaaaggacagtctctatattatggccactccccttatgccccatatgaatgatggaaaatcctcagacattgaggatcttctgttttctagttcccagaatagcctgcccattcttaagggaaaagagttccacaaagacggtggagacaatcactatgggaaagagatattttcgaaatacgtgctcaagaactacaaagagtttgactttactgaattcatccctcttcttgacggtattcgagacaatatactggattataagtccttgttctga

SEQ ID NO: 8562 - RNA, 1980 nt, synthetic construct
  source 1..1980: mol_type = other RNA
atgacgaaactcaatcagctgaaaactaaagatgattttgccaagcttttgggctttaaaaatgccaggtacataaatcacctgctgtataacatcaccacagacaatctgtacgaacctccaatagtgattcccaagaagaacggaggagagcgggtcatccatgcgccccagaaagagctcaagttcctgcagaaaaaactatctaatgtcctctgggaatgctatctcgaaagcattgagtcaaagagcaaagacaagaactttaaaaccccagtgttgtcccatgctttcgaaaaaggcaaaagtatcattaccaactctcagatgcatcgcaacaagaagtacattcttaatattgacctgaagaacttcttcgattcttttaacttcggccgtgtgagaggattttttatcaaagatcgcgattttgctgtcagtcccgaaatcgccaccgttatcgcccagattgcctgttatcaagggaagttacctcagggcgcaccctcctctccaattatcacaaatctcataaccaggattctggactacaggatagtgaagatcgccaaaaagtacagattcacctattcaaggtatgctgatgacatgacattctccaccaattgtgagttgaattccaataaacttcgggcctccaaggaattggataactttctgacagagctggaggaggtaatcattagtagcggcttcgaaatcaaccccaaaaaaacccggctgagcaataacatgcagcgacaggaggtaacgggtctggtggtcaataagaagatcaacgtgaaaagagagtacgttaagaatacacgcgctatggcatttcaattatataaggacggggctttcgagattgataaaaaacctggtactatcaaccaactaacagggcgattcgcttttatcttccagatcgaccagtataataactatctcctctacgagaaatcgttgattcagaacaatctggactctcagaaatacctgctggggaggaactccagtaagaagtcagaatccaagtacttctggaagtatatcttctacaataagaacctgcgtaaggaactgttttacaacaagaagcacaacacctataacctcccaaaggagttttactcaatttccgagaatgagaaagaggtgtacatgtgcctgttcaacagcaaagagaaggaatacaagaaattcctcttttaccggtactttttcggcaacgaccgccccatgatagtgacggagggcaaaacagatcctctctatatcaaggcagccttgaagaaactgtataagaactacccgaagcttatagaaaaagacggtgacgacttcatttttaagattgagtttctgaaccgaagcaacacagtcgaataccttttcaatatcccagaaggaggcgagggcctaaagtactggtacaattatttcagcaatcaaatccccgcaaattttttcaatcaaaagttccccgccaaaaatgatgggaagaagatctataaagagctgtatcctaattacatggaattctttagccaccttacctcaagagagcctaaaaacccaaccatcttcctttttgataacgaaccatccggaaaccccttgtttaaattcttcaaccacgcgactgatctcaatgtttcatctaataacctgggacaggttcggggcacttctttctacaagatcactaagaaggacagtttatatgtgatggccactcctctgatgcctcacatgaataatggaaatagctcagacattgaagatcttctgctatcgtgcaacccaagcccgatactgaagggtaagactttttctaagggtgggggggcaaaccattatgggaaagatatcttttccaagtacgtgctcaaaaactataaagagtttgacttcactgagttcataccgttgctggacggaattagagacaacattttagattacaccagttga

SEQ ID NO: 8563 - RNA, 2097 nt, synthetic construct
  source 1..2097: mol_type = other RNA
atgaataagctgaatcagctcaagaccaaagacgatttagccagacttcttgggtttaaaaacgcacgatacattaactacctcttgtatgataagcagaccgacaatctctatgagtcctttacaatcagcaaaaaaaacgggggggagcgtatcattaatgccccgaagaaagagctaaaatttctgcagaagaaactggcaaatgtgctctgggagtgttatttggaaagtctggagagcaagaattttcttcagaaacgcctcgctggcattttgtggaagtgctatctgaagtccttggagatcaactacatcaagaacaacctctctgattttctttgggagtgcttcatgaaagtccttggatttaaaccaaaggaaatcaaaactcctgtactatcacacgcctttgagaaaggcaagtcgattatcaccaattctcaaattcaccgcaataagaagtatattctgaacatcgaccttaaagactttttcgggagttttaatttcgggagggtcaggggatttttcattaaggaccgggattttggaatcagccccgaaattgccactgtgatcgcgcagattgcctgttaccagggaaagctgcctcaaggtgcgcccagttcgcccattattaccaaccttataactaggatccttgactatcggatcgtcaaaattgctaagaaatatcggttcacctatagtagatacgccgatgacatgacattcagcactaacagggagttgaattcaaataagctgcgagcatctaaggagctcgaaaattttctggccgaattagaagagctcatcatctcttctggctttgaaattaacccgaagaaaacccggctcagtaataatatgcagcggcaagaggtgaccgggttagtcgtgaacaaaaaaatctctgttaagcgcgaatacgtgaagaacactagagctatggccttccaactgtataaagacggcgcctttgagattgacacaaaaccaggtacattgaatcagctgaccggcaggtttgcgttcattttccagatagaccagtacaacaactaccttttgtacaaaaagagccttatacagaacaacctggactcccagaagtatctgctcggcagaaacagttcccgcaagtccgaatcaaagtactactggaagtacatcttctataacaaagatctacagaaggagctgttcgacaacaaaaaacataacacgtacaacttacctaaggagttttatagcatccccgaaaatgaaaaagaagtgtacatgtccctgttcaacagcaaggagaaggagtacaagaagtacctcttctataagtatttcttcggcaatgacaagccaataatcataacagagggcaagactgatccgcggtacatcaaggcagctctgaaacacctgtatcaaaaataccctgaactgattgagaaagatggcgacagattcactttcaagatagaattcctcaatcatacgaacactctggaatatctattcaatgtgccagaaggaggagagggttttaagtactggtacaactacttctctaatcagattccctccaacttctttaaacagaggtttcctacaaagaacgatgggaaggacatctacaaagagctctaccccaattatatcgagtactttagcaatctcaccacacgtaagcccaagaacccaacaatattcctgttcgacaacgaaccttcagataaccccctgttcaagttctgcaatcatgcagtggatctgaaagtttcatcaaatgatctggatcaagttagaggaacctctttcaatcgtataaccaagaaggacaatttgtacatcatggctacaccattactgtccaaccgaaataacggcaatagctcagatattgaggatttgctgctatcccgcaatctcccacctatcctgaatgggaaaacgtttagcaaatccggtggcgacaaccactatggtaaagagatttttagcaaacacgtactgaagaactttacggagttcgattttgctgaattcatccccttactggatggaatccgcgacaatatactgaactattggtga

SEQ ID NO: 8564 - RNA, 1971 nt, synthetic construct
  source 1..1971: mol_type = other RNA
atgaataagctgaatcagcttaagactaaggatgacttggccaaacttctcggctttaagaatgcccgctatattaactacctgctgtacaacatacagacagacaatctgtataattctttcaccattccaaagaagaacgggggtgagagaatcattcatgctcccaaaaaggagttgaaatttctccagaaaaagctggccaacgtattatgggagtgctacttagagagcattgagtcaaaatcaaaggggaagaactttaagacaccagtcctaagtcatgcctttgagaagggcaaaagcatcatcaccaatagccagatgcatcgcaacaagaagtatatcttgaacatagacttgaaggatttcttcgactcatttaactttgggcgtgttaggggcttttttattaaagatagggatttcgcagtgagcccagaaatagcaactgtcatcgcacagattgtgtgttaccagggcaaactgccacagggcgctccgtcttcccccattattaccaatctgataaccagaatcctagactatagaatcgtgaaaatagccaagaagtatagattcacttactcaaggtacgccgacgacatgacattttctactaatcgcgagctgaattctaataaactccgggcgtccaaagaattagaaaacttcctggcagagctggaagaactgatcgcttccagcggatttaagataaacccaaagaaaacgcgactgagtaacaatatgcagcgccaggaggtgaccggccttgtggttaacaaaaaaatcaatgtgcgtagggaatatgtaaagaatacacgggcgatggcatttcaattgtacaaagacggcgcctttgaaattgatactaagccagggaagcttaatcaactgaccgggcgctttgctttcattttccagattgaccagtataacaattacctgctgtacaaaaagtcgctgatacaaaacaacttggattcacagaagtatctgctgggccgaaactcctccaaaaaaagtgagtctaaatactactggaagtacatcttctacaacaaggacctgcggaaggagcttttcgacaatacggaacacaatacatacaacttgccgaaagaattttacagcatcggtaaggagcaaaagaagatgtacatgtcgctctttaacagccgggagaaggagtataagaagttcctattctacaagtacttcttcggaaatgacaagcccatcattgtgacagaaggtaagacggatcccagatatatcaaagctgcccttaagaagctttatctgtcttatcccgaactcgttgaaaaagtcggaaacaacttcatcttcaaaatcgagtttctcaatcggagcaacaccgtggagtatctgtttaacatccctggaggtggcgagggactgaaacactggtataattacttctccaacaaggagaaattccaaatggactccaaggaaaaattgctctaccctaactatattgagtacttccagaaactcacaacccgaaaaccccaataccctaccatcttcctgttcgacaatgagcctaacaataggaaaaaggatgataaagcccctctctttctttttgccagtcacgcccgcgacctggaaattgattccgacaacttagaacaggcgaggcgtggctcaagcagtcggatcaccaagaagggatctctgtatattatggcaactcccttattgcccaatatgaataacgggaattcaagtgatatcgaagacctcctgctctctcagaagaaaccacctattctcaagggaaaagcttttagcaaaaaagatgatccgaatcactacgggaaagagatcttctccaagtatgtcctcaagaattatacacagttcgatttcactgagtttattcctctgctagatgctatcagaaacaacatacttgactaccagaatatcaacgattga

SEQ ID NO: 8565 - RNA, 1962 nt, synthetic construct
  source 1..1962: mol_type = other RNA
atgaacaagcttaccaatgtggagtccaaagatgactttgcacgacttttaggcttctctaattcccgattcatgaactatgtgctatatgtcctcaggactgaagaactgtatgagacattcacaattcctaagaaatcagggggggagagaaccatcaatgcacctaaaaaggagttaaagatcctgcaaaagaagctggccaacctgctgtgggattgctatatcgaggacctagagtccgagtccaaggtgaaaaataagaaaatacccaacctgagtcatgcctatgagaagaacaaaagtatcataaccaacgccaaactccatcgcaataagaagtacgtgttgaacatagatctggaggatttttttgacagcttcaactttggcagagttaggggattttttatcaaagacaggaatttctgcgtgtctagtgacgtcgctacagtgatcgcccagatcgcctgttataaaggtaaactccctcagggtgccccatcttccccaattattacaaatctaattgctcgcatcctcgattaccggatcgtaaagattgcgaaaaagtacaggtttacctatagcaggtacgcagacgatatgactttttcgaccaatcgggagctggcctccaataaactacgaactactaaggagcttgacaagtttctggccgagctcgaaaaagttatcgtggcctcaggattcaagatcaataacaaaaaaacgcggctttccaataatatgcaacgccaggaggtcacagggttagtcgtcaataagaagattaacgtgaaacgtgagtacattaaaaacactcgtgcgatggctcataaattatacctgtctcagaggtttgaaatagatgggcgggaaggcacaattaatcagttgataggcagatttgcattcgttcagcagatagatcagtttaacaactacctgtcctacaagaagagcctgattaaaaacaactttgacgcccagaagtatcttatcgggaaggatagcggcaagaagtcagaaagcaagtactattggaagtatatcttctctaaccgcgacctccggaaacacttgtattacaatagcaggcacgacacctacaacttacccaaaggcttctacacaataggaaaagaagagaagaagatgtacatgagcctctttaattcacgagagaaggaatacaagaagttccttttctataggtacttttacgggaatgacaagccaattattgtaaccgaaggcaaaaccgacagccggtacatcaaggccgctctgaagaaactctattataaatatcccgaactgatcgagaaaaacggttccgatttcgttttcaagattgagttcctgaaacattcgaacaccattgagtacctgttcaatgtcccagaaggcggtagtggatttgaatactggtatcgctacttctcagacaaaaagcgctttcagatgggcgaagttgagaaggtggtgtaccccaactacatcgaatactttaagaaactgacgaacagaccgcccgacaatcctacaatcttcctcttcgataatgaacttcaaggaccgctctataacttcgcgaatttcgcaaaagatctggctatctctaccaacaatttcaaccaaatcagatactccagttttgatagaatcgtgaaaaaggattcactctacgtaatggctacgcctttgatccccaagattaacaatggagtattctctgacattgaggatttgttgctggtgagaaattctactccaattctgcgcggtaaacagttttcaaaacacggagggagtaaccactatggcaaggacattttcagtaaacacgtcctgaagaactatagcaagtatgactttactgaattcatccctctgttggatggggtgaagaacaacataaaggactattaccagaagagcaacaatcggaaaaattga

SEQ ID NO: 8566 - RNA, 1956 nt, synthetic construct
  source 1..1956: mol_type = other RNA
atgagcgactatgtcaaccttaaaaccaaagatgacctggccaaaaatctgggatatagggactctcggtatctgaattacctgttgtataaagtaggagtggacaacctttataggactttctcaattcctaagaagaatggggatgaacgcataattaatgctcctttgaaggagttgaaaatcgtgcaaaggaagctcgccaacctcttgtggaatcgctacctggagatcctggaaacaaaaagccgagatcgcggaatcaaaattccgagtatttcccatggattcgaaaagaacaaaaacatcatcaccaatgcacagcagcatcgtaacaagaaatatataatcaacgtcgacctggaatcatattttgactgttttaacttcggacgcgtaagaggcttttttataaaagaccgagacttcaaggtcagtagcgatgtggctaccgtgatggcccagatagcttgctatcagggcaagttaccccagggtgccccttcatctcccatcattaccaatttgattgctagaattctggattatcgcatcgttaagctggccaaaaagtacagattcacatatacacgatacgctgatgatctcaccttctccaccaatagaaatctactatccaacaagctcagagctgagaaggagttcaacgaatttctcgtggagcttgagaaaatcataacaactagcgggtttaacattaaccccagcaaaacaaggatttccaacagttaccaaagacaggaagttactggcattgtagtcaataagaagatcaacgtcaaaagggactactttaagaacactaaagcgatggcatacaaactatataaggacggcgaatttgaaattgatggtaaaagtgggacattagagcaactgtctggccggttttcttttatctttcaggccactcagtacaataattacctcttctacaagaagtcgctgattgacaacaacttagaataccagaaaaaccttctcggacaggggacaaacaagaaatccgagtccaagttctattggaaatacatcatctacaacagagatctccgtcgcgagctattttataacgagaagcacaagacctataatctgccagatgaattttacgccatttccaaagaagagaagaagaactatatggcactgttcgattccaaggaaaaggagtacaagaaattcctcttctacaagaacttctatggcaacgacaaacccatcattgttacggaaggcaagacggacccacggtacatcaaggcagccttgaaaaaactttacctgtattatcccgaattgatcgagaaagttgataaccggtttgtgttcaagatagactttctgaaacacagcaatattatcgagtacttgttcaatgtgcctgagggcggtagcggattcatgttttggtacaactacttctctaataaggagaagtttcacctgtcaaatgaggagcaacttctttaccccaactatatagactttttccgtaagttcacctcagaaaaggcgaataacccaactatattcctgttcgataatgagccatttgggaatcctctgtatcagtttgtgaattatgcgaaggaccttcagatcgatacaaataatctgaataccgtgcgggggccctcattcaatcgaattagtaaaaaggagagcctctacctgatggccaccccactcgtttcgaatctgaataatggtaattcttctgacgtggaagatctgctgatatccaccaacaagctggcaatccaaacgttcttcaacatcaagaagatcaattacaagaggctcgaagacgtgaaaaaccataaagagattttcagcaagtacgtcctcaaaaactacgagcagtttgactttactgagtatattccgctgttagatggcatccggaacaacatcttagattacaggaaatga

SEQ ID NO: 8567 - RNA, 1986 nt, synthetic construct
  source 1..1986: mol_type = other RNA
atggggaagctacaagaactggaaacaaaagacgagtttgctcggctgctcggattcaatgatgcccggtacatcaactacttgttgtaccacaatgagaataaccaggacaagaagttcattaacacagagaatctctactatagctttaccattcctaaaaagtcaggaggcgtgagagaaattaatgcgcccaaggacgaacttaagttcgttcagagaaaactggcagaaatcctgtgggatgactacgtagaaatgctaaaagtcaacagcaagaacaaggactttaaaatcccttccatatcccatggttttgaaaaggaaaagtcaatcatcaccaatgcaaaacagcatcgtaataagaggtttgtgctcaatctggacttggacaactttttcgatagctttaatttcggccgagtgcgcgggtttttcattaaggataaagattttggcaccactccagagatcgccaccgtgatcgctcagattacctgctaccagggtaaacttccacaaggcgctcccagctcccccattatcaccaacttgatcgcccggatcctggactaccgtatagtcaagatcgccaagaagtatagattcacttatacgcgatatgctgatgatttaaccttcagtacaaaccgggaactttattccaataagctcaagtcccgcaaagagctcgagaatttcctcgaagagatcaagataaaagtggaggccagtggcttttctatcaatgagaaaaagactcgcctctcagatcagtcacaaagacaagaagtcaccgggatcgtggttaacaaaaagctcaatgtaaaaagggagtactttaagaacactaaggctatggcattcaagttatataaggacgagaaattcgagattgatggtaaagaaggcaccatagatcagctcaacggcaggttcagcttcatcaatcagattgatcagtacaacaactacttgctgtacaaaaagtctcttatccagaatacgttgagccaccaaaagaatttgattggacaggagctctccaaaaaaagcgagtccaagtattactggaaatacatattccagagtaaggacttactgaaggaaacatactataacaagacacatcacacgtataacctgcccgtagagttttatgacatcgccaagaatgagaaaaagctgtatatgagctatttcaacgctcatgagaaggagtacaagaaattcctgttttacaggtactttttcgggaacgataaaccaattattgtgacagaagggaagacagaccctagatacctgaaggccgcactgaaaaacctttatcttaactatccggaactaattgagaaagtcgagggcaaatttctttttaagatcgacttcctctcgcactctgacactatcgagtacttattcaatgtgccggaggggggagaaggcctgaaatggtggtataactatttctcagacaaaaactaccagaacaaaatgagtgaggaagagaagctattatatcccaactacatatcttacttccgcaagcgcactggaagggatcctcgaaaggcgactatcttcctgtttgataatgaacctaagggatcgccactttttaattttgccaactacgccaaagacctgcagattgacagcaataatctggaacaggttagacgggacaacttctacaagatttctaagaaagagtctctctatctggtggcaccacctctactgacaaacatgaattttggaaactcttccgatattgaggacctgctcctgtccaggcagaaaatgccaactctttacatggacaaacaaatgaaaaccttcaacaagaacggtgggctgaaacactatggcaaagaaatattgagtaagtacgtcctgaagcaccatcagaagtttgactttaccgagttcgtgcccctgctgaatgcgattcgcgataatatcctggattataatgtttga

SEQ ID NO: 8568 - RNA, 1929 nt, synthetic construct
  source 1..1929: mol_type = other RNA
atgaataaacttcagaccatccagagcaaggaggactttgctcacttgctggggtacaaaaagtattcctctataacatacctgctgtacaagatcgggatcgacaacctttacacctccttcgaaattccaaaaaagactgggggaaccagaactatttatgcaccacagaaggccctaaaaaaactccagaaaaggtttgcaagtctgttatgggaagcatatgtagaaaacttccagccaacctctaataaaaaacacaaaaagctgcccaacgtgtctcatgcgtttgagaagaataaaagtatcatcaccaacgctaaaaggcacagaaataagaagttcgtcttaaaccttgatcttgaagatttcttcggttcatttcattttggaagggtgcggggatttttcctcaaaaatcgggactttcaggttcctgaagaagtcgctaccctgatcgcccagctgacttgttacaaaggctcactaccccaaggcgcacccagctcccctattataacgaacctcatttgccagatattagatcaccgtattgtgaaactggccaagaagtatcgcctcacttatacacgttatgccgatgatctgactttttctactaacgctgaactgccagcggaaagctttgaagccttcttcacacagctccaggatatcattcaccgaagcggcttttctatcaatcaccgcaaaacaagaatcagtgacaatggccagcggcaggaggtcactggcctgattgttaataagaaggtgaacatcaagcgggagtactttaaaaataccaaggccatggcttttcatctttataaggacggacagtttgagatcgacgggaaaccgggaacaattgaccaactcaacggcagattcgcttatatccagcagattgagaactataacaactacttgctctacaagaaatcattatccaccaatggcatcgaatatcaaaagtacttgttgcctaagtatgagaataaaaagggcagggataatttttaccaccattacatcttcaacgagcaggacctggttgagccaaccaatttctggaattccaagcacaagaaatatgagttgccccagacgttctacaaagccgagaagaattcgaactacaactacatggagaattttagtagccgggagaaagaataccaaaagttcctgttcttcaagaatttcttcatgaacaacagacccctgatcgtaaccgaagggaagacagacatcgtgtatctgaaagccgctcttaagaatcttgcatcaaaatacccttccttaattgaaaaggaggacaatcagttcaacttcaaaatcaacttcttcagtcatacagccacaatcgactatttgttcaacattccaaagggcggtggtgaggtgtttaaacatctgtacaactacttttctgacaatacaggaattaagcaacagaagtatctctacccaaactatttgaagtactttagggaacttactagtcgagagcccaaaaatccgacctttttcctgtttgataacgagcccaaggggaaccctttgtataattttgctaaccacgcccgcgacctcaaactggattctcagacgctcgacatactgcgcataaatgcggtcgatattttcgtgaagaacaatttgttcctgcttctcatacccctgctgtcagggaagtcatccagcgatattgaggacctgctcctggccgagcaatccatgcctattctgaacaacaagagcttctcgaagaacaataatgatgaaggtcgaaattcttactccaaggaaatactgagcaaatacatcctacgccattaccaaagctttaacttcaacaagttcatccctctatttgatgcactggagaaaaggattctcgagtataaagagagcaccaagtga

SEQ ID NO: 8569 - RNA, 1683 nt, synthetic construct
  source 1..1683: mol_type = other RNA
atgaagaaaaaaaacatcctgtacaacgtcatttcaaagagagcattggcaaccgtgctgaatgtccagtataaaactctgacatatgttctgtacaggcggggagtggacagcttctacaatgggttcgagatacagaagaagacaggaggcacaagaatcattaatgctccacaaggtgaattgaaaaccatccagaaaaatctcgccaaaattctggaaaagtcgatcaacaatagctcaaacatttcccacggcttcatcaaaaataagagcatctataccaacgcagccatacacagaaacaaatgctttgtgcttaacatggacctccaaaactttttcgatagcttccattttggtcgtgtgcgcggattctttattaagaaccgcaacttcaattgtacaaatgaaatcgcgacgatgatagctcagatcgtctgttataaaggaaaactgccacagggtgccccttcgagtccagtcattactaatctggtgtgcgggtctttagattatcgcatctctaaactgtctaagaagtataagctggattatactaggtatgcagacgatattacatttagtactaacaaccgccattttatctgtgaatacgagaatttcctgaatgagattaccgaaataatcgagaaaagcggattcaagattaacgataagaagacacgacttaccttttcacacaaaagacagactgtaactggggtagtggtgaataaaaaattgtccgtgccgcgcgagtattacaaacagacacgagctatggccttcaacttttacaagaataggattgcttacttggatgagagcaacaagacgctgaaccagattgaaggccggttctcctacatcaatagttttgacaagctcaataacatcctagaaagcgacaagaataacaagaagaaaaacctgaaggatctgaacaaccgggaaaaggattacgccaggttcatcttctacaagtacttctacatgaattccaaaccactgattattaccgaaggcaagaccgatatcctgtatatcaaagccgctttaaaaaaccttgtagggtcatacaaggatctttacaacggtgagtttaagatcaacttcttgagaaggagtaaaaggtttgcgttcctgttaaagatttctactgatggagcagacaccataaagaacttctacaagaactattacaccaagcctgttatcaaagacctatcctttgactactttctggacttcggctattaccccgactgccccatcattatcctgctcgacaacgagcctgacggcaaacacccccttggcaaatttgttagctccgataaatcatccgagttgttagagcagctcagattgaatggctttatccggctcaataaggttcacaatgtctatctatctgtggtccccaaaaatcctgacaaaaagctcgaccgttacgaaatagaagatctgtttgacgaggaactcctccatatggagctcaatgggaaaaagttcaatcgagagggcctgaaggggtattatacgaaggacgatctttctaagtatgtgtacagtcattacgaggagataaacttcaacaactttaatgccatgttcgagaattttcggaatataattgtggactaccaaaagtggtatcttgccaatatcaacaattga

SEQ ID NO: 8570 - RNA, 1974 nt, synthetic construct
  source 1..1974: mol_type = other RNA
atgtcatgccacgccctcttcatcatcatgaagtacacagagattaagaccatcattgatttcatcaaagccattaaagtgaacaactactcctacatcaattacctgctgtacggaattaaacccaataaacagtacagcctctttgaaatacccaaaaagaacggcgactctcggcagattgtctctccaaatcctaaactaaaaaagatccagaagcgcatttattcactgctgtggcagagatatgaagaggtgatgctgagtaagaccgggaagtaccagaaaactcccagcctatcccacggctttctgaagaataggagtatcataaccaacgcccagaaacaccgtaaccggaagatcattctgaatattgacctcaaggacttttttgattcctttcatttcggaagggtcaggggattcttcctcaaaaacaagtacttcaagttgcctgaagaggtggctactatattagcacagctcacttgctataacggaaaactgcctcaaggcgctccaacaagtcccttgatcactaatctgatctgtgagatactggactatagaattgtgaccttaagcaagaaataccgggttacttacaccagatatgccgacgatttaacgttctctacgaacaacaattcatttcttcagtcagtgagcgaatttatcattgagctgacaaacattatccaaaagagtggctttgaaattaacgattccaaaacgcatttgtctctgtataaccagagacaagaggtgacagggctgatcgtcaacaagaagatcaacgttcgccgtgagttttacaaaaaaacccgagccatggcccacaatctatacaaaaatggcgagttctacattgacgaaaataacaataagggctcgattaatcagttgcacggccggtttagcttcatctataacatcgagaagtacaataacttcctcagttacaaaaagtccctgtccaagaatagcgtcgaatatcaaaaaaacttgctatcccgcaacattgggataaagggtaacaatgatctctacaccaaattccttttacaggaacacgacataaataataccacttactactcccctgaacataataagcttttccttccaaaggatttctattcctacttcctgaaatacgaatctgactatatcaagtatctgagcgcaaaggagaaagaatatcagaagttccttttttacctgaacttctatgggaattcttatccaacaatcgtatgcgaaggtaaaaccgatcctctctatattaaggctgcgttgaaaaacctgtataaagattatcctgagctggttacgtatgacgatcagaagttcaccttcaagatcaactttttcaaaaggacatctgacaccaataaactcctgtttggcgtgccagagggaggtgggagtagccttaagttcctttataactacttctctgacattaagcccaagaataatactcaagaggatatttacacgaactacctggagtattttgagaatttgacactccacagcgcaatctcacccaccatcttcctgtttgacaatgagggcagcgggcaacccctgtctaactttatatgtcatgtggcaaaagacatccgcataccaaacaatgacctcgatgaccgcagaaaggagatgtactgtcagaaagtcaaaaagaacctttttgtactgagtaccccgaaagcggctcatgatacaaagtccgatattgagtccctgttaatcaacaagcccgttataaatggacgaacatttagctcacaggagtcatataaacgggaatttgagtacggtaaaaatgagctcgccaattatgtgctgaagaactacaagaacatcaatttcgagaagtttaagccgctcttgaacactatcagggaaattaacatctcgtacaagaaggaatacaataagctaaacagcaaacgagaatga

SEQ ID NO: 8571 - RNA, 1728 nt, synthetic construct
  source 1..1728: mol_type = other RNA
atggagaatttgagcttaataaataccaagcggactctcgcttttcatttgtcaatcccatacaaatcgtttgtgtatcttctctaccatctagaccacccgtatagcaccttcgagattttgaaaaagaatggggagtctagggtaattaattcacctcacccgaaattgaagcggctgcagtataagataaaggatctcctggaaacacagtacaatctcatgatgaaagatcgcgtgtctcacaacgtttctcatgggttcatcaaagagaggtccatatttactaatgccaaaattcaccggaacaaaaagattgtgttcaacatcgacattaaggacttctttaagagtatccactttggtcgtgttaggggctttctgatcaaaaacaaatactttctgctgaacgatgaagtggccactactattagtaagctgatttgctacgaaggcagccttcctcagggagcacccacatctcccatcatgagtaacctcatcctgaacatctttgatatgaaagtcctggacatttgccagaaatattcagtcgattataccagatatgctgatgacttgacctttagctctaacagccggaagttctaccagtccttcggggatttctactatgagatcgaacaactgataaataagaacgggttcaaactaaatggaagtaaataccgagtacagttaaacaactccagacaggaagtcacaggcctggtggtgaacaacagactgaatataaagcgtgactactataaggcaacacgctctctcgtccataaatttctgttggaccagtccccaatcatcaacgagcaggttcttaatgctaatcaaattgagggtcgcctgagcttcatccattctatagagatttacaacaagaagatcgagtacaataaggaacgccaggagaaaagttataggaaggactttacgacatatttacacgattccgtgcttaatgctaaggaaagggagtaccagaaattcctgttctacaaccttttctataagccaaataacatcgtggtcttcccagaaggaaagactgacatctactacataaaagcggcactaaaaaagtattacaaggagtaccctgaactcgtggagttcaaggacaacaagtaccactacaagatcaactttattaagcggaacaagagactgtattacttttttgacctagccattgatggagccgatacaatgagcaagatcctgaattattactcctcaaaaccagggggcaaacacaataaaaaccccatcaactacttccagtacttcaacgaaagactcgatattcaaccctccaaacctgtggtgctgctttttgataacgaaggcaaagacaagcccctccataaattcataaatacggccaaaaagcaactggacatcgattcggatatgttaaagagcaaactgaatacctgtgacccttcccctgtaaatttgatcggcaatctgtatatccttaccattaataagctggaggcggacaaagagtatgagattgaagacatgataaaggagtataccgacaacttggtgatcaatggacgaaaatatctgaacaagggtgaaggcaactcaattagcaaaattgtcctcgcccaaaacgttctggagaattacgaaaccatcaacctcgagaatatcaagccccttctcaataagctgaagattctcaagaatctgtattga

SEQ ID NO: 8572 - RNA, 1680 nt, synthetic construct
  source 1..1680: mol_type = other RNA
atgaacgattataaggctgcccgtgccgaagtcagcaggttattcggtattaaactgaagatgatcacctatgtcctgtataaaaaaggcgtggagaacttgtatacatcctatgatataccgaagaagaatggaggtactcgcgttatctacgctccagattccaaactgaataagatccagaaaaagatctcagagaaactgtatgagattcacatcaattacatgaatcaggaaaagatcaagtctactatctcacacggctttgaaaagaacaagggaataatcacgaatgcataccgacataagaataaaaggtatctggtcaacgtggatatttccgacttcttctcctcttttaatttcgggagagtgcaggggtacttccataagtcacaggaatttggattttctaaagaggtgtcgacaattatagcccaacttgtttgccataatggcaaactacctcagggggcacctacaagccccatcattagcaaccttatcttcaatatcgtggacaggcggatcttaacccttgccaaaaaatataaactctactacacccgttacgcagatgatatgagttttagcaccaacaataaggagttccaaaaggagtataaaggcttcatccaggagcttacagacctcctcgagaagagtgggtttatgataaatcacaacaagacccggtttgtgtattacagcagtcggcaggaggtcaccggcctaactgtaaacaataaaatcaatgccagtcgcaatttcattaaccaaacaagggcgatggcaaaccagctctacaaaaaggataacttccagatcaacggtaaagacggcacactagcacagctggaaggaagatttagctttattaatcagctggattggttcaataacagactcgaatataagcgaaccaataagaagaagaacaagaagtacatcagcgacttgaatgctcgcgaaaagcaataccagtacttcctgttctacaaatactttttcaagcccataaagcccactattgtgactgaggggaaaaccgatattctgcacatcaaagcggccctgatgaaatactgcgatagatatcctaaactgatcactaaatctgctgacggaaagtacgaattcaaactgtatttcctgaacaagactaaaagactggaatactttctggggatatatagggagggcgctgatacgatgaagaacatttggaacttctataaaggtgctcacggctttacgaacatattctcatatctctctaagaaatgccttggggattccttaaatcgggtaaatccagtgattttactctttgacaatgagcaggttacagataaacccttgcgcaagttcctcaaccatatcggaattaaggccaagatcaatccagacctcatgaaccttacagccaacctgtatctgcaaaccataagtctcataaacgactttgacgaatgtgaaattgaggacctgtacagcgaggatattctgaacatcatcattaagggcaagaagtttgaaaaaaccgtcgagaaggacaaggaagacacgttttccaaagacattttctctaagtacatcttggagcactactacgagattgatttttccaacttcattcctttgttggactcaatcaacgacgtgtgtaaaaccgactga

SEQ ID NO: 8573 - RNA, 1722 nt, synthetic construct
  source 1..1722: mol_type = other RNA
atgaaaaattataaggatgcccggaaaaaagtagctggatggattaaggtgaaccaaaaggaattggtatatgttctgtatggtaagaaagtggactacttctacaaaagttttcccattccaaaaaagaacggtgaaagcagggtcatatatgcacctaaagacgagctgaaaatcatccagaagaggctttcacagaagctctatgaaacccaccgcgagtacatacgacagtacaggatcaaatcaactataagtcacggatacgaacaaaaacggaacattattaccaatgcccggaggcacaagaataagagatatctcctcaatattgacatctctgatttcttcccttcattcaattttggccgggtgcaagggttcttctacaagagtagagaattttccttttcgaaggaggaggcaacaataattgctcagctcgtgtgttataacgggaaattaccacagggggctccaacatctcctattatcagcaacctgatctttaatatcgtcgatcttagaatcctctctcttgccaaaaagtataaactttactacacgcggtatgtggacgacctgacattttccactaatcataagcgcttcaaggagacgtgcagcgacttcattaaagagctgaccgacctgttgaagaagaacgggtttgaaattaaccagggtaagacacgcctggaatactattcctccagacaagaggtgactggcttgacagttaacaagaaaatcaatgcctctcgtaactttattaacatcacacgggcaatggcaaatcagctgtatcgaaccgacgaatttcaaatagatggagagaagggatcgctggagaaactggaggggcgcttctccttcattaatcagctggattggttcaacaacaaactggaacacaaaataaagaagggcaatttcagtaagcgttataatagcggctttaacggccgagagaaacagtaccagtactttctgttttacaagtacttcttcaagccaaagaaacccactatagttaccgagggaaagactgatattttgcatatcaaagccgccttaatgaaatattcagacaggtaccccaatttgattgtgaaagaggacaatggcacctataagttcaagatctacttcctcaacaaaacaaagaggctcgagtacttcctaggcattagcgtggatggagccgacactatgaaaaacatctggaatttctatcacggcatggaaaactgcttcaacatatttaagtacctgtctgtcaagaacaataatgcaactcttgataaggctaaccctgtcattctgttatttgacaatgagcaggaaaaaaacagaccgctgaagaagtttttgaactacacgaagatcaatctcgaggaggctaatatttgccagaaactcaactttaacctgtacctacagaccattccccttatcgggaagttggataagtgtgaaatcgaagatctgtatcaagaggaaaccctgaatcttaccatcaacggtaagaaatttagccgtgacgccaaatttgatcagaaaatctatttcggcaaggcgatcttttctagatacatcatcgatcattacaacgagattgatttctccaatttcatcaagctactcgacagcatcaatcgcatctgtattaaagaccagaatgcgtacctggacataaacaacaaggtcttatccaactga

SEQ ID NO: 8574 - RNA, 1671 nt, synthetic construct
  source 1..1671: mol_type = other RNA
atgaatgattataagattgcgcggaaggaattggctcgtctcatcagcgtggacctgaaggaaatcacctatgttctctacaaaacgggtattgagaatagctacgtaagctttgaaattcccaaaaagaatggggaatctagggttatcgacacccccaaggacaagttgaagtggatccagcgaaagctgtcggagaaactctatcagatgcattctgattatatgactcaaaacggtatcaaaaccaacgtgtcgcatggcttcgaaaagaataaaagcatcattaccaacgcctacagacacaagaacaagaaatatttgctgaatgtagacatctctgactttttctcaagctttaatttcggtagagtgcagggatacttttataagtctcgggaattcatgttctccaaagagatagcaacaatcatcgctcagctagtgtgttacaaagggaaacttcctcagggcgcgccaacttcaccgatcatttcaaatctcattttcaacatcgtcgacattcagatcttagcacttgcaaaagaatacaggttgaactacactcggtatgctgatgacatgagtttttccacaaacaacaaagtctttgagaaggagtacttaaacttcatacaagagttgtccgaccttctcggcaagaatggcttcgagattaaccagaataaaactagactggagtactgtagtagcaagcaggaggtgactggccttaccgtgaacaacaaaataaacgcctcccaaaaattcattaagaatacaagggccatggccaatcagctgtataagaccaatagctttcttattgacggcaaggatgggactatcaaccagctcgaagggcgctttagttttatcaaccagctggattggctgaacaataagttagagtaccgcaccaccaagaagaaaaccaataagaaattcatctccgggctgaacgctcgtgagaaacagtaccagtactttctgttttacaagtacttcttccggcccaataaacctacaatcgtgactgagggaaaaacagatatactccatatcaagagtgccctgatgaaatattgcgaccgatatcccaactttataacaaaggtggccgatggagagtatgactttaaggtatatttcctcaacaagaccaaaaggctgaattatttcctaggcatttccggagatggagcagacacaatgaagaacatttggaatttctacagcggcaagaacaactacgaaaacatatacgagtacatgaagaagaagaatcaggccgagtcttctaataaagtcaatccagtgattcttctctttgataatgagcaaaagtccgatagacctttgaaaaaattcctgacgtattcagatgtcaagatggacgatggtcagatctttaaacaactgaaagctaatctgttcctgcaaacgattccactggccaatgggctagaggagtgcgaaatcgaagacctgtatcagaaagaagttctgaacgtgatcattaacggaaaaaagttctgccgcaacgaagaggacgactctgaaaagtacttcggcaagcacatcttttcagtctatataatggagcactacaatgaagttgactttagcaacttcttacctattctcgattccatcgatagtctgatatga

SEQ ID NO: 8575 - RNA, 1650 nt, synthetic construct
  source 1..1650: mol_type = other RNA
atggtggcaaagctgataaacgtagaattacgggctatcacatacgtgctttataagaaggggattgaaaagtcctataccagctttgaaatcccaaaaaaagccgggggcacaagggtgattgactccccaaacaaacagctgaagagaatacaacggcgtttgggcaaaaagatctatgacattcacaagaactacctggatcagaaccgtattgcatcaaatataagccatggttttgaagttggaaagggtattatcaccaacgcccgcatccataagaataaaaagtatctgctcaacatcgacatcgcaaactttttttcgagcgtgaatttcgggagggtacagggctacttcaacaaatcccaggagttcctgtttagtaaagaagtgagcaccatcatcagccagttagtatgttacgataaaaaactgccccaaggagcccctacctcgccaattatctccaaccttatcttcaacattgtggatctgagaatcctgtctcttgctaagaagtacaagctgagttataccagatatgcggatgacatgtccttttctactaataatagagccttccagactgactacattaattttattcaggagctccgcaatctgctcgagaatagcggcttcgaaatcaatgagaacaagactagattggaatattactcctcacgccaagaggtgactggactcaccgttaataaaaagatcaatgtcagcaggaagttcattaaacagacacgggccatggtggatcagctgttcaaagccaattccttttacattgacgatacttttgggacagaggaacagcttgagggccgactggcctttatcaatcaactcgactggtataataacgaattggagcctgagtccaaaaagcaaaaggctaataagaagtacatgtcaggccttaatgcacgcgagaagcaatatcagtacttcctcttctacaagtacttttttaagccctctaaaccaaccattgtgacagaaggcaaaaccgatatactgcatataaaggctgcgctaatgaaacacagtgatcggtatcctaacttaataacgaaaaatgacgagggcaagtacgtttttaacttgtacttcctaaacaagacgaaaaggctcaaatatttcttcggtatagtccagaatggggccgacactatgaagaacatctggaatttctataacgggaaaaacaactgcgacaacatcttcaagtacatcaatgataagagccagtatggagtcattcgaaacgtgaaccccgttatactcctctttgataatgagaaagaaccggacaagcctctgcggaagtttttaaatcacattggaatgcagtcaggaattgacaagccgtttctgaagctaaaggctaatctctatctgcagaaaatccccaggatcaacaattctgattgtgagattgaggatctgtactctaaagaggtcttgaacatttctatcgacggcaaaaaattcgaaaagaacgtcaaagacagtgtggaggacacattcagtaaggacatattctcaaagtacattcttgagcactaccaggaaatcgattttaaaaacttcctgcccttgctggatagcattaacaacatctgcaaaatcgagtga

SEQ ID NO: 8576 - RNA, 1677 nt, synthetic construct
  source 1..1677: mol_type = other RNA
atgagcttgtataaaaatgctagagaggaggttgcccggatgcttaatatccatcataaagagctgacttatgtgttatacaaggttggtatcgacaagtcctacaaaactttcaagattcccaagaaaaacggaaaataccgcattattaacgcccctactgagaaactaaaacgcatccagaagaaactggcggacgaactctacaatatgcatatcgaatacctgcacaacaacaatatcaagtctatcatttcccacggcttcgagaagaataagtctatcataactaacgccaccgtgcacaagcgtaatcgatatctcttgaatatggacatactcgacttctttccttcttttaacttcgggagggtacaggggtacttcgaaaaatcacgcgagtttatgttttccaaagaagtctcaaccgttatcgcgcagttagtgtgttttaatggcgaattgccccagggtgccccaacgagcccccttattgctaacctcatatttaacattgtggacatgcagattctgcccattacgaagaaatataaactgaactacacccgctatgcagacgatatgtcattttctacgaacgattacaagttcaagcagaattacgtgtatttcatcgaggagctcacaaatatcctggagaaaaatgggtttggggtgaacacagaaaaaacacggttacaatactattccaaacgtcaggaggtgacaggtttgaccgtcaacgataagataaatgccaacaggaagttcattaacgagactcgggcaatggctaatcaactctataaaaccggaggcttcaaaattaatggcgaggctggcagtctcctgcaactggaaggcagattctctttcattaatcaactggataagtccaacaacaaaatgaatggggtgagcgggaataatagatatatcaacaagttgaacgcccgagagaaacagtaccagtatttcctattctacaagtacttctacaagccacagaaaccgaccatcgtcacagagggcaagacagacattattcatataaaggccgcacttatgaaatactgcgatatgtttcctaagctcgtcagtaaaaacgatggacactacgatttcaaaatttcgtttctgaacaagaccagtaggttgaagtatttcctgggcatcagtgagtatggggctgacgcaatgcttaatatctggaacttttacaccggcaataataacaggaccaacatatacaagaacatctgtgacaagagcatcagagataagaatgagaacataaatcccgtatttcttctgtttgacaacgagaaggaatctgacaagcccctgaaaaagtttctgggatcaaccaaaactgaactggaggatagggaaacactgaagctgttaatctacaacctgtatctcctaaccattcctcttgaaaagggtctgaaagagtgcgagatcgaagacctatattccgatgaactcttgaacatcataatcaatggaaagaagttcagcagaagcagcctggatgatagtaagaatcactttggaaagcatcggttttcaatctatgtgcttaacaactacgaacacattgacttcgaaaaattcctcccactgctgaatactattaactccgtcatcatcaacaacaataatagcaattga

SEQ ID NO: 8577 - RNA, 1524 nt, synthetic construct
  source 1..1524: mol_type = other RNA
atgcatgccccgaaagataatcttaaatggattcagcggaagctgaacaacaaactatttgaaattcaccttgactaccttgaggataataacatcaagtctatcatctcacatgggtttgagaagggcaagtcgattattacaaatgcctcagttcataagcacaaaaagtacctgctgaacattgacattgcagactttttccctagtttccactttggtcgggtaaggggctattttcacaagtcgaaggagttcaactttagcaaagaggtttcaacaatcattgcacagctaacttgttataaagggaagctgccacagggtgcacccacttctcccatcatctccaactttatcttcaacatcgttgacctgcggatcctcaagcttgcaaaaaattacaaactggactatacccgctacgcagacgatatgtccttcagcaccaataacaaagcgttcaaaaaagattacctggccttcattcaggaactcaaggagctgttggagaagagcggcttcgagataaatcaaaataaaacccgcctcgaatactattcttcaaggcaggaagtcacaggtttgaccgtgaatgacaaaatcaatgccagtcgtacctttatcaataacactagagccatggctaaccagctctataagacgaatagctttcaaatcaatgggaaggacggtactataaatcagctcgagggaaggctctccttcatgaatcagttggactttagcaataacaagctgggatgcagaattactaaaaaaaaggcgaaccgcaagttcttttcagggctgaatgtgcgtgaaaaacagtaccagtacttcctcttttataagtatttcttccgaccagctaaacctacaatcgtcacagagggaaaaacagatgtgctgcatattaaatccgccctgatgaagtattatgaccgataccctaagttaattaccaaaacatctgacggcaaatatgaattcaaggtctacttcctgaacaagaccagaagattagattacttcctcggcgtaagttctgacggcgctgataccatgaagaacatatggaacttttacaccggaaaaaacaattgcgctaacatattcgagtacatcaacaacaagaatcagaatgagagtttagataaggccaacccagtgatattgctgttcgataacgaacaaaagagtgacagaccccttaagaattttctgaagtacctggacatcaaactcgatgatggacaaatatccaaacagcttagggctaacctgttcttgcaaacgatacccctcatgaaggggctagaggaatgcgaagtggaggacttgtaccgggatgaagtgctgtctgtgactatccatggcaagaacttctgtaggagcgccgaagatgactccgagaaatactttggaaagcacattttttccatgtatatcaaggagcactataaccgcattgactttagcaatttcctggagatcttagatagcattaacaatctgtgttga

SEQ ID NO: 8578 - RNA, 1752 nt, synthetic construct
  source 1..1752: mol_type = other RNA
atgtcctcatacactttgttcctcttcatcatgaacaactatagagaggctaggcagtcggtcagtaaactcattggtatagagttgcggaaactgacatatattctctacgagaagaagacgcatagcttttatagcacttttatcatcccgaagaaaaacggaggcaaccggaaaatctacgcccccgatgacgaactgaagtgggtacagaagaaactggccaataagctacattcaatccacgcgcagtatctggaggacaataacatcaagagtgttatttcccacgggttcgaaaaggacaagaacattataagcaatgcgtacatacacaagaataagagatttgtcctgaatgtggatatctctaactttttcgatagctttcactttggccgagtgaaaggcttctttatcaagaacaaggcattcaatttcagtgacgaggagtcgacaattctggcccagcttgtctgttataatggcaaattacctcagggagcacctacctcccccctcatcgcaaatctgattttcaatatagctgatctgcagattctgaaactagctcgcgcctacaagttgaattatacccgttacgctgacgacctgtctttttcaaccaacatctcaacctttggatctgcctatagtctttttctggaagaactcagctctatactcatcaaaaacgggtttaagttgaatgaggataagactaggttgcaatttttctccagcagacaggaggtcaccggcatcacagtaaatcagaagttgaacgtgagtaagaagtttatcaaagacacaagagctatggccgacaaactttacaaaaccgacgagtttcagattaatggtaccaatggcaccttaaatcagcttgaagggcggttctcattcatcaatcagctggattggttcaataataagtgcgagtacaagattaacaagaaatcttccgagaagaagtatattcatagcctgaacaccagggaaaaacagttccaaatcttcctgttctataagtacttctacaatcccgataaagttactctcgtcactgaaggcaaaacagatataattcacgtgaaagctgcactgaaaaagtactacaataagtaccctgaactaatcgtgaaaaaaggtgacgaattcgagttcaagattaacttcctgaaaaggacagaccgcctggcctattttctaggtatcgttagtgatggagccgacactatgaagaacatttggaacttttacaccgggcataacaatcactataacatcaacgactacttagagaacaagagcctcaacaatataaaacaagtgaaccggaaaccatctattctgctgtttgataacgaacagatcaaagacaaaccccttgattctttcctgaaatacacaaatcttgagctgaaagataaccagatctccatcaagttaattagcaacttgtacctgcaaacgtttccactcatttccaatatgcgcgaggccgaaatagaggatctctattccacagaggtgttaaataccgaaatacgaggaaagacctttaagaaagacaagaagatcaacaagaacaagaagaaaaacagcgacaatgatactgaaagctccaataagcattatgggaaacacattttctcccaatatattaaggagaactacgcatcaatcgacttcactaacttcatcccactccttgattctattaacacgatcgtgatgaataacaaatga

SEQ ID NO: 8579 - RNA, 1455 nt, synthetic construct
  source 1..1455: mol_type = other RNA
atgaaccggtacaaactggccagaaagaacatagcaaacttaatcgatgtcaaccccagtacacttacttacgtactgtatgtcgagaagatcgagcagtcatacaagataataaacatccctaagaagtctggcggaactagggatatctgcatcccttctcctcagttaaagagcgttcagagaaaactggccaatatgctgtgcaccaagcactccgaatatgtggtctacaataatatcaatcaggctgtgtcccatggatttgagagaaagcgatcaataataaccaacgcaagcaatcacaagaataaaaagtacctccttaacgtggatatcctggacttcttcgattctttccactttggccgcgttaaaggcttcttcaagaagaacaggaattttgtcttttccgaggaggaagccaccatcatcgcccagcttagctgctataagggtaaactgccccagggagctcccacatctcctattatcgcgaacttgattttcaacatagttgacctccagattctcaaactggctaagaagtatcgcgtgtattatacgcgatacgccgacgatctgtcctttagtaccgacatgaacaaatttaagaacatgttaccctcgttcctaaaggaactgaaactcctattggaaaagcacgggttcgagttgaacgatgaaaaaacccggctccaaacgagagagtgcaggcaagaggtgacaggcgtgacagttaatgaaaagctgaatccctgtccaatttttgtgcgtaaaactcgtgccatggctgaccggctatacaagactggagatatttacctggaaggttgtgtggatgatgaggacatttctctgaaaaaaaaacggttggaggggcgcttttgctttatcaatcagttcgactcctttaataacatgattgagtatgggcataacaatagtaaactctataagaagcaccaagcgaagttgaataaacgcgaaactcagtatcagaggtttcttttctacaaacatttctacaacccagacgcaccactgctggtgaccgaaggtattaccgacatcatccacattgagtcagcactgatgaagcattacgtgagatatccgcgactgatcaccaaaacagaaaaaggcttcgagttcaatttcaaattcttgaatcggaccgataaactcaagttttttttcgggattagcgaggacggggccgacacaatggtcaacatctacaattattacagcggtacaaactgtacgaacatcgataagatccttgaaaagaaactgccccctaaacaatccatgggaactaggaatccagtaattctcatttttgacaacgagcagcagggcaacaaaaaaccgctgaagaagttccttaactactcacggaagaagttaaatggcaatctctatagtcgcatttgtagcaatctgtactga

SEQ ID NO: 8580 - RNA, 1632 nt, synthetic construct
  source 1..1632: mol_type = other RNA
atgtatataaacgaggtcaatgaccgtgaaaggttggcaatattgctggacgtgccgttacagaagctgacttacatcttgtatgtcaagaagactgacaattgctacaagcaatttcagatcccaaaaaaagatggtaccatgcggatcatttgtgccccgaatgatgagcttaaagtgattcaacggaagcttgccaatgagctgtggaagtatcacttatactatatggagaagaagaacatcgagtccaatatttcccatggctttgtaaaaggacgcagcattctgactaatgcaaacatacacgtgaacaagaagtacattgtcaacatggacattgaagacttttttcctagtatccatttcggacgtgtccgagggtacttcaataaatccaacgagtttaacctgtcagaaaatgtctctaccattatcgcccagcttacatgttatcaaggcgtcctcccccaaggtgctccaacatcccctatcctcgctaatctcctctgtaacattctggatatgaggctcctgaaagtgtgtgccaaatacaaagttgactacagtcgatatgccgatgatatgacatttagcactaacgacaaatacttcatcgtgaatcagtctaggttcatagacgagattgagaaggaagtggaggaattcgggttcaagatcaataagaaaaagacacgcctggacttctacagcagtcggcaaaatgtgaccggattgatcgtaaatcagaaaataggcgtggacaagaagtttagaaaagacacccgcgcaatggcttattcactctacaaaaacggagagtttaaaatagatggagaaatcggcagcgtttatcagttggagggtagatttgcttttatcgatcagattgacaagtacaacaacaaaagcgacatccagaaaaatatatggggcctcaattccagagagcgcgagtacctaaagttcctgttctataagaatttcttcgccactaacaagcccgtgataatcaccgagggcaaaacagacatttactatttaaaggccgctctccagaagtattacgtgcagtatccaaaactgattacgaagaaagatgagaagttcatctacaacattaacttcttcgaaagaaactccaagacccagtttttcttcaacattaaaaaggatggggcagatacgctcaagaacatctataacttgtacaccgggttaaacaactttcccaatctttacaagtactttcttgaagtttgcaagtatatccctaagaccccagtgatcctgcttttcgataacgaacagaaaactaatcggcctctgaagaatttcctgaagtacatcaactacaaagatgggaaattgattggaaagaaatgcctgattggcaatctgtatatcatgacaaaccccctagtgaaaaatctggaggagtgcgaaattgaagacctgtttgacgatgaggtactgaatgttgagcttgcggggaaaacgtttagcagggacaagaatatcgatctctcaaaaaagtttggcaagtctatttttgcggactatgttctgaaaaactacaagtcgataaacctagaaaacttcaagcccatcctggattctatcaatgaatga

SEQ ID NO: 8581 - RNA, 1686 nt, synthetic construct
  source 1..1686: mol_type = other RNA
atgaagaacatcaaaacccgaaatgacttcgccaagtttatcggggtgaaattacagactctgacctatctcctatacattaagaagatcgacaactgctacaatactttggaaatccccaagaagaatggggataccagaactatttgtgtcccaaataagaatctgaagaaggttcagaagaagctgtataacaaactgtcgacctattatgatgaaatcaagacacagaacaactttacctcaaaaatttctcatgggttcgagaagaatagaagcattgtaacaaatgctgaagtgcacaaaaataagcgctatgttgtgaatctggatctgctggtctttttccccagtataaattttggtcgcgtgcggtcctatttcatcaagaacaactacttcgagattaatgacgacatagcaacgatactggcccagctcacctgttacaaaggaactctgccacaaggggcgtccacctctccattgatcgcgaatatgatatgcaacatcatggacatacggatcctgaagatcgcaaaaaaatatcgtctagactatacacggtatgctgacgacttgaccttttccacaaacaataaatacttcctcaacgattacgacaagttcctggaggacataaagaatattatccataggagcggctttgagcttaattctaagaagactaggctgcttttctctaatagtcgacaagaggtcaccggtttagtggtgaataaaaaaatttccgtgcctaaggagtattataaaaacacaagggctatggctcactcgttatacaagaatggctatttcctgattgatgatgaggtgggtacaattgagcagttagagggcaggttctctttcatcaatcagatcaatctctacaacatcgataacaagaagaagaatatgtggcacctcaactcaaaggaaaaacaataccagaagttcatgatctacaaaaccttttatgccaacgaaaaacctctgatcattactgaaggaaaaaccgacgtgttgtacattaaagccgcactgaagaaatactacaagtactttcccaacttgatcacaaaaaaagacaacggcaattttgtgtttcacgtgaactttttcaagcggaaacagaagcactcatattacctcaatcttgttaaagacggcgccgacactattaagaacatctacagcaactgttacattaagacgaagaacaacaagaacattacaacggtccatgattttaaaaagctatgcggggaaagagagacaaacccggtcattcttatctttgataacgagatggttagcaataaagaccgccctctgaagaaatttctcaacgagatcaaggtaaatgcctctcagaaagataaactgaaggaaaacctgtacataaacatctgtgataacctgtacttgtgcacttaccaactcaacaataaagaggcctgcgagattgaaatagaagatctttttcccgcagatgtcctggaacatgagattaacggaagaaagttctccaaaaaagatagcacgcacgacaatggcttctatggaaaaaacgaattcagtcagtatgtatacagtaattacgagagcattgacttctccaatttcataagccttctctcagctattaatgagatcatcgaactctatcctaacaacatctga

SEQ ID NO: 8582 - RNA, 1983 nt, synthetic construct
  source 1..1983: mol_type = other RNA
atgtttttcaaggagattaaagacttgaaccatttgagtagcatcttgggaatcgacaggaatacactcaacaacctgctaaatcagaaatatcgtgagaagctttatgagacatactacattcctaagaaggatggaagtgaccgacaaatctgtgcccctaaagagcctctaaaatcgattcagaaaaagatcgcggagctactctggcagaatcaactgtgggttaatcataagaaggaagagaagtatatccaggacaaaaagatgttgcgagaagagaagtatcgaatacagacgttctctgagacactggaggatataaattccagttacaagctcaccctggagattaaaaaggactacagattccaaaacgacatcattcaggcttttgaaaagggaaaatccatcctgactaacgcggagatccaccggaataaaaagtacatcatcaagatcgaccttgaagacttttttgactctttcaccttttatcgggtgaagggttattttgaaaagaaccgggatttccagctgagcaaagaaatctccatgaccttggctaatctcgtgtgctataaatctaaattgccacaaggggccccctcatccccgatcctgactaatatgatcgggcgcattctggattctcgcattctgaaaatatgtaagcggtataggcttaaatacactagatacgctgacgatatgaccttcagcacaaacgatgatactatcactaagacactggatgacttcctcagcgagctggacaatgtgattgagaattccggattcaaaatcaatgagaagaaaacacgtgtgagctactggaattcaagacagctggtgaccggcttagtggtgaataaacgcgtcaatatcccgcgggagtattacaaggcaactaagggtatggcacaccagttatacctaggcaacgacgtacacataaaaggcaagaagattaagaagcccattaatcagttaaccggccgctttgctttcattaatcaggttgaaaggttcaacaacgaaagaaccaacctggaacaaacggaattctcatctaaggaaaagtcctttcaaaggtttctcttctacaagaatttctacggtgcagaaaaacccgtgcttataacagaagggaaaactgacataagatatatccgcgccgccctgaaaaaattacacgataagcacccatcattgattactctggaggaaggcgggaaagcaaagtataagctgacattcttcaagaaaagtgatgttattgagcagtacctggatctcaataaacatgggggaagtattttcgaaaagatttggaacctctattgcaacaatcagatctttaagaagaagaacttcaacaacgtctacgagtatttcaagaggatcgactcgaaatacaaatcccctgtaatcatgatctttgataacgaactggacgtcaaagactcaccaatccagcagtttataaacaagttcggctctaatgttaagatagtgtggaacaccgagtataaagagaacatccatgtcaaacttcaggagctgaaacaggccggcaagacccggcaacaaatagatagcgagattaagaagtttcagaaagactttacggagaataagaaaacccagcttattaccgaactcaggaagaaggattacgcccatttaaaggacaatttgtacctgatgctgatcccccttgtcaaaccaaatcagtctaagagtgatattgaagccctcctcctgcccgaagacattgagaaaataaaccagaagcttggtaagcaatttaatccttcagagaaggagtttattgaaaaggacaactactccaaagataaactgagcaagcaggtaatctataactaccagaacattagctttgagaactttgatagcctgttcaagaacgtggagaaaatcatccagcacaacttcctcaaaagagtgttcaaaaaatga

SEQ ID NO: 8583 - RNA, 936 nt, synthetic construct
  source 1..936: mol_type = other RNA
atgattttcaaagagatcaaggatctgaatcatttatcttcccgactgggcatcgaccggaacattttgaacaacttgttgaaacagaagtaccgcgagaagctgtatgatgtgtacaatatcccgaaaaaggatgggagcgatcggcaaatatgtgctcctaaagaaccccttaaatcggtccagaagaagattgctgagctactgtggcaagagcagctgtggatcaatcacgaaaaagaggagaagtacattaaagacaagaaaatgctcagagaagaaaattttcgtacacagaccttttctgaagcaattgaggatatgaactccggctacaagctcactttggagacaaagaagtattaccggtttcagaatgacataattcaggcctttgaaaaagggaagagcattctcacaaacgcacaagttcatagaaacaagaagtatatcgtgagtatagacctgaaggatttcttcgattctttcaccttctaccgcgtgaaagaatacttcgagaagaatagggattttcagctgagtaaggaaatagccatgacccttgccaacctggtctgctacaaatccaaattaccacagggtgccccaagctcacctatcctcacgaacatgattggacgcatccttgactcccggattctgaaaatctgtaaaaagtataggctgaagtacactcgatacgcagacgatatgacgttttcaaccaatgacgacgttatcattaaaaaactcgacgacttcctaagcgaccttaacagcatcatcgataacgcgagttttaaaatcaatgagaagaagaccagggtgtcatattggaattctaggcagctggtaacaggactcgtcgtgaacaagagagtgaatacccccagagagtattataaggctactaactggactttctgcatccactga

SEQ ID NO: 8584 - RNA, 1053 nt, synthetic construct
  source 1..1053: mol_type = other RNA
atggatctgaaggacttttttgattcctttaccttctacagggtgagaggctacttcgagcaccataaggactttctgttgagtcgcgagatagctatgaccctcgctaatcttgtttgttataaatctaagctgccgcaaggggcacccagctcacccattctcactaatatgatcggcagaatccttgattccagaattcgaaagctgtgcaaaaagttccggcttaaatatacccggtatgcagatgacatgactttctccacgaatgatgatgactgttttgcccgggtaaaggactttctccatgaattgaacatcatagtggaggatgcagggttcactgttaatgataagaaatcacgtatctgctactggtactccaggcagactgtgacaggattaatcgtcaacaaacgaatctctgtgtcgaagaagtactacaaagctacaagggggatggcccaccagctgtatataggtcgcgaagtgtatgtcaataaggagaaggtggacaacccaataaaaattctgtcaggtagatttgccttcattaatcaagtcgaccagtatagcgataatattctgggtctagagaggaatatatttagtacccgggagaagacattccagagattcctgttctacaaatacttctatggcattgaccgtcctatgctggtgacggaaggaaagaccgacattcggtatatccgcgcgtctctgaaaaagctgaataaaaagtttcccgagctcattaacttggagaatgacgggaaagccgaatacagcatcaccttcttaaagaaatctacagttcttgagaagtacctcggcctaaacaagcacggcggaagcatctttgaaaaaatctggaacctgtatctgaacaacaacctcttgaacaacaagaactttggcgacatctataattacttcaagaggatcggaagcccatacaaaagtcctgtaattatgctcttcgataacgaattagacgaaccagatcgccctattaagcagtttctggacaaaatccagaaaaatggatga

SEQ ID NO: 8585 - RNA, 1641 nt, synthetic construct
  source 1..1641: mol_type = other RNA
atggaatttaaggacattactgacaagagactcttggccaaatttctgggcataaaatacaaggaactgacttacatcctttactccaaacgtaccgaaaatctatatcagaccttcgagatacctaaaaaaaatggaaagatgcgatgcatcaatgcccctcaagaaccactgaaatacgtgcagaggaatctggccaaacagcttatatcgatccaagagaagtactatctggagacgaacaacatcatacaaggctttaccaaaaaacgcgacattatcagcaatggaagctaccaccgtaacaagcgatatatcctgaatttggacctggagaactttttcgactcatttcacttcggcagggttaaaggctatttccagaagaaccagtattttatgctcaactctaatgtcgcgacatgtttggctaatatcgcctgctataaagggaagctgccccagggctccccctcaagtcctgtgattacaaatctgatttgttccatcctggatagacgcctcgcaacaattgctcagaagtatcgcatgacctatacccggtacgctgatgaccttaccttttctactaatcgcagagacttcttagaaaacaaggatgaactcatctccgagctctacgcagtaatcgataaatccggatttaaggtaaacaggaataaaactcgggtgctgttttggaacagcaggcaggaggtgacaggcttagtggtcaataagaagatttctgtcaagagagaattctacaaggagactagggccatgcttgatcatctgtacaagggtctgattgtcgagcacaatgggattgaagtttccttgcagcagattgagggacgactctctttcattaaccagatcgataagtacaacaataagcatgggggggagcgcaagaatgtgcaaaagggaatgaacgggagagagaaagagtaccagcagttcctgttctataagtacttcttttgtccttcaaagccggtgattgttacagaaggaaagaccgatcccgtatatattcgtagtgcgcttcagaaattctatatccaatacccaaagctcatccggaaaaaggaggatggttcattcgagtacctgattacattcctaaagcggactagcagactggagttttttttggggatccagcaagatggcgctaacgccatgaagaacatatataacgaatatgtgggcaacaaccagtatccaaatctatatgaacctcttcggaaatacgggctgaagtctagcaaccccgtgatcctactgtttgacaatgagacagtcaccaagaggcccttgaaggactttctcaatcacatcaataataagtcaggtatggactatcggttgtggctgaacatacatgagaacttatacctcgctaccatcccgctcgtgaaaggacagaaagaatgcgagatagaagacttattcagcgatgaagtccttagtcacgagattgatggcaaatacttcgaccgcaagggcaaagatggtgagaaaagctacagtaaacaaattttcgcatcttacatcgcccagaacatcagttccattgacttcacgaactttgttccactcctggacgcactgaacgaaatcgtgaaaaattga

SEQ ID NO: 8586 - RNA, 1710 nt, synthetic construct
  source 1..1710: mol_type = other RNA
atgttgagaattaaagaatgtgataacgtgtaccagctggccatgtgcctgaacctgaatacggcagtcatcaccaacatcctctataatatcaaaactgacaactgttaccgccaattcaaaattcccaagaagaatgggaagacaaggactatctgcgcaccaaatgctgaactgaaaagcgttcaaaaacgcctagcgaacgcgctctactatgaactcaaactcatccgggaagagaacaacatcaattccaagatttcacatgctttcgagaagaagaagtcaattatctctaactgcgagatccataagcggaaaagatttatcctcaatgtggacctcaaagacttttttgatcatttccattacggaagagtctatggctatttcctgaagaacaagtacttcttatgcaccgacgagacggctcgcactatcgctaacatcgcatgttttcagggaaagctgcctcagggagctccaacctcacccattatcacgaatctgatatttcaggccgtagacgcaaggattctgcaacttaccaaaaaacaccacttggactatacacggtacgcggacgatcttacatttagtactaatgagcaggatttcatagagacttataacgacttcctaaacaagcttaccagacttatagagaagagcggatttgagattaatcagaacaagatccgaatttcgtgtcacgatagtcgacagaccgttacaggcttaatagtaaatgacaagatcaacgtgtgcaacgactattataaactggtcagggcctacgcccactccttctacaagaccgattcctttgatataaaggataacaacggcaaagtgattaaatctggcaacgccaaccaactggaaggtatgttagcctttacgcacatgatcgataagcacaataaaaccatcaagaagaatcctgctgagctgcagcattctttaaataaacgggaacgcgagtatcagcgcttcctattctataagtacttctaccacaatgaacgtccactgattatcactgaagggaaaacagatcagatttatctgtgctgtgccatgaagaaatattatagggagttccccgaattgattgaacaaagaaagtccggctttcactttaaggtgcagttcatgaaaaaaagtaagaggatgttggagatgttcagctttgtgcaggatggtgccagcgcaatgacaaccctgtatctcaactactacaagaagaattccaagtttcccgattattaccaatacttcagtcagatcacatgcaagtcagcctctaatcctgtcctctttatctacgataatgagctgtgttctaaggacaaaccactttacgagcttatgaagaaggagaagaaatccatggttgacaaaatagaaaaggacgggtgggtgtcaatgagcagcaaaaagaatttgtacattgtcaccaatccgctggtggacagtaaaaaagagtgcgaaatcgaagagttgtttaccactgagacactgcagaaggaaataaacggtaaaactttcagcctcgaaaagaattacgacaccaacgagcattttgggaaagacatcttctccaaaattattgctaaggagtacgagcagattgatttctctcggttcattccttttctggaacgaatacgtgatgccatcgtggactacaacaatacagaggcatga

SEQ ID NO: 8587 - RNA, 1695 nt, synthetic construct
  source 1..1695: mol_type = other RNA
atgcagatgattaacgaagtcactacaagagatgagctagccgatctggttggaattccatataggaaactgacatatatcctgtacaagaagtacgtggaaaatatgtatacttccttcgagatacccaaaaaaaacggcggcagacggctaatcaattctcccaatgaagaactcaaatacatccagaagaacttagttaaagctctctacagatatgagcagacactgcttgataaggatataaatattcacagctcagtgtcgcatgcattcgagaacgaaaaatctatcttcacaaatgcccgtatccaccgcaacaaacgctttatcatcaatgtagatctggagaactttttcgactctattcactttgggagggtgagaggttactttctaaagaacaactatttccgactgaccgacgaagtagccacagtgatagcgcagcttacatgttataaagggagtctgccccagggagcaccaacttcgcctataatctccaactacatctgcaacatttttgacttgcgaatcatgaaactcgcgaagaagtacagaatgaattacactcgatatgctgacgaccttacgttctccaccaatgataaacactgcattgaatatcaggacgagtttcttttgaagttaaagaaggagattgacagggccggcttcagcatcaaccagactaagacacgcatttcttacaaaaacagccggcaagaagttaccggcgtagtggtcaatcaaaaaatctctatcaagcgtgaatactacaaaatcaccagagcaatggctgataggttgtataagactggggaatttttcatcgatggggagaaaggaagtatccatcagctggagggaaggtttgattttataaatcaggcggagtggtttgacaataaatacttcaagaagaagcggaacttctattccctgaacggccgggagaaagagtacaagaagttcctcttctacaagtacttctttgcaaacgagaaaaccctgatcatcactgaagggaagaccgatgtgatttatatcaaggccgcccttaaaaacctgtacaaagagtatcctgagctcgtcacgaggaacgagaagggtgagtatcaatacaagttcagtttcctgaaaaagagcaaacgcctggactatttcctgaatatcaaaaaagacggtgccgacaccttgaagaacatttatgcttattacagcgggaagtcagaggttaactacccagagtatatgacggaattcgagaatagtcagggaattcgggctcagaatgccgtgattatgctgtatgacaatgaactgcagcagaaaaccaagcccgtggcaaaattttgtaaagtgaacatgtccgacgatcaaataaagaagctcaagaaggaagaatatgtcctcctcaattccaacttatacctgatggtgacccctctgcaaaaaggcaagagcatttcagatattgaggacctctttcatagcgagttattgaaaacaaagcttgacggcaagatttttaccaagaatgacaagtacgataccaaaatctactatggtaaggatcgcttttcaaagtacgtcatgaaaaattacgccaaaattgacttcgaggcttttaagccgttgctgaataacataaagaagatcgtgtacgaatacaaaaagatagaggaatga

SEQ ID NO: 8588 - RNA, 1689 nt, synthetic construct
  source 1..1689: mol_type = other RNA
atgaaaatgattaacgaagtgaagagcaggaacgagctggcggatctattaggcatcagcaggaaacggttgacatatctgctgtacattaagcacctcgaaaacatgtacacctcattcgagattcccaaaaaatctgggggccagcgtctcattaatgcacctaacaaagaacttaaactgattcaacgacgtctggcgaatgaattgtatgagtatcatactagactcaacaaggataagcagatcaacggggtgtcccaggcctttgaaaaagagaagagtatcttcaccaacgccaagatccaccgcaagaagcggtttatcatcaatgttgacctggagaatttcttcgataatattcacttcgggagagtgcgcggctatttgatcaagaacaaagacttccaactgtccgaggaggtagccacagtgatcgcacagttgacctgtttcaaagggagccttcctcagggcgcacccacttcccccatcatcagcaactacatttgcaacatttttgacctgcggattattaaactggctaagaaatacaagctgaattataccaggtatgccgacgatctaactttctctacaaacgacaagtacttcatggagaattgggaagcttttttaggcaatttggagaaagaagtcgaaagagccggcttccacctcaatgagaaaaagacgcgaataagttatgaagattctaggcaggaagtgaccggagtgatagtaaataagaagatcagcatcaagagagagtactataagaatactagagcaatggccaacaatctgtataagaccggtgaattctacattaacggggagaagggcagtctcaaccagctggaaggtcggttcacattcattaaccaggctgagtgctttggtaagaagattaactttcagcaactaaatggaagggaaaaagagtaccagaagtttctctttttcaagtacttttacgctaacgaaaagccattaatagtgacagaggggaaaactgatgttatttatcttaaggcagctctcaagaaaatgtacagggactatcctgagcttgtgacccgcgatgataaaggaggtttccattacaacctgagctttctgaagaagtcgatgcggctcaaaaattatcttaatatacagtcggacggagccgataccatgaagaatatctacctgtactactccaaacaatcaaataagaactacccgcaatacatcaaaaaatttgagaacatacggggttcacgcccacagaacgttgttataatgctgtttgacaatgagttgaaagaaaaagatcgacctatctctaagttttgtaaaggaacagtcaaggatgagcagaaagtcgagctgcaggacaagctccatatactgctggaaactaatcttttcctgatggtcacccccctcaaagagggaaaagagatttccgacatcgaggaccttttcccagatgaagtgttaaacatcgagattgacggcaagaaatttacgaagaaggacaaatacgacacaaaggagaattatggcaaagatcgctttgccaagtatgtcatgaagaattatgggaaaatcaacttcgacgggtttagaccactgttggataagatcaagttcatcatcatgcagtacaaggaaggagacaagggcgaaaaagagaactga

SEQ ID NO: 8589 - RNA, 1674 nt, synthetic construct
  source 1..1674: mol_type = other RNA
atgttattgtcagagatacatacaaggtacgagtttgctcagctgctcggaatcgaactgaaggaattgacctatctgctttacattgagaaggttgaaaacctgtataccacatttagtatccctaaaaagagcggtggcgagaggtgcatcaatgccccccaaaagaagctcaaatatatccagaagctcctgaaggtgcttttagaatcatacgaagaggagatatgttgtgccaatcatattaataccggcgtggctcacgcgtttaagaaaagacggagcatcattacaaatgcccagaagcacaagaacaagaagtacatcatcaacattgatctcgagaacttctttgactcttttaatttcggtcgggtgagggggtttttcataaagaacaagtactggaaccttgacccaaacatcgccacgttgattgcccaaatatcatgctataatggggttctgcctcagggagcacctactagccccatcatcacaaacatgatttgtaacatcatggactggcacataactaaaatcgcccagaagtacaaattaatctacactcgctatgctgatgatcttacctttactaccaacgacaagaaaattgtggacaaatacgatgacttcctgctggagctgaatagagagatcgaaaaaagcggtttcaaaataaacaactccaaaacccgctttactaacaatcttaatcgacaggtcgtcactgggttggtcgtgaattccaaagtatctattaacagggagtactataagaagacatatgcaatggcccactccctttaccggtccggcgaattcaccattgatgaaaaaaagggcaccattaatcaactcgagggcagattctccttcatcgaccagattgacaaatataacaaccggatcgattgtaacataaagcacgacatttggcatctgaatcaccgcgaaaagaagtaccaggagttcctgttctacaagtacttctgcgctaacaatcgccctctagtgattactgagggcaaaacagatattatctatctgaagaccgcatacaggatcttgcgtcaggacgacacaaaattatttatcccggaggacaatgaaatagattacggcgtatcttttctgcgtaaatctgaccgactggactattttttcaacctgaaaaaggatggagcaagccccatgaccaatattcttgatagttatctggggaataagacgtttaaaatcagctattacgagcagctaatggcgaaatataaaataacgccaaatgctccagtcattctgttgtacgataacgaactcaataaaaagggagcagtgagagatgttattaactcgaagaagctggacatcgagtcactaaaggagaaaaactacatcagagtcataggtaatctgtatattcaagtggtacccctcgttaaagggaaggaagactgcgaaatcgaggatttgattacagaaaatgtggatgacctcatcatcgaggggcggcactttgaccgaaaaggaaaggccgacaaagaaaagttctacaataaagacgtgctcagtcactatatcgaggaacatgagaacgagttccatttcgattgcttcaaagagctgtttaagacctgggatctcattatcgaagattacaacagtctgaagtga

SEQ ID NO: 8590 - RNA, 1722 nt, synthetic construct
  source 1..1722: mol_type = other RNA
atgaacttagaggatgtgtgtacacgcaacgacctcgccgattttctgggaattaagagaggcaaactgacctatatcttatacatccagaaagtcgacaccatgtatagtacctttagtatcccaaagaaaagtggcggtgaacgcacaataaatgcccctaatgacgatcttaagcagatccagcgtaaactggcagatgcactgtggaattatcaggtgaaaatatgggagaagaacaagatccagaccaatatttctcatgcgttccagaagagtaagtccattgttaccaattctatgagacacgtcaggaaacgatacgtgctgaacatcgatttaaagaacttctttgactccttccatttcggcagggtgcgggggtttttcatgaaaaatttgttctggggcatgaccgaggaggctgctacagtgattgcacagctgacctgctataagggcgccctgccacaaggtgcaccgacatctcccattatcacgaacatgatctgcaacataatggatatgcatctactgtctattgccaagagatacaagttgaattatactcgatacgccgacgacatgacattctccacgaatgataaacacttcatggaacactatgacgctttctataaggacctctcaaaagaagtattgggagcgggctttcagataaatgaagaaaagacacgcctgctgtacaatgactcccggcaagaggtcaccggactgatcgtaaataacaagatttccatcaaacgcgagtattacaaaaatacccaagctatggcacactcgctgtacacgaacgggttctttactataaacggggaggatggaactatcagccaacttgaaggacgcttttcgtttattgatcagatcgagaagtacaataactcccacgacggggccaaacatagtgccatttcactcaaccacagagaaaagaaataccaagagttcctgttctacaaaaacttctgtatcaaccctaagcccctaatcgtgaccgaagggaagactgatattctgtacataaaaagcgctctgaggaagatgtatctccagtatcctgatctcatagagaagaaagacaaccaatggatctataatctatctttcctgcatcggagctctaaactgagctactttttcgacttcaacgtggacggggcagataccatgcagaacatctataatatgtacaccggcagcggaaggactcacgttaattattacagacattttcgggagaagtacgatttaaatatgcatcagcccgtcatactcttgtttgacaacgaatttgagaattccgaaaagcctattaagaagttcatgaacaacattggtagcgataaaaagggcaagaataaggccaagggcgaatccaaacagcgtgagacatcacttcagaacgagctgtttctgcaccttattggtaatctgtacgtgcaggccgttccacttgctccatccgagacaagcggagaaatcgaagatttgctcgggaaaaatattctcaacatggagattgacggcaggaaatttgaccgaactggtaagaaagataagagccggttctataacaaggacattctctcaaagtacatcctctctcactatgaggagatcgacttttcattgtttatcccccttttcgacacttttaggaaaatcaaaaacgactacagcgatcagaaaaatacttga

SEQ ID NO: 8591 - RNA, 1695 nt, synthetic construct
  source 1..1695: mol_type = other RNA
atgtcctataatgaggctagaaataatgtggccgaaaaactcggtgtaccaccaaaactgttatcgtatctgtttagacgtgggatcgataagttctacaaagagatagaaatccccaaaaaaacagggggactacggaaaattatgatcccccagaatcagttgaaatctgtgcagaaggagattctgaaaatgctacagaagatttacatcgagaacaacgtggaaaccaccttctcacatggtttcgagaagaacaagagcataatatctaacgcgaggatgcacaagaacaagtatctggttttgaacctggatctggaggacttttttggatcattccacttcggcagaatcaggggctactttgagaagagtaataatttccagctgtcccatgaagaatccgctgtgctcgcaaatcttatttgctacaaaggatttctgcctcaaggggcctccaccagccccattatgacaaacatgatctgtcattttctcgacttgaaactgcactacatagccaagaaaaataagttcacatacacgagatacgcagatgatctgaccttcagtagcaacaatattaagactgagtctgaatgcgaacaattactgttcaacatcgagaagcagatcaagaaagcgggatttaaaattaacaagagcaagactcgcctgcaattccgcaatggctctcaaaaggtgaccggactcgtcgtcaacaaaaaagtgaatgtgaacaacacgtattacaagaccacacgggccatggctaataaactttatagggagggctccttcaatatcaatgggaataaagggaccgttaatcaactcgaaggccgctttagtttcatagatcagctcaatttcgagtcaaacaagaacgacaaatctatgtctaccgtgaaacacgggttttcctggggcagcgacaaccggaaagactatctggtgaacagaagggagaagagttatcaggagttccttttctacaaatacttttacgcaaacgagaagcccatcatcctcacagaaggcaaaactgacatcacttatttaaaggccgccctgaagaacatgtatcaggattatccttctcttattgagaagaaagatggcaagttcaactttaaggttgaattcatgaagcgcagcaagaggttcaactacttttttggttatttcgaagggggaaatggtatgaagaatatctatcggttgtttttccactcaccgtacaagtactatgaaaagttctacaagaagcgccagattgagaatcacaaccctgtcttccttatatttgacaatgagctagtcgacaatcttaaacctttgcggtcgtttattaactttacgaacctcaatacgaacgataatatccggtttctggaagagcagcactacctgaacctggacaaaaacttatatgctattactcatcagctcatgaatgacaagtccatgatggagattgaggatctttttctggaagacgtactgaacgtccgactcaataataagagtttcaaccgaaaggacaatgcagatagggagtccactttcggcaaaagcagatttagcgattacatcgccgaacattacaagaccatcaacttcgaaaactttaaaccaatgttggatatcatccgtaacatttcagacaatgagaaaaacattcgactgtga

SEQ ID NO: 8592 - RNA, 1677 nt, synthetic construct
  source 1..1677: mol_type = other RNA
atgaactataacgatgctcgcaactctattgccgacaaaattaatgtccccccgaaactgctgagttacatcttcctgactggtatcgataagttttacaccgaaattgagatccctaagaaaaatggaggcgttagaaagatatctatcccacagaatcaactcaagtccgtgcaccaggaagtcctgaagtttctgcaaaagatctacaagaactcagatctggccaccgtattttcccatggtttcgaaaagaataagagcatcataacgaacgcacaggtgcacaaaaataaaaggatcgtgctaaatatggacttggaggatttcttctatagtttccattttggacgtattcgggggttcttcaagaacaataagttcttcaagatgactcacgaagaggccaccgttctttccaacctgatctgctataagggagtactgcctcagggcgcagcaacttccccaattatgactaacatgatctgccactttatggacctgaaattgcagcatgtggcgaagaaacataagtgttcttataccaggtatgctgatgacctcacattttcgaccaataacaagaacacagttgagaactacaaagagctcatcaaggacatcaaaactcaaatcaacaaagccgggtttaagattaatgacgacaagacgagattacagtccaaagagaattcacagcgagtgaccggcctggtggtgaacaaaaaagtgaacgtctctcactactattataagaagactagagccatggcagagagcctatataaaaccggcaagttttacatcaatgaccaggaaggggacattaagcagctggaagggcgctttagcttcatcgatcagctgaattttgccaataacattcaagggaagaaagatggcaccggatatcacggcttctttacaacaggcaatgacggaaagatagctgtcaacaatcgggagaaaagctaccagaagttcttattctacaagtacttttacgccaatgataaacccacaattctcacagaaggcaaaacagacatcaagtacttgaaagctgccttaaaaaaaatgtacctactgttccccaacctcattaaaaaaaaggagacggggtttgaatttaaagttaacttcctggaaaggtcaaggcggttcgatttttttttcggttatgtggagggggctgagggaatgaaaaaaatcttcgagctctatttcaggaagcccttctattactacaacgagtttcaacttaagcgtacctttccaaaccagaagccagtcttcttgatttttgataacgagctgaagaataacaagaaacctattcggaagttcattaacttcactaatggaaatgtggagctgaaagtctcaaaagtggaatctgagaatttcttgcatatagacaagaacctttaccttatcacccaccagcttatgaatgacaaggacgagatggaaatcgaggatctcttcagcacagacgttctcagtgctaaggtagatggtaagatctttgatcgcaatgataatgcggaccgatccaagacttttggcaaagcagtgtttgccgaatatattaccagaaattaccgcaacatagactttagtaacttcatacctatgctgcacagaattagcgaaatcataagcaacacctga

SEQ ID NO: 8593 - RNA, 1911 nt, synthetic construct
  source 1..1911: mol_type = other RNA
atgaaaaataagaacaaggccaacgatataaagaagttcgtcatggacaatatcaagatcgataccattcggcattccgacgattatcttccctacttctattacttgtatcctcagtgggctcccgaccataccaaaattataaataccctcgcgaatatcagtgcctcttattgcaacgtgagtattcctaagaagataagtggcactagaaatctttctgtaccaaacaagtttctcaaacccttacaggagtttgtgaagcttctgatcacgaatcagttaaagtcgaacaatttctccttttccccaatcgctcagggttttatagaaggtcgaggaatctacactaacgcccacattcaccggaacaagaaatatatacttcacctcgacctcaaagatttctttaccagtattcactttgggcgtgtatcaggcttctttataaaggacaagaactttaagctgcagcctcacattgcttattttttcgcaaacctctgctgccttgatggagttcttcctcaaggctctcccacctccccaatcatttccaatctgatcgcgcaacatctggacaaaaaagtcctgctgctcagcaaaaagtaccatttcaccttttctcgatatgcggatgacctcgtgttcagcaccaatgacacgaagattatagtgaacgaattgccgaatttcctgaattctatcaacagcatcgttaaaaaccaagggttcgaaattaattgggataagctttcactgatggggccagatgtccggcatacagtgactggactgtccaacaacgtaagagttagcgttaccaaaaatttctatctagagacgcgcgctatcagcgagaatctgtatgtgtcaaactcgttcttcgtggacaataaattatttctagggcacagcgacaaatccattactgagaatctgaaaatcgtcgaagggcgcttcgcatttatctacgatatcgagaaaagaaacagacagttttactccaagaaaaccttcgggaaagctctgcagggcaaaaataacaataactaccagccgaatcacaaaattactttcctggagagcaagaacaagaaacagggagcttctgatatcgggcagaatgcctttaacggcaaaatttgggcctatagcaagttcctcttctacaagtactttatatacggcgacaagcttactattttctgtgagggaaaaacagacccaatctacctcaaagctgccatgggcgcactaggctataataacgcagtgacaatgtactccattgaaacatggctcaacgaaaagaacgtcttcgtcaatttatttggactgcccatgggaggttcaggtctgcagaaactgatctattattttttgacacccatcaagaacagtaagagttattacgatttcttcgagaagaagaccttgagcatgaaacctgtggtgctgctggtggactatgaattgaagaaagacaaaccactcaataacatcattaacgccatttgtattgccaagaagctgagcaataatgagaaggtgaaattaaagaacgagattgagagcgatctcgacaagaacggctactacttcttgggtaataatgtttacatcgccgtgacaatagattttaactccaagaaggacacagacagggccatcgaagagtactttcctacaaatactctgctagatattgaaggaaatcaaactcgccacttcggcgatgagaactgtaaagtcatcaataagaacaagcacctgatctctaacaactcacagcccatggagaaaatcgacttcgcaatctggtctttgaaccataggtacaataggaacctgtttatcgggtttatcaatatcctgaacatactgattacctcagaaatgaccatttga

SEQ ID NO: 8594 - RNA, 1983 nt, synthetic construct
  source 1..1983: mol_type = other RNA
atgaacattaagaaaatcagcctgaaaatctctgacttttctcaccgtgattctttcatcagcaccctggaaaaatataaaaagcattttggcaccttcgatgtgcaatctacaatccagaatgccagcgccctgtactcggaaaaaaagattcccaagaagatatctgggttcagagttatctccattccctctcctgagctgaaaattatccaggtttttgtgaaagagctgatcgagaatcagttggagtactttgattacaagttttcagtcgtgaaccatgctttccaaaaggagaagtcgatttatactaatgcacaggtgcatagaaataagaagtacattttacacgtggatctgaaggatttcttcagcagtatacacttcggccggatatctggatacttgagcaaaaacaagaactttaagctgccatcctatatggcttattttttcgcggacatttgttgtttgaatggcattcttcctcaaggatccccagctagccctgtgatttccaatcttatcgcagaaaatctagataagaaggtcctgtccctgtctaaggaataccactttatctatactcggtatgtagatgacctagtgtttagcaccaacgacacagcgataatcatgaactatatgcaggatttcctgtacaaactgaatgctattgtcgagaatcagggattccacataaattgggaaaaactcaacctcatgggcccagacgtccgccataccgttaccggtttaagcaataataagagggtgtccgttaccaaggacttttaccttaccacccgtagtatcgccaataacttctattgcacaaactcattctactccaaaggcatcttgtacagcggttacgagtcgtccgaccgccagaagaacctgaattttatagccgggctgttttccttcatctatgatattgaggttaggaacaagaactttcacaaagagaagacttatggtgagagcttgcaggggctcaaccacaataattatcagccccgacataaagtgagcatggagacgaacaattctctgagtgaccaaatttttaacgggaagatcttcctttactccaagttcctattcttcaagtatttcctgttcggggacatcatcacagttttcactgaagggattacagatcccctctatctgaacgctgccataaaaagtttggattaccagaacgaagtggaactaattagtattcaggagatgcagaacaaagagatggtgtttcctaaactgtttaacttaagcaggggcggctcagctcttcgcagactcattgactactacaacgacaccgtgaaaaatggcaagacatattacgacttcttcaaaaacaagatggtccctctcaaacccgtagtgctcctgttcgactacgagattaaaaagaataagccgttaggacaggcaatcaatctcctcctgaactacgggcacaactcacagacggtagaggatgagctgcgggaaaatggtttttatttcgtaggagacaatctgtacattgcaactacagtcaattttaacgacaaaaccgacgatgatcgagccatcgaagactatcttccgatccaatttcttggagatgtgaatggagatcatactagacacttcgccgatgagaagtcaaaattctttagggaaaagaagatcgcgatcagtgaactgtccaccccaatgtacaaagaggaactcgcccagactgtcctgaagaagacgagtgacatcgtcatttttaaggacttcagcatgatactttcaatcttttcagagattcgcttaggctacatgaataaagtgatagactgcatcaacgaggatcggattaacacaatctataacatattggactccaaatctgcaagtgaaatcatcgacaaaaacactgagctcaagaaaaagtttgacgaaaagctctcagatctgctgaaaatccatgcctga

SEQ ID NO: 8595 - RNA, 2088 nt, synthetic construct
  source 1..2088: mol_type = other RNA
atgaagcatttcgagtatcatagacagaagaagatatctgactttcattctagggacagttttatacacgaactccatatcgtctcttggatcacagacgaaaggaaacaattgttcagtaggttgcttaattcccctggcaatttttacaaggagttttcaatccctaagaagtatggagaaggtgaacgtatcatcgacgccccaaatgaggatctcaaatctctgcagatcatcataaagagtctcatagagaatcagctgaaggtgaaagagttcgtattcgggaagtatgaccaggcataccagaagaacaaaggaattttcacaaatgcccagatccacaggaacaaaaaatatcttgtgcacatcgatctggaaggattctttccgtccatacactttgggcgcgtcagcggattttttcagaagtcccggctgttcaaattggagcccccaatggcttttttctttgccaatctgtgctgctacaaagggcatttacctcagggggctccgacctctccactcatagctaaccttataggtgagaaactggaccgggaggttctcctcctgtccaagaagtttagattcacgtacagtaggtatgcggacgatttgacattttccacgaacaacgtcaagagcatcaccaatgactttcgatctttcatggacgcactgaattacatgatcgaaaaaatgggcttcaacatcaattgggacaaggtgggaattgaaggacccgatgttcgacacacagtcaccggacttagtaacaataagagagtgagcagcaccgttgatttctacaaattaaccagggcaatggcaaactcattatatgtcgacaacgagtttttcgatgctaaacggtcctataacgcctacactcagaagagcctcgagaaagcaattcaagtgattgaggggcgctacgccttcattaacgacattgaggataagaacaagaaactgtacgaacggcattccggcggcgaagaatatcagagtattacccccaccgactttagggagcaccactacatatcctccagattgaatggcgtctcaaaggagaatctgccagctatttatagtggcaagaaactgtcctacagccgctttttgttttacaagaaattcttagccggggatgcgatgactgtattcactgaaggcaaaaccgaccctatgtatatttccgcagccatgaaggccttgaccccaaacctaaagatcacctttacgattccccaagtggaaggggagaaccagactcagttcgcaaatctttttgacctcaaccgaggcggtgcctccttacggcgtattctggatatctatttcgggattagcacaggtggccacgccagcatcagccatcccctctacttcgaaaaaaagatcatctcaatcaagccatgtgtcctgcttctcgattttgaattcaacgatggccagcagaaatctgagaaagccaattctaagaagaaaaacagctcttcaccccacccgcttgtggttgttctgaactacatttttcaaaaccgcagaatcgctaagaaaaaggccagcattatcaaggatgaccttatcaaaaatggcttctatttcgtggacgagaatctgtacattgctactacaactgatcggtcaggcgacaaaacaaatcgagccatcgaagattacttccctgctagcttcctgaatgatccttatggagatggtacaaaacacttcgagaatgcgcccatgctgaaaaaagacaacgggttcaaggacagtgattctctgagaaagtacgactttgctaaatatgtgaagacccaaactgagactgtggacctatttaaggatttcaacgtgctgtttgacattttcaataacattcgcaaggactacaatcgtagactactgaagaagatcgcggatgtatcgacaaattataccatactggcaaagaacacgatgtaccgcattctggatagcgatatcctacggaaagagattgcccatgactcagatctgaaccagctcttcttcgacaactataagaaactctttgatgtgtcgtcatactga

SEQ ID NO: 8596 - RNA, 2025 nt, synthetic construct
  source 1..2025: mol_type = other RNA
atgaccaagttcaagtataatagggagaaaaagatctccgattttaaaactaggctatcgtttgtgcgcgaactgtattctattggtctgaatagcatcgacattttcaaactgtccaagaacataaacaactactacacagagtttactatccctaaaaagtacggcaccggcgtgagaacgatttccgcgccgctgggagacttgaagcaaatccagcagatcattaagaaactcatcgagaatgaactcacctattgcaattacacgtttgggaaatacaatcaggctttccagaagaataaaagcattttcaccaatgctcaaatccatcgtaacaagaagtacattatccatttggacctaaaagacttctttagttccattcacttcggccgcataagcggatacctgcagaaaaactccaaatttcggctgaccaaggacatggcctcattcattgcaaacctttgctgttataatggcatgctccctcaaggcgcaccgacgtcaccaatcataagcaatctgctgggggagtctctggatcgaaaactactgaaaataagcaagacttaccatttgacctactcgcgatacgccgacgatttagtgttttctactaacgacgagaaaattatcgcacaaaagctttcagaactcatagaagttatctctaccagcgtcaagaaaagtggctttcagctgaactgggacaagcttaattttatgggtcccgacgttaggcatttagtaaccggactctctaacaataagcgtgtctcgagcacaattgacttctataagaataccagatccatggcccttaacttctacgtgaagaatagcttttacgccggtaaacatttctacaacgggtatactataagaaaccagcaacggtcaatgcaggtgctggaagggcggtatgcttttattaacaacatagagagccaaaatcgcaggctgtatgagaatcacctgtccggtgcagagtatcacgccatcacaccacaggatttcaaagacagacacaatttgattaaggccaaaaaacacgacgaaccctccttttcaggaaaagagctgagttacagccgcttcattttctttaagaagttcttgttcggcaataacatctccgtgtttactgaggggaaaacagatccacgctatatccaggccgccatgcgggctttaaacagtgatatccagctggaagtgacatcttttcagactgaaagcgaccttaacacccagttttcaaagatgtttaacttaacgcaggggggaacatctctgaagcgaatcatcgatctctataagggcaccaattatcaatacgggaagagggcgctgtctgcctactataactattttgacctcgataacagtaagatcaagtttgttcccatgaaaccatgcatattgttgctggatttcgagcttctggggcctacatcccccttgcagacaattatcaataggttaatgggcgcaagaaaaaacagctacacaatcgactcaaaagagaacattcagaagaatcttaaggagaagggtttttattacatcttcgacaacctctacatagtcacaactattggctcaaatgataccgaaaatcagaagaacagggcgattgaggattacttccctaaggagtttctggccgatatctataaggatggaaccacttgtttcgaaaatgctgaaaacaagtctgataacagtcggaagctcatcagtaagaatgattttagcattctgatcgaatccaatttcttcaacgatcctgagattttcaaaaatttccagatcctctttgacatattcggaaaagtccaattcgactatctgaataaactcctaaaccggattgataacaaccccagtgctcagcacgtaattttcaacatcctcgactctaatttcattcggaacatcatcaacgaaaatcactccctgcgcgagaaatttctgatgatcttcaacaagtacttccttagaaattaccagaaatga

SEQ ID NO: 8597 - RNA, 2010 nt, synthetic construct
  source 1..2010: mol_type = other RNA
atgagctataaaatctcggacctgaatacaaagaacgacatcattaactatctgatgtccaccaagtcaataagctccccgaagattttttacaagattttgaacgacgtgtccgctcactacagcgacatctacctaaagaaaaagtattcaaacgacgttaggcacataaatgccccagatgagcagctgaagagcatacagcacaagattaagatcttgatcgaaaatcagctttcttacaagaactacaagttcaacaacatcagtcaggcctatcagaatggtaaatcaatctttacgaacgcccaaatccatcggaacaagaagtatgtcttgcacttagatatttgcaacttcttcgacgagattacgtttaaaaggattaatggctttctgcagcacaattcaaaattcatgctgaactacaccgtatccactattatgactaagctttgctgctatgacggccacctgacccaaggttcccctgtctcacctataatcagtaacttgctgggggagaaaattgatctcgtgctagttaaggttgctaagaaataccatttcgtctatacacgatatgccgatgatctggtattctctaccaatgatacgtacaccattaatgaaaagttgaccgagttcataaacaaggtgtccgagataatcaatagccagggctttagtatcaactgggacaaactgagcatagcaggccccgatgtcaggcatacagttacaggactgaccaataataaaaaagtcagtgtccctcttgaattttataaacaaactcgggctattgccaatcatttctacatttacgacgagttctacaataatcagcaaatctaccgcgactgttatgtgaaaaactttaacaagacgccaatgaagattatagaagggagactcaaccacatctacaatatcgaaaaccagaatcggacactctattctgaccacctgtccggatttgagtatcaggccattacacctattgattacaagcgtcatgtgttcagccccaccgaaaacaaggagactcacgaggtgatcaatgaattttccggcaaagagcttgaatactccaagttcatcttctataagttcttcctttacggggattttatcacactgttcaccgaaggcaaaacagatcccctctatatcaagaaggcgaaaaagattttaggcatcgatgatttcgatctgaaaatttatgacgcagatactgagatcaacaagaaaagcattttcagccgcttattcaatctccataccggcgggaaaagcttgattaagatctttgagatctacgttggtagagcgaccgaccagcacttcatcaattactctaaatacttcgaggagaaaacattctctataaaaccaacagtgctgctctatgactttgagctgtatagtcgcaattctcccctaggaaatttcatcagcatcatttgtggaaagaagtataagcattacggatttaagagaaacgtgatcatcaaggagctcaaaactaaaggattttacagggtctataagaacctctacattgcagtgactatggattttaacatgatagggcttaatacccaggaagaggatataaaaagatcgatcgaagactacttcccatcacaactcctgagcaatactaatggtttaaacaccgagcattttgaaggggtgtccgctccgaattctcacagtgtggtgattgataagaaccagtttagtaagcggatccagacctataccgataagaagatcttcaacaactttaacaacctcttcgacatatttctggacattcagaaagactacctgtctgtgctgctctcccgtttggacaaatctaacttagacaatcccgtagaaaaacgcatggtgattaattgtctgtaccgaatccttaattcaaataagactctgcagctcatcgagcaatttaaactaaccaaactgtttatggacgtatacaacaaaaactttctgtga

SEQ ID NO: 8598 - RNA, 1998 nt, synthetic construct
  source 1..1998: mol_type = other RNA
atggccaagaaattgtcggacattaccaacaagaaccagctcattcaagtgctgatagtagcacatgccattaccaatggaaagactttctataacgtgctgaacaatattgacaaacattataccgagttcagcattccaaagaaatacagtaatgaactgaggacaattaacgcacccgactccgagctgaaaaaaatccagaaacaaatcaaacggcttatcgagaatcagctgttaagcaagaagtattacttcaacatcagttctcaagcataccagaagaataagtccatctttacaaacgcccagattcaccgtaacaaaaaatacatcctccatttcgacatagagaacttctttgacaatatcacattccgaaggattaatggtttcttccagaaaaacaagaggtttaaactgccctacaacatttctaccattcttactcggctgtgttgctgcaaaggccacttggtgcaaggcagtccgatctctcctattatctctaatctcattggcgatggcttggattacaaattacggaagctgtccaataagtaccacttcatatacacacgatatgctgatgatatgatattctcaaccaatgatagcaagataatcacgaataagctgcaggaatttatgaaggacttgcaagatattatcgagcaggagggtttttctctgaaccagagaaaatataccctgatgggcccaaatgtaaggcactatgtcacaggacttaccaacaacaagaaagttgccacaccgattgagttttataagagcactcgggctatggctaatcacctgtataagtacggggagattaatgtcaatggcaaaatctttgactccaattcttaccctagtcctgtgaatattgtggaggggcgccttaaccacatttatcatatcgagcaggagaaccgcaagttatatcaggaacacagcgcgggatttgagtattttccaataacccctctcgactaccagaaacatactaacaagttgaagatcaacaacgatactggctcaatcattaatgaactctcagggaaagaactggagtattctaagttcatcttctacaagaacttcttctatggggactacataaaagtgtttactgagggaaaaacggatcccaggtatataaagaaggcctatagcatgctgcgtcccaacgacaactcaatcagactctccagcgtcgagtcactgctcaatcacaacaatatcctcaccaaggtttttaacctgcaccaaggcggggatggattgaccgatattttcaatatgtacaccgggaatcagtctaacgagaataaatacttcaactacacgcagtacttcaatctaaagactttacccatcagaccaactatcatcctgatggactttgaactgaacaacaagaataagacatcccctctcaacaactttatcaacaatatcgtgaacacactgctcgggggaaaaggtcgcaataaagaaaaggagaggaacaaaatcaagcaggaactgaaggaaaaaggatactatcggatctactcaaatctgtacttagccgtcactacagacttgattgaaataacatcccataccgaaaacaaaacaatagaccgcgatattgaaaattacttcgatattgacctggtgaaagacatgtttcagagaaacatgatccacatcaaagacattagaagtgtctgtaaagtgagcgagttgatcaataagaatgagttctcgaagtccatcaaaaagattaatgatgctaccaagttcacaggttttcagaacctaataaccatcttcagcaatattcatcttgactatcttgaactggttctaaacaaactcctactgacccgagataatccactcatctacacgcagactatcaagaagattaagtccagtaactacatcatacatatgatcaccggcaatcaaaagcttaacaatctctataagcagcttaacctgtga

SEQ ID NO: 8599 - RNA, 1821 nt, synthetic construct
  source 1..1821: mol_type = other RNA
atgctcaacgaagctaaaaccatcgacgaattggctgcatgtatcgagatgcagccctggcagctgaagaaggtgttgtatagcgggggcggcgccaacacaaaataccgccaattcgaagtgataaagaaaacgggggggataagaaaaatcgatgctcccgagcaaagtctgaaacacgtccagaagcggatcgcggccaagatcaatgaccttctggcacttgagaaaggtgatgcaccgttcgttccccttagtcaggcttaccagaaaggccatggaatttatactaacgcgcttgtgcaccgtaacaagaaactagttctgaatatcgacatctctgacttctttccgagcctgcactttggccggatagctgggttctttatgaaaaataagaacttcctgctgtcaaaggaggttgccgtatcgatcgcccagctaacctgccataatggtgtgctcgctcagggttcagccctgtctcctgtgattagcaacttaattttccaggccgtcgatcaacatatcctgaaggtaactcgcaagtacaagcttacctacacccgctacgctgatgacatgacgttttccactaacaattttggcttcttgaacgagctggaggagttcgtaaaaagcatcgaaagccagattaaagccgatggattttcgatcaattggtcaaaaatgaggctgagtggaccagacgtccgacagacagtgaccggtctatcaataaacaagaaggtgaacgtttcaaaacagtactacaagaatacccgcagtatggccctgtccctgtacacaacgggcttttttcatgtcgatggacagaggtatgaccagaacatgctgagtaaactcgaaggcagattcagctacattaatgacattgtacggaagaacaacctcctgtatgaacagtattcctttgaatatctggcgacacgagctaacaataagtctaggctcctgaacgagaagaagtccaaaccatctttgcaccccgaagcattttcctcttccgagaaagcctacaggaacttcctgttctacaagtacttctataagaacaagaagcctctgatagtgacagagggacatactgacgcgatctatttaaagaccgccataaagaacctgaagatcagcaacttaaatctcgatttcttgaagagatcaaagatgaccaagtatttcttcggctttattaaaggtggcgactccctcaaaaatattgcaaatctgtacctcagctctcagaaaagcaacgtgaatatcagcaacaagatgtataattacggcgtgatcccagaccaacctgttatcttactcctggaccacgaaatgcataagaaagaaaagaaggattctccactccttcctctcgcaaattacttgaagggggtgtccaagttccctgagattgaggatttcttttgcgaactccacaaacacggatttatccacctaacctctaatttgtacattgccgtggtcagtaaaaagggcactaccaaagacgatatctatgagatagagaatctgtttcccaatactctgttaaacgatgtttttggtatggggacatttgagaaagtgtattccggaaaagggagaaaaatcgacaagaatgatttcgcactgattattaggaaacactggaacaacgacatttttcagggattcaaggtgatgttggatgtgattgataaggtctgtctcgactatgagaaaagaaagcaacggatgcttgaaaaacgtcaaaatgacgagaagaaagccgtgaaggtcgggaatacaaacaataaactttga

SEQ ID NO: 8600 - RNA, 1755 nt, synthetic construct
  source 1..1755: mol_type = other RNA
atgtatctcaatgaagccaaaactatcgacgacctcgcggagtgcttggaaattaagacctggcagctgaaaaaggtgctctatagtcacggcggagccaacaacaagtatttccaattcgagatcacaaagaaatccggaggcacgcggaaaattaatgctcccgagaaaagcttaaaactcgtgcagaagaagcttgctacaaaaatcaatgatcttctgcatgaggagaaaggagaggcgccttttacgccactgagccaggcataccagaaaaaacacggaatctatacaaatgggctcattcacaggaataagaatctggtcctcaacatagatctccttaatttctttccaagcctgcatttcgggagggtggtaggattcttcatgaagaacaagaaattctccctcaccaacgaagtttctgttgcaatcgcacagctgacttgccatgatgggatgctggctcaggggtcaagcctgtccccggtgataagcaatctaatctgtcagtccattgaccagcatattctgaagattagcaaggagtacaaattgacgtataccagatacgccgacgacatgactttctcaaccaacgactttaacttcattaatcgactggaacagttcgttaagctgttggaaacccagatcaaacgggacggctttgatataaactggagcaaaatgcgcttttctggtcctgatgtgaggcagactgtcacaggtctatcagtgaacaagaaggtgaatgtcccctaccaattttacaagaatacccgatcaatggcactgtctctatataccacagggcattttactatcgatggccaagagtatgatcgcgataaattgtacaaactagagggcagattcagtcacataaatgatatcgactggaagaataacctgttatatgaacggtactcctttgaatatcaggctatgcgcccaaataacaagtctcaccttctgaacggtaaaattagtaccccctacctttaccccgaagctttttccagtagagaaaaggcctatcgcaatttcttgttctacaagtacttcttcaagaacaagaagccgcttattgtgacagagggccataccgacatcgtatatctgaaatccgccattaagaatctgcagagaaacgatttgaacgtggactttctgaaaaggtctaagtctaccaagtacttttttgggtttatcaagggaggcgattccctgaagaacattagcaacctctaccacaatagttcattgatgaacatctccaacaagatgtataagtacggtatcaagccagaccagcctgtgatactccttttagatcacgagatgtacaaaaaagttcagaaggatagccctttaatgcccctcgccaactattggaaggatgtatcgaaattccccatcatccagaacttttacgacgaattacatcaacatggcttcatacacctcacttcgaatctgtacattgccgtggttagtaaaaaaggcactacaaaggacaatatcttcgaaattgagaatctgttctcagactatgtcctggataaggtcttcggcctgggaacatttgagaaaaaatacaaagggtctgggcggaaaattaccaagaacgacttttcactgatcatccgtaagcaccaaaaggatagcatttttgagggtttcgacaaaatgcttgacataatccacctggtgtgtgtcgactatgagaagcgttctggacagcaatga

SEQ ID NO: 8601 - RNA, 1833 nt, synthetic construct
  source 1..1833: mol_type = other RNA
atgaatctgaatgaggttaatgatgtcgtggacctcgccagagtgttacactatcctagcaggaaaataaagaagattctttacagggacagggttgataaccaatacttcgaatttagtctcgccaagaagagcggtggctcccgacttattaatgtccctaacgaagtgctcgccgacctgcagaattgcattttgattgagctgaaacgctatatgaacaatcatgacatcaaattcagccgcgtgtctcaggcttaccaaaaggatcgcgagaaaggaatctacaggaatgctcgaattcaccggggaagaaagtacgtaataaatgttgatctcgaggatttctttccctccattcattttggacgagtggtgggcttctttgaaaagaacaacaagttcaagttcacacacagatgtgctatcttgctcgctcagctggtttgctataaaggctatctgccacagggagcgtccacttcacctctgatcagtaatctgatctgtcatactctggatatccacattttgaagatagcaaagaagtatcaccttagatattcaaggtttgctgacgatcttaccttctccacaaacgacgatgaaattagcacggaagaacaaatgcacaattttataaaggagctgacaaggcagatcgggcgtgatgggtttaaggtgaactggaaaaaaatgcgaattgccgggccggacgtacgccacactgtaaccggtctggtgaataacaagatcgttaaggtgaagaaggagtactacaaaaatacccgcgctatggtgaaccagttgttttatactcaccggttcattattgatggcgtcaagtacaatatcgaaaacgacgagtcaaaaaaaggcgggataaaaaagctggagggaagactcgcattcattgacgatataaaccggaggaataatatcgaatatctggacgatatcaccaagaaagccatgacacgggtgcagaatccaaaacggtacgacaaatttagtgcgttcgagagaatgtacagacagtttctcttctttaagaacttctggcaaagaaacacaccgctgatagtcaccgagggcaaaacggacgtgttacatctgaaagaggcaatcaagaattctgatattctccttcccaacatttcgttttttaaaccttcctcccggttcgacttcttcctgggaattgggtttgacggggccagcaagatggacaagtttatcaacttgtacatcaaggagaattccttcgagaacctatcaatcaaatttcggaagatagatgacatcaagaaagaaaacgatctgtttggactttcgggggaatccaaacccgttattctactcttcgaccatgagtttgcagacttagagtctccaataaacatgttcatcaataacctgagcaaagaccgcacctacaggcatattgagagtaagaagatcgaagaactcgagaaatatgaaagcgagaaacagaattctaacgccattaaaaagttcctaaagaagaagctgaacgaaaatggcttcatccacttggtcgataatctgtacgtcctcgtcatcaagaaagacgtgccatcaatcaacgaaaagtatgccattgaaggtctataccccattgaggtcgtaaataacgtgtttggtctgggcgtgctggaaacctatgccgacaacaattttgagaacgtgcttagcaaaaacgatttcagtaaaatcatccgtcataagcctgcagagatcttccgtggcttccggcccactttatcttgcatcgaggagatcttgaaagattctgagaaccgcaacaattga

SEQ ID NO: 8602 - RNA, 1695 nt, synthetic construct
  source 1..1695: mol_type = other RNA
atgaagttcaatgaattgagaaacaggaatgacctggcatcgatcctgaaaatacctaaaaaccagttctcataccttctctacaagctaaacgtgaataagcagtatgagaaatttgagatccccaaaaaatctggtgggactcgaacgattcatagcccgaacgataggctaaagtatatacagaaacgcttgaacgaggagattcttaacttcatcgacgatagcgattatccaaagagcaaaatttctcatggatatgagaagggcaagagcatttcaacaaatgcttcagttcacgtcaagaagcggtacgtcttgaatatcgatatcgaggattttttcgggtctatcaactttggtagagtgcgtggattctttaacaagaacaagtttttctccctgcccctggaggtgtccactatcatcgctcaaatctgctgtaaagacggggtgttgcctcagggagcgcctacgtcccctatcattagcaacctaattggacataccctcgattacaggatcagcatcttagccaagaagtacaaaatgaattactcaaggtacgtagacgatctgactttttccacaaatgagaaaaacttcgagttgtatctcgagaattttctgagcgaatttgacgcacacctgaataatgctgggtttaaacgcaacaagaagaagacgcgtctgcaatataagcggagtcggcagagtgtgacaggcgttatagtgaatgaagatctgagtatacccaacgatttctataaaaacacaagagccatgctcaacgagtttattaagaacgagaagttcttcattgacaaaaaggacaactatggcactctcaatcaattagagggccgcctgagctacataaaccacttcgagaagatgaaaaatatgcggaacgccaagaataaggaagttaacaaaaagaaccacactaagttctccaccaaagaaaaggaattcaagaagtttctcttctacaagaacttcatcatcaacgacaagcctctcattattaccgaaggtaaaactgacgtactgtatctcaaagccgcgttgaagaatctgcattctgaatacccaaatctgatcgaaaagaaggataatggcaattacgacttcaaagtgaaattctttcagcgaagtaagaggaaccggtatttttttatcatttccaaagacggagctgatgcaatgaaaaacctcgtagacttattcatcgataagcgcagtaataatgtgaatgagtgcgtcatgaccaaaattaaaaccatgcgcaaaacaaaagccctgaaccccgtgatactgctgttcgataatgaaatggtcaccgatagaccgctcaagaacttcctgaatttcatcaaaatctctccagaagatcgacttaaatttggcctgtccctgaatacctgtattagcgacaacttgtttttactaaccaacgatatccccctgaaaaagaaggacgttggtgaagccgagattgaagaccttcttccagagaatatactgaatcacgtcataaacggcaagatgatgaattatacaaacgggaaggacaaacagtcaatttctaaagactttctgtccaaatacgtggtgtcaaattacgagaagattaacttcgacaagtttagaccccttctcaattcgcttaactctatcatcgagaattactga

SEQ ID NO: 8603 - RNA, 1677 nt, synthetic construct
  source 1..1677: mol_type = other RNA
atggtgatttccgatattgaaagccgggaacagctcgccttccttctcaacatccccctgagcaaactgacctatctgctatacgtgaaaaaaattgacaactgctacaccagtttcgacattaagaaaaagaataacggagtcagagtaatatccgctccaaacgaagatctcaaagatatccagagaaaacttggatatctgttggagtcacatcataaggctttcctgaaggaaaaaaacattgacaacaagatctcccatggcttcgagaagaacaagtccattattacaaatgctgcggtgcaccgcaataacaagtacattctgaacatcgacattaaggatttctttgactctatccactttggccgggttagagggttcttcaacaagaacatcgagttcaatttaccgctggatatggcaactgttatggcacaactggtttgttacaagggggttctgcctcaaggcgccccaaccagccctatcgtgtcaaatctgatatgcaacattctggacatccgaattctcaacctggtcaagaaatataggatgaattatacccggtatgctgacgatatgactttttcaacaaatgacaggtgtatcgtcgataactacgacggaatcctcgaggagatagccaatgagctggataaatttggcctctacataaacgacaaaaagaccagactaatttacaaggattcgcgccaggaagtgaccggactggtggtcaacaaaattatcaacgtaaaccgggattattgcaaaaaaactagagccatggctgaaaatctctaccgtaaaggttctttttacataggggatgaggaagggtctataaagcagttggaagggaggttcgcctacatcaatcagctcgacttttataacaacaagcgaaaaggcgaaaaaaaagactgctggcacttgaattctcgcgagaagaattatcagaagtttctgtattaccgctattttttcaacaacgagaagcctcttatagtgacggagggtaagacagatatcctttacttgaagtcagcactcaagaaaatgtatgactcttatcccaatctgatctccaaaactaagaatggcttcgaatttaaagtgagctttttgaaacgaagcaagaggctcgaatatttcttcaatatcaatcaggatggtgcagacaccataaagaatgtgttgaacatgtacaccggacagaaaggatttgcgaattactacaagtacttcaaggacaaaagtgagaaagacgggcgtaatcctgtgttactgatcttcgataatgagcagaagacagataggcccctaaaaaagtttaagaaagacgccaagatccaggatgtgaacatcaagaattggattaacatcttagggaacctttacctggtcacaaatccaattgtgaatggcaaagacgagtgtgaaattgaggatcttttctccgagagtactcttaatacgttgatcggtggcaagtcctttagccggaactcaaaaagtgagaacgacaaatactacggcaaggccattttcgccgattatgtcatgaagaactatcagaagatcgactttagtaactttgtacccttcctggacagcatcaatagcgttttagatgactaccaaaagaagaatctgatccaatctcagtga

SEQ ID NO: 8604 - RNA, 1827 nt, synthetic construct
  source 1..1827: mol_type = other RNA
atgatgtcctataaagagattgactcaaagcgcaaactggcactatatattggagttccagtgaaacagttgacctggcttctttacgttcggaaaatagaaaactgctacaacaactcgtttagcattaaaaagaagaacggggatgaccggattattaatgcacccaacaagtctttaaagtatgtgcaaagaaggctggctcggttactgctcaaacgactgaatgaggtctacgtagaaggtaacatcatcaataacatatcccacggctttttcaaggggaaaagtattaagacaaacgctgtgccacataggaacaagaagtacattctcaatatcgatctaaaggacttcttcgacagtatccattttggcagggtgcaagggttcttcaaaaacaacaaccactttaagttgcctgaagtagccaccatcatcgcacagctgacctgctacgaaggcaagctcccccaaggcgctcctacatcccccgttatcagtaatctgatttgccaaattctggactacaaaatcctgagcctctgtaagaagtaccgacttacttacaccagatacgccgacgatctcaccttctctactaatgacaataacttcaaggacaactattccaactttttaagcgagcttgataaagtggtcgtacggtcaggctttgagatcaatagtaacaagatacgcttccaggagttcaattatcgtcagacagtgaccggcctaactgtcaacaaaaaagttaacgtgcgacaggattactacaagcggaccagatctatggcgcactctctgtacacgactgagaaatatgagatcaatggaagaaatggtacgattaatcagctggaaggaaggttttccttcataaacgatttggtgaagtacaataacaggctggttgaacaaaatagtctgagactcaactcaattgagtataagaaaaaccttctctacacacaagactcagagtttgtgaatcggacaaataagaacccttggaagaccaatttaaacagcttgagcattcgcgagaaggactatcagaaattcctgttctacaagtatttcattgccaatccccagatcactttcattccagaaggaaagactgatgaaaagtacataaaagctgcccttaaacgttactacaaggactatccgaatctggtgaagaaggtcgggaagaagtttgtctacaacattactttcatcgatagaagcaagcgctggaaatacttttttggcgtgctggaaggaggtgggtccgatctctatcagctgctaaattattttaccaacgccgagaataggacttgtcgcaactatctgtctcattttaagtcaatcatcccaaatcccccgaaaaaacccgtcattttcttactggacaatgagttcgataagaaaaagcccctcaaccagtttataaaaaagctcctgattgcaaatggactggattccaataaaatcgagagcacggtgcatgaggagtatctgtataacattgaccttaatgcgtttatcatgacaattccattcgacaacatcaaaaacgaggatgataaagagatagaagacctgctggatatcgaaaccataaataacgaactcatcagcaacgaatttgacggcaaaatcttcgacaagaataagcagcacgatgatcctaaatatatagggaaagagatcttcgccaatacaatcttgaagaaccacaactctaaattgatcgactttacccagttcaaacctcttttggacctcatcaatcagctgtccacaaattacagccagtttcagaacaagtga

SEQ ID NO: 8605 - RNA, 1848 nt, synthetic construct
  source 1..1848: mol_type = other RNA
atgcagtattccgatattaagtcgatcagaaccctcgcttatgcgttgggcgtgcaaaccaaacaactgacgggactactttacgggatcaaaattgaaaactgctatacctccttcaaaatttccaaaaagaacggggacgaacggaccatcaacgccccaagcaaaagtttaaaatatgttcagaggcgactgactagactgttagtcaagagacaggaggagttcttcttggagagaaacgtcaaaaacaatatttctcatggctttagcaaggggaaaggcatcaagacaaatgccgtgcctcacaggaataagagatacgtgctcaatgtagatcttgagaacttttttgagacgatccatttcggtcgagtccagggcttcttcaagaataacgagtactttaagttgcctgaggttgcaacaattatcgcgcagatagcttgttatgaaggtagcctgcctcagggagcaccatcttcacccattatatccaacttgatttgccaaatcctagattaccggatcgtccatctctgtaagaagtaccgacttacttacacccgttacgccgacgatttgacgttcagtactaatgacaaaaacttcgaggacatgaaagatgaatttgaggatgagctgaaaaaggtgattagtcgtagcgggttcatcgttaattccaataagactcgctttcagaaaaatgactcaaggcaaatcgtaacaggactgtctgtgaataagaaaatcaacgtgacccgcgatttttataaaaagactaggtctatggccgataaactgtatcggaatgggtccttcactattaatgagaagaacggaaccatcgaccaactagagggccgcttttcatttatcaatgatctcgtgaagtacaacaacagactggatgaactgaacagcctcaagagcaatctgatcgaatataagaagaacctgctctatactgaagagcggaaatataagaacgataatgacaacaaccaggtgctcgattgggaacggaatctgggcaatctgaacataagagaaaaagactttcagaagttcctcttctacaagtatttcattgccaatccgaaggtcacagtaataactgaggggaaaacagactcaaggtacattaaggctgccctacgcgagtattacctcgaatatcctaacctgataacaaaggatgaagggggcttcaagtacaatatccactttctcaagccgtctaaacggctgcgctatttttttgattacatgtctgggggaggcggaggttttgtccttattaaccttatggagttctttagcggaaaagattcaaggaccaagcgcaactacattaagtacttcaactcaattctgtcggagaaaacattaccccagaagccaaccctgtttctggttgacaatgagtggcagggttccaaccctttaccaggtgtgatcggcaaattagtgaaggacaaaaatctggagaggaaagatattgaacagaagatcaagagcgactttctctaccacatagacttgaatgctttcgtgataaccctccccgttgaatccgtcgactacaaaacaaacattgagatagagaacctgtttaatcttgaggaaatcaataacgagcttatcgcacccaactatgacggcaagatcttcgatcccaagaagaaaaatggcgacaacaaaaagaagatcggaaaagaaatcttcagcaactacattttgtctaactacgacagtgaagtgatcaattattccaagttcaagccactgttggacctgattaataaactgagtgaagactacaccaaattcaaggacaataaatga

SEQ ID NO: 8606 - RNA, 1833 nt, synthetic construct
  source 1..1833: mol_type = other RNA
atgaattatgaggatattcatagtcgcgatatgctggcattcgctctgggaatacccattaagcaattgaccggcctgctgtacggggtcaaaatcgaaaactgctacactaccttcacaattagtaagaaaaacggctccgagcgaaccatatcggccccaaataagtcactgaagtatgtgcaaaggaaactggcccggctactccttgagcgctacgaggagtttctcaccgaaaagaacactaataaccgcatctcacatgcttttttcaagggcaaatccataaagacgaatgcattacctcatagaaacaaaaggtatgtgctgaatgtagacttgcaggatttcttcgactctatacatttcggaagagtccacgggttcttcaagaacaatgactttttcaaactccctgacgtggcaactgtgatcgcgcagctgacatgctatgagggcgtgttacctcagggggcgcctaccagcccaatcatcagcaatctcatctgtcagatccttgactacaagataatcgagctttgtcaggaataccacctgacttatactagatatgctgatgatctgaccttctctacaaatgagaagaactttgacaacaactatcaggattttttggataaactcgacaaactggttacccggtccggttttaaaattaatgccgagaaaacccacttccaggaatacaacggtcgccagactgtaacagggcttagtgtcaacaaaaaactgaacgtgaagaagggtttttacaagcatacccggagcatggcccactcactctacaagacgggcaagtttatgattaatggcaaagaagggacactaaatcaactcgagggaagattcagcttcattaacgatttagtgaagtacaacaacaggttggaggagcttccatccctaaaactgaactcaattgagtacaagaagaatttgcagtttaccgatggaaaggaatttgaagttaagaagaacgagcagaagcaaatcctggactggaaaaagaatctatctacactgagtatcagggagaaagactatcagaaattccttttctacaagtacttcattgccaataccaatatcacagttgttactgaggggaaaactgactctaaatacatcaaggccgctctgcgtaagtattatgcagaatatccagaacttgtaacaaaggagaaggacggctttaagtacaagatcaattttctccccaggacgaagcgaatgagatatttctttggtttcctgtctggaggcgggtccgatcagattcagctcttcaactacttcattaaccgtgataatcacatcagccggaattacatcaagtacttcaaagagatcagcgaagacgtgccgctgccgcagaaaccaactgtgtttttgctggacaatgagtgggagacaaaaaagcccctccacaatatcataaaagtgctgtgtagtgctcaaaacctgaacaacaaagacatcattcagaaaatccacactgattatctgtatcacgtggatctgaatgcctttcttatgacactgcccgtcgacaatttaagccctaaatgcgaagtcgaaatcgaaaacttattcgacctggaaaagattaacaccgaactcattgaacccttgcatgacggaaagaagtttgatattaaaaaggagcacgacgatgataaatcaataggcaaagagatctttgccaataccattctcaccaactacgattccgagattatagacttcagcaactttaagcccttgctggacaaactctccgacatctctaaggattttacaaagtatacgtga

SEQ ID NO: 8607 - RNA, 1866 nt, synthetic construct
  source 1..1866: mol_type = other RNA
atgtgcaagtattcaagtattgatagcaaagaagctctcgcgtccaccattggtgtgagcgtgcgccagattacaggccttgtttacggcatccgaattgacaactgttatcactccttctatattagcaaaaagtcagggaaaaagcgacaaatatcagccccaaataaatcgttaaagtacgtgcaaaggcggctgtgccggctgctaattgagaaattgaacgacttctatctggagtacaacataaagaatcagatcacccatggattcttcaaaggaaagtcgataaaaacgaatgccttgccgcacagaaacaaacggtatgtgcttaatatcgaccttaaggatttttttggcagcattcatttcggaagggtccaagggtttttcctcaagaataactatttcaagctgccaaaggtggctacacttatcgcacagctgacttgttacaatggcaaactacctcagggagccccgactagccccattatcagtaacctgatatgccagatcctggactacaagataatcatcctgtgtaagaagtatcggctgacctatactaggtatgcagatgatctgacattctccaccaataataaggtctttagcgagaactatactctcttcttggaagagttaaaagatatcgtcaccagcagtggttttgacatcaatgccgagaagactcattttcagaaattcaacagcaggcagaccgtcacaggactgagtgtgaataagaagttgaacgtgcaaaacgacttttataagaagacacgcagcatggctaataccttatataagactggtgagtttaccatcgacggaaaagagggcaccataaaaaaactagaagggcggtttagtttcatcaatgaactcgtaaagtacaacaacagacttgtggaagatcggtcactcacctcaaacatcatcgagtataagaagaatcttctgagaacacaggagaaattatttagactgtccgaccgtaaaataaagaccctcgcctgggacgagaacctgcgctcactgtctatgcgtgagaaggactaccagaaattcctattctacaagtacttcatcgctaataagaaaactacactgattacggaagggaagacggatccacgctacattaaagcagccttgaaacattactatagcgattttgcgggtctggttagttccgacgggaacaactttaaatacaacgtaagtttcctctcccgttccaatcgcatgaggtacttttttgggtttaaagaaggcggaggcggcgagctccagaatctgctgcgattctttaccgagggcaacacagttgagaaccttttggagtatttcagaaaaatcatccctctcaaaccctctaagcccgttattttccttgtcgacaatgaattctctaaagatgacccactctactgcgtggcaaagtttctcaagaacaaaatccacacaactgagtacatcgaaaaaaaactccacacagactatttttaccatgtggggttgaatactttcatcatcaccctgcctatctctaacatcgatatggataataaggacaagtctaagttgaagggaacggatattgaaattgaagacctgtacaacctgaacgagattaatgaaaaactcataaagcccaatcacggcgggaagatttttaataagaagaaggaggacaactctaagtacattggcaaagagatattctccaagttcatgatctctaattactccaactcctgtattgactactcaaaattcaggcctttactggatctgattaacgatctgtctgaaaactatcacctgaagaccgatggtgaaagatacaatacaaaatga

SEQ ID NO: 8608 - RNA, 1155 nt, synthetic construct
  source 1..1155: mol_type = other RNA
atgtattcgtactcttcaatcgatagcaaagaaaatctggcagccaacataggtgtcactgtgaagcagattacggggattctttatgggatcggaatagacaagtattaccacacctttttcattcccaagaaaaacggacagcagcggcagattaatgcgccaaccggctctctgaaatatgtgcaaaggcgcctaaacgtgctgctgctgaagagactggatgaattctatctggagcacaacatcaagaacagaatttcacatgggttctttaagggcaaatccattaagacgaatgcattccagcatcggaataaacggtatgtgctgaatattgacttgaagaacttcttcgactcaatacattttgggcgggtccagggattcttcttgaagaacgattacttcaagctgcccaaagtagctactattatcgcccagctgacctgttacaatggtaagctagcacagggcgctcctacaagcccgatcatctctaatttaatctgccaaatcttggactaccgcatacttaaactctgtaaaaagtaccgactcatgtataccagatatgccgatgatctgacattttccaccaacaataaggcctttagtgaggcttataccctctttttagacgagctcagcaacattgtgaatgatagtgggtttgccattaatactgaaaaaacacacttccaggagtttaacaagagacagaccgttactggcttgtctgtcaacaagaagatcaacgttcaaaatgagttttacaagaagaccaggagtatggctaatacactctacagaacagacaaatttacgatagacggcaaagaaggaactatcaataaactggaaggtcgtttttccttcatcaacgatttagtgaagtacaacaataggcttgaggaagacaatagtctggcgtccaacatcatagaatacaaaaagaacatcctgcgcgccaaagagaagcactttaacaagagcaacaataaccagatcaaaattctcgactggaacgagaatcttaggtgcctcagcattcgtgagaaagattatcaacgattcttgttctacaagtacttcattgccaacaataaaatcactcttatctccgagggcaaaacagaccctcgctacatctga

SEQ ID NO: 8609 - RNA, 1848 nt, synthetic construct
  source 1..1848: mol_type = other RNA
atgaaatacaccgacatatgtagcagggatgatctggctatcgctctaggaatcggcaaaagacaactcactgggctcctctacggaatcggcatagacaagtgctatagctcttttgagattcctaaaaagaacgggggaaagcgactgattaatgcgcccaataaatctctcaagtatgtccaaaggaagctgaataagctgctcttgaagagactcgacgattataaccgagaaaatggttcaaaacagaacatcgcacacgcatattttaagggcaagggcattaaaactaacgcctttccacatcggaacaagagatttattcttaacatcgacttggacgatttctttggaactattcacttcgggcgggtgcagggtttcttccaaaaaaatgcctatttcaagctgcctgagatcgccacaattcttgcccagctcacatgttatgaggggaagctgcctcaaggagctcctacctcccccgtcatcagcaacttgatctgccagattctcgactacaagatattagacttatgcaagcggtacaaattaacctatactaggtatgccgacgacctgactttcagtacaaatgatcggaagttcttcgaatctagacagcagttcgttgaggaacttgggcgcattattaagaagtccggtttcaatatcaacaacgagaagacgtatttccagagttccgagaataggcaggtggtgacgggcctgtctgtgaataaaaagatcaacgttacagtcgacttttacaaaaaaacccgctctatggcacagcatctttacaagacaggcggatttagcgtggacgggaaagagggtaatttgaatatccttgaaggcagattcagttttatcaatgacctcgtgagatacaacaaccagaccaaaaaaaatgagagcctcgtgagtaacagcccagagtaccagaaatacttgagtctgccgatcgaaaaactgattagcttaaaggggaaacgatttaccggaaaactgacgcgcaacgaaaagctgtacaatctgacaattagggagaaggattaccagaagttcctgttttacaaatactttgtggcgaatcccaagaccatcattataacagagggtaaaacagattcgcggtatattaaagcatccttgaaaaggtactacactgattatcccaatctaatcaagaaagagggcaacaagttctcttataatatcactttcctgccccgctcacagcgtcttaagtatttttttggctttttagacggcggagggagtgatctgataaacctggttagcttctttatagacactaacaactactctttccgcaattacgtcagctatttcaagtcaattatcaccaacaatcctcctaaaccagtaatatttcttctggacaacgaggaaaaatcaggaaaaccgctcggctccttcaagtccttcatctccaagaacactagtgccacctcatctcaaatagatagcgccattaaaagcgatttcttctaccacattgattttaacacgtttttgatgacccttccagtagaacgtacctcaaactccgacattctggatgtcgagatcgagaatctattcgatctagacaagatcaataacgaactgatccgggggatgcatggtggcaagacattttctccaaagaaggctgagggggatgatctccacatcggcaaagaaatcttttccaagacaatcctgaccaactacgaatcagaaataattgacttttcgcagttcaagcccctgctggacaacatctccaacctgagcaataattattccgagtacaccaaggataaaattcagtga

SEQ ID NO: 8610 - RNA, 1842 nt, synthetic construct
  source 1..1842: mol_type = other RNA
atgaaatattatcaaatcagttccatcgacatgcttgcgttcgcactcagaatccccgtgaaacagattacaggactcttgtatggtgtcaagatcgagaattgctacagcaccaaggaaatccccaaaaaagatggttccaagcgcatactcaacgctccaaacaaaagtttaaagtatgttcagcgtcaaatctgtaagctgctgattaatcgcttggacgagctgacggagaaaaatggggtgaaaaataatatctcccatggcttcttcaagggaaagagcatcaaaaccaatgcacttccgcatagaaataagaagtacgtacttaacgtggacttagaggacttttttgacagtattcactttggaagggttcagggcttctttaagaacaacaagtacttcaaactccctgagatcgccactgtgctcgcgcagctgacctgcttcaatggcaaactgcctcaaggtgcccccacttcaccccttgtctcaaacttgatctgccaaatcctcgatttcaagattctgaaactgtgtaagaagtacaaactaacttacacacggtacgttgacgatttgacattttccactaatgacccatacttcttttacctgtacaactactttctcgacgagcttaacaacctaattaataaggccggcttcaagataaatcttcagaagacccactttcagccttttaataatagacaggttgtgacgggtctaagtgtcaataagatccttaacgtcaaaaaggaattctacaagatcactagatcaatggcaaactcactgtataaaacaggaacttttgagattgacggaaagaaagagacggtggaaaaaattgataagctacatgggaggttcaccttcattaatgatctggtaaagtctaacaacaggttacacgaaatcaattctctgcgcctgaatggcatcgaatataagaagtttctactcactacctatgagaaggaattcgaatataaatcggccaatcagaagagcgagttgaagtggaaaaacaatctggggcacttaaacctccgggaaaaggactttcagaaattcctcttttacaagtacttcattgctaatacctctgtaacaattctgaccgagggaaaaaccgattccagatatctgaaagccgccctgaaaaagacatatagtcagtatccagaactcattaactttgaggattcaaagttcaaggtcaacatcaacttcataaatcggacggctacacagcggtatttctttgggatattggaaggcgggggcggggatctgacacaactcctgaagtattttactgacggcaaaaacgatattgagaggaattaccttagctacttcaaacggattataccagaggccccaaagaaacccgtcatattcttagtggataacgaatctgataacaaatcgcccctggagaacgtggcatcctttctcgctagcaggcagggggtgaaaaagcaagacatcgtgaaaaaactgcagaacgacttctattaccacgttgattttaatgtgttcatcgtgaccctgcctaccaatatcttcaacaataagaccaacatcgagattgaggaccttctgaatctggacgaaataaacaaccagattattcgagaacgatatagcggaaagtccttctctccgaagaaatctcacaacgatataaaccatatcggcaaggagattttcagcaattttatcaaccgtaactactccaaccctctgatcgattttagcggctttcgccagctgttggacttgattgattcactgagccaggactaccattcttacacaaataattga

SEQ ID NO: 8611 - RNA, 1755 nt, synthetic construct
  source 1..1755: mol_type = other RNA
atgaatctgcagatcaataatttcaccacgcgcactgagttagccaacctgctggaaatagagttacagattctcactcggctgctatactcaccaacccagaatgtgaatacacagtatcatacgtttgaactggaaaagaaacgcggtggagctacccgtacaatagccgcgcctaacgactcacttaagattgttttgaggaagctgaacgaccttctttcccaatattatttgaaagcgtttgcctttagggaggccgagaagcagatttcccatggcttcgttcgaaaaaaaaacattttcaccaacgcctctcagcacaggaacaagaaatatatcctcaacattgacctggaagactacttcgaccactttcactttggtagagtcaggggcttctttgaaaaagataagcgctttaacctgagcaaggaaatggccaccgtgcttgcacagctcacttgctacaagaaagtgctccctcagggtgcacccacaagcccaacgatcgcaaacatgattacggcaattttagatcggcgcatcttatccctgtgccagaagtacaagttgaaatacactaggtacgctgacgacctaactttctccaccaatgataataccttctccgataagtacggagaattccttattgagctcgacagaatagtgaaagcttgtggccacgagataaaccaagacaaaactcacttcctgacatacaacaatcggcaaacaatcacagggctgagcgttaataagatcgtaaacgtgccgagaacctactcaagtaagacgcgagccatggcccataacctgtatactaagggagagtacttcatcggggacaacgtgtataacatcaatgagaatgaaaagacactcgagattctgaccggacgattcaactttagtaattggatcgacaacttaaagctgcagaacaatcagttcgctcaaaacaataaatcactcaggacctatagcaaacgtgagaaggatttcagcaaattcctcttctacaagactttttatgtgaatgccacacctttgctgattaccgaaggcaagactgatttcagctacatcgattctgcgtataaatctctactaccacgggatatcgaagtggtcaacaagtttgattacaagctgttcaagaaaaacaactctatcactacctactttctcaacagcaaatcggacaataagacaggcgagggcggcgacgagattagcaaattgtttttccagtatacctcccaaattaccttcggcaaaggaatagtggaggattgtgaaatcaacattgggctgagcaaagtaagtccccatttttaccactattttcggaaatatgggcacccctttaatcatcatcctgttgtcatcctgctggataatgaaaacagttctaataagccccttaaaaagtttctcaaggcaatctatacaggagggaattaccagccaccgtatgagttgcttcagtctacaaattttctgcacctggtcgggaacctgtacctgacaaccatacctagtccacaaaagaaccccaatgcctttgagatagaagatctgtttacagaggaggacaagaaaagactctccttctcgagagatagaaaagctcccttctccgaggctgtcgaggaaaatcgcgagactatcaatttcgacaactttatcaagctcttcaagatccttgatgacattaagcagcactacttgaccttcgaatcatattga

SEQ ID NO: 8612 - RNA, 1761 nt, synthetic construct
  source 1..1761: mol_type = other RNA
atgagcgactataatttctcaaacattaagacgaggaaggatctggctagatttctcaaaatacccctaaagaagcttacttttctgttgtacatcgatcaaaacttgtacaccaactttagcatacccaaaaaatctggtggaattcgcaatatctacgcacctaacaaaaatctcaaagaggtgcagagagtcatcaaacataagttggagcagcacattaatgaatatcagaaactcaacgggattaagaataacgtgtctcatggctttgagcgggagaagaatattatcaccaattcagagatccacaagaataagaagatagtcttcaatactgacatcaaagactttttctccacaatccactttgggcgggttcgcggattctttattaagaacaagtacttccgcatggaggaaaacattgccacaatgctcgcgcagctggtgtgttataatggctcattaccccaagggagccccactagcccaataatcggcaatctgatttgcaacacccttgatatcaaaatcttgaagctgtgcaaaaagtttaagcttaactatacccggtatgccgatgatttgacttttagtaccaataacaagctcttctcagacgagttccagcttttttacaataatttggaggaacaggtgaaccaatccggtttcctcataaacaccaacaaaaataggttcctgtgtaaggataatcgacagacagtgacaggactcactgtaaataagaaggttaacgttaacagggacttttatctgaagacacgtgctatggcatattgtctctataatagcggggaattctatatagatggcgaaaaagcaaacatcaatcagctggaaggacgatttagctttattaaccagctggataagcaccagaacatcaagaaattcaatatgctgctgccatctgagaagaaagaaaagtttttcagcaacctgttcctgaattcccgtgagaaagagtaccagaaatttctgttttacaagtacttctggaggaacagtaaacctttaatactgactgaaggaaagactgacattctctatattaaggccgctcttaagaaatactataaggcctatccggaactaatagagaaaatcggggaagacgagttctactataagatctcttttttcaagcggtctgacaagatgaagtttttcttctccttcatttccgacggcgccgacaatctcaccaacatcttcaactactacattgataacttcgacgacaaaaagaataagagtttcaactactgcaactactttaagaacaaactgagcatcccattcaagaatccgatcatcatcttatatgacaacgagagacaaaacaaaccacttcacaaagccattgataatgtaattaccggcctcattaggggaaagtcagaggagaaaaaaaaacagcgcagagaaaaaaaggagagtctgaagaaatctctgaatgactccacgccttttgctgagaatatcctagagaacatctactttctaacaaatcctcaactggaggataagaatacggaaattgaagacttactcaccaacataacaaatcatctggaacttgatggtaaatcgttcaataaagatggcgggaagaacaatttcggcaaaaacattttatcccagtacgtgtataagaactacaagaagctggatctgaactccttgaaacccatcctggacaacatcaaggacgtcaaaagtaaatacttttga

SEQ ID NO: 8613 - RNA, 1728 nt, synthetic construct
  source 1..1728: mol_type = other RNA
atgaataaactgtccgagatcaaaacacgtagcgaccttgcggccacacttagtgtttcagaaggcgacctggtgaagatcctatattacgagaaggacttataccaaaactttgacattgcaaagaagaacggcacatcccgcaagatcaatgccccaaaagagaatctcaaaaagatcttacagaccttgaatatcttgctgaataagcacgtacatgattattacgacgagaacaattcctcattaaatgtttctcacggttttgaaaagggacgagatatagtgtctaatgccgaggtgcacattaacaagaaatttgtgttcaacactgacatcaaggattttttccccagtattcattttggaagagtgcggggactgtttcataagcatacaatcttccagatggatgagtacgctgcaactatgcttgctcagttgacctgctataatggctccctaccacaaggcgcccctactagcccactgatctctaacctgatttgcagggaattggacattaggatgctgaggatatgtaaaaaattccgactgcactacactagatatgctgacgatctgacctttagcacaaataacaagaactttcagctcaattacgagaacttttataagaagctcaacaacgagatcaacagcgccggattttctttaaaacacaataagtcgaggctgcagcagaagaccgagaggcaggaagtgaccgggctgacagtcaataacaaggtcaacgttaatcgcaaattctatctgaaaactagggccatggcgcacagtttctatgagaacggtagcttctatattaacaacaatatcgggactatgagacaactcgagggacgtctagcatttattaatcgcctcgacaaagagaataatattcggaagtatgagcgcctcaccaatgaaaaggataaaatggggtttttcaagcataaacctctcaatgctcgagagaaagaataccagaagtttctgttctacaaaaacttctgggtgagaacgaaacccctcataataacggaaggcaagactgatcccctgtatatcaaagctgccttgaaaaagtattacaaggaatacccggagctgattgaactcaataacaacaacgacttcgaatttaagatcgatttcttcaatcggaccagtaaactgagatactttttcgaacttgagaaggacggcgcagataccatgaaccggcttattaactactacgtgcacaaaaactacaattccaagcgcaatgataagttcaactactatcacttcttccacagcaagatgggggtaccccctctttatccaattgtctttctcttcgataacgaatatgaaaagaagccactgcataagttcattgacaatgtggccccactgacaaataagcccgtgaaaaccctgaaaaaggaattgaacaaaaccaatcctactccgcagaacctgataggcaatacctacatcttgtcagtccccaaatccacacctaacgtcaatggggagatcgaggacctgttactcaacataaccaaagacctgacgatcaaaggaaaaaagtacaacaaaaacggtggcgatcagtatatcgggaaggacattcttagcaagtatatctaccaagagtacgaatcattgaatcttgattctctcaagcctctgctggaccggattgttaacctaaaaatcatgtacgagaagtga

SEQ ID NO: 8614 - RNA, 1791 nt, synthetic construct
  source 1..1791: mol_type = other RNA
atgaagtatgcgttcataaacaacaaatacgacttcttcaacgttctcggggtgcctgccacaaaaatgaactacttactgtacaatcgagagagaatgggtactaacaatatgtatcacacctttagcattcctaaaaaatcaggaggaaaacggaccattcatgcaccgaacgatgagttgaaaaacattcagaagaaactggccaaagtcctcgaaaaccactattacgaaagcatccaggacaataagaataaagacgcgttcttgcaaggttttttcaaggatcgcggcatcattaccaatgctaagattcatcggaacaagaagtttattctcaatatcgaccttgaagacttttttcagactattcacttcgggcgtgtcaaaggctttttcgagaaagataacacctttaaggtgccgagcgaagtcgctctgataattgctaatctcgtttgttatcgtggcatccttccacaaggcgcccccacctccccaattatctcaaatttgatcgggcgcataatggatgtaaaactgctgaagctatgcaagagatataaactcaagtacacaaggtatgccgatgatctgacgttctctactaatgacaatagttttctggaactagaggataagctgatctatgagatcaaaaacgaaatcaggaaatgcggatttgaggttaatgaaaaaaagacgcgagtacaggattacagactccggcagagtgtgaccaacatcactgtgaacaagaaactgaatgtgtcaaaaacgtacattaagaacacccgggccatggcccaccatttgtacaagcatcaagaatattacatcgacaatgaagtgggaacaataaatcagctcgaaggccgctttgctttcattaaccaacttgacaagtacaacaataacattgtcaagatcaagagctttgaaaagaattcgattgaggagcagaaaaacctgggtagcgtgttccagactaagaaagagatttcaaagaccttcttcttcaaaaatctcaatagcagggagaaggagtatcagaagttcttgttctacaagtatttctacgcaaatccaaagccaatcatagtgaccgagggcaaaacagacgttagatatctaaaggccgcactgaaaaacttatacaaagagtatcccgatctgatagaaaaaaacgaaaatggctttgacttcaagatttccttcctaaataggttttccaacaggcaccagaagatcagcaagctgcattatttccttaatattgtgcctgacggggcagatactatctacaacatatacggttactatgactctaaaaacagtacatatcccaactttatcgagttctttaagaacatttcccagtcgtctcccgccaatcccgtcattttcctgtttgacaacgagctgaataacaagaataaacccttggctaagttctgcaagaaattaaacatgaaggaacaccaaaaggagaaactctcttccgacaataagatctacttaacagagaacttgtacctcatcacacaccagcttctggaaaattgtgatgaaaatgagctggaggacctgtttagtaagagtactctgagcaaggagatcaacggaaaaaaattcatcaaacgcgattccttcgataataagaagtattatgggaaggagatcttttccaactacatatcctctaattactctgtgcttgactttaacaactttcggcctatacttaacaatatcgtggatgtactgaagaaatacaagtcaatcctgtga

SEQ ID NO: 8615 - RNA, 954 nt, synthetic construct
  source 1..954: mol_type = other RNA
atggagtatgcattcatcaccgataagaatgactttttccaggcgctaaagatccctacacagaagatgaattaccttttgtacaacaaacaccagatgggcccggaaaacatgtatagcaccttcagcatctccaaaaaatccggtggggaaaggatcatccatgcgccttctgatgaactgaagtcagttcagaagaaacttgcaaaattgctcgaaaaccactactacgaatcgatccgcaataacaaaaacaaggacacatttctgcaaggattcctgcagaatagggggataattacgaatgccaaggtgcaccgcaacaagaaacacattcttaacattgacttggaagactttttccatacgatccatttcggccgggtgaaggggttctttgagaaagacaagacttttaaagtcccctccgaggtcgctctgatcatagccagattgacctgttataaaggcgccttaccacagggcgctcccacatctccaatcattagtaacctgatcggcaaaatcatggatttcagactaattaagctgtgcaagaaatataagctgtcctacactagatacgctgatgacctcactttctcaaccaatgacaatagtttcctgaaactggctgaccgattaattattgagatcaagaatgaggttcggaaaagcggatttaaagtgaatgaaaagaagactagggtgcagaactaccgcctgcggcaagatgtaacaaatataaccgtcaacaagaaactcaatgtgagcaagacatactttaagaacacccgagccatggcacaccatctctataagcaccaagagtattttatagatgacgagattggtaccctcgagcagcttgagggaaggtttgccttcattaaccagatagataagtacaacaacaagctgtctcgtgccgaaacttatgagaaaaatcattga

SEQ ID NO: 8616 - RNA, 1758 nt, synthetic construct
  source 1..1758: mol_type = other RNA
atgaagtatacgtacattaacaacaagtacgatttctttgcactgcttggagttcctagtaacaagatgaactacctgttgtataatagagtgaatatgggccccgagaatatgtattctacttttaccatccccaaaaaaaacggaggggaaagaactattaacgcgcccaacaaagagcttaagaacatccaaaagaaactcgtggtgctgctggaaaaccattataacgagctggttgagaagaagaaatttcgtgatagcttcctccacgcttttataaaggatcggtccatcattacaaatgctaggatccaccgcaacaaaaattttatcctgaacatcgacctggaaaacttcttcgaaactatacattttgggcgggtgaagggcttcttcgagaaggactttaattttaaggtgcctagcgaagtagccttaattatcgctcagctcacctgctataaaggctcattgcctcagggcgcccctaccagcccgatcatttctaacctgattggcaaaattctagaccttagactgatcaaactgtgcaagaagtacaaactcaactataccaggtacgcagatgatcttacattctctacgaatgattacagctttgtcaagaatttcaacaagatcctagaggatataaagatcgaggtcaataaaagtggcttcaaagtgaatgacaaaaagacaagagtccagaattaccgtttacgccaggatgtaaccaatctgacagtgaacaagaaaatcaacgttcagaagaagtacttcaaaaatactagagccatggccaaccatctgtaccgcaataatgaattctttattgacggggatctgggaacccttaatcagttggaaggtcgattcgcgttcattaaccaaattgacaagtacaacaacaagaacatcatccacaaatacaatagcagtaagaagaaatccaacaaagagtatatccacaacctcaatagtcgggaaaaggagtatcgcaagttcattttttaccggctattttatgccaatccgaatcccatcatagctacagaaggaaaaacagatattaggtacatcaaagccgcactgaaaaatttgtatgacgaatatccagagctgattgagaagaacgacaatcagtttctgttcaagatctcctttctaaacaggttccgaaagaagacagatgagatgaataaacttcaatacttcctgaaccttgccccacatggtgcagactctctcaagaacatcttcaagtattacaaggaaagcgaatcgtcttaccccaattacatggagtactttaaaaaactcggtaacaacatgccaaacaatcctgtgatcatactctttgataacgagctccacaacaagaaaaaaccactctccaagttctgtaccaatctgaaattgaccgatgacgacaagtcaattctgaaattgaacctgaatatctgtctcaaggacaatctgtatttacttaccaatcagctgattggaactagtaaggagaatcagctggaggatttatttcaagaagagactttgtccaagattattaacaacaagtccttctcaacctctgacgaatatgacaaatcaatctactacgggaaagaaatattctcccagtatataagcagcaattatgagacggagaatttcgacaattttaggccattactcgacaacattgtcaagataatcaacgactacaagatgaacaaatgcgaggataataattga

SEQ ID NO: 8617 - RNA, 1788 nt, synthetic construct
  source 1..1788: mol_type = other RNA
atggagtacaatctaatcgccgacaaatatgattttttcaacatgctgggcatcagcacaaggaaaatgaactacatcctctataatagggaacatatgggtaccgagaatatgtatgagacttttagtattcccaagaaatcaggaggcgaacgaacaattcatgctcctaaagccgaattaagaattatccagaagcgtctggcatctatcctggaaaaccattattatgagagcattgaggataagaagtatagtgacaccttcattcacgcattcatcaagaataagtccatcatcactaatgccaaaattcatcgcaacaaaaagaacatcatgaatatagacctggaggacttcttccacacgattcactttggtcgggtcaaaggattcttcgaaaaagactcaatcttcaaggtgcccagtgaggtggcgctgataatcgcacagcttacctgttttaaaggcgctttgccacagggagctccaacatctcccattatatcaaatatgatagggaagatcctcgatttgcgcctgttacacttgtgcaaaaagtacaatcttgactatactaggtacgccgatgatcttaccttctctactaatgataaagcctttgaaaagaacaccgacacaattctttccgaaatcaaaatggagatcgtaaagtctgggtttaaagtgaacgataagaagacacggattcagaattatcggatccgccaggacgtgacatcgctgactgttaataagaagatcaacactaagaagacctactttaagaatacccgggcaatggccaataacctgtacaagaatcatgagtttttcatcgataacaagctgggtactattgaacaactggaaggccgatttgccttcatcaaccagattgacaagtacaacaacaagatttccaagatcaaatcctttgagagaaatacgctggtccaccagaagtacctcgagagcatgtacctcattaaaaaagagaactccaagacacagtatttcaaaaacctgaacaaacgggaaagggagtaccaaacatttctgttctatagacacttttacgggaactctaaaccaataatagttaccgaaggaaaaaccgatattcgttatatcaaagccgctcttaagaatctgtacaaatattaccctgacctcatcgagaaagatggaaacagcttcatattcaaaatcaacttcctgaagagattcaaaagcaagcctagcaaaatgaataagctccactatttcttgaacattttgcctgatggagcagacgccatgaaaaacatctacaactactataacgagaacgattcctattacccgaactacatcaaaaagtttaagctgttgggcaagaatgtgccctataaccctgtgattttaatgtttgacaacgaactgcaaaacactaaaaaaccgctctcaaatttctgcaagcatgcgaagctgagtaatgacaaaaagaataagctcaagacagactactacatcaacctgattgagaatttatacctacttacccaccagttgatgccaaatagcaatgaaaatgaactcgaggatctatttgaccagcaagctcttagtaagaagattgggggtaaaacctttaagaggggcgacggctttgacacgaatcagtattacgggaaggagatattctctcagtatatcataagcaactacaagcgcattaactttgataatttcagacccctcctggataatctggtcgagatcataaaagactactccaagaaatga

SEQ ID NO: 8618 - RNA, 1788 nt, synthetic construct
  source 1..1788: mol_type = other RNA
atgaagtatagcttcataaccaacaagaaagacttcttcaatctgctcggcgtgtctgctaagaaaatgaactacatcctgtacaacaagcagttcaagggtccggaaaatatgtatacgacgttccttgttccaaaaaaaaatggcggcgagcgcaagatcagcgcacccaatggggagctgaagattatccaaaaaaagctggcaaccattctcgagaatcactattatgagacgtacaagtcacagaattactgcaataatatcacccatgcctttcagaaaaataaaggcattatcaccaacgccaaggtgcaccgcaacaaaaaaaacatcttgaacatagacctggaggagttttttcactcaatacattttggccgggtaaaaggcttttttgaaaaagactctacgttcaaggtccctaaagatgtcgctctgattattgctcagctgacatgttatcagggatatctgccacagggcgccccaacatcccctatcatctccaatctgattggtaatatcctggatatgaggttgttgaagctatgtaagaaatacaagctgaactatacacggtatgcggacgatctcacattcagcagcaatgacctaagcttcagtaaggtaaaagataagatcatccttgacatagagatggagattgagagatgcggatttaaagttaacaatagcaagactcggattcagaattacaaaattagacaggaggtcactgggttaaccgtgaataaaaagatcaatgtgaagagatcctactacaaaaacactcgcgccatggccaacaatttataccgaaacaaagagttcttcatcgacaataagattggaaccatcaaccagttggaagggcgatttagttttattaaccagctggacaagtataacaacaagatactcaagtacaagtcttttgaaaagaacagtgtgggtcatcaaaagaatctcgaatcactttacaagatcaagaaggaatccagtaacactcaattttttaagcacttgaacgcccgggagaaagagtatcagaaattcctgttctacaaatacttctacaacaatcctcagccgctactggctactgagggaaaaaccgatataaggtatctaaaggcagctctgaaaaatttatacatcgagtatcccgaccttattgaacaacaggatggaaagttcgtgtataaaataggattcctgaatcgtttcaactacaatgcaaaaaagatgaatcgtctccattatttcctcaatattcttcccgacggtgcctcggctctgaagaacatttactcatactacaatgagcaaaactctcattatcctaactatgtgaagttgttcaagaagttagatgacgacaagcccctcaaccctgttatcctgttatacgacaatgaactcgccaataaaaagaagccaattctgaacttttgcaatcacatcgatatgtctgagaatgaaaaggcaagtcttcagtccgggtcctattttcacattagcgagaacctgtatctcttgacccaccagctcatcaattctgcgaaagagaacgaacttgaagacctgtttgataaaaaaacactgagcaagatcatcaacaacaagactttttgcaaaaaggacaaattcgatacctcaaaatactacgggaaagatatcttttccaaattcgtcatttgcaactacaacaacatcaacttcgaaaactttaagcccctcctggataatatagtcagggtggtgaaggattacgaaaacaggtga

SEQ ID NO: 8619 - RNA, 1827 nt, synthetic construct
  source 1..1827: mol_type = other RNA
atgaattacaattttatcgtagacaagcagtcattctgtaatgaactgggcattagcgtgggtttgctgaattaccttctgtactccaacaaagaaaatggcattgagagcttctatattaacttttcggtacccaaaaagaacggggaagaacgccgtatacacgcacccaatgagcagttgaagtttgtacaaaaaaaggtgcaggagctgctgcagatccgaaatgacgagctttttgcaaagctgaacgtcgaaaataaaatcgtgcatggctttgtccctgggaaaaatatcataacaaacgcgagaaaacacaggaacaaaaagatcgtgatcaacattgatatccaggactttttcgaatctctgcactttggaagggtaaaggggtttttcgaaaaggataaattcttcggcctacctaaggaagtggctctgattatagcccaactgacgtgttacaaaggacacctgccccaaggagccccaacatctcctataatttctaatctcatcgctaagatcctggatattcggatgttgaagatgtgcaaaaaatacaatctggactacacgcgatatgccgacgatatgacgttttctacaaacaagtatctcaccactaagcagttggagaagttactcaaagatctggagaaggtcatcagcaatagtggctttagcatcaacaacaagaaaacaaggattcagcaaaacaatcttcggcaggacgttaccggtattacagttaatgagaagctgaacgtcaacaaggaatatatcaaaaagacccgcgccatggctcataacctgtattgcaacaacgaattctatattgagaacgagaaagggaccttagatcaactggaaggaagattctcattcataaatcagctggacaagttcaacaacaatatcagcaagactaaatcagttgagtacaacctgattaagaaccagaagaatttcagctacatttcaacttaccagaaaaaggttaacacaaaatctgaccaattcttcaaacagctcaattcccgcgaacaggagtaccaaaagtttattttcttcaagctcttctacggcaatccgaagccacttatcattactgaggggaaaaccgacatcaaatatctaaaggctgccttaaaatccttgcacaaggaatatcccggtttggtggagaagcagggagataaatacatctacaaagtgagtttcctggacaaaagttccagaaaaaacaagaagatcagcaaactccagtatttccttaatatttccgagcatggcggggacgtgatgaagaatatcttttcgtactatgatgtgcagaacaactactatccatcctattatgattacttcgacgaattacggaattttaccggtgcgaataagcccgtcattctcttttttgacaatgaagtggatagacggaagaaagatagtcctgtgaaatcctttatcaagcatgccaaaatctcttctaaggtcgacgagtttaagaagaacaagaaaatccacatcactaaaaacctctacctgcttacccacagccttgaagagggggcactcgagggcgaaatagaggacctctttgatgaggatgtgctaaatcacgagataaacggaaagatcttttcacgtaaggacgaggaggaaaccaacaaatatggcaaagagatattcagcaagtacgtttatagtaacttccagaacattaacttccataacttcaagcagattttggatgacatcgtgtacattatagagatctacgagatgtccaagaagaataggaaaaaggtggtcactgagtga

SEQ ID NO: 8620 - RNA, 1713 nt, synthetic construct
  source 1..1713: mol_type = other RNA
atgaggctgaaagacgtaaaaaatagaaaggatctagcccagctcctagacgtgaaggtgaaagtcctcacttattgtctgtatgtgctcccagaaacaatgcgttattccagcttcgtgatacccaagaaggacggctctgagagacaaatccttgtgccctgcgctcagctcaagaggattcagaagaaactggcggaagtcctgaacgaggattacttggagattaactccaataacgtagcacagggattcatcaagaataaggggatcattacaaacgcccggtatcatcgcaacaaaagagtcatcataaatgtggatatctccgattttttcggcaccatacattttggtcgcgtgaaagggtactttgagaacaacaagttctacaaactgaataacaaggtggctacaatgattgcccagctcacatgttaccaagggaaattgccacagggcgcccccacaagccctgtcattgcaaatatgattggccagattatcgactaccacatcttgaaattgtgcaagcaatacaagctgtattacacccgatatgctgacgacatgacctttagcactaacatcaactacagtttggttgaaatcgagaagtttatctgcgacttgtcagaaaccctgtccagactgggtttcgaaatcaacactaagaagactcgagtctgttttaactcaagcaagcaggaggttacgggagtaatagttaacaagaaactcaatgcggacaaaacctttattaaggaaactagagccatggctcagaatctttacagcaccggcgggtttgtgatagataataaaattggcaccatggaccaactcgaagggcgcttcgcgttcattaaccaattcgacaagtacaataacatcgtgaacaatacgtctaaaggtaaacacctcgagaagctcaatgttcgcgaaaaagcctaccagcagttcttattctacaagctgttcttaggtaatgatcgccctgtgatctatacggagggtaaaacagatagtaggtacattaaagccgctcttaagaagctgtatattcagtacgatgaccttatagagaaaaatgaaaacgggaagttcgaatataagatcctattcggaagtcggaacaaaaagtatgagtacttccttgactttatgcagtacggggcagattctttcaatatcatcgccctgttatacaccggacggaacggctatgctaatctgtgctcgatcctgaagtctaagatgcggcggaaaccgaacgcaccagtcattctgctgatggacaacgaacagactaatggaaaaccattaaacaagttcttgcagtcatatagggatgaacactacaaaaatcttactgatcatgagaaggccttcttcaatgactataattacattaggctggtggagaacctttatctggcaacctttcccctggaacctggagttgaggaaatggagatagaggatctcttttccaaagagtttctagatggcaagatcaatggcaaatcctttaagaggtcccctaagaagggagagacaaatgtaatgagcaaagacgagctgtctcgttatgtgctgagtcactatcgaagcattaatttttctggctttaaggggctcctggatgtcatctcagccattaagaaagactacgagaaatacatcaacatggacgataacaaatggtattga

SEQ ID NO: 8621 - RNA, 1791 nt, synthetic construct
  source 1..1791: mol_type = other RNA
atgaaatatttgaaagagctgaagagttgccagacccagaaagacttggccaacctactggggtactctgaaaaaaacttcactaggatcctgttctcccaaaatatttctcttaggtatcagagcttcgaaattcctaagaaaaacggggataaacgcaagatattagctccgacatctgaactgaaagtccttcagacccggttgtcaatactgttatccaattgctacgaggaactggagttaaaacggctcagtaccagctcttatattaagtgtatctcttcccacggcttccgaaaaaaacttatcgtgaatatcccggcatcgaaacagaatagaaagataatcgagtacaaggagattaactttggcatatacagtaatgctaagcaacacacagggaagaggctcgtgctgaatatcgacctaaaggacttttttgagagcattaccttttcaagagttgttggattcttcaccaaaaataaactcttcctcctgcccctggacatcgcggtactgatagcccagatcgtcacgtatcgtacaagtaccagccaagaggggtttttgcctcaaggctctccctgctccccaatcatcagcaacctcataggtaatattctggacgttaagatggtcaagttggccaaagagtataaattcacctacacacgttatgtcgatgacctgaccctttcaaccaacctcccccagttctccgaagacattatcgagtttgatggagaaaagtgggtgctgggatcggcacttaaccacaccattaactcttcaaagttcaaaatcaaccctaagaagacacgcctgacagataaatacaacaaacaggaagtgacgggcctgacaatcaataaaaaggttaacatcgaccggacgtattaccgctacaccaggtccatggtacagaaattctgtgccgagggggagttctttaagtctaaagtccatatggataagcagaagatttcccgggaggctctgaatggcatacttagtcacatctaccaaataaagaaccagcaggacattaattttccaaattgcgctcgcaacttttcagagcttaacagcttggaaaagttatatgccaagtttctctttcaccattattttgtgcacccacagcgaatgctcattattggtgagggttatacggacccactgcattttaagctggcgtgtcataagctatataaagagagcctcagctttcttaaattctccagtctcgaagggactaaaagatttagcaagattactggttacggcggaggaactggcctcttaaagatattcctacagaactataagcagttctataaagccagaaacatctgtttgaagccctgtctgattatcgtggatggggatagcgatggcgacgcagtgattagcaaagcatcggctgagttcaagacaacttttaaaaagatctcccatagttccatgacaactgccggactcctggactggtaccacattttcaacaatctctacatcctgcagttgcctaagaataaagtgatcgaagatttctacgatcctctgatcctgactattcccattggatcaaaaactttccattcagacgataagaagaagaataccaagtttgatagcaaaatccactacggcaagaaggtgctgctggagaagataatttatgaacagcaagacactatcgacttttctaagttcgatctgatcttcaatacaatctttcacattcagttctaccattacatctactgcaacatggaatcctga

SEQ ID NO: 8622 - RNA, 1779 nt, synthetic construct
  source 1..1779: mol_type = other RNA
atgaaatacctcaaacagctgaagtcttgtcagacccagaaagatttggcgatactcctcggctactccgagaagaacttcacacgtatcctgttcagcgaaaatattacgactaggtatcaggactttgagatttctaagaaatcaggcgggaagcggaggatattcgctcctacccctgaacttaaaattctgcaaactcgcctgtcaattctgttatccaactgctaccgcgaactggagcttaaaagactttctacaagctcctatgtgaattgcatatcatcacatggcttcagaaagaagctcaagattaacatcccgacttcgaaacagaaccgtacatcgttggaggccaaggaaatcaattttgggatctatagcaacgcccagaagcatacgggcaaacggctggtcctgaacattgatttgaaggacttcttcgaaagcatcactttttctcggattgtgggtttctttagtaaaaacaagctgtttagccttccatttgacatcgcaatcctgattgcccagatagtgacctatcgggaaagtactagcaaggaaggctttctgccccagggcagtccctgctccccaattatcagcaatctcattggtaacatcctagacgttaaaatggtgaaactggcaaaggagtacaaatttacttatacacgctatgtggatgatttaacattaagcaccaatctcccacagttcagtgaagacattatcgaattcgatggagagaagtgggtactaggatctgctttgaaccataccataaactcatcgaaattcaagatcaatcctaagaaaacacgactcaccgacaagtataataaacaagaggtaaccggcctcacagttaacaagaaagtcaatatcgaccaaaactattacagatacacaagaagcatggtccaaaacttctgtgccgagggagagtttttcaaatctaagtttcacatggacaagcataaaactaatagggaggcactgaacgggatcctgagccacatatatcaaataaagaaccagcaggacatcaaattcccgaattctacccgcaattttaatgagcttaactctctggagaagctgtataccaagttcctgtttcaccactattttatccatcctcaaagggtcttaattatcggcgaaggttacaccgatcctttacacctgaaacttgcttgtcacaaactataccccgattcactaaagtttatcaaattctcctccctctcaggcacaaaacgatttagtaagattatgggacttacgggggggactgggctgattcagaagtttctgaagaattacaacgtcatctacaagtcccaggtgatctcccatctcccatgcattattctggtggatggagattccgatggggaacacgtgatcaaatgtgcgaataaggagttcaatgactttattaagcacatcagcctgactgccctgaacaagtccgccattttggattattaccacgctcatcataatctttacatcatcaagttgcccaaaaatacggttatcgagaatttctacgaccccagtattctgctcaaaaccatatctggaaaaacctacaacagttctaacagcacattcgatttgaccaagttttacggtaagaaggacctcttcgagaaaattattttccaggaccagaacaccatcgacttctccaagtttgacttgatattcaacacaatcttccacatacagttttaccactatatctactgcaatatggaagagtga

SEQ ID NO: 8623 - RNA, 1776 nt, synthetic construct
  source 1..1776: mol_type = other RNA
atgaattttctacaccaactcaaaacctgccagactcaaaaggacctcgcagcactgcttggttactcagagaagaacttttctcggatcctctttagtcaaaacatcatcactcgctatcgcagctttgaaatacctaagaaaaacgggaataagcggcagattctggctcccacaagcgagttaaaaattctgcagacccgactggctaatctgctgtccaattgctacgaggaactggaagtcaagcggctttcatcgagttcctatgtcaactgtatttcatcccacggatttagacgcaacattactatcaacatccccacaagtaaacagaatagaacacctatcaagtctaagaaggttaactttggcatctactcaaatgccgaaaagcacatcggcaaaagactggttcttaacatagaccttaaggactttttcgagaatataaccttcagtaggatcgtgggttttttcaccaaaaacaaattcttcctgctgccactggacgtggccatattgattgctcaaatcaccacgtataggacctcaatatctcaggaaggatttctcccgcagggcagcccgtgttcgcctatcatctccaatttaatcgggaacattctagatgtgaaaatggtgaagctcgctaaggagtataagtttacgtatactcgttacgtggacgatttgaccctttcaaccaatttacctcaattctcagatgacattgttaaactgaacaatgagaagtgggtaatcggatctattctgaatcatactgttaatagcagtcgcttcactattaatccaacgaagaccaggctgaccaataaatacaataagcaggaagtcacaggcctgacagtgaacaaaaaggtgaatatagaccagacttattacaggtataccagaagcatggtgcaaaagttctgtagcgagggcgagtttttcaaaagtaaagtgcacatggacaaacagaaaatatcccgggaagccttaaatggtatccttagccatatataccagatcaaaaacaagcaggatattaaattccagaacataacccgtaacttcgacgaactaaatagcctcgataagctttatgccaaattcttgtttcaccactatattgtccatcctcagaggatgtttatcatcggcgaaggatacactgatcccttgcacctgaagctcgcatgccataagctgtacaaaaactctctagagtttatcaagttctccagcctccaagagacaaagaaattcagcaaaattatggggtattctggaggcactggcctgttacagaagtttctcaagaactacaagctgatttataaggggagtctcttgtccttgaagccatctgtaattcttattgacggcgacaaagccggagatgatgtgatcaagaccgcgaagaacgagtttaaggattctttccaggaaatcaagaactcttccatgaatgggtcctacatcctggagttcaagcatgtatttaaaaacctctacatcatccagctgcccaaaaacgatgtcattgagaacctgtacgatgtctccgtgattaacacaaaaattggtacccgaacatataatccctcgaacaacaaattcgacctcacaaaatactatgggaagaaagagttgattgaaaaggtgatctttccaaatcagaacacaataaacttcagcaagttcgacctgattttcaatacgatcttccacatccagctgtaccattacatttactgcaatgggaattga

SEQ ID NO: 8624 - RNA, 1791 nt, synthetic construct
  source 1..1791: mol_type = other RNA
atgaacttcctgaatcaattgaaaacttgccagactcagaaagacttcgcagccctcttgggatattcagagaaaaacttctcaaggatcctgttttcacagaacataaccacccgctatatcagttttgagattccaaagaagaacggcaataagagacagattctggcccctaccagcgagcttaagattctacaaaccaggcttgctaatctgctttccaattgctacgaggagctcgaggtcaagagactgagttccagctcgtacgtgaattgtacatcaagccacggatttcggaggaatatcaccattaacatccccacttcaaaacaaaaccggacacctattggttcaaagaaaatcaacttcggcatctattctaacgctgaaaaacacattgggaaaagactggtcttgaacatcgacctgaaggactttttcgaaaacatcaccttttctcgaatagtgggttttttcacgaagaataagttcttcttgctccctcttgacgtcgctatactcatagcccagatagcaacttacaggacctccacttcgcaggaagggttcctgccgcagggttccccatgtagtccaattatcagcaatctaatcgggaatatacttgacgtaaagatggtaaaactcgccaaggaatataagtttacatacacacgttacgtggacgatttaacactatccacgaatcttccccaattctccgatgacatcgtcaagctgaataatgagaaatgggttgtgggatctattctgaaccatactatcaattcgagccgcttcactattaatcctacaaagacgcgggtcaccaataagtataataagcaggaggtgactgggctgatagttaacaagaaggtaaacatcgacaaaacctactatcgatatacacgttccatggtgcagaaattttgtagcgagggggagtttttcaaatccaaagtgcacatggacaaacagaagatctcaagagaagcgctcaacggaattctcagtcatatctaccaaatcaagaacaagcaagacattaaattccagaactccacccgcaagttcaatgagctgaacagcttagaaaaactctatgcgaagtttctgtttcaccattactttgtctatccccagagaatgctgataatcggcgaaggatatacagatcctctgcactttaaactggcctgccataaactgtataaaaattccctgcacttcttgaaattctcttctctcgagggaaccaagcggttcagtaaaatcacagggtatggcggcgggacaggcttacttaaaatcttcctccagaactataagcagttttacaaggctaagaacatttttctgaagccgtgcttaattattgtggatggcgatagcgatggccaggccgttatatctaccgcacgctctgaattcaagtctacctttaagcaaatcaatcattctagcatgactaccaccggactgttggattggtaccacatcttcaacaacttatacatattgcagctgcccaaaaacgaggtgattgaggacttttacgatcccagtgttctgatgtatagtattggcagcaaggtgttccacagcgatgacaaaaaaaagaataccaagttcgatccaaacattcactacggtaaaaaagtgctccttgaaaagatcatctacgaaaagcaggatatcattgattttacgaagttcgacctgatctttaactccatttttcacattcagctataccattacatctacagcaatctccataattga

SEQ ID NO: 8625 - RNA, 1782 nt, synthetic construct
  source 1..1782: mol_type = other RNA
atgaataatctttttttgttacgtacctgccaaacgcagaaagactttgctaaagtcctgggatactctgagaaagaatttaccctaattctgttttctcagtccatccaaaataaataccagtcctttgacatccctaagaaaaacggaaataagcgcaagatactcgcacccacaccagatctcaagatcctgcagaccaggtgcctctcaacactgttgactaattgttatgaggagcttgagaaaaagcgattatccaaaagttcatacgtgcagtctatttcaagtcacggcttccgcaaaaagctgctccttgatattccattcaccaaaaagtcgaggacacccttcgagaaaaaggttatcaagctggggatatacagtaacgcaagcaaacatgtaggcaagaatctgatcctgaatatagacctaaaagacttcttccagtccattaccttcagcagaataatcgggttttttagcaagaacaagtatttccagctcaactttgacattgcggtgctgatcgcccagatagccacgtacagacccaatcaatctcaggaaggcttcttgcctcagggctcaccttgtagcccaattatttctaacctgatcggaaacatactcgatatcaagatgcttaaactggggaagaagtacaagtttacatattcgcgatatgtcgatgacttgactttaagcacgaatctgccaaaattcaacgaggaaattgttaagctggttgataatacgtgggttattggctcagaacttaaaaacgtggtgaactcatccaaattcaaggtgaatccccaaaagaccagacttacaaataagtataaccggcaagaggtgacagggctcactgtaaatcggaaagtaaacgtctctaaggagtattacaggtatacacggtccatggttcaaagtttctgcaccgagggcaactttgtcaaatctaaggtgcatatggacaaacagaagatctcccgcgaggcactgaatggcattctcagccatatattccagatcaagaacaaacagcagatcgaattcaataatcaaacccggaattttgacgaactaaactcaatcgaaaagttatacgccaaattcttgtttcaccactacttcattcaccctcagagaatgatcgtgattggggagggatacaccgacccgacacactttaagctagccagccataacctgtacccggatatccttaaatttctcaagttcagtagcctgcaggaaaccaaacgcttttctaagatcatgggctattccggaggtacaggtttgctgaacaaattcctgaagaactacaagctgatctataaagccaacgtgatcagctgtaagccttgtttgatcattgtggatggagataaagctggcaacgatgtgattaagactgctaggagcgaattctctaagacctttaaggctattaacaacgtcagtttgaatctgagcgccaaactggagttttttcacattttcgagaacctgtacatcctgcagcttcccaaggaccaggtgattgaggatttctatgatactactgtcactggtagtctgatcgggacacgaacttataattcctccaacaacaaattcgacctcactaagtactatggtaagaaggaactcctggaaaagattatctttccaaatcaggacaccataaacttctccaaatttaacctcatcttcaataccatcttccatatacagatttaccactacatctattgcaatctcaaaaattga

SEQ ID NO: 8626 - RNA, 1779 nt, synthetic construct
  source 1..1779: mol_type = other RNA
atggataacctattcctccttaaaacgtgtcagacccagaaggattttgcatcattgctcggttatagcgagaaagagtttactcgcatcctcttttctcagccaatccagaataagtacaaaagcttcaagattccgaaaaagaatggctcccgaagaaatattctcgcgccagtccctgatttgaaaattctgcagactcgtctgtctatactactcacacattgctacgacgagctggagcacaaaagacttagcaaatcctcttatgttcagtgtatatctagccacggcttcagaaaaaagatcctcgtagaaatcccaatcagcaagaaatcccggacatcattcgaatcaaaggtgataaactttggaatctactcaaatgctaagaaacatgtcggtaagaatctagtgttgaacattgacttgaaggacttttttcagtcgataaccttcagtagaatcattgggtttttcaccaagaacaagtactttcaactgaatttcgatatcgcattacttgtcgctcagattgccacataccggcctaaccaggtgcaagaagggtttctccctcaggggagtccttgctccccaatcatttcaaatctgatcggcaatatcttagacatcaagatggtgaaactggcccgaaagtacaagtttacatatacacggtatgtggatgacctgaccctgtccactaatctgccccagttcagcgaggaaattattaagctggatggcaaatcttgggttataggctccacattgaaatacgccatcaacagcagtaaatttgaagtgaacccccagaagactcgcctgaccaacaagtataacaggcaggaggtcaccggattgaccgtcaatcgtaaggtaaacattagcaaggagtactataggtatacgagaagtatggtacaaagcttctgcgccgaaggacacttcttcaaatcaaaagttcatatggacacggacaaaactaccagggaagccctcaatggaattttgagccatatcttccagattcgcaacaaacaacagattgagtttaacaaccaaacccgcaatttcgacgaactgcagagtacagagaaactttacaccaagttcttattccaccactactttgtgcacccccaaaggatgatcctcgtgggggagggctacacagatcctctgcaccttaagctggcttgtcataagctgtatcccaatagtcttaacttcctgaagttctcttcacttcaacaaaccaagcggttttccaaaattatgggctatcagggaggcacaggactgttaaacaagttcctgaaaaactacaaactgatctaccaggctaaaaatatttctctgaagccctgcctcattatagtggatggcgataccgcagggaatgacgttatcaagctcgccaaatctgagttcaaggagactatcaaactgatcaataagagcttactgactactagttccatcttgaaattctttcacgtgtttgagaatctgtatctgatccagcttccagagaataaagtgattgaggacttttacgactcctcgataaccggttcttgtataggtacaaggacctataatccgtccaacaagaagtttgatctagacaagtattacgggaagaaggaactgttcgaaaagatcatctttaccaatcagaacactattaacttctcggaattcgatctgatctttaacacgatattccatatccagctctaccactatatttacaacaacctcaaaacatga

SEQ ID NO: 8627 - RNA, 1779 nt, synthetic construct
  source 1..1779: mol_type = other RNA
atgaataatctatttctgctcaagagctgccaaacccagcgcgacctggccattctgctcggatacagcgaaaaggactttacccggatactgttttcaaaacccatcagcacgaagtaccagagtttcgatattcttaagaagaacggcaataaaaggaatatcctggctcccacttcggaactgaaaactttgcagacacggctcagcaaactgctcactaattattacgaagaactcgaacagaaacgactatccactagttcctacgtgaaatgtatttcttcccacggctttagaaataagatcagtgtgcagataccaatttctaagaagaacaggacatctttcgaatccaagattatcaacttagggatctactctaatgcacataagcacgtaggcaaaaagctggttctgaacgtggatctgaaagacttcttccagtcaatcacttttagtcgcataattggcttcttcaccaaaaataagcattttcagctgcctttcgatatagcgctgctgatagctcaaattgcaacctacagattaaatcagagtaaagagggatttttgccccagggatccccatgttcacccattatttctaatctcatcggtaacatccttgacattaaaatgttacgactagctaaagagtacaaattcacctataccaggtatgtcgacgaccttacgctgtccactaacctgccccaatttgacaatgagataatcaagctcgaaggcgatacctggattttgggcagcaccttgaaatacacaatccagagttcaaagttcaacatcaatagtcagaaaactcggatcaccaaccgggataacagacaagaggtcactggactgaccgtgaatacaaaggtcaatatcaaccagaactattaccgttacacaaggagcatggttaacaaattttgtacagagggtgaattcttcaagtccaaagtgcacatggacaaagacaagacatctcgtgaggccttgaacggcatactgtcccacatttttctgatcaaaaaccagcagcaaatagagtttccgcataccacaaaaaacttcaacgagctgaatgggatcgaaaagctatacattaagttcctgttccaccactatttcgtgcatccgcagcgcatgctgatcattggcgagggctataccgatcctatccatctcaagttggcctgccataaactttttcccaattctctcaacttcctcaaattttcatctcttcaggaaactaagagattttcgaagatcatgggttattcaggcggaaccgggctgcttaacaagttccttaagaactataagaccatctacaaagccaaaactatttccttaaagccatgcctgatcatcgttgacggggataatgccggtgatggagtcataaagactgcaaggggagagttcaaagagacattcagacctattaacaatccaccattgagctcaagcgggaaattcgagttttttcacatcttcgagaacttatacatcgtgcaattgcctaagaatcaggtcattgaagatctctacgatacaacagtgacgaccagcctgattgggaagcgcacatataattcttccaacaacaagttcgatcttacgaagtattatgggaagaaggagctctttgagaagatcatttttcctaaccaagacaccatagactttagcaagtttgacctcatcttcaatacgattttccacatccaggtatatcactacttttacagcaacctgaataattga

SEQ ID NO: 8628 - RNA, 1776 nt, synthetic construct
  source 1..1776: mol_type = other RNA
atgaaatacctggaacaactcaaatcttgcaaaacacagaaggagctggccatcctgctgggatattctgaaaagaacttcacaagaatcctgtttagccaaaaaattagtacccggtatcagtcatttgaaattccaaagaagacaggcagcaaaaggattattttcgcgcctaattctgagctcaagatcctgcagacgcgcctgagcattatattgtccaactgctatgaggaactggaaataaaacgactatcaaccagctcctattcacagtgcatcagttcacacggctttaggaagaaattgacattagacattcccattagcaaatctaacagggaatctttagggagtcagataattaacttgggtatatactccaatgcccagaagcacgttggtaagcgcttggtcttgaacatcgatctgaaggacttttttcagtcaatcactttttcgcgcatcgttggcttcttcaataaaaaccagagattcttgcttgagctggacgtgagcatcttaattgcacagatcgccacctatagggagactacagaggagggctttctgccccaaggctccccatgttctcccattatctcaaatcttatcgggaacatattggacgtcaaaatggtgaaacttgccaaagagtataagtttacctacactcgctacgtcgatgatcttacctttagtacaaatctgcctcaattctctgaaaagatcgtgaagctcaacgataataattgggtcataggaagcacgctaaagcacgttattaacagtagcaagtttgaggttaacagtcagaagactcggctcacaaataattacaacagacaggaggtgaccgggctgaccgtaaattcaaaggtgaacattaacaaggagtactatcgatatactcggtctatggtccagatgttttgtgctgaagggaaattcttcaaaagtaaggtgcatatggaccaggataagaatacgaggggagctctgaatggggtgctatcccatatcttccagataaagaacaaacaacagatcgagttcgatccgaagaccaagaactatgacgaactgcagtccattgagaaactgtacactaagtttcttttccacaattacttcgtccatccacaccggatggtagtgatcggagaggggtatacagatccaattcacttaaagttagcatgtcataagctgtacccgaatagcctgaactttctaaagttcagcagcctgcagcagactaagagattttcccaaattatgggttacaatggcggtacaggacttcttaataagtttctcgagaactaccaactgatttatcaggctaaatcgatctccctgaaaccttgtctcattatcgtggacggggataaagcaggagacggcgttatccggactgcccgtagcaaattcaaagatacctttcagtcaatccgttatacacctctgaattccagtagcatcctcaacttcttccacgtattcaagaatctttacatcatacagctccccaaaaccaaagtgatcgaagacctctacgacacctgcgtgacctctactctgataggcaccagatcttacaacccttccaataaagatttcgacctctccaaattttacggcaagaaggaactcttcgagaagattattttccccaaccaaaacacaattaacttcagcgaattcgacctcatcttcaatacgatctttcatatccagctgtaccactatatcttttccaactccaagaattga

SEQ ID NO: 8629 - RNA, 1782 nt, synthetic construct
  source 1..1782: mol_type = other RNA
atgaacattctcaagtttccgattagcaaacttgcgcttgctagcgataagaaagacctgtccaatctcctcaattacgattataaagacttctgttggatcctctattcacagcccatccacatgaggtacaaactcatcgagattccaaagaaaaatggcaagataaggatcattcacgctccagattcgcacctaaagcaactgcagaaaaatctggccattcaactgaataaaatcttcgaagagaagaatctgtacgagccagctttctcttttgcctttcgcagaaacaacaacaagcagaaatttggcatttacttcaatgctaaacggcatagaaatcgcaaattagtaatcaacatcgaccttaaagactttttccataccatcgagtttaaacgtatcgtcggctactttaagaggaataagtacttcaacttcccaattgacgtggcgattggtattgcccaaatcgcttgctataaggaccctaatacagggaaaaccttcttgcctcagggaagtccagtgtctccgattatttccaacctgattactgaaatcctcgacgcaaagttcactaagttggccaaaaagtataagttctactacagtcgctacgcagacgacctaactttatcgttcgacacaaataacatcccttctgaaatcgtcaaatgcaacgagaataattactccctgggtagggaggtcatcaaggccattaagtcttccgggtttaacataaataaggacaaggtcagctttaggaccaactttgatagacagcaggtaactggcttagtggtgaacaagaagataaacatccctcggaattattatgactttagtaagtccatggcatataactattgccaatacgctacattcaagaaatcaagctatcacacttttgcaaaaaagaactccaatcagggcgaaagcataataggcgtgctaaactacatctacaatatcaagatggagtataagaaccgaacaactgataaacccccttacatttacaccgaattcaaaatcgacaagcccaaaagccctgagcagttgttctggtcaaagaactcatttatccggctgcttttgcaaacttatttccaggagtcttttgtttatcggaagaaaattcatctgctttgcgagggaaagacggatccactccattttaagaattacatctcaacgcttcccattgagattcagtcttattacgactttaccgccttcaaggaagaggatctgacgatatttcagaaagagttgaatatccgatccggaacccccaatctgaaaagattcatcgagatttacagtactctgtacatatccaaaatgatctttgtgaaccccacaatactcatcgttgataacgacaaggcaggaaacgaagtttttcagtgtgccaccgggagatataaaaagacaaccaaaaacggcaaagtcattataaacagcatcgaaatcgaatatgcctatatttgtaagaacctgttcatcatcaagctgcccaaaataaaccctgaaacaacgattgaagatctgtatgataccaccctcacaagcacaatactgaacgggaaaagtttcacaaaggataatgtgtacgatccgaatatccactatggtaaagtggacttcttcaagaatgtgattcgcaagaaccggactaccatcgattacaagaattttgaggccattattgagattatcaaccgtatcttcaacttgaatttctacctgaacctgaccaatataaattga

SEQ ID NO: 8630 - RNA, 1752 nt, synthetic construct
  source 1..1752: mol_type = other RNA
atgcttgccacggataaaaaggacttggcaaactttctcaactacgattacaagcatttctgctggattctatactctcagcctattcacacccgctacaacataatagaaatcccaaagaagagtggtaaactaagggtgattcatgccccagactcccacttgaagcaactgcaaaaaaacctggccgtgcaactcaccgagctgttcgagcagaagaatactgggaaaccctccttcagctttgcgtatcgtagaaataacaaggaggaaaaattcgggatttattttaacgccaaacggcacagaaatcgcaagctcgttattaacatcgatttgaaagacttcttccacaccatagaattcaagcgcattgttggatattttacgcggaacaaccattttaagtttcccattgatgtggccatcgggatcgcccaaattgcatgctacaaggacccaaaaacaggcaaggtctttctgcctcagggttctcctgtgagtcctattatatccaatctgataacggagatcttagatgcaaagataaccaaactggctatccagtataagttctattatagtcggtatgctgacgaccttacactatcattcgatactaaaaagctgccgcaggagattatacagtcaaacgagaataacttcttcttaggagacaaaatcatcaaagcgatcaaaagctctggttttaacatcaacaacgacaagatttgcttccgtactaatttcgatagacagcaggtcacagggcttgttgtcaataagaagataaatatccccaggaactactataatctgtcgaaaagtatggcatacaatttttgtcagttcgccacatttgagaaatcatccttccacactttctccaagaataatagcgacaagggcaaaagtatcattggaatcatgacctacatctacaacattaagaacgaatacaacaaccggaccattaatgctgagcccaacatctacactgactttaaaatggagaaaccaaagtcacccgaacatttattctggtctaagaactccttcaataggctctttctccacacctattttcaggaattcttcgtgtatcgaaagaagattcacctgctttgtgagggaaagactgatcctttgcactttaagaattacatctctacactggataagaagatccagaactactacgaatttacggctttcaatgaagataagctcaccatctttcaaaaagagttgaatattcgcagcggcacacccaatcttaaaaggttcatcgacatatatagcaccttgtacgtaagcaaattaagctttctcaaccctaccatcattattgtcgataatgacaaagctggcaatgaagtgtttcagtgcggggtaggacgatataacaaaacatcacagcatggcaaaaccactatcaataagctggaagtggaatatgcctacatctgtaagaacctttttatcctgaagctaccgaaaatcctcaaagatactacaattgaggacctgtacgagccatctgtgacctccactctgctgaatggcaaatcgttcacaaaggacaataactatgacagcaatctttactacggcaaggtcgagttgctgaggaacgtgatcaagaaaaacaagctgtccattaactacaaaaacttcgagacaatgctggaggcaatagatagactgtttctcatgaatctgtatctgaatctcaccaattctatcaagtga

SEQ ID NO: 8631 - RNA, 1785 nt, synthetic construct
  source 1..1785: mol_type = other RNA
atgagtaagcagttaaatgctctcaaacagtgtcagacaagccgggatctggctaagctgctgggatattcttacaaaggattttgctatgtgctatatagcgccccaattcacaccaaatataggatggtaacaatccccaaaaagaatagccccattggcagacaaatactgatccccagcaatcgtctgaaaatcctgcagcaaagacttgcaactttgctgacaaacatttacctcgagattaatcagaacaatccgtcgtgttgctacgcctttattcccgacagcaatactcagaacttcggtattgtggagaacgccaaacagcacatcaataagaatatcgtcctcaacatcgatcttaaagacttctttacaagcataacgttcagtcgcattgtggggtttttcactaagaacatacagttccggttgaattatgacgttgctatcactctggcgcagatagcttgttatagagcaagtcctacttcccacgcataccttccccagggatccccatgttcccccatcatatccaacttcgtgggtcagattatcgattccaagattacgtttcttgccaaaaagtttcactttacatactccaggtacgcggatgacctgaccttatcattcgacaagaaccagattgacagcaagatactggaatatgatcaaaccacaagggaatacaaactgggaaaactgttggagaaagaaatcctcaagacaaatttccaaatcaactatcagaagttgtgtgttaggaccaaacgcgaacgacagcaggtcactggactagtggtgaacaagagtgtgaacgtcaataaggcatactattaccatacgaaaagtatggccttggagtattgcagaaatgggacgttcactcggtcaacatctcacgccaagaagataggccagccgaacttccattcgttgatggggtactttaactacatccactatataaagcgagagaacctcaaaagacatcagcctctccagcctaaaatcatcctgccagaattgacaaataacgacattcagcgcaacaaaaagattcctaaatctctgaactccttcgagaagatgatgatcaaagctatttttcactaccgtttcgtacattccgagaagattaaaatcctatgcgagggtaagactgacccacagtacctcaacctgtaccttaagataaaaaagtccaactgcttccatcctaccgcattttcagaccacacacccaccttttttcaaaatgagctcaatattcggagcggcacccaaaacctcaaaaggttcatttctgccttccagaacctgtatatcagcaagaatgaataccagctgccaaccattatcatggttgaccctgataaagatggcttcgatgtgttcaattatgccaagtcaaagagcaattcatacatcgaaatacagaccaactcttctatcaaggtcgctcatgtgtttcacaacttatacctgatctcacttccacagaattctagtatcaaccaacagcagatcaattccatcgaggatatgtttgacaaaaccctgcagcaacaaaagattgggaataagaccctctgcctggacaataagtgctcaggccaaaaacacaacaatcattatggcaaggttgaatacttcgaacacatcattaaatcccagaacaatcttagcttttctaacttcgatcgcttatatgaggtcattgagaacatctgttacctgcactttttcaagtgctttagtaagaccttccattga

SEQ ID NO: 8632 - RNA, 1698 nt, synthetic construct
  source 1..1698: mol_type = other RNA
atgagctctaatctgctgctcctccaaaattgtaagaataggcaagatttggctgacttactggacatagattacaaccagttctgttacatcttgtatgcccagcctatatccaagcactacaacaaagcacttatttacaagaagaacggcaaaccgagagagattctagcccccgataatcatttgaaatatatccagcagaggctcgctatattgctcgcaaaaatctacgacgaggttaatttcaggtctacacaactctgctattcttaccgaaaagacagcgagcaaaagttcgatttccatgaaaatgctaagttgcatatcggatccaaactggtgatcaatgttgacctgaaggacttttttaccaacattacattcagccggattgtagggtatttttcgaagaacaagaacctcaagatcaattatgaagtggctgtcacgattgcccagattgcgtgttacaaagaccccattagtaacaagagttatcttcctcagggctccccatgttctcccattatctctaattttatcggcaccatcctcgatgatcgtctgtttaaactagccaaccgaaaaaagtttacatatagccgctatagtgacgatctaaccttctcctttaacacaaactcctttccctccgatatcgtcactaagatcgaaaagaactgggttctgtgcaaaacaattcgcaacactatcaatctgtgccaattcgagattaatgaggagaagatagtgattcgggacaaatataagagacagcaggtgaccggactgactgtgaataaaaaggcaaacatcaacgctaattactacaagtatactcgggccatgatcgacaagtattgcaaaaccggtctttatgaacggtctaaacaccattccatcgggatcgacttcagtgaaaaatcactgattggtattgccaaccacatcaagaatataaagggcattaagtacaaccacacgaacattattgataaaaacctggagccgttacagatttaccagaacctgaagggcttcagtaaaagctacatcgaccttatgttccatatcaactttgtgcaccagtcaaaaattaagattatctgcgagggaaaaaccgatcctcaacatatctataactatttgaggaacaccgatctgttccacaaaaatcagttcgacatcatttcctttgaaaaacaccttagctcatttacacagccattaaatctttcagggggtaccgatcagctgtgtaagttcattaagatgtactcgcacctgtacaagagcatcgataagtcaaagtatcctaccatcatatttgtcgataatgacccagcaggaaattcaaccttcaatacagcgaagagctattctacttacaatgagataaagatcctgagagacagtattcgcgtagccttcgtctgcaaaaacctgtacattatacagtccgccaagcattgtcccggcatagagtacctttatccatctcatgtgctcgaggaaaagttagaaggaaaaacgctgaatttgagcaatgacaaaatcaaagatgacagcgagtacggtaagatcgtgttctttcacaagataatcaagcctctggggaagaaaatatacctgggcaaatttagatacctctgctttgggttctaccagatcgcacagcacctcaaaaacacttga

SEQ ID NO: 8633 - RNA, 951 nt, synthetic construct
  source 1..951: mol_type = other RNA
atgagttcaaatcttcagctgctaaaacaatgtcagaatcgccaagatctcgctaatctcctgatactggattacaagctgctatgtttcacgttatatagccagcccatccataacaactacaaaaaggctatcatctacaagaagaatgggtcaccccgggagatactcgcccctaacaagcagctgaaatttattcagcagaaactggcgctgttactgaatgatatcttcgacgaaatcaatttcaggaagactcagctgtgctactcctatcgtaaggattctgaccagaaatatggctttcatgagaatgcaaagctccacaccaaatccaagctggtcataaatatcgatttagaggacttcttcactaatatcaccttttctaggatcgttggattcttccacaaaaacaagaatctcaagatcaactatgacatttgcattgcaattgcacaaatcgcttgctaccgggacccgaatactaatgacagttatctcccacaggggtcaccttgtagccccattatttccaactttcttggtaccattttggatgaacgattgttcaaactgtccaagagaaaaaagttcatctacagcagatatagcgacgaccttacattttcctttactacaaattcgatccctcaggacatagcccagaagaacggcaacatatggacactcaataaaaccttgatcaacaccattaacagctgtcaattcaagatcaacaaggacaagatcattattagggatcagtatcagagacaacaggtgacaggattgaccgtgaacaagaaggccaacattaacaagaactattacaagtacacgcgcgctatgattgataaatactgcaaatctggcctgtacgaacggtctgcctaccacagtcttggtatggccctgttgcataaagatctgaaatataaagccccatga

SEQ ID NO: 8634 - RNA, 1806 nt, synthetic construct
  source 1..1806: mol_type = other RNA
atgtcctctctccaggcccttagaaaatgtgaagatcgtaaagacttagctactatactcggatattctctgaagcaattcactgccattatttatgcccaatctccccagtataagtacaacagctttacgatacctaaaaagacagggggcaatcgcaacatccttgcacctaaaagtgacctcaaacagctgcaacaaaagctcgccaccctattgtccaagtgctatgaggaaattgaatgtaacagattgactaaactgccaaaaccggttagtattctctctttcagcagtcatggctttcgccggaagatcgacaataagctgtcaagcgacaagttcaactttgacatttatagcaatgctaagtctcatacaaacaaaaagtacgtcctcaatctcgacatcaaggattttttcaagtcaattaccttcagtaggatagtgggatattttgtgaaaaatcgggacttcctgcttgacgtggatgtgtcagtcacaatcgctcagatcgcgacctacagggagacagactctactgaaggttatctgccccagggatcaccgctgtcccctattatctcgaattttataggaagtgtcctggacattaaaatcttacgcctcgccaagaaatataaactagattacacgcggtatgctgacgatatcaccctgtcgactaatctgaaagattttccataccagatagctgtacatagacaggatcgctggatcgtagggctgcaattggagaagattattaagtccagcggatttgaggtgaataaaagcaagaccaggctctacacaaacaacgaacggcaagaggtgacctccctgtccgtcaataagaaggtcaatatcagaaaggagtactatagatacactcgatccatggtcaaccagtattgtatgaccggtatgtacttcaaatcaagtgaacataggcgggccaacatcgccaacgataacagcctgaacggcatcctgtccttcatatactatatcaaacgtgatcgcaaccttgttgtcgacgatgggtatattaaatactgcgatatgaaggggctgcagaagctgtataccaagttcttattccactacaactttatctaccagtctcgcacaaccgtgatcggggaaggttttaccgatccaagacacctccgtatcgcctacaaagttatttataatgctcacaacacgtccattaagttcacttatctgggcaataccaaacgatttagccacttcacaggaatgaagggcggcaccggtttaatcaataagttcttgtcagagtaccagcttatagataagagcatcgccatttcgaagtttccctgcataatcctgctggacggcgacaaggcagggaatgacgtgattaaaatggccgaaaagctgtttaacaagacaatccggaaaattaacatcccaaaagtgggcattatgctattctaccatgtgtacaacaatctatacatccttcagctcgacaaagacgtagatgtggagaaactgtacgatagcaacgttcttcagacaaaagtggatcagcgaacgtttaaccctagtaataaaaagacagaccagaccaagttctatgggaagaaggagttcctggagaaagttattgagcccaataggtcttcaatcaattttagcaacttcgagatagtgttcaagacactcaatcacatccagttgtaccacttaattgcatacaggtctgaagcaggcttggcagcgaaaaccaatttgagcctgatctccgcgaagtcctctaacactacttga

SEQ ID NO: 8635 - RNA, 1761 nt, synthetic construct
  source 1..1761: mol_type = other RNA
atgaacaaattgagtaaccttcggagctgctccgaccggaagggtctagcttccctcttaggcttctctgaaaagcaactcacaaacattctgtattcctccaatatcaacgagaagtactacaagtttagcattcctaagaaatctggcggagataggagaatactggcgccccacgcttcactcaaactgctgcaatcgaacatggcaattctgcttagtcaatgccatgatgaaatcgagaatgagcgggtaactaaaactgcacagcagagcagcatcctaagcttctcatcacatggctttcggaaagctcttaagaccgataactcactggaaccatttagcttcaatatttacagcaatgccaaaaagcacattaacaagaagtacgtgctcaatattgatatagttgacttcttcgagagtatcaccttttctcgcattgtgggctacttccacaagaatcgtcactttttactcgacatcgatgttgccattttaatagcccagatcgcaacgtatagaccctccatcagcgtagaaggttatctccctcaagggagtcccctgagccctatcatcagtaacctcattgggagtattctggacgctagaattctaaggctcagccagcgatataagctggattacagccgctatgcggacgatatcaccctgtcaaccaacatgaagtcctttccaactgagatcgcctatcttaagaacgacgagtgggtcgtcggatcgaaactgaaaaaagctattgagggatctagattcacggtgaataagaaaaagaccaggctgtatactagaaacaagaggcaggaggttacctctctgaccgtcaataagaaggtcaacatcagcaagaagtactatcggtacactcgtagcatggttaatgaatactgtaagactgggtcctattctaaatcctccgagcaccgctatacagaaatagatagtgacaattcactgaatggcattctctcctacatttactacatcaagaaagaccgtaacgatatcgcaatcgaccacaaattcagggaatacgagaaattggtgtctatagaaaagctgtacgtgaaattcctgtttcactactacttcatctaccccgaaaagatgttagtggtgggtgagggcgtgacagacccgctgcatcttaaagtcgcctgtaaccagttatcaaagtcctcgcgaaaatatatcaagttcagttacctgggggagatggcacgcttttctaaatttatgcggttcagtggaggcacaggccatatccataacctcctgacaaactatcacacgatttttaaagctaagtccctgtctctgaaaccttgtataatcttggtggacggggacaaagccggtaatgacgtcgtgaagcatgcgaagtccttgttcaaagaacgccagctggtttttaagggagccaattgcatacgagcctatcacttggatcataatctttacatcatccagctgaataagggaaaagagattgaggatctctatcacccagacattaaaaaaaccaagatcgggatcagagaattttctagcgagaatgactcaaagaagctagacgtgaccaaacattacgggaagaaagaattttacgagaaaattgtcgtggaagagcaggatacaataaacttttctggcttcaacgatgtattggccacattgtatcacattcagatgtatcacttcatcctttggctcttctcagagaggaagatatga

SEQ ID NO: 8636 - RNA, 1779 nt, synthetic construct
  source 1..1779: mol_type = other RNA
atgaacatactggaacaattgaaatcatgcacagacttaaacagcctggccactcttttaggctactcccccaaggtgttctcttacatcctgttttcgaagtctatcaactatcagtacgagaaattcgaaatcgacaaaaaggacggcagtaaaaggataatccatgcccccaaagagaagttgaaggagcttcaacgcagtctggccaatgtgctcaatgagtgttacaacatcatagagaagaacagattgaaccttaccaataagtatcagtgcgtgctctcacacgggtttcggaacaaactggttctggatctgcctattagcaacaaaaccaacattaagctgaaaagcaaggagttcatttttggaattacttcgaatgcgaaggcgcacattaacaaaaagtacatcctgaacatcgatctgaagaacttcttccattctattacttttgggcgtatagtcggcttctttgagaagaatatcaactttaacctcaccaagaaggtagctatcctaatagcacagattgctacctatcgggattccacaaatatggtgggatttctgccacaaggtagtccttgttctcctataatcagcaacttaatctcaggaattctcgataagagactctatgagttcgccaaagaaaataaatgtacctacacaaggttcgccgatgacattacctttagcacaaacatcaagaactttccaacgaatctagcaatcttgagcaatgaaaaatacactccatccaatcagcttatccgaatcatcgagaaaaccggctttcttattaatcccaccaagactcgactgaatacattcgaggaccgccaggtcgttaccgggctggtcgttaacaagaaagttaacgtctcctctaattactaccggtatactaagtctatggtgaacaaatactgtcaggagggaatatattacaaatccaaactgcacaccaatgagaaaataacaacctccaattcactacaggggatactggacttcattttcaacatcaagaagccagctttcgtcaaccctacgaattacaaggaattttccaaacttgactcaatcgagaaactcagtctgaaactgaacttccataagaacttcattcacaataccgaaactagaattatctgcgaaggggtaagtgaccctatgcactttaaaaatgcttataagagcctctacaagtcaaacaaatacccattctttttcaaggtcttgacttctttcaactctctggtgaaaattaccggcattggaaatggcaccggcaatctcaagcacttcctgtccatgtataagaagatcaacacgagcaaaatcaataatatcaacccctgtattgtgttggtggatggtgataatgagggtgaaaaggtgttaacagcagccaaaaagatctttgacaagaattgctacaaggaactctcatttttttccccgttttataatcttgacgattttcaggtgctccattgcgaaaagaacttatatatcgttatgctgcccacaaatttcacaattgaggatctatacgacccgatttacaagacttttacccttggtacgaggaccctgaaactgagcaatgaagatctcgatcacactaagttctatgggaagacagagttcttcgaatatgtgattaaacccaatagtcatgtgatcgacttcacaaacttcaaaaagattttcgaggtcttgtttcacgtacagctctataacttttttcatagcaacctgtcctga

SEQ ID NO: 8637 - RNA, 1761 nt, synthetic construct
  source 1..1761: mol_type = other RNA
atgaatgaccttattctgctgaagaactgcaaaaatcttcaagacttggcctatcttctgggctataccccgagaatactgtcatacactctatttaaaaggagcatactacagccctacacaaaattcgaaatacctaagaaatccggcggtaaacgcgtcatcctggcgccaaacaaagacctgaaaaaacttcagtcagctctcgcagagctcctagactcctgttttaatataatcgagaagaaccgcttggagaacacgtcctataccacatgtatcctgagccatgggtttcgttcaaagttcaaaattgacataccgaaatcacacaagaatcgggaagtcctgaaaactatagacctgaaactcgggatttattctaacgccttcaagcataagaataaaaagtacgtgctcaacattgatctcaaggatttctttaccagtataacattcaaccggatcgtgggttacttctgcaaaaacgaaaatttcttgcttgacaagaaggtggctatcctgattgctcagattgcaacctacagagagattagatcttctgaaggatttctgccacagggctctccaagttcccctattattagcaacctgatagcaggaatcttggacaatagactgaacaatttggcccagcggtataaatgtacctacacgaggtatgccgatgatctcaccttttcaacaaatattagcacatttccaacggaattgtatgattacgagaataaggtaatcgggaagaagctgaataagatcataaaggactcgtggttcgagattaatccaagcaagacaaggctgacccataaccaaaatcgacaggaagttactggactgactgtgaacaagaaggtcaacatttccaaaaactattaccgatacagtcggtcgatgatccataacttctgcattaatggcacttttacaaagtccaaactccacaacaagcctcttgttttaaacattaacagcctcactggtatcactaactacatcttcaacatcaagaatcccaattttgagaagtcccgtaccctgcgggacctcgaggatttatcctctatcgagaaactgtacgtttcgttcaattttcacaaatacttcagcaacaacgaacagcctaacatcatttgtgagggaatcaccgaccccttacacctcaagaatagctggaagaacttgaataaagatcaactggagtacaagatcacgtctctcgaggaaattaaaagtcttcatgaagtgatgggacttagcaatggcgtgcccaatatgacaaaattcctgcgccagtatcacaaactgcacaaaagtaagtacaagaatcctcagccttgcatcctcctactggatggggatgatgagggggagaaactgttaacaaatatctcatctagcttcaagcagaaaaagtctttggacttttataacttccgcgatccctccaacagcctgctgagggtgacccacctgatcaataacttatatattatgcagctcccaaacggtaagtgcatcgaagacatttatgaccccagtgtgctgaccctgactcttaaaggcagaacatacaatcccagtaacaattcctttgataccaccacttactacggcaagaaggatttgatcaagaaggtaatcatcccccaaaagaattccattaacttcgactcattcaacatcatctttgacaccattctacacatcaggctctattcttttttttgtagcaaatga

SEQ ID NO: 8638 - RNA, 1872 nt, synthetic construct
  source 1..1872: mol_type = other RNA
atgaagaatctggaaaatctcaaatcttgccatacagcagaggatttgtctacacttctggacttcccgtataaacggttcttgatcattctgtatcacggccacatttcctccaagtatagcagtttcgagattacgaaaaaagatcagtcccttagatccattaatgcccctcataaagagctcaagatgattcaggagaggctcgccgatctgctcgaacaatgtttgagcgaaattgagaatgaccgtcttaagaaaaatctggaaaagtttcacgagaacagccctaataaatatcccaagtttcatctgacttcacacggcttcaggaaaaaactgtatatagatcccccctacaatatccataccatcacacctggcatctttactaatgcctatgtgcataccaacaagaatcttgtcctcaatattgacattaaggacttcttcacttccatcaagtttaatcggttggtcgggttcttcattcagaacaagtacttcgaactttctgaggaagtggcctttactattgcaagaatagcaacctttcgaaagaatgacgatgagatgggatatttgcctcaaggttccccgtgttctcctgtgataagtaacctgtttactagtatgctggattcacgccttgtgaaattatgtaagaagaacaaatgcgtgtacacaaggtacgctgatgatatcaccatatcaaccaatctaaagaagttcccccaggaaatcctaactatcatcaacgataaggtgaagttaaatgaccggctagagcgccagtttgaagcctttggttttaacatcaacaacaagaagacgcggattagtaataggaaacaacgccaggtagttacgggactcgtcgtgaataagaaagtgaacgttaaccgatcttactataaagccactagagccatggtggacaactattgcaagacaaacacatttgtcaaaagcaaataccacgtttttcatgagttgaagattgaaaactcccagagcctgaatgggatcctgaactacatctacaacattaagaaggtggagccatacaaactgattgaaaaccatgacgactacttaaaacaccacaatgacttcatcgataagaagaattgggagtcacgtctgctctatcaccatataaacactctgaacgggctggacaaaatctatgcgtcctatatattccacaagaaatacgtctacaacgaaaagaaaagcattatttgcgagggggtaaccgatgtcattcatttcaagaaggcagctgataaattaggcatcacgagcatcaaatttagctctttctcccccgattaccagtttgagaaactgatccacttggacggcggaaccgataaccttaagaagtttctaagcaacctgaagctgctctataaatcggaagtgagcttaaatctcctgaatccaaccattatcattgttgacagagatgatgcaggtaaaggcgttatcgctgaggccaagaaactgtttaagaacagttggcacgagcactcatcatctacagtgcctaacatgaagttctacaacttcttcaagaaattctacatcttccatcttccaatcgtaccctatgacccaaacaagaccgtaatagagttcctgtacaataatagtaccctgctcaatgacaccatttctatcaacggaaagacactgatctgtgaagctatcgcgacctcggaacaaataaagaaaaaggaggtctacagtaagatctcattcatcaagacaataatcccaaagcacgagccatccctggactataaatactttaaacaggtgctcgacgtggttgacgagataagcaaactcatgaaaaccgcttga

SEQ ID NO: 8639 - RNA, 1872 nt, synthetic construct
  source 1..1872: mol_type = other RNA
atgaagaatctggagaatctcaaaaactgtgaaaatgctagagatctggcgactctgctggacataccctataaacgcttttccataattctctaccgaggacacatctcatccaaatactcgagcttcgaaatcaaaaaaaaggaccagagtcttcgtaaaatccatgccccgtatgaatatttgaaaatcctgcagaagaagctagcaaatctactcgagcgctgtttaagcgagattgaaaatgaccggttggctgagaacctgtctaagtttcaggaaaatcgaccgaataagtatcctaagtttcatctcgcaagccacgggttcaggaaaaaactgtacattgactccccatataacgtacatactatcactccttccatttttaccaatgcccacactcatacaaataaaaacctcgtgctgaacattgacattaaggactttttcacctccatcaaattcaatcgcttggtcggtttctttattcagaacaagtacttcgaactcagcgaggaggtggcctttacaatagctcgaatcgctacctttagagagaatgatgacgtcatgggttacttaccacagggctccccttgtagcccaatcattagtaacctgtttacagcaatgcttgatagtaggttggtcaaactctgcaagaagaatcagtgtctttatacccggtatgccgacgacatcacgatcagtactaatctcaaagaattccctcaggagatactgacagtggtaaacgacaaggtgaaactgaatgatcggctgcagaggcaatttgaggcctttggcttcaacattaatcacaaaaagaccagaatcagtgaccgcaaacagaggcaggtcgtcacaggtctggttgtgaacaagaaggttaacattaaccagagctattacaaagccaccagagcgatggtggataattactgcaagacaaatacattcgtcaaatcgaaataccatgtgtttcatgagcatcagatagagaattctcagtccctcaatggcattttgaactacatctacaacatcaagaaggttgaaccttataagctgctgaattcccacgacgattatctggataaccacaacaacctgattaacaaacggaattgggaaaaccggttactgtaccatcacattaatacgctgtctgggcttgatcgcatgtatgcactgtttatattccacaagaagtatgtgtacgaccacaaaatctctatcatctgcgaggggattactgacgtactgcactttaaaaaggcttcagagaagcttgggatcaataacatcaggctatcttcattcaatagcgagtatcagttcgagaaacttcttcacctggacggcggcaccgataacctgaaaaagtttttgagcaacctcaaactcatctataagtcagagattcccttaaaggatctcaatcccactattattatcgtggatcgtgacaaagctggaaaaggagttattgaggaagcaaggaagctattcaagaatagttttaaggagcacaactcttcaagcgtcaaggacatgaaattctacactttgttccaaaagttctacatcttctgcttgcccatagtgtctatcgacagcaacaagaccgtgatcgaattcctatataacaacagagatctccttaacgaaaccatgtctgtgaacggaaagcccttaatatgcgaagccatcgccacaaaggagcaaattgatcaaaagaaggtataccccaagatactgtttatcaagaacatcctgccaaaatacgaatccatcctggattacacctacttccagcaagttttcgatgtgattaacgagatatcaaccttgatgaagacggtgtga

SEQ ID NO: 8640 - RNA, 1872 nt, synthetic construct
  source 1..1872: mol_type = other RNA
atgaaaaatttggagaatcttaagaactgcgagaatgcccgagatctggctaccctcttggatattccgtacaaaaggttcagtattattctgtatcgccatcacataagtagcaaatactctagtttcgagatcaagaaaaaggaccagtctctgcgtaagatccacgcaccttacgagtacctgaagatattacagaaaaagctggccaatcttctggaacaatgtctgtctgagatcgagaatgatagattaactgaaaacttggccaagtttaatgaaaaccggccaaaaaagtatcctaaatttcatctcaccagccacggctttcggaaaaaaatttatatcgacagcccatatgaggtccacacaattacccccggaatatttaccaacgcttatacccataccaacaaaaatctggtgctcaatatagacatcaaggactttttctccagcataaaatttaaccggttagtggggttctttattcagaataagtatttcgagctcagcgaagaggtggccttcacaatcgttcgcattgcaacatttagggagaatgatgatgagatggggtacctcccacagggctcaccctgtagcccggtcatttccaatttatttgcctctatgcttgactcccgcctagtgaagctctgcaagaagaatcgttgtgtttatactcggtacgctgacgacataaccattagcacgaatttgaaggaatttcctcaagacattctgactatcgtgaatgataaagtgatcctcaatgatcgcctgaaaagacagtttgatgcattcggctttaacgtgaataataagaagactaggctctcttcaaaaaaacagcgacaagttgtgacaggtctggtggtcaacaagaaggtcaacattaacaagaattactacaaggccactagggcaatgaccgactccttctgcaaaaccaacacattcattaaatccaagtaccacactttccatgagtctgaagtatctaacagccatagcctcaatgggatcctgaactatatctacaatatcaagaagatcgagccttataaactgctagagtcccactcggactatttgaaacaccacaacgaactaatcgacaagaaaaattgggaaagcagactgctatatcatcatatcaacacgctgtccggtctggataagatgtacgctctgtttatattccacaaaaagtacgtgtacaacgagaagaactccattatctgtgagggaatcaccgacgtgcttcatttcaaaaaagcagctgttaagctcggtgtagataatctgaagtttagttctttccactccgattaccaattcgaaaagctgttgcacctggacggaggcacagataaccttaaaaaattcctgtccaaccttaaactgctctataaaagtgaagtttcactgaaggacctgaacccaactattatcgtcgtagatagagatgacgcgggcaaaggggtgattgaagaagctaaaaagctcttcaagaactcacttgaagaatatagttcgtcaagcatctccacgttgaagttctactgcatcttcaagaagttttacatattccagctgcccattgtgccctacgattctaagaagacagtgatcgagtatttatacaataacagtaccctcctaaacgaaacaatgactatcaacggaaagacgttgatatgcgaggccatcgcgactgccgagcagatcaagaaaaaagaggtttacagcaagattgccttcatcaaaaacatcattcccaaatatgagtcaacccttgactacacatattttaagcaggtctttgacattgtcgacgaaatttcaacactgatgaagaccgtatga

SEQ ID NO: 8641 - RNA, 1872 nt, synthetic construct
  source 1..1872: mol_type = other RNA
atgaccaatcttgaaaatctaaagcgatgtgagactgccagagacttagctatcctcctggatataccttacaaacgcttctctataattctttaccggggccacattagttctaaatactccaccttcgagattaaaaagaaggatcaaacatctcggaaaataagcgcaccttacgagtacctgaagattgtgcagaagaagctgagtgtgctattagagcagtgcctctcagaaatagaaaataataggctggctgaaactctgtccaagtttcaagaaaacaggccgaataagtatcccaaattccatttggtgtctcacggatttaggaagaagatctacattgatagcccttataactttcattcaatcacccccggcatatttactaacgcacacattcatacgaacaaaaatctcgttttgaacattgacatcaaggacttctttacctctatcaagttcaacagactcgttggattcttcatccagaacaaatactttgagctgtcagaggaggttgcgctcacgattgcccgcattgcgacttttagggaaaatgacaaagtaattgggtatttaccccagggatccccttgcagcccagtcattagcaacttattcacagccatgctggactcgcgattggtaaagctctgcaagaagaacaaatgtgtttatacccgctacgccgatgacattacaatcagcaccaatctgaaagaattcccagaggcaattctcacgatggatgaaaatttgattgtactgaacgagcgtctcattcggcagtttgaaaccttcggtttccacatcaataacaaaaaaacacgcctggcaaatcgtaaacagagacaggtggtgaccggccttgtggtcaacaaaaaggtcaacatcaaccggcactattataaagccactagagccatggttgactccttttgtaagacaaatacatttgtgaagtccaagtatcatgtgttccatgagccacagatcgaagattcgcagagtcttaatggcatactgaactacatatacaacatcaagaaggtggaaccatataagctgcttgagcagcatgatgactacctgaagcatcacaatgagttcatcgataaaaagaactgggaaagtaggctactgtatcaccacatcaacacactgaatgggttggacaaaatgtatgggtctttcatcttccacaaaaagtacgtatacaacgataaaccctcaattatatgcgagggtattacagacgtgatacactttaagaaagccgctgagaagcttgggatcactaacatcaagtttagttccttcaattccgactaccagttcgagaaattgctacatctggatggtggcacagaaaacctgaaaaaatttctgagcaacctcaagattctctataaatccgaggtccaactgaatttgctcaatcctaccatcatcatcgtcgatagagacggagccgggaaaggcgtgattactgaggctaagaaattgttcaagaattcctggaaggaacactcatctaccactgtccctacaatgaaatttcttgctctgttcaagaagttctacatctttgaattaccggtggtgccctttgaccccgagaagaccgtcattgagttcctgtacaacaatagcaccctcctgaacgagacaatgatgatcaatggaaagcatctgatttgtgaggcaatcgctagcaaagaccaaatcgataagaaaaaggtgtacagcaagatcagtttcatcaagaatatcatcccaaaacacgaaagctcactggactatacctattttaagcaggtttttgatgtgattgaggagatctctacgcttatgaaaactatatga

SEQ ID NO: 8642 - RNA, 1098 nt, synthetic construct
  source 1..1098: mol_type = other RNA
atgaaaaatctcgagaacctgaagaaatgtgaaacttcaaaagacctggccattcttcttaacgtaccatacaagatattcctgatcacactctacaatggacacattagcagcaagtatagcaacttcgaaatcaagaagaaagataataccctgcgcaagataaaagcgcctatccagaacctaaaggacattcagaagaaattagcagatttgctggaatactgcttgtctgagattgagaatgaacgactgaagaagatacagttaaactttagtgagcattcccccaataaatatcccaaatttcaccttacctctcacggcttccgcaagaagatttacattgagtcaccctataacgtgcatactatcaatctgggtatcttttccaatgccagtgttcacaccaataaaaacttagtcctcaacatcgatatcaaggacttcttttcctccattaagttcaatcgactcgtgggattcctcatccaaaacaaatactttgagcttaacgaagagatcgcactgactattgcacaaatagccacatttcgtgagaatgatgatgaggtcggttatttgccccaggggtcgccttgtagtccggtgatttcaaatctgtttactgctatgctagatagtagactggtgaagctttgtaagaagaacaagtgcatttatacgaggtatgctgacgacatcaccatttccactaacctcaaagaatttccaaaagagatcctaacaatcgacgaagaccggattgtcttgaacgaacggctgatcaggcagtttgagacattcgggttcaatatcaacaataaaaagaccagactggccaaccgcaaacaaaggcaggtggtcaccggcctcgttgtaaataaaaaggtgaacatcaatcggtcatactacaaagccacaagagctatggttgattctttttgcaagaccaatacgttcttcaaaagcaaatatcatgtgttccacgagctgcagattgaaaatagccagagcctgaacggcatcctgaactacatatacaacataaagaaggtggagccatataagttgctctctcctcatgacgactactga

SEQ ID NO: 8643 - RNA, 1833 nt, synthetic construct
  source 1..1833: mol_type = other RNA
atgaacgccttatccagattgaagaattgcaacagtatcgccgacatcatcagctctttctccttaaacataagccccaaaaacttcagttatatcctctacatcctttccgacaatgacaaatataaggaattcaccatcccgaagtcagattcatcgatccgcactatctcctgtccggagcctaggctgaaatatctccaaaaggagtttagcaagatcattaatgactgcgtgattgaaattcagcacaagaatccatcatatctcatcgggaatcacgcctttgagaaatataaatccattgcaagcaacgcctacaaacatgagaagcagagatacatcttaaacattgacatcgagaacttctttagtagcatacattatgggcgtgtggtcggctttttacagaatgaccggtatttttccctaagcgaaaaaacctctaagatcatcgctaaacttgcaacacacaagggagttctccctcagggctcacccctatctcctatattggcatcactgattggcaatatagtggattctaggctgatgaagctggctagaaaatacaaactcacctacacaagatacgcagacgacattacattttctagtaaccgcaatttcagcactgatctgctgacctttaaggacggtatctgggtagcgaataagaagctgatcagtgccatcaatcattgtggtttcaagatcaaccacaaaaaaacccggtttagtgatcaaaatcataagcgagtcgtgaccggcgtcatcgtcaacgaatttctgaatacggacaaaaagtaccggaagaatactcgcgcaatggtgaattctctactgagcaaaggggagtttaaaatcctggacagggacaataatgaaatacagggcacaattgaacagctgataggtcgccttaatcattccatttctattaagtatcgcgatagggtgttaaatccacggcttccacgagatgtccgcattgaagtgcagaacaagatcaaagagaacctgatcaagataatccaatacaaggagaacacgacattccttccaaaaaatatcggactggacaagatcgaaaaagcgtttaacattgagaaggacgaagctaaatatctcctctcttttgtgcaaaaacgtgatgaccgtctgatcatccctgattgtaacatacgactgcttcggaacgtgctgttctacaaatatttcttgagcatggataagcctgtgattatcacagagggaaagactgacgctctgtacttcaaagccgccatgaaaaaactgctgatttccaatgatttgtacttcgtcaagcacaaaaagaatggcgagctggacaagttgggacttaccgggggtaccgctcccataaatgccttcttcaagtacgtgtacaatgataacaacttcgtggattttcacaagattaatgttaagcccaagtctcccgtcatcttcattctggactatgatgatgggctggataaggtgaaaaacctcctaaaaaagaacttcagcgagggcaaaagattttcccagattaagcggaacatttatatactcctcctgaacaagtttggcgatggggaggatttcaaaaaggacaacaaggtatgcatagaaaacttgattagtttcgatggagagaagattgctgtttcaaatgaaagagtttcctttcagggaaaagaactctcgaagaacgaatttagcaaaattgttttggaggagtacgagaggttcgactttactaatttctcaatcgtattctcggagatcaacaacattattaaccacttcaactacaacagggactga

SEQ ID NO: 8644 - RNA, 1854 nt, synthetic construct
  source 1..1854: mol_type = other RNA
atgtcgacactaaataaactcaggaaatgcgacagtattgaggacctgatctcatccttttcactgaaaattaccgctagccagttcagttatatagtgtaccgtgtccaagatagcgacaaatatcatcagtttacgatccctaaatctgatgggactacgcggatcataagctcacctcacaagaccttaaaatatcttcagaaggagttttccaagatctttatgcagtgtatcaccgagattcaacagaagcaccctagttacttagccaagaatcacgcatttgagaaatacaaatccattgcctcaaatgcctccctgcacaagcgtcaaaagtacctcctaaacattgacatcaaggacttcttttcttcaatacactacggtcgcattataggcttcctgaagaaagacaaatacttttgcctgtctgaccgaaccgcgaaaatcattgcgaaacttgctacatatgacggggtcctgccacagggaagtcccctgagccccatccttgcatccttgattggcaatatcatcgatacacgcctgagcatgattgctagaaaataccatctcgtatatacacgatatgccgacgatatcactttcagcagtaatagggatttttctaagtacctgctcgacaacaagaataatatttggcatcccaataacaagctgatatcggctattaacaagtgcgggtttagcatcaacatcaaaaagaccagatatatcaacagataccacaaacaggttgtgaccggtataatcgtgaaccattccctaaatgtggataagaagtacaagaaacacagtagagctatggttaataatctgcttaggacatcacaatttcaaattcataagggctacaactacaaatacaccggcaatatcgaccagttgattggacgccttaaccacgcaatctctatcaagtatagggaccgcattctgaacctgaacctcctctcggaaattcggaagtatatccagttcagcattaagcggaacctgatcaacataattaaatacaatgggcgcactgacaaaatcaaaaaacatatcggcattgatcggctggaaaggacctttgatattaacaacgaacaagtgaagaagtacttaacattcatccagaagaaagacgacactctctatccatccgacaatcagatcaagttactcagaaatgtgctgttctacaagtacttcatagggatagagagtacgtatatcttcaccgaagggaaaaccgatcacatttacttgaaatatgcattccaggccttgaacttcaccaagaacgtaaagatcatcaaacacaactctaatttggagaaactgggcctgtccggaggtacagaacctattaaccagtttattggacgggcctatactgataatttttatgtcgacttcgacaagatcaatatcaagccaaagcatcccgttatatttttgcttgactatgatgatggcctcaaaaagatagagagctatatcaaacggtgtttcaagacaggagatcagttcgcccatattaaagagaacatctacatcctactgctggaaaagcttactccgcagcaggacaagtacaattataccgaaaagaacaagcagacttgcatagagaatttgatccactacaatgactccaagataatgatttcttctaacaaccacgattgtgtgattttcgatggtaaggaaatcagcaaaaacgacttttcaattaaggtgcgagagaacaagaactcctttgatttcaacaatttctctagcctgattacagccatcagggatatcgagaatcatttcaaaactaaggtcaaactcgattga

SEQ ID NO: 8645 - RNA, 1842 nt, synthetic construct
  source 1..1842: mol_type = other RNA
atgaacaccctaagcaagctccaaaaatgcaatagtatcgacgagctgatttctagcttcagcctgaatatcactccaaagaagttttcctacatcctctatgtcttgcaggacaatcagaagtataaggattttacaatccccaaatccggcggcggaatacggacaatttcttgccctgaaccaacgcttaaatatcttcagaaggagttcaacaagatctttatttcctgtatcgacgagatcaaacagataaaccccagctatctgatcagcaatcatgcgtttgagaaatacaagtcaattgcttctaacgcctacaaacacaagaacaagaagtacattctcaatattgacatcaaggacttcttttcaagcatccactacggccgcatcatcgggtttctgcaaaaagaccggtatctgaaactgagtgaaaaaaccgccaaaatcattgccaagttagctacatacaatggcactttgccccaaggcagtcctttatccccaattctggcctcactaatcgggaatataatagatgccagacttttgaagctcgcaaagaagtataaattgacatacacccgatacgccgacgacataactttcagcagtaacttggatttttcctccttcctgcttgaaaaggaaaataatatatgggtcccaaacaaaaaccttattagcgccgtcgaatccctcggttttaagattaacaacaagaagactcgctatacagacaaatatcacaaacagattgtgactggactcgtggttaataaattcgttaacaccgacaagaactataagaagaaaaccagagcgatggtataccagctttttaagatcggcgagtttaaactgactggaaagaataaagacacgattacagggtctattgaccagttaattggccgtctcaatcactctattagtatcaagtacaaggataggatcctaaacccttttctgctgaataacgtaaggtccgaagtcaaaaataaacttcgggataatctgatcaacattattcagtatcggggcgaatccaatctgttgccaaaagatgtgggaatcaataagctggaggaatcgatcttcatagaaattgaggaagctaaaaagctcctgtctttcaacaagaacaagaacgataagctaatcattcccgacgatagtataaagcaactgaggaacgtgctgttctacaaatacttcataagcttcgcaatgaatgggccggtgataattacggaaggtaaaaccgatttcttctactttaaagcagctatgaagagtctgtcaatgaacaacaactttaagttcatccgacagaataatagaagcctggagaagctcggtctgagcggaggcaccgaccctattaacaagttcatcaagaacgtgtatcatgatgagaaattcgtgaacttttctaagctgaaggtgcgcccgaagtaccctgtcatctttatcctggattatgacgatggattggataaagtgtcccacattattaaagagaagttcaaagacgggacccagtttgcacagattaaagagaacatctacatactcctcctgaagaaaattacactcaattcttcagggaaaatggattataccaatgagccctcgaaagtttgtatcgagaatcttatcttactgaacgggaacaagataaatgtaatcaacgatgaggttgattacgagggtaccaggacttcaaaatcttgctttgctaaggaggtgtcaagcaatttagagaagttcgacttctccgaattcaagaatatcttcgacaaaatcgaagacatcgtgacccattttcatacatga

SEQ ID NO: 8646 - RNA, 1845 nt, synthetic construct
  source 1..1845: mol_type = other RNA
atgaatctgcaaaagctgcgaaactgtcaatccattgaggaccttatttcctcatttagtatcaagactaccccgagaaaatttgcctacgtggtatacaagatcccagataaccagaaatacattgagttcgagatcaaaaaggcaaacgggagcctacgcaaaattgccgctcctaactctactctcaagtatctgcagaagctttttgccgacataattttaaactgcgtgctcgagattcaacagaaggataagaactttctggttactaatcacggttttgaaaagcacaagagcataataagcaacgctcgtattcatcagggaaagaagtatctcctgaatctcgacatcaaagatttcttcgagtctattcatttcggccgcattaaaggatttctttctaacgaccagcactttttactgcacaataagacagctgaaatcatcgcgactttggccacttacggcgaaagaaaaactctgcctcagggatcccctctgtctccaatactcagcgtcctcatcgggtccatccttgatgcaaacctcatgaaaatcgcaaacaagtacaatttgtcctacacccggtatgcagacgacataaccttctcaagcaataaggatttttccaaattcctgctgagaaaagaccagaatggcaattggcagctaaaagggaagttcgagaagtacattaacaaagtggggttccatatcaacaaggaaaaaaccaggtatacgaacatcaataacaaacaaatcgtcacgggtttgatagtgaacaagttcacaaatacagatcagcggtaccggaagcagtctagggccatggtccacaaactgtttcaaactggtaccttcacccccgattcaaaaaatgatggcagactgtacaatgaggattaccttattgggcggatttaccactctatatcagtgaagtacagggaaattgtgatcaatcctaatttgctgaccaatgacatcaatatcatcaacaaggaaatcaacaagaagatttccaacctgattcgctatgataaggtttgtgcccccgactataaacctaattacacagccaatgacatactgaataaattaacaccaccctttacggatggattaattgaaagtctcagcaaatctctagtgaaacgtaatatgccgatagacagtgacaatcagattaaactcctgcgcgatatcctgttcttcaagtacttcgttaatatcaactcccccgtcataattccagaaggtcataccgatagcaaatatctgaaaatcgccatgaagatgttaaacatcaacatcgaccttaagttctacaacattaaccccagtctggataagttgggcctcaatggcggaacagctaaaatcaacagctttatccagaactgctatagcgacaacaattttgtttcgttcaataagctgaagatcaagtctaagcatcccatcatatttattctagactatgacgaggggcttaagtcatgtgacgaaattctgaagtatttcaaagatggcagcaattatgcgaggattaaagaaaacatcttcgtgattctgctgaacaaatacaaaatcctggaggataagaagaagaaggatttcaatatcaaggatcatcaggtatgcattgagaatctcatttcacacaacagtcagcgaatcaacgtggacaaagacaaccatgacaaagtgtcgtttaacaacgagttgatatccaaatccaagtttagcgagttggtcgagaataatacccacctttttcagttcctcaactttagtaccatcttcgacacaatcaagaaaattatccacgagtattga

SEQ ID NO: 8647 - RNA, 1749 nt, synthetic construct
  source 1..1749: mol_type = other RNA
atggccaagtatatagatcgactaagaaagtgcacatgcattgcggatctggtaagcgagtttaagctgaaagtaactgcaaaggaatttggttacgtggtctatcatctttccgatgatctgaagtacgaggagtttgatattcctaaaaagaacggcaccctgagaaggatccattccccgaagcccacattgaaatacattcagaaggaattcagcctgatcatttttaactgtatcaacgagatcaggctggataatgccaattatttggcttgtaaccacgccttcgaacgtgacaagtccattcttagtaacgcagacctgcataagaacaagaagttcatcctgaacatagacatcaaagactttttcgacagcatccactacggacgcattaaaggttttctggcaaatgactcacacttcaaactgaatgagaaggtgtcccaaataatagccaggttagccacctatcataaaattctccctcaaggctcaccactctctccaatactggctaccctgataggaaatatcatggacgtgcgctttcttaagctagccaagaaatatcgatttacctacagtcgttatgctgatgacattaccctatcatctaataaggccttcgataagaatattgtctactggtgcgaaaacaataaaaaatgggtggcgggcgaaatagtgatcaatattctgactgacagcgggtttactatcaattcagagaagacccgcgtgtcttatagcaacgatagacaaactgtaacagggatagttgtcaacaaacagcgcaatgttacacttgagtatcggcggacaaatcggagcatggtttactctctcttgagcacgggctcctttagattaaacgataatgtcgggaagattactcagttgatgggccggctcaatcacagtatttacattaagtactacgacagcaagttctcaataccattggatatgaacgagcgcatcaagtacaaggaaaaaaagcagaaagagctcatcaagattattaacgacaattggaagagtgacaaaaataacatcacgtgcgcagatcatcagatgaagctgcttcggagtgtgatctacttcaaatatatcatcaacgtggaccagaccaccattttccccgagggctttacagatcctatctatttctcttcggcaaaggagaaattgaacatcaattccaacatcaagttccagaaaatcaacaacggactcaaaaaaattggcctgctcggatgtgcctcttctgtcaataccttcattcacaatgtgaaggaaaagattgacaagttcatctcgtataaacaaatcggtgtcatccctaagcaccccgtgatttttatactcgactatgatgacgggctcgacgattgcaggttcatacttgacaaaattcagatcgaccagcagtatgtgtttattagagacaacatctacgttttactgctggagcccaaaggcaaatctaaaaatcatcacaagacgatagagaacatgtcctgtatcgaaaatctgatctcattcgaagggaaccgaattgaggctgttcagggaaagaaagaatacatcaacttcaagggtattgagtttaagaaaggaagtttcgccaattacgtgaaagaacactccagcgattttgattactccgggtttgataaaatcttcaagaagatcacagagatcgaagaggactacgctaaaaggatgatcactaacgcttga

SEQ ID NO: 8648 - RNA, 1794 nt, synthetic construct
  source 1..1794: mol_type = other RNA
atggaagtgttcatcagtatgtccagctatttggaaaaattgaaatcttgcacgtcaatttccgacctgataagcgaatttgagcttaacatcactccccagcagttttcttacattgtgtacaaggttgaggacagcaagaaataccagacgttcactatcctaaaaaaatcaggcgacgatcgtatcattcagaagccccataactcacttaaagaaattcagaagtcgatcgccaacattttaatgcactgtgtggacgacatacggaaggataagcctaattacctcaagtgttctcatgcattcgagtggggtaagagcatcgtcagtaactccgagatccacatcaacaaaaagttcgtgctcaatattgacattgcagactttttcgatagcattcactacggtaggattaagggcttttttgtgtctgactactacttttctctgaacgaaaccatcgctcgggtgatagccaaagtggcaacttgtaacgggacactacctcagggaagcccgctgagccccatcatcagttcgctgatagggaacctgatcgacataaaattcctcgaactggcgaaaaaatatcgtttcacttatagccggtatgctgatgacattacattgtccagcaataaagaactgtcagatgagctggtgatttgggacagagaaaataatgtctggaaagtcaccaatacaattgagagcttgttgaacagaaagagtggattcaagataaacgagaaaaagacccgatataataggttttcctccagacagctagttaccggtattgttgtcaacaaggagaaaaatgtcgtgagagagtataagaagcagaaccgctctatggtgaattctctcctgaatacgggagagtttttcatcaaagatatttccgatgagcacatcaaagggactatcgaacaactgattggccgcctcaactactgcatctatgtaaagtactacaagccaaataaccttacaaagctggacttggactcaaagattgacaacaaagaggataaccgcaagaatataaggaaaatggtatcactccggattgataagaatgacgaaaatttcccgttacagaagccagatcaccagatgtatctccttcgaagtgtcctctttttcaaatacttcaccaatatcacacagactaccatataccccgaaggctatacagacccaatgtacttttctatagccaccgagaagctgaacaaaaaagggcttttttacttccaaaagatcaatgattccctgaagaaactcggactgagtggaggggcttcatccgtgaattactttatttccaagttcgttgagcattcctatttcatcaggttctcgtctattgtacctacccacccagctatcttcgtcttagattatgacaacggccttgatggttgccaatatatcctgaattccaaacgctttggcttcattaagaagaagaacattcagttttcccatatcaaggataacgtgtatgtactcttactgagccctatcagtaacgagaaaagttggaagaaaaaggagaactataagtgcatcgagaattttatcacctatcaggggaagatcattcaagtgagcgatgaggagggcgaatacgttagctttaaggacgacaagatcaaaaagtacaattttgcccaatacatcatgaataagcccgatgaattttctttctcagaattctctaacctgttcgatcagatatcactgatcgagagcgactacaaagaacggctggccatgaaatga

SEQ ID NO: 8649 - RNA, 1773 nt, synthetic construct
  source 1..1773: mol_type = other RNA
atgaataagaccacaattgacagactgcggagctgtacttcgattgcagatcttattagcgaattccagctgaagatcagcccttcaaagttctcatacattgtttactgcctcagagacgaggacaaatacaccaagtttgagatccccaaaaaaagcggtggggtgcgtatcatccacagtcctaaagacagtctgaaatacatacagagggaggtcgctactatcttgttaaactgcattgatgacatcaagctgagtaaccctaattatctccgatgcaatcacgcgttcgaaaaagataagagcattgtgtccaatgctaatctgcacgaacataaaaggtttgtcctaaacatcgacatcaagaacttcttttccagcattcattacggccgcatcaagggcttcctgatatctgacgccaattttctcctgaatgagaaggttggacaaattatcgctaagctcgccacgtataatgggtatctgccccaaggagctccaacttcaccaatactagcctcattgataggcaatatcctcgatatccggcttctcaaattggcgaaggaataccgtttttcatacagtcggtacgccgatgatatcactctctcttctaaccaggaactgcctaatgagcttatctattgggaaaaggaggaaaacatttggatagcaggtaacaagatcacaaaggtcattaagaaatgtgggttcgaactgaacccgctgaagactaggtatattcgcaacaccaaccgacagattgtaactggcattgtggtgaataaaaagcggaatgtggtgagtttataccgaaaaatcaatcgcgccatgacgtatagtttactttccacaggccaatatactattcgggatgtgtctggtctgttgtccaatggaacaattaatcagctgatcggccgcatatcccattgtatttacgtgaagtatcataacccccccatgatccatccgttaaactcccaaagggcagatctgaggaagaaaaattctgagagagtgacaaagattatcagtgataactggaatagagactcaaagtccaacatcaattattattccgaccaccagacgatgttgctcagatcggttctgttctttaaatacttcataagcaacgagcgcaccacaattatacctgaagggttcaccgatccaatttactttaaaaccgccctgtctagccttgagattaacttgaaccttcactttcagaaactgaacagagagctgaaaaaaatcggtatctatggcggggcctcattcgtaaacagcttcttatgtaacatcgaaaccgaaaagaaagggttcatcagctatggaatgattaagcaaaccccacagaaacccgtcatctttattttggactacgattccggcctcgaggactgcaaatacctgctgtccaagatgaaagacggagagcagtatatcaacatcaccgacaatatttacatcctgctactaagggtcaaacacaataaggatcacaagaacataaacaaccatatctacaccgaacggcttattagctaccagggaaataaaatacaggcaaaagatgacaaccacgagtacatcctctttaagaacgaggagtacaagaagtacaatttcgcaaagtatatctctcagcacaaggatgagtttaactttgactctttcaaggacatattcgacaagattaaggaaatagaggatgactatcaggccaaactcgctacaaagaatatcaaactgtga

SEQ ID NO: 8650 - RNA, 1761 nt, synthetic construct
  source 1..1761: mol_type = other RNA
atgactttatacctggagaaattgaagaagtgcaattctattagtgactttatccgcgagttcaatttgggtctgtcagccaagcagtttggctacattatatacgggcttccggaccacaagaagtacgattccttcgaaatacttaaaagtaacggagatcttcgaactatacacgcacctaagaagagcctgaaattcctgcagaaacaattcgcttctatattcctccagtcaattttggacattcagaaacagaaccatcattatttgcgttgtaaccacgccttcgagaagaataaatcaatcatctcgaatgcccgccatcaccagaaaaagaagttccttctgaacattgacatttccgattttttcggaagtatccattacggtcggatcaagaactttctcatcaacgacaaatactttagtatgactgagaaaggggcctctattatcgccaaactcgcagtgtatcagggtaaactgccacagggcagtcctctcagtcctatattagcaacactgattgggaatctgattgatgttaggctgactcagatcgctaagaagtatcgactgacatataccagatacgctgacgacatcagcttttcttccaattttcccctgcctgagaaactggtttattgggacgactcacaacaaatctgggtagccggtaagatcttagagaaggtgattctgaagaccggctttctaatcaatcccaaaaaaacccgctataccacaattccatttagacagctcgtcaccgggattgtggttaacatccatacaaattctccgtccccatataagaaacaaaatagggcaatggtgaattccctactgaaaaccggcaaattctatatcgagaagaatggcatccagacgaaaggaaccctcaatcagttaattgggcggttgaatcatactatctacgcgaagtatcacaaacccacaaccgacatcaagcttgaccaggaggaaagggagaagtttaaagaggaaaacaggaactacatcatcgagattctcagcaaaaaatggcacaagggcaagtccagctactcagaagccgatcaccaaaccaagctgctaaggaacgtgcttttttacaagtactttaatagcctggacaagacaaagatctttacagagggtgtaaccgatagcatatatttccagatcgccgctgaaaaattcaacctcaaagacgacctttcttttcaaaagacgaacatatcactgaagaaactagggctgaagggcggcgtccccactattaagagcttcttcaagaacataaaggacaacaactttatcaacttgaagcagttcaagactaactccgagtatcccgcgatctttattctggattatgatcagggactcgatggatgtccagagatcattgagaagttctctaacgggcgccagtactgtcacataactagaaacatatacgtgctgttgctcaaaccttacaacggcaaaggggactataagaaaaacaagatctgcatcgaaaacctgattagatatgaaggcggacaaattgaagtcgatggagccaaaaatgaaaatgtgtgctggaataattcgctgattagcaaaatggctttcagcaagtacatttccaatcacaaaacggactttgatttcaccgaattcaagaagatcttcaatctcattcaggatatcgaacgggattacttccgtcggctgacacaggcacaagctcaggatgagtggtga

SEQ ID NO: 8651 - RNA, 1776 nt, synthetic construct
  source 1..1776: mol_type = other RNA
atgttcaatcatctgattaagctgaagttatgtaacaatgggatcgatgtggtcaacaacttccacaactatcttggtattagcgtgaaagatttttggtatatcgcctattctcttaaccatttcagtcagttcacaagctttactattctgaaggcgtcaggaggcgaacggacaatactaattccgccacaacccctcaaggatctccagaagaaatttgccacaatcctaaacttctgcatcagggaaattcagcaagagaatccaaactacttaatctgcaatcatgcattcgagattaaaaagtcaatcctgactaacgctcagatccataggaacaaaagatacgtcctgaacattgatctcagcgatttcttcggctccattcattatggccgcatctccaatttttttaaggccgataagtacttcagacttaatgacaaggtggctaaaacactggctcaattggcctgttttcgcgacgagaataacaaaacatttctccctcaggggagccctctctcacctatcatagccagtctgattggaaacctgctggacatacgcttggttaagataagtaaggagtataagctgacttactcccgatatgcagacgacttgaccttttcctcaaacaagcccattcctgaagacctggtgcggtggaattccgaaaatttcatttgggaggctggagatagattgcggagagtgatcgaagattcaggctttaaaatcaacgataagaagacccgtttattttccgcaaagaagcggcagacggtgacgggaattaccgtcaataagacgctgaatatatccgaatattaccagaagcacaatcgagctatgctttattccctgttcacctctgggaaattcctgatcggagataaagagggtaccattaaccagttaatcggtagactgaattatgtcgcttctgtaaaatacctcaaacagcatcacgacatgagcattcaagagtgggaggaggagcgaaagaaattcgcctacttgtgcgcgggcaattttgacaacaaagagaactctaataggagcatccgcctcttgaggcaagccatattctacaagtacttcattggcaataacaaaccgatcatttttcccgaaggcatcactgattctatttacttcaagctcgccaataaaatactgaatcccaatgaacacaaggaaaactacatcattcagtctattaacagcgagcttactaaaattagcctaggaggtggcaccgcactgatcaatagttttctactccacgcatacaaagactacttcatcaacctgaaaaatctgaagataaagtcgaaacacccagtcatcttcgttctggactacgaccaggggctcgacgtgaaggacaagaacgagaagtcaaaaaataacatccccgagacacatcatatgaaggacgggcagcagtgggtgcacatcagagagaatatctatctcgtactgttgaggcctttagctcttgaaaacaaaaagccaactttccggaatgcgcttgaaatgacctgtgttgagaacctgctgagtcacgtatcgatagggaaaatcaaggtggatgatgaaaaccacgaaaacatcaaatttcgcaataggagctatccaaagaccgtgtttgccaaatatgttgccaagcgttctacacactttgacttttccgagttcaaaaaaatcttcgagatcattgacgagataaagaagcacttttaccagaacagtatctctatttga

SEQ ID NO: 8652 - RNA, 1860 nt, synthetic construct
  source 1..1860: mol_type = other RNA
atgaaggagaaactgtccaagttgaagaaatgtaccaccaggatcgacttcttaaacatattatttcctggggaagggagcaaaaacgaatacttgaaggtgatcttctccgtgcctgatgagaagaaatatagcacctttaagatccccaaaaagtctggaggcacccgtgaaattctcgcccccaaagaggacctcaaaaagatccagaagaaactcggggattttttgagcgattgttaccaggaactttacggagacaaaaataattactccaacgcttacctgaaggagaagtctattatcaccaatgccaaaaagcatcgtaacaagcgctacgttctcaacatcgacctggagaatttttttccctcaattacctttggccgggttcggaactacttcatcaagaacaagtattttgagcttacagaggaaatcgcgactctgattgctaagattgcatgctacaaaggcatcctcccacaaggttctccatgctcaccaattatcagcaatttcatttgccaaatcctggacatccgattaggaaagctggcaagcaaaaataagtgtcactattctcggtatgccgacgatataacctttagtacgaacctcatgatgtttcccgaaaacatcgcccactggaatggcgacaagatcatagtgggccaggaactaggctccgaagtgacccgggctggattcaattgccaacattcaaagacaaggatctacggaaaagacaaaaggcaagaggtgacaagtctcactgttaatagaaaagtcaatgtgtcaaggaagtattttgattccactaaagcaatggccagaaagtactatctcacagggacatgtgagataaacgggcaggaggccacttacaagcaaattctgggccgctttaactacattaatcagctggagaagtacaacaacaagatttttttcaagcagaacgaggctaaggaacccgaaaacatttttacccccgccaatgaaaaaccactggaaaccaatcagaaagatagtgtgatcgcaccagtacagctaacttacaattctaagtaccacaccttcgcagtcaatggctccaaagagaaggagttagggaaatatggttacaaggttggatacgattatctctccgcgcgcgaacaggcatactcgaagttcctttattatagtacgttcatagctaaccagaaacctattattttgactgaggggaagacagatatattgtatctgaaagccgcgatcaaaaacctctatttggagttccctaatcttgtggagaaagtgcaggataagttcaacttcaagatcagtttctacaactattccaaacttaacaggtacctgctgaacatcattccgagcggtgggggaatcctgagagtcctgtctccgcagtatttatttccctctgactcactgatcagtaaacatcctacaattctgctgctggacaatgaggaaaagaagggtaagccactggctagacttctgggcaatggaaagcttaagaaggagattgtcaaaaaagatttcgccagcctggacaaaactaaaatcacgctaaaagagtcagatgagctgttcaatcgagtcaagggcgtggataagttttttctcttgactattccgcggatcgagtctgataaggagtccgacattgaaaacctgtttacagaggatttcataaaggagcaggaattcgacaaagaaagcaaaggtgctaaaaacgagctgtcgaaaattgtaagccgcgactataagaagatagacttcaccaatttcaagcctcttctcgaaaatctaacaaacataatccgcgccaacgacaataaatga

SEQ ID NO: 8653 - RNA, 1353 nt, synthetic construct
  source 1..1353: mol_type = other RNA
atgcctattgcacctcagcttaccatcgtgaaaaacaagacgaaaacaatgagcaagaacaacaagctgtctgagcttaagagcgcaaaaaacattacagacttggccaagatcatcagtgtgccacgacagtctataacatacgtgttgtatggcatcaacaggctcaacctggcaaagtaccacacctttaaaatacccaagaaggacggatcagaaagaaccatcaatgcccccgtcaaagagctaaaagacatacaaaaaaaggtgtctagccttctgcaggagtgtttccgtatcgtctgcattctggaaggtcacaggaaccatctgaaaaagattaattccctgtcacacgggtttatcaaagggaagtcgatcattactaacgccacacctcacaaaaataagcggtttgttctcaatgtcgatttgaaagatttctttggccagatccactacggacgggtctacgggtttttcaaaaataacaagcacttccagctgtccgatgaagtggccaaggtgctggccaacatcacgtgttaccagcagggcttacctcagggcgcgccaacgagtccggtaatcagcaatctgatcgccgggattctcgatatcaaattggctagcctggctaaaaagtacagctgctactatacccgctatgctgacgaccttacattctccacaaatttgaaggagtttcccccccgtatcgcttctatcgaaaatggtgacgtaaggattggcagttctctcgaaggaataattaaaaaatgcggcttcgacatcaaccataaaaagaacagactccaattctgcaatagtcgacaggacgttaccggtatagtggtcaacaagaaagtgaatgttccctatgattatcgcaataaggctagggtgatctggcacaagttaaagaatggcaaggagatatatgcaattaactctcagccagagataaagaaggacatcaactatctgattggaattctctcccacatccataatgtgcggcgcgagcatagagtgactactaaagaggagtacattattccaaagaaaccgaacaagaagacttttgatgacatctttgatgcggattcacgcatgtacagggacgttctgttcttcaagaatttcgtgaagaacaagaaaccagttatagtctgtgaagggaaaaccgatattacctacttacaatgtgccctggaatcacaggccgcaaaacatagatcgctgattatcaagaaagagctccaaattagcttttttcggcctacaaaaactatctccgaactattcaaggtaactgggggaaccggcgatattggaaatcttatctcctga

SEQ ID NO: 8654 - RNA, 1731 nt, synthetic construct
  source 1..1731: mol_type = other RNA
atgtctaagaataacaagttgtccttacttaagtcagctaacaatacaaaggatctcgcagaagtgctctcggttccatttcaggcgataacttacgctatctatggcatcaataggctgcgcctgcctaaatacacgacttttaccataccaaagaaagatggcaccgcacgccggatcaatgtccctgtgaaggaccttaaggacatccagaagaaagtggccgcgttattgcaagaatgcttcaggattatttgtatcctcgaaggccacagagatcatgacaaagagatcacaagcatttcgcatggcttcatcaagggaaagtctattattaccaatgccatccctcataagaatagccggtatgtgttaaatctcgatctgaaggacttttttggtcaaattcacttcggaagagtctacgggttcttcaagaataacaaacactttgagcttgaggatgaggtggctaaggcactggccaacatttgctgttaccagtctggcctgccacagggggcacctacaagtccgatcgtgtcaaatttgattgccggaatcctggacatccgcttagcaagcttggctaaaaaacacagctgcttttatactcggtacgcggatgacctgacattttctacaaatctgaaagaattccccaaagaactggctattttcgagaacggaaatgtgacgattgggacaagtctgaacaaagtgatagacaagtgtgggtttgaagttaatgtcaaaaagaacaggcttcagttctgtgactcacggcaggacgtgaccgggctaatcgtcaacaagaaggtcaacgttccctcagattaccggaaccgagcccgagtaatctggcacaaaatgaaatccggaaaggagatatatgccataaacgccaaacctgagaagaaagagaacatcaactatgtaaccggcattctgggccatatacataatgttcgtcgcgagcatagaatcactaccgccacggaatacgtaatcccgaaaaagccaaccaaggccctgatggactccatcttcgacgcagattctaggatgtacagagacatgctgttttttaagaacttcgtgtccggcaaaaagcccctgattgtgtgcgaagggaagaccgatatcgtatacctgaaatgcgctcttcacagtcaagctgcgaaacaccgatcactcattctgagtaaagagttgaaggtggattttttcagaccaagtaagaccatcggagagctgttccgtgtgactggtggtactggggacattggcaatctcatttctaattactcaagctactgtgatgagtttaaaaggttcagtctcccccagcccgtcataatactcattgataacgattccggagcaccaagcgttcgcagcctggtttcccagatcacaaaatctaagtttgataacacagacaccttcacccacattatcaagaacctatacattctacagactcctctggtcatgggcggcgatagcgccatcgaagacttctttgacgctaagactttgaacgaaaagcttggaaagaagtccttttcctataagggtaatttcgattcttcaaagcactatggtaaaaatcacttcgccgagtatgtggtcaaagtgaagaaaaacagcatcgagttcaaagggtttaacgtgctcttcgactccataaaagccattatcaaggactataaaagcaagccccattga

SEQ ID NO: 8655 - RNA, 1734 nt, synthetic construct
  source 1..1734: mol_type = other RNA
atgtccaccaattccaagctgaaagaactgcaggaagcaagatccctcgaagacctagcgtcgatcttgtccactcctctgcagctgctcacttatgtgttacacggcagacaccatcacgggcttgtgaactacaagagcttcaacattataaagaagagtggagggattaggacaatcaatgctcctatcgatgaactcaaatccattcagaagaaacttagtactgtcctgcaggattgccagaaaacaatcaacattctggagggacaccggacacacgataaaaagctcgttactatagcacatgggtttataaagggaaagtccattatcaccaacgctgagccccacagaaaccggaaatttgtgctcaatatcgatcttcaggattttttcgacagtattcattacggtcgcatttatggcttcctggtgaacaataagcacttcaaactgaacgagaatatagctagagctattacgaacctagcctgtcacgacggtaaactgccacaaggagcaccaaccagccccataatcagcaatttaattgcgggcattctggatattcgcctcgcagctttggcctataaacacaaattacattacacccgttacgctgatgacatcactctgtcaactaacctgaacgaatttccctcaagcattgcttacatagataatgcccacgtcgttattggtaataaactcaggacatcaatcgagaaacagggtttctcgatcaaccctcagaagagcaggctccagtttaagaatagccgccaagacgtgaccggcctgatcgttaataagaagattaacgtgaagaacgagtataggaatcgagcccgggtgctgtggaacaagatccaaaatgggaaggaaatatatgccatcggatctgagcccgagaaaaccaagaacataaattacctggtaggcgtgttgagttatatttatcatgtgcgcaactctaatctcgttcgtaatggaattccttccattacacacaagaaaccaacaaaaaaagagatcgactctaccctcgatgccaatgcccgcatgtatcgggacgtccttttcttcaagtatttcatcgccaacaaaaaacccattattatctgtgagggcaagacagacatcatttatataagatctgccttgctgtctcttgcacgaaagcaccggtcattaatcgacaagaaggaagccaagatcgactttctgagggtaagtaagacgattaaggaattgttcaagatctcaggcggcaccggcgacatagggaatctaatttccaattactcaagctactgcgaacattttaaacggttttctcccatggcacctgtcatcatccttatcgacaatgactccggggcagccccattgcgatccctaatcaaggagatcaccaaaaccccgttcaagaaagaagacgactacaaatacataatcaacaacctgtacatcatccagactccatcaattgatgggaaagatagcgctatcgaggaccttttcgataagaagatactgcaaacaaagctggatggcaaatcttttatccataaacagagcacgttcgatatcaagaagcattacggaaaaaaccattttgcggagtatgtcgtgagacaacaccagaaagagattgattttagtaggtttaacctgttgttcgactctatcaagaagattatcaaggactacaaaagcaagccgcattga

SEQ ID NO: 8656 - RNA, 1734 nt, synthetic construct
  source 1..1734: mol_type = other RNA
atgagtaccaataataagttgaaagagcttcaagacgcgaaaaccctggaggacttggcgaccctactagccatacccctgcagatgctgacatacgtactgcacgggagatacaaattgaagctcgagaattataggagcttcactttaacgaaaaagaacggcggagaacgactcattaatgcccccattaacgaactgaaaactatccagcggaagttaagcattctactgcaggactgccagaggattatctccatcttagagggacacaggacacatcaaaaggagataaagtctattgctcacggattcatcaaaggtaaatccatcatctccaacgctactcctcaccggaataagaagtttgtgctgaatacagacttacaagatttcttcggctccatacactatggccgggtttatggcttcttcctcactaacaaacattttcagctgaacgaggacgtcgctcgggccatcgctaatctggcatgtcacgagggaaaacttccccaaggcgcacctaccagccctgtgatttcaaacctgatagccgggattctcgacatcaaattgtccacgctcgcatacaagcacaaactctattatacacgatatgcggatgatcttactttttctactaaccagaaggaattcccatcaagtatcgcttacgaggaagaggggattgtggtcataggtcacgccctgaatagtatcatccagaaacatggcttcgagattaatgcatcaaagaacaggcttcagtataagaattcccgccaggatgttactgggctgatcgtgaacaccaagattaatgtcaagaatgaataccgcaaccgagtgcgtgtgctttggcacaagatccagaatggcaaagagatccatgccattcaaggagacaaggacgacaaaaagaatattaactatctggtgggtgttctctcttatatctaccaggtgaggaagtccaataaaaccaggacaaacaccattaccaatctggggaaaaaaccacagaaaaaggagatcgattcaattctcgacgctgatgaaagaatgtatagagatgtgctcgtattcaagaatttcattactaacgccaagcctctgattatttgtgagggtaagaccgatataacatacctgcgtagcgcactgctgtctttgagcaacaagcatcggtctttgatagaaaaaaaagagatcaaggtcgatttcttgagaatcacagcaacaattcaggagcttttcaaaatatcgggaggcacaggcgacatcggaaacttaatatcgaattacagctcttactgcgatcattttaagcgctttaccccagcttcaccggtaataatcctgatcgataatgactccggggccgctccactgagaagcctgattaaggagatcacaaagacgccgtttactcgcgaaaccgaatacgcccacatcatcaacaacctttacatcattcagacccccctgatcgacggtaaagatagtgccatcgaggacctcttcgaatctaaaacactgaacaccaaactagaagggaagacgtttgtctacaacaaggcaaattttgataccaagaaacattacgggaaaaaccattttgccgaatatgtgattcgccagagtagaaaggacatcaactttaacggctttaaccccctctttgaaagcgttaaaaagattatcaaggaccacaagaagaagcctcactga

SEQ ID NO: 8657 - RNA, 1737 nt, synthetic construct
  source 1..1737: mol_type = other RNA
atgtcacattccgataaattgtcgaaattgaagaatgcgaagaccctgcaggacctggcagacgtgattaatgtgccactgcagtcccttacctacgcccttcacggtatgcataggctggggattaataagtacaactcgtttccaatacctaaaaaatctgggggggtcaggatcatcaatagccccgttaaggagctgaaagacgtacagaagaaactgagccaaacactctatgattgttacaacgagatgctgatcgtcagtggttatcgggggctggacaaaaagggaattaccatttcccatgggttcattaagaacaagtccatcataacaaacgcagagtgccacagaaatcggaggttcatacttaaccttgacctcgaagattttttcggctctattcattatggccgcgtctatggattttttaagacgaacaagcacttcggcctgcacgatttaatagctcatgcactcgcaaatcttgtatgttacacccacggactgcctcaaggtgcgccgacttcccccttggcgtctaattttattgctcatatcctggacatccgattggccagcctttctaagaaacacggcctatattatacacggtatgccgacgacctcacatttagcacaaacaagaagatttttccagcagatattgcctatctcgaggctggcaaaacggtgatcggatttgagctgaacaagattatcaacaaacacgggttctctgtgaacagcgccaagactcggctgcagtttaacgattcacgccaggatgtcacaggcctaatcgtgaacaaaaaagtgaatattcggaaagagtacgtaagggccgccaggatactcgcaaataagctcttcaacaacaaggtgatttatcgcatcgagtccaagaagactgaagatgacatctgcgacataaattacttaataggcgtgatggctttcatttacaatgttcgccaatcacagctgattcgtgtgagtggtgacaagagtgccgaactgaaaaatttcactaagaaggacatcgacagcagtctcgacgctaatgcccgactctacagagatctcatcttcttcaaaaagtttatcgtgtcagacgaaccactcattatctgtgagggcaaaacggacgtgatctacctgcgtactgccatgttgtctcttagcgctaagcataggtctttggttaccaaggggcgtgttaacgtcgcttttctgaaccatacccagactatcaaggagttattcaaaatacgaggcggaaccggagatctcggcaacctgatcagcaactactcttcatattgcggaaagttcgccagatttaaacccaaaagccctgtgattatcattatggataacgatagtggtgcccccaaaataagaagtttagtcaaagctatcaccggaaaagtatacgacaagaatgacgggttcagacacctgacaaacaatctgtacctaatccagactcctcctctggcaggaggcgcggattcagctatcgaggatctattcgacaagaagaccttagacgttagattgtccaataagaagttttcctacaaaggtgaattcattaagtccaaacactacgggaagaaccacttcgccgaatatgtcgtgaaaccgcgccggaaagatatcgattttaatggcttcaatcccctgctggatgaaatcaaggcagtgattaagcactacaaaaaaagctga

SEQ ID NO: 8658 - RNA, 1767 nt, synthetic construct
  source 1..1767: mol_type = other RNA
atgagctcagctgacaagtttctgaaactaaaacaagccacaaccttaagtgagctcgcagagatactgggttacaagcataactccctgagttacatcttatacggaaagtttcgacttggcctatccaattactccacattctccattcccaaaaaaaatggtggctatcggactatctcatcccctgccccagagctgatggagctgcagaggagagtatccgacctgctgcacgattgctttgtgcagatccagattattaacggattccgctatcgaaacaagaatatcaagacgatctcacacggcttcatgcggggaaaatcaatcgtgactaatgctgaaacgcataaaaagaagaagttcgtgttgaacattgatattgagaacttcttcgattctatccattttggccgtatttacggctactttctgagtaataagaacttcgaactgaacccgaccatcgccaaaatcctggccaacatcgtttgccacaacggaagcctaccccagggtgcccctacatcgccaatcatctcaaacttggtcgctcacattttggacattaagctcgcaaagatagcacaagagaattcctgtcagtatacgcgctacgtagacgacctgactttttccactaacaaaaatatcttccccattggcctgggcacaattgatgaaaagcacgactgtaagataaatgaaaaactcatcggcctgattaaacatagcggctttaccatcaacaataaaaaaacacgggtgcagtataaggatagccggcaggaggtcaccgggctgatagtcaataagaaggtcaatgttaagtctgagtacaggaataaagccaggattctggtgaataagttgtattcgaataaggaggtgtataagataaactctaccactaacgaacctgcaacaatagagtacatccagggggtgctcaactacatatatcaagtacgtctgcacaatagtattaagcataccgaaaacattctggagagtcagcgcaaaaaatgtgtttccaaggaacaaatcgataccaccttagatgctgacgccagaatgtacagggacttccttttcttcaagaacttcgtgatcaacaattctccccttataatatgtgaagggaaaaccgacgtgatttatctccgcgctgccattagtgtgttgtctaaagaatttccaaaccttagcaatagtgataatggacaccaactgagcttctttaacaataccaatacaacatcacagctgttcaaaatcaacgggggtactggagacttaagaaacctcattagcaactacaagaagtactttacaaagtttgagagattcacacccgagtctccggtcataattcttatcgacaatgatagcgggtccgcgacaatcagaagcattctcaaagaagttacgaaaaaggagttcaccaaaaaagataacttcattcacatcgagaagaatctgtatgtcatgcagaccccactccagaagaatcagactgagtcagagatggaagacttttttactaaggaaactttgtctctcaagctcaagaataaatctttttgctacaagggagaattcaacaaaaatagccattacgggaagaatcactttgcggagtatgttatcaaacctcagaagaaaaccatcaactttagcaacttcaaggtgatttttgacatcattaaccttatctgcgatgattataagcagaagatcaaaaaccccatcaaaaccaggtga

SEQ ID NO: 8659 - RNA, 1956 nt, synthetic construct
  source 1..1956: mol_type = other RNA
atgtcttggttttgccagagtattggatcatcctttgttaccttcttctcacagaaactgtttaataagctggaactcttactgcaatcttttcagagcttttctcagctcttgacaggaattaagaacatgagtgaaaatgatctggaaagactgaggaattgtaaggacttacaggattttagcaagcttatcggttacaagaaaacgaagaaccttagctacattatttacaagatcccggagaatctgaggtacaacgagttcaagattaagaagaaaaactccgagtttcggatcatccacgccccagtggagaaactcaagaccgtacaatcacggctttccagtctgttacagaattgttatgacctcataagcgttgatctgaaatccaaggaaatcctttcccacggctttatccgtggaaggagcataatcaccaatgccttgatccacaagaataaacgcttcgtcttcaatattgacattgagaacttctttggaagcataaatttcggcagagtgagagggttctttatcaaaaacaggtatttcaagctgaacgagaatatcgctaccattattgcaaaaattgcctgccataataacagtctgcctcagggttcaccttgctccccaataataagcaatctaatcgcgtctattctggatatctaccttttcaagctctgtaagaaatacaaactctattactcccggtatgtggacgatttgacgatatcgactaatctgaactattttcctgagaacatagcttacaaaaacccaagttcaaaaaacgagtgggtcattggcaatgaattgacgaaaatttttgagcgcgttaacttcaaattcaacttcaagaagactcgaatgcagttaaagaattctcgccaagaagtcactgggttaatagtgaataagaaagtgaacgtgaagtatgagtataaaaagaaggtgcgggctatgatacataacctgttcatgaatgggaagattttcatcaagaaagaggacaaagagaaaaatgtcgaggtcgagaaaaaaattaacagcctccatggaatgattcaatttatcgggcatatcatagagtatcagctggaaacttttaatctgtctaaggtggacaaaaagaacgagaatgcaatttctaacatgaattactggctgaagatgtacgaaaatttcatcatctacaagtacttctacggcatcaaggctcccacaatcatcaccgaaggaaagacagataccatataccttaaatgcgcaatcgagaggttgaactttcaattctgtaccaattctttctccagcctgagtaaagcgatctgtttccacccacacacccaccgaaataacttccagaacaagatcaagaacaaagacaactacaagaaaagctttgataagaagctgaaaagaaagcccgtgtttcttggcgggaatagtggcgccacatttctcatgaagaactatatccccaacaacaaactatttaagaacgcagacaagattctgtctgcccccctcatctatattattgataacgatgaaagcggcaaaaaatcactaaacaacttcctgtccaacaaaaaattcattaaccaccgcctcaatgacaatacctgctttgtgggcctcaacctatatatcattaagttgcctcagataagctcggaaaacaatgattacgaaatcgaagactacttcgacacagatacattgagctctattattgacgggaagtcatttaacaaatcaaacgattccttcgacatcaaagacgtttactttggtaaaatggatttcgccctgaagatcatcaagaacaataagaacaacatcgacttttccaagttcaataaactgctggacgagatcaactttgtaattcaggatttctacaacaacaagcgtcatcagaatagtctcgtatccaattga

SEQ ID NO: 8660 - RNA, 1674 nt, synthetic construct
  source 1..1674: mol_type = other RNA
atgttcctgattttcgagaatatgtataagaaggaagagattgaacgggccgtcaaaaagttagaggaactggttaactgcaaatctaagaaagacttttcagattggctagatatcagactcaaaaccatctactacatcttactcattaacaaggaacctctctataacgagttcactatcccaaaaaaaaacggaagtatgagaaacatctccgcgcctaatgagcacctgaaacggatccagcacaatcttaagaagaatttggacatgtgttacatagccataactcacaacaatttcaacaaacggctggctcatggctttattaggaagaagagcatcattaccaattcacagtatcacaagaataagcgatacgttctcaacatcgacttaaaagattttttcccctccatcaatttcggaagggtgcgcgggttcttcatcaaaaataaatacttccagctgaacgaagatattgctactttgatcgcacaaattgcctgccataataatcagctcccccaagggtcaccgtgtagcccaatcattagtaatctgctggccctgtctctagataaataccttttctccctgagtaaaaagtaccgctttacatataccaggtatgctgatgatattacaataagcaccaatctgagagaatttcccaagggtattgcatatttcgatgaatatgaggagaaatggtttttgggaaacaagattatcgaggtcattaacaacaaccatttcgacataaacttcgaaaagatccgtatgcaatacaaaacgagcagacaggaggtaactggcctcattaccaataagaaggtgaacatcaaaaggtcttatataagagcaacccgagccatgctagatcaccttgtgttatacccctccagtgacgattatattagcaggcgaaaaatcgtggaagggcgtatagcctttatccaccaaattcggaagatcaatattgaaaacaaccgcgacctgtcccttaagatgcttgagaatttcttttgcttcgacaatttcatcaacaacaacaatatcacgatcctcgtggaagggattacagataagatttacatcaagagcgcattcaagtatttcaagtccgagtataagttcaagctgaaaatcataaccaagaatcctttttctcgcactaattctcagaagaacagtggagagggctccctgaatcagctcttgtctcggtttaaggagacaaaattcctggacagaattaacatgtttcttaaacgcagcaaactcgtcaagcccaagaatccaatcatcattatattcgacagggataacaaaaagttcgtgaatgactttgagcagaagaatgcgcagtacttgtttctggagcctaacgtttattatttccctataccagaactccccgacaagaaatacatcagcatcgagtactacttttcagacgaggtactgaatacaccgtttaaaggccataagctggaattggatattcagaacaaggacaagaagatcttctacaaaattggcgagaaaggtctgtcgaaaaacaaatttgccattcatatagtgcggaaactggctgaatcagagttcatcaatttcaagaagatcttcgacatcataaacgagatcaacattgactacaagaacaaatga

SEQ ID NO: 8661 - RNA, 1692 nt, synthetic construct
  source 1..1692: mol_type = other RNA
atggacaccttagacaagctcaaaaattgcaaaagtaagtttggcctgtcgaagattattgggatcaaactcaagaaaatcacatacatcctctttgtcaagaaatataacctatacacagagtttcagatccccaaaaataacggaaaattccgaaacattagcgcccctaacaagtacttgaaaatcatccagaagaaactgaaaaaggtgctagaagagtgctacaatgagattcagttaaataagaacgcttcacatggtttcctcaaaaagaaaagcatttacacgaatagcaacttccataagaataaaaggtacgtgctgaatatagatctgaaagacttctttccaagtattaactttggtagggttcggggcttcttcataaagaacaagaatttccagttgaacgaagaggtggccaccctgattgctcagattagttgttataacaatcagttaccccagggcagcccatcctcacccattatttccaatttgatcgctatatctctggacaaaggactgtcaattctctccaagaagtacaagttcaactatactagatacgcggatgacattactatctccaccaacctgaagaatttccctatagcaatcgcatataaagacgatgatggcaattggaagcttggcagcgaaatcattaagatgatcaacaacaaccacttcgacattaattttgacaaagttcggatgcagtataagtcatctcgccaagaggtgacagggctaattgtcaataagaaggtaaacgtgaagaggaattatatacgcaaaacccggctgatgctgtacaatctgatcaaaaatccaaattccgacgattatcagagtattcgtaactgtatagaagggaggatagccttcatataccaaattcgcaagatgaacttcgaaaataacaaacgggatatcgccaagaaaatgaaagacatgttcttctacttcgataagatcattaacaaccagaagataaccatcataacagagggaaaaaccgataaggtctatctgtcttcagcctatagccactttaaggaatactataagcttaacttccagatcatcacaaaaataccgtatacgaagcatgacagcaataatattaacaacacgggtgatcaaactttgatgaatttcgtgaaagaactgaaggagaagaacaatatcaaaccttataagtacctcctggaaaagtctaaaatcaaaaacccgaagaatccagtgatcgttattttcgacagagatagaatcaacatcatcaaagaattcgagaagaatatcaagaacgagaactgtaaattcgtgttctttgaacccaatatctactatttcgtactgcctaaacttatcggaaaggagtatcttagcattgagtactatttccccaataaaatcctgaacaagaaaatcaaaggcaaaaacttgtctctgtgccaagagaagcacaagaaacacatcatttacaagattgacgagaataacgatgggctctctaagaacgagttctccaaatacatcaaaaagcttcgatacaataccaagagagataacattctcaatgagaagaacaagaagtacttcgataatttcaagtccatattcgacatcatcaatgacattcgtaaagactacaagaacaagttgcagaatatcaacaaatga

SEQ ID NO: 8662 - RNA, 1737 nt, synthetic construct
  source 1..1737: mol_type = other RNA
atgatactggaaaaactgcagaattgccaggataaaaaagacctggcccttctgcttaaatgtgatcttcaaaacctgtcaagaatactcttcaaagacttcaacaacaactactccatcttctttattgacaagaaagacggtggcaaacgagaaattttagctcccaagaaggatttgaagatcatccagaaaaaactctctaagatcctagaggaatgttatattgagatttccgagaagaacaacaagatcaacttcaactcgataaatggatttatcacaggcaaatcaatcatcactaacgcaaaaaagcataccaataaaaggtacgtgttgaatatagatctgaaggacttctttccaagtattacatttaaccggattgtggggtttctgaagaagaataagtactttaagctcgaacatgacgttgcgatgttgattgcccaaattgcctgtcacaaaggtagtctcccgcaagggagcccttctagccccatcatatccaatctgatcatgctgtctcttgacaaagagataaatattctcgcaaagaaacacggcttgacctatagccgttatgctgatgacatcacgctctctactaataagaagaattttcccaacgagatagctagtggaaacggaattgagtggaatatccataaaaaactggaaacgctgatcaacaactacaaattcaacatcaaccacaaaaagatccgaatgcagtacaaaacctcccggcaggaggtgaccggcatcattgtgaataaaaaggtcaatgtcaacaggaagtatattcgcaatgttaaggcaatgctgaataagagcatcatcaatcattctatggagaattatgagtacttcaagttgtcacttcggggaaaaattgatttcatttatcaggtccgcaaactgtacatggaaaacgataagtctaacgaaaaggatctaatcagcaagattttcaacaacttcctgtactttaaccatttcatcaacaacaacaaggtgactattctgactgaaggaaagaccgacaagatttatatagatactgcctttagtcacttcaaaaacgaatacaactaccagataaacatcctcaaacagtccgacatgtttacaaatatcaccaaactgaatgggattaacaatctggtgaatttcatcaagtcctatgattcgaaaaacggcatcatcaataagctgataaacaagtcaaacatccacattccaaaaaagcccgtaatcataatcattgactccgacgaacctactaaatcaaaagccctcgagttacttgataacaaaaacgggttcatctttaaggaacctaacctatattgctttcagttacctgagatcaaagacaagaagttcttcagcattgagtactattttccagagagaataaggaactatgaaaacaatgggaagaaattaggtgagaataccaaaaacaagtacaacaacaaggagacaatatacaagattgaagacggcggcaacaatttgagcaagtcctacttttctaactacattaagacactcaagcacaaggagattagcgataaaaagaacaaaaccaaggaggatattgacaatatcaagagaattaacgaggtcaataagaattcattcgaagagttcaagaagatctttaacaaaatcgacgagatcattaacgattataagaagatctgcaacagcaaaacaagtgaacaatga

SEQ ID NO: 8663 - RNA, 1674 nt, synthetic construct
  source 1..1674: mol_type = other RNA
atgaatcttgagaaactgaaggagtgcaaatcaaaatatgacttggctaatctcttgaagtattcgctccaaagtctgtcctgtattctctttaaggacatagacagcaattatagcatgttctacatcgacaaaaaggatggcactaaacgcgagatcctcgctcctaacgagaaactgaaaaaggttcagaagaatctcagtaagattctgtgcaagtcatacgaatgcattaataaaaaccccaaagccgtgcacggctttattgagaaaaagtccatcataaccaacgctaagatgcacaaaaacaagagatacgtgttgaacatcgacttgaaggacttttttccatccatcacctttaatcgcatagtcggattctttaagaagaacaaacactttcagctggaacatgaggtggcaatcctgatagcccagatattatgccataagggtaaactgccccaggggagccctagcagccccattatgagtaatctgataatgctgtctctcgataaggaactcaatatcctctctaagaaatatggcctgatttatacacgttatgccgatgatatcacattctcgacaaacaaaaggaaatttcctaaagagatcgcatacagtattaataacgtggattggaatgtcagcaaaatcctggaaaggcttatcaataactaccacttcgaaatcaaccataataaaacccgaatgcagtatcggactagtagacaggagactacagggattgtggttaataaaaaggtcaatgtttccaggacttatattcggaatattagagcgatgctaaataagatgatctgtaattacacgatggatgagtacgatagctttaagtcatctattaaaggacggattgatttcatctatcaggtcagaaaagactatattgatctgaaggacaagaaaaactacgaaaaagacttgattgtgaagctgttcaacaagtacttttacttcgataagttcgtcaacaattctaacgttacgatcctgaccgaaggcaaaaccgacaaggtgtatatagacgtggccttttctcactttaagaacgagtacaactatgacattgatattgtgcgtcattctgacatgtttcttaacatcaccaaactcaacggaatcaagaagttaaaagggttcattgacaattacaaggataagtacaagcaagagatcgtaccactactgaagaagtctaagattgagaattccaagtatccggtggtaattattatagactccgatgaaatcgagtttttaaagcagctgaaactatttgacgacaagtacaaccttaagaacaagtacatcttcaaaaagccaaatctttactgtttccacttaccccagttggacgacaaagaattcttcagcattgagtattacttccaggagaacataaggaacaaatatatcaacggtaagcgcctgcgcgatatcatcgagaaggagaatatatacaagattgatgacaagtcccttactaagtcaaaattctcacaatacatccgaaaactgaggtacgataatgaaaaaaagacagacatcaacagcaacaacaagaagatattctccgaattcaaaaagatcttcgatctgatcgacgaaatcctcaaagattataacacccggatccaaaaatga

SEQ ID NO: 8664 - RNA, 1698 nt, synthetic construct
  source 1..1698: mol_type = other RNA
atgtacggactgcatggtgggcccaacggccagtataccgactttactatcaaaaagcggaacggcaccgaccgcaacataagcgctccaaccacagctctgaaagctatccaaagatctctggcaattaggctgagcggagtctacgagcctaagaaagcagcctatggatacatcaaaaagtccgacaacaaccaagacaaaactgtgtttggaaacgctttggtgcacagcaaaaaaaggtacgtgttcaacgtcgacctcaaagatttctttccatccatccacttcggtagagtcatggggctgttccgttctaatccttataagctggacaggtccattgccatattaattgcaaagattgcctgctacaatgattttctgccccagggcagtccttgcagtcccatcatctctaacatgatttgcagtcatatggatcgagatctcagcgacctcgccaaaaattacaggtgctactatacaaggtacgtcgatgacatcacattttccacaaacgtgaaagactttcctgaggatattgctttctttgatggcatctggaatccgggagaaggtctggtagagatcattgacgaccacggttttaagattaacggcgaaaaaacctcactcagaacacaaagtgacaggcagatcgtgacggggttgactgttaatgacttccccaacgtgcgcaaacgatccattaatcaggtgcgggcgatgctgcatgactggaaggtgaatggcctagagctggcctatactaaatacattgagaagtacgatacgagaaataaccagcacgaagaggaggacaagactgtttttgggaagataatcaaaggaaaactggaatggattggatcagtaaaggataagcggttcgagataaatgagaagcataagggcaataaagccaagctaaatcgactcgggtatagcaagaatctgctcgagcggcagagctataagaaatacattgagaggcttaagcacctgaccattaacgaatcagacatggtcactgtgcttggggaagggcagacagattggatgcatcttaagaccgcgtacaaacggctctgttccgatccagaattgtcattccctatctacttctaccctcactcccgcaaggagaaagggggcgaggataacttgtggaccttttgttcaacagcaaaagatcactacgtaacttatcgccacccagtcgtgtgtgtttttgattgtgacctagagagaatcaataataagcacaagggcaagaagttcatcgaccatggcaacaacgttttctctatactgctgcagaagccggaaggctcaatctatgaaaagtatgcaatcgagcagatctatgatctccacgacatgctgaagaccgacgaatatgggcgcagattgtatctttctagcgaattcgatggaaactccgtgcataaaatgaaccccaacattttcagcaagaaaaagacctctaatgacgaaaagatcgtcgataacgaggtgttcttacggaaaaaggacggcacggagaaatcgattgctctttccaagacaaattttgccgttagtatcgccagaggaatacaacccttccgtaccatgaatttttctggttttatgccaaccttcttacgcattaaagaaatctaccagctgcacatatcggatagcagtcattga

SEQ ID NO: 8665 - RNA, 1200 nt, synthetic construct
  source 1..1200: mol_type = other RNA
atgacaagaattaataacctgtcccgatttcagcaaatttccacattgaaccagttagctctgttcctcgggttcaagccaaaggacttttcttacatcctttaccgtctcagtgacggaccaaatgggcagtataccgagttcgccatcaagaagaggaatgggaaagaccgcaccatcgctgcaccacacacagcgctgaagactattcagcggtcactgacatctaaactcgaagggatttatgatcccaaaaaagccgcatacggatatataaaggagactcctcacaataaggataaaactgtcttcggaaacgccctggtgcattcaaagaagcgatacgttttcaatatcgacctgtgtgatttttttcccaccatccatttcggtagagtgatgggcttgttccagtcgaatccgtacaagctcaaacgcaatatcgccatcctgctcgctaaaattgcttgctataatgactgtctcccacagggctctccttgtagtcccatcatttccaacatgatatgctcccacatggacagagaattaagcgacttggcaaaggcttatggttgctattacagccgatatgccgatgatatgaccttttccaccaatataatcgagtttcctagggacatcgcatttagagacgagaactggaagcccggcgaaggcctcatagagatcattgataaaaatgggttcgagatcaactcagaaaaaacgactctgcgcacccaggccgatcggcaaatcgtgacgggcctgattgtgaacgattttcctaacattcggaagaggtctattaatcaggtacgggcaatgctacacgactggaaactgaacggtatggaagccgcttacgagaaattcatcaactaccacgacacacggaatagcgaaaacaaggaagatagcacagaactatttagcatggtggttaggggaaagttggagtggattagaagtgtgaaggataaacgtttcaacatccaggagattcaaaacaaggccaagagtaagcagaatagactgtcatatagctcccgccttcttgagaaacagagctacaaaaagtacttcaaccggtataagcatctgaggataaatgaatctgacatgttaactgtccttggcgagggacaaaccgattggcgccattttaaaaacgcgtacgaggtcctgtacaggtga

SEQ ID NO: 8666 - RNA, 1056 nt, synthetic construct
  source 1..1056: mol_type = other RNA
atggaactgaaactgaatcggactgacgaagagatattagcgcttttcaagagcctcaactctgttgagacagtggcaaacattttggaggtcagtcccaagattctgaattactacactttcaagagcgaaaactatcagaagttcttcatccggaaaaaaaacggtaaaccacgcaccatttactctcccaataccaacattaagattctccagcagaaactcctgtacattttcaacctgctatacaagcccaaccagtacgcttatggctacatcaaggaaagaaatatagtggacaatgccaacaagcacctgaaaaagaaattcatactgaacgtagacctgagtgactattttccgtccattacttaccggagggtgatcggatacctagtcaaaaacttaaagatcgagaataccgccgcacgaatcatcaccaaacttatctgtgtcgaagatgagaagaatacgttccttccacaaggaggcgtgacatctcctttgatctccaactttatctcagagaatctggataaggatctatcctattatctgaagagattcaggtgcgagtatactaggtatgccgacgatctgacaatttcctcggaagatctcaagtttccagataagattgctgtagaggaccagtttcgtcaagtttggcttcataacgatttcgagcgtataatcaagaaaaatggctttgaggtgaattatgagaaaatacggttaagaaagcctaaccagcgacagactgtgaccggtctgattgttaacggatcaaagcctaatgtgaaacgcagctatattcgcaatttgagaagcatcctgtacaattgggaaaccaaggggtacacacacatccaaacggcatacgaattgaagtataggaaattcgacaacgccgaatttaaacccatccctaagatcgagaacgtgattgatgggaagcttaattttttgagcatggtcaaagggaaggacgacgagatctacctcaaactcaaaaagcgctttctgaagctgaaagctacactcgatgacgtctga

SEQ ID NO: 8667 - RNA, 1044 nt, synthetic construct
  source 1..1044: mol_type = other RNA
atgaagctcgaactcgttaaaactaacgaggaaatcatcgagtgtttctattcactgagaaccaaatccgacgtggctgatcttctggagatccccatcgaggtgctgaattattatctgtacatctcctcgaactacacaatttttacgattcctaaaagggatggctctcctcgtgtaatatattcacccatcacaccgatcaaaatcttgcagcgtaagttactctatgtgttcaacctgatttatgaaccagatgacaactctttcggattcatcaaaaaccggtccatcgttcagaacgctgccaggcaccagaataaaaagtacgtcctgaacatcgacttgaaggattactttccgaacattacatttgggcggattcttggctacctcaagaagaatctgatgctgggggacgaggccagcgtgataataactaaactggcctgcgttgagacagaggaaaatacctttctcccccccggctcacccctctctccaattctgagcaatatgatttcaagaaagctggacgtggaaataagcaactttgttaagaagtacgactgcacctatagtaggtacgcagacgacattagcatttccactgatcgcatcgtattccctgaacaagtggccatcagagatctatacggagatatctggttgaacgcgaaattcgtcaaggtgatctccgacaacgacttcaatatcaactacagaaaggtgcgcctccggtctaataagcagaggcaagaagtcaccggtctgattgtgaacggggtgcgcccaaatgtaaagcgcgagtatatccgaaatcttcgagctatgattttcgattgggaaaaaaacggacttgagaatgcacagagcaacttcgagattaattattggaagcctaaagacagtgactttaagcagataccaaggattgagaatgtcatagacggcaaactaaattttctgagtatggtccggggtaaggatgatttattgtaccagaagctgaaaaccaaatacgataagttagtgagcatctga

SEQ ID NO: 8668 - RNA, 1716 nt, synthetic construct
  source 1..1716: mol_type = other RNA
atgaagaataagttcaaacgcctagtagactttgaggatgtggccctcctgctcgagatccctacagagtttctctggaaaattctgatacgggacaagcagattaattataccagcttccctctgggaaagaagtcgggcggctttagaacgatctacagccccagcaagaatctcgcaatactgcaggctaagcttgcatacattctctctctaaatttcaccccccataatcgcgcccacggctttattgaaaaacggagtatcgtgaccaacgctagtgagcacttaaagaaatctttcgtgctgaacattgacctggagaacttcttcgagtcaatatctttcgcgagagtccggaagatgtttatctcctactttaagttgggcgagactgtggcaacgacccttgcaaacatttgtatccacccaggaggttttctgccacagggggccgctaccagtcctatagtcagcaatatcttggccaagtcgctggataaagagctcaagcagctgtctatcgagtccaaaggagttaagtataccaggtatgccgacgatattacattctctaccaacaaacgtgtcttcccgaggtccatcgcctccctgaatgaagatgggcaagtggaactttcagagaggctaatgcagatcatcaagaagaacggattcaacgtgaacggaaagaaagtccgaatgcaagattcaaagaagaatcagagtgttactgggataacagtgaacgagaaactgaacatctccaggacttacattcgcagaattagatctatcctgaattgcatcgaaaaaaacatcgatgacttggacagagccagagaggtttttgagcgcaaatacccgttccgccaacgggccaaggaaaactatcctgaaatgttttccgtgttaagggggatgataaatcacgtggggcatgtcaaagggaaatcagacccagtgtatttgaagctcgctaatcgattcaacgatgtgagccccgagcacaaagtgatcaagtcagttgacaagcaatcatctaagaggaaaatgtacgaggactatacatatgtcattgaacaggaaaatcccgtagttgctttcgcgagcgaacagcggaacgaatttgaacacgtttatcataaccagggaactgggttcctgctgaaaggttttggcctggtgacgaatgctcacgtcttgaaggatctggtggatgctatagaactcgagatggtgatccttgagccatactacgtccgagtgttcaagtccaatgacatcaatgtgcatatgatgcggatcgaatgctatgacatcgaaaaagacatcgcaatacttagaagcaacagtgtcgatcacaacacagaaggctttaactacaacgaactgattcagaaagagcagttaatcgatctggtaggataccctgattaccgccggggccaagagatcagggtcgacaatggttttgttcgtggcattcgaatgcacactgactcctctgacaagacaaccgcccataagcgttatgaaattacccccacaatttacggcggcaatagtggtggccccattgtgaacgagaaaggtgaggtgattgccgtggcggtgaaaggagcaactatgaacggggtagttccaaatgaggtcattcctatctccgaggtaattgagctcgccaaaaggcagttgttcagccatagcctttga

SEQ ID NO: 8669 - RNA, 1656 nt, synthetic construct
  source 1..1656: mol_type = other RNA
atggaaataccaactgagtttctctggaaaatcctaattcgcgataagtccaataactacacatcattccccatttctaagaaaagcggtggataccggacaatacattctccctcctctaatcttgccatcctccagaaaaagctcgcctacgtcctgtcattgcaattcaatccccacaatcgggctcatggttttatcgagaaaaggtccatcgtcacgaacgcatcagagcacctgaagaaaagtttcgtgctgaacattgatctggagaacttcttcgaaagcatctcttttgccagagttcgcaagatgttcgcaagctattttaagttatcaggggtagtcgccacgaccctggcaaatatttgcagtcacccagaaggctttctaccacagggcgcggcaacaagtcctataatttccaacatcattgcgaagtcactggataaggagcttaaacagctgagcgtggagtccaaaggggtgaagtatactaggtacgccgacgacatcaccttctcgacaaataagaaagatttcccgaggaatatcgcttttttgaacgaggactctcacgtggtattgagtgagaagcttttaaggatcatcgagaataacggcttcaatgtcaacgagcagaagattcgcctgcaggatcggcagtccaaccagagtgtaactggcattgttgtaaacgagaaacttaacgttagccggacctacattcggaggatccgctcaatcctcaactgtatcgagaagaataataatgacctggacgcggcccgagaaatttttatcagacggtatcctttccgccaaagagctaaagttaaccagcccgagatgttttccgtactgagaggaatgattaatcatgtgggccatgttaaagggaagagcgatcctgtctacctcaaactggccaaccgattcaactccgtttctcctgagcagaaagtgatcaagtctgtggaaaagcaaataaacaagaggaagatgtacgaggattatactttcgtgattgaacaggaaaagcccgtcgtggcccttgtcagtaaagaatcgaccgaatttgagcacgtgtatcataatcagggaaccggctttttactaaagggtataggaatggtgacaaatgctcacgtcttgaaggatctggtcagcgctatcgagctggagatgttgattccaatcccttactatgttcgtggttttaactccaaggacttcaacgtgcacatgatgcggattgagtgcttcgacaccgaaaaagacatcgtgatcctgcgaagcaagtccctcgatcacaataaagagggattctcttatagtgaggcaatccaaacagaccaactcatagaactggtggggtacccagattacagaaggggtcaggaaatcagagtcgacaacggctttgtgcgcggaataagaatgcacatcaactcaggcgacaaaaccgtgactcataggcgttatgaaatcactccgacgatttacgggggcaatagcggaggaccaattgtaaatgaggtgagcgaagtgattgctgtggccgtgaagggggctaccatgaatggggtggtccccaacgaagtgatacctatctctgaagttattggcctggccaaacgaaacagcctcatatga

SEQ ID NO: 8670 - RNA, 1749 nt, synthetic construct
  source 1..1749: mol_type = other RNA
atgaagcctgtactgctctctacagacgaggaaatcaagaataagttcaagaatctgaccgattttggcgacgtggcccttctttttgagatccccaccgagtttctctggaagatcctgattcgtgataaatggatcaattacgtgtcattcccgcttcataagaaaaacggtgggtaccggaccattcactcccccagcaagaacctggccattctgcagaaaaagctggcctacatcctatccttgaatttcacaccgcataatagggcacatggctttattgagaaacgcagcatcattactaacgccagtgaacacttaaaaaaggctttcgttctgaatatcgatcttgagaattttttcgagagcatttcatttgctcgggttcggaagatgttcatctcatattttaagctctccgaaatagttgcaaccaccctagcgaatatctgtacccacccagacggatttctccctcagggtgccgctacaagtccgataatctccaacatcctggccaagacactagacaaggagctgaaacagctttccatcgaatccaagggtgtcaaatacacgaggtatgccgatgatataactttctcgacgaataaaaagctgttccccaagagcatcgctttcttgaacgaggacgggcaaatagtactgagtgagagattcatgaagattatcacgaagaatggattcaacgtgaacaagaaaaaaatccgacttcaagatagtgaagggaaccagtctgttacaggcattaccgtcaatgagaaactcaacgtgtctcgaaactacatcagacggatcaggtccattctgaattgtatcgagaagaacataaacgatctggactacgctcgggaagtattcgaaagaaagtacccctttcgccagcgtgccaataggatccatcctgaaatgttttctgtgctcagggggatggtgaaccatgtcggccacgtcaaagggactagcgatcctgtttatctcaaattggcaagccgattcaataatgtgtcaccagaacacaaagtgattaaaagcgtggaagagcagagtaacaaacggaaactgtacgaagaatatactttcgtcattgaacaggagaacccagtggtggcgttcccattcaaaggttccatggattttgagtacgtctaccacaatcaaggaaccggttttctcctgaagggaatcgggctcattacaaacgtgcacgttttaaaggacttggtcgatgccattgagttagagatgtatattccccagtcgtattatgtgcgcgtatttaacagtattgacttcaaagagcacatgatgaaaatagaatgctatgacatcgagaaggacatcgctatactgcgcagctctagcctggatcataatgcagagggcttctcctacaacgaattgattcagaaagaccagcctatagacctggtgggatatccagattacagaatgggccaagacatcagagtcgataatggctttgttcgcgggatcagaatgcataacgactcatgcgacaataccgttaagcacaagcgttatgaaataacacctactatctacggcggcaactcaggagggcccgtaattaatgtgaactctgaggtgattgcggtcgccgtcaagggcgcaactatgaacggagtggtgcccaacgaggtcattccaatttctgaggtgatcgagttagctaataggaagttgtttgtgtattctgtgtga

SEQ ID NO: 8671 - RNA, 1770 nt, synthetic construct
  source 1..1770: mol_type = other RNA
atgatatttatttctacacttgtgcgccccctcctgcagtcatctgacgataagatcaagagtaagttcaagacgctgaccgattttgaggacgttgctcttttgttagaaattccagtcgaattcctctggaagattctcatcagagacaagcagattaactataagtcatttccgctggctaagaagaatggcggctatagaaccatttatagtcctagtaagaacctgaccttgctccagaagaagttggcctatatcttgagcctcaattttacaccacacacaagggcctatgggttcatcgagaagcgcagtatcgtgactaatgctagcgaacaccttaaaaaaaactacgtgctgaacattgacctggagaatttctttgagagcattagcttcgcccgggtgcgtaagatgttcatctcctacttcaagttcaacgacactgttagcactacactcgctaatatatgtgtacaccccgacgggatcttacctcaaggggccgcaacctctccgatcatctcgaacattctagccaaatccttagataaggaattactgaggctgagcctggagtcgaaaggcgtgaagtacacaaggtatgcagatgacataaccttctctaccaacaaaaaaactttccccaaagcgatagccctgctgaatgatgacaagcaagtcattctgtcagacaaccttattcagatcatcaaatccaacggctttaacgtcaacgagcggaaaattagactgcaggatagagagggaaatcagagcgtcacaggaatcaccgttaacgagaagctaaatgtgagccgaacctacatacgaagaattcgatccatcctcaactgcatcgagaagaacattaacgatctggactttgcccggtcaatctttgagcgtaaatatccattccggcagcgcgtcaagggaaactaccctgatatgtttctggtcctgcgtgggatgattacgcacgtgggtcacgtgaagggtaaacgggatcctatatacctgaaactcgcgagcaggtttaaccggatctcccctaaaaaaatgataatcaactccgcagagaagcagaacaataagaggaaagcttacgaggactacacatatgtgattgatcaggacgacatcaagtgcgtcttcgatcccaagatggatgatatggtggatctatattacgggcagggaactggggtgttgctaaaaggcattggtgtggtcactaatacgcatgttctcggaaccattattgacgccttggacaacggagccaaacttccctctagttacaggattagagtattcaaacatgactcagaactggcgtgtaccatcacttgttatgatccagagagggacatcgccatactgaccccagatgacattgactgctctgcaataggcctggaatacaatacaagtatcacgaagggacagtccattgatttgatcgggtaccccaattatcgccagggccaagaaattcgcgtagaaaatggatttgtccagggcaaacgaatccataaaggtactaaaggagagtacattcgccatgaaatctcccctaccatctacgctggcaatagcgggggcccagttgtaaacgaaaatgccgaggttatagctatcgcagcaaagggcgcaacagagaatggcgtggtgcccaatgaagtgatcccgatctctgagataatcaaactcgctcaagacaatggtcttctgaatgaaagaatgtcctcagtgcaactttga

SEQ ID NO: 8672 - RNA, 1707 nt, synthetic construct
  source 1..1707: mol_type = other RNA
atgcgtaccgaattgttggccaacgaggacaagattaaacgcaattttcagaacctgaacacctttaatgacatcgctaaccttctggaaatccccgttgagttcctttggaagatattgatcagagatcgggctcactcctaccgcagattcgagctgcgaaagaaaaatggggacccacgcatcatttattcaccaaacaccaatctatctatcctgcagaagaagttcctttatgtgttggaactcaattttaacagccatcagcgagcccacggctttgttaagaaccgggatataatcactaatgccaatgaacacatcaataagaggttcgtgctgaacttcgacctggagaacttcttcgagagtataaacttcaggagggttaggcacatgttcatcagttactttaagctgaacgagacagtcgcttcaactctagctaatctctgttgccatcctgatggcttcctgcctcaaggagcagccacatcaccgatcatttccaacattctgtcaaaaagcatggacaaggaactcacccgcattgcgattaacgtgcgggggtgcaactacacaagatatgctgatgatattaccttttccagcaataagaggatctttcccacacagatcgcaatccaacattctgatggcaacattgaaatcagcgaggaagtgattaaaatcatcaacaagtatggcttcagcataaaagaatctaaaactaggatgagcgattggaaacaacatcagtctgtaaccgggatagttgtgaactctaagctcaacgtaagccgcaaatatgtgcgtaaggtgcggtccatcttgcattcagccgaaaagaacattgataatctggacgtggcggtcgagctgtttaactccaagtataattttcggcagaaaaacaacaacacgtaccctgacatgttcagtatactgagaggcaagatcgcccacatcggaaatgtaaagggaaaaatcgatccagtttttctgaacttagccaaacgttataaccagattgcacatctgaatgaagagccactaatcatcatcccacccaatgacattcagttttatcaggagaacacattcgtgatggagtgcaatgaattcgagctgtacattgacaaaaacgatgagactggtgaattcatctacgggcagggatctggctttttactcaagggcattggtttaatcactaatgcacacgtggtgaaggaggtgattgatctcatgaagaacgaggtgaagttcataaataagtactacgtcgccatccacagagcatcaccttacgacattatatacaaggcacggattatctgttatagtattgagaaggacctggctatacttgaggtcgagaatctcgacatcgagagcattgggtattccgccaatgaaagtatcaagaaagacatgcagattaatctcgtaggttttccctcctacagagaaggcaatgacatcaaaagccaatctgggtatgtggaagggattcgaatgcacgagaaaataaatgtccgctacgagatttctgccaccatttacgagggaaattccggcggtcccgtctttaacgccagtaatgaggtcatcggagtcgctacaaaaggcaccacgtcgaacggagtttcgcctaatgaaatcataccgatttccgaagtgcttaaactggcgaaagaggtgtga

SEQ ID NO: 8673 - RNA, 1761 nt, synthetic construct
  source 1..1761: mol_type = other RNA
atgagtgggcatgttaacgtagagttgaagtcctcaccaactgacatccggctcaagttcagaaagttgaatacatttgacgacatagcccaccttttggaaataccagtgcagttcctgtggaagatccttgtcagagataagttagtgaactaccgaacgtttaagttaaggaaaaaaaacggcgacgagcgtactatatatagtcctctctccaatctggcaatcctgcagaaaaagctgtcgtacattctgagcctcaatttcacacatcatgaccgcagccatggtttcatcgagaacaggtctattgtcaccaatgccagcgaacatctgcgaaaaaagtatgtgctgaaccttgacctcgagaatttcttcgagagcatttccttccggcgcattcggcacatgttcatttcctactacaagttcaatgataaggtggcttctactctagccaacatttgttcacatcctgatggattcctaccacagggagcacctaccagtcccgtggtgtctaatatcattgccaaaaccctggataaggagctgaaacgcgtagccatcggcgctaaatggacacaatacacgagatatgctgacgacatcaccttctcaacaagtaaagaacaatttcccaaggagatcgcaaccataaacgaatccggaataatcaccctcaacgagaatatcatcaagatcattgaaaagaacggctttaaggtgaacgataaaaaaacccgccttcaaaaccacaaacaatctcagagtgtcactggcatcactgttaacgagaaactgaacatcgacaggaggtacataagaagaattcgctccatcctgtcttgcatagagaagaacattaacaacctggatgaagcccacaaaatctttgaaatgaaatatcccttccgtcagagaaagaggggatcaaatccagacatgtttctcattttgcgggggatgatcagccatgtgggaaacgtcaagggcaagcaagattctgtctattggaaacttgcgaatagattcaataaggtcacccctcacgagcccatcaagttgcagctgtctcggcgagaatttcacgaggacaatacgtacgttatagactcagattataccgcgaaatactacaaccacaacgagaacatttttgacgaagccctctacggacagggtaccgggttcattctgcggacaatcggcctggtcacaaatgctcacgtgatcgaggggatcattgagggtctggagcagaagttcattttttcgaagaagtactacatcgaagcctataagtctacactgtacagctttcctgaaaatgcaaaggtgctctgctacgatattgaaaaggatattgccattcttagtgtggaaggcctcgaaatccacgaaaaagggtatatgtataacgagagcatcaaggaggagcagcagatcgagttggttggatttcccggttataggaaaggacaggatataaagattcagaaggggtttgtgcagggtgttcgaatgcacctgtcaaaagatggcaccaaacgctataaacgtagggaaatttccgctactatatacggcggcaatagcggggggccgatagtaaacactgacaatgaggtaatcggcttagctgtgaagggagcaacaatgaatggggtgagcccaaatgagatcgttccgatcagcgaggtgattgagctagcgaaaaaacacggcattattaatgaacatgtctccatctccttttga

SEQ ID NO: 8674 - RNA, 1758 nt, synthetic construct
  source 1..1758: mol_type = other RNA
atggaactcaagtcggacgtaagcgtcatcaacaagagattcaagaagttacagaatttcgatgacatagccctgctgctggagatcccagtggaatttttgtggaaaattctcgtgcgcgacaaacataccaactacagggtctttaaactgaggaaaaagaatggaggggagcgcacaatttacagtccagccagcaatctcgccattttgcagaagaagctcgcatacatacttagtctggagtacaaagtgcattctcgagtgcatggcttcactaagaagagatctatcgtcacgaatgccttcgagcacctggataaacgatacgtgctaaactttgacctggaaaatttcttcgagtctatcgagtttaggcgtgtcaggaagatgtttatctcatatttcggtttcaacgacaaggtagcggccactctggcaaatatttgctgccatcctaacggctttttaccccaaggggccgctacatcccccattgtgtccaacatcatagccaatggactggataaggaattgaccaggattgcgaagaactcaaaatggtgtaaatacacccgctacgctgatgacatcaccttttctacgaataacaagaagtttccacaagagatcgctcacattgtggacgaaaacattgtcctgggagagacaatccttaatgttgtagagaagcacggatttaagattaaccacgagaaaacccggctccagaaccacaaacagaaccaaacagtaaccggcattaccgtgaacaaaatctccaatgtaaaccggacctatattcgtcgtatcagaagcatcctgaactgtatcgaaaagaacaagaacgacattgttaacgccgagaagatcttcaagatgaaatatccttaccggcagaaacgcgaagataacaagcctgatatgttccatattctgaaaggcatgatcgcgcacgtgggcaatgtcaagggcaaaaaagatccactctaccttaaactagcaacccggtttaatggagtggtggagttgagcgacctcactcccttccgcctgcctataactaagaagggttttcaagagaatcacacctacgtgatagacaatcctgacttcgagatgtacttcactgaagatggatatgaagaagtgatgtatgggcaggggactggcttccttttgaaggacatcggtctggtcaccaacgctcacgttattgaagatgttatcaagacagtcgagaaaaaacaggggaaatttcagaaggagttttacatttccttctttagagctgtggactaccacgttaagcattgggccaaactgttatattatgacacggatatggatatcgccattctagacgtcaaggatatcaatatctccaagacaggctacgagtataacgaattcattgagaaaggccagaatgtggagctggtgggtttccccaattatcgcgagggacaggagatacggattcaggaagggacaatacagggggtcagaataaatgaatctagggaccgaagcagaaaatatatacggcatgagatcacaactactatttatggcgggaatagcggaggtcccatcgttaatgaaaacaatgaggtgatcgcagtggcagtgaaaggtgctaccctcaatggcgtcagtccgaacgaggttattccgataagtgatgtgatcaagcttatcaaccaaaacaaacagccagaagaaaagtcagaggcttccatcgaagtggttcagtga

SEQ ID NO: 8675 - RNA, 1776 nt, synthetic construct
  source 1..1776: mol_type = other RNA
atgagtaatcatacctatgtggagctgaaaagtgacgtcagcgttatcaataaacgctttaagaagctgcagaatttcgaagacatcgcgctgcttctcgaaatccccgtggaattcctctggaaaattttagtcagagacaagcacataaactatcgcgcatttaaactaagaaagaagaatggaggggaacgtactatttactcccccgcctctaacctagctatcctccagaaaaaactcgctcacattttgagtcttcagtataaggtgcatagcagggtccacgggtttacaaagaagaggtctattgttacgaacgcattcgagcacttggataagcggtacgtcttgaattttgaccttgaaaacttcttcgagtcgatcgagtttaggcgagtgcggaagatgttcatttcttacttcggatttaacgacaaagttgctgccaccctggcaaatatctgctgtcacccgaatggttttctgcctcagggtgctgcaaccagccccattgtttccaatattatcgctaacggtctggacagggaattaacgagggtggccaaaaataccaagtggtgcaaatacacccgatacgctgacgatatcaccttttccaccaataataagaagtttccccacgagatagctcacatcgtggatgggaatatcgtcttaggagagacaataataaacatcgttgaaaagcacggctttaaaataaaccatgagaaaacgaggctgcaaaaccataaacagaaccagactgtgacaggcatcaccgtgaataagatcagcaacgtgaatagaacctatatccggaagattagatccattctgaactgtatcgagaagaataaagatgaagtggcccgcgccgaaaaaatcttcgagtctaagtaccagtaccggcaatctcgcaagggggataaaccagatatgtttcgcattctgaagggcatgataagccatgttggtaatgtgaagggtaaaaaagatcctgtctacctgaagctcgccaatagatttaacgaggttgtagagctgggcaacagtacaccatttaaactgccaatgactaggagagcattccatgagaatcacaccttcattatagataacgaagactttgagatgtacttgaacaaggatggaacaggagatgtgctgtcagagcaagggacaggcttcattctaaagggaataggcctgattacaaacgctcacgtgttggaggacttcattaaggtgcttgagacagaagaagggagattcgtgaacgagttctatatcagctttttccggtccgtatccactcatgtcaaacataaggccaagatcctgtattacaacactgacatggatatcgcggtactttctgtgaaggacatggacatatcaaaaattggctacgagtataatgagttcatcgaacgtgaccagaaaatcgaactcgtcggcttccctaattatcgtgacggccaagagatcaagattaaagaaggaactgtggaagggatccggattcagcgaagcaaagacggctcaaaacgctacgaacgatatgagatctcggccactattcacggggggaacagcggcggaccgatagtgaacgaaaacaacgaggtggtcgccgtagccgttaagggcgccaccatggcgggagtatcaccaaatgaagtcatccctatcagtgatgtgatcaagctcattaaccagaagaaacagcccgaggagaagtccgaggcatcaattgaggtcgtgcagtga

SEQ ID NO: 8676 - RNA, 1764 nt, synthetic construct
  source 1..1764: mol_type = other RNA
atggtttacaagctgaacttcgaacttcagtctaatctcgaggacattaagcagaacttcaaaaacctttcttgctttgaggatgtagccctgttattggaggttccaaaagaattgttgtggaaggtcttgattaagaacaagggagcaaactataaagccttcaagctcaaaaagaagaatggctccgagagagtgatctttagccccaccctgtccttgagcatactgcagaagaaattggcgtatatcctggagtcaaactacaaaaaccacaggcaatcctatggctttgtgaaagggaggggaattgtggacaatgcccagaaacatctgaacaagaaatatgtcctgaactttgatatcgagaactttttcgaatctatcaccttccgacgagtgagaagcatgttcatgacgtactataaattcaacgagaaggtggccacaacccttgctaatatatgctgtcaccccaatggattcctaccacagggcgctgctacatcccccatcattagtaatataatctgcaaccgcatcgacaaggaattcagtaaactcgcaaagaataatcggtgccagtacacccggtacgccgacgatattacttttagtaccagcaggcgtgtctttcctcatgacattgcatacattaaagaaggtagcatcttcctgaactcaaatgtcatctctatagtcgagtatcagggttttaagataaataaggagaagacacgtctccaaaattaccgccaaaaccagacggtaaccgggatcacagtaaatgaaaagctcaacgtgaaaagatcatatgttcgcagaataaggtcaatcctgcattgtattgagaaaaatgtggaagacctgcagaaggccgaacaaatttttgaagaaaagtacccgttcagacagaagaagtacctcgacaacattaatatgtttgccatcctgaaaggtatgatcagccatgtgggccacgttaagggaaaggacgatccattatacctgaagctcgctaaacggttcaacaagatcagttatctgtctgagactatctcgccctttaagctggagtccctaaaaaagtttcacgagacttatacctacatcatcgattatgacgacaaggtgcccttagtctgtttcgagaatgataaaatggaagaaatcctttacggccagggcacaggattcttactgaagggtgttggcctaatcactaacgctcacgtgatagaggatgcgattgaggccatcaaggacaataagaagttcaacaacgagtatggaatttcattcttccgcgggaattatccagatctgaaatacaaggccaaagtatcgaaatacgatctcgataaggacatcgctatccttgacatcaaaggctttaacattgacaatcaaggatacgagtataatatcgacatgaaagatgggcagaaaattgagctcattggctaccctgattataagataggccaggagattaaaattgagactggacaccttaaggggatacggaaacatcgcgatagcaccggcacatttcactctaggcgggaaatttcagcaatcatttacggggggaatagcggggggccgattatcaacgagtccaatgaggtgataggagtggccgtgaagggcgcgactctgcatggtgtcagcccttccgaaatcatccctattgaagacgttattaatctgaacagctccaactctgaagtgagttccaaaatcgcaaccaaacctcactga

SEQ ID NO: 8677 - RNA, 1752 nt, synthetic construct
  source 1..1752: mol_type = other RNA
atggtctacaagttgaatatacggttgcagtccaatttggaagacatcaagcaaaagtttcagaacctgtcatgtttcgaggatgtcgcactgctgctagaagtgccaaaagaactactgtggaaagtgttgataaaaaacaagggtaacaactacaacgccttcaagattaaaaagaagaacggatcagaacggtttatttttagcccaacatccaatctcagcctgctccagaaaaaacttgcctacgttctcaaatgcaactacaagaatcacaatcagtcttttgggtttgtggaagggagaggcatagtggctaatgcccagaagcatctgaataagaaatacgtcctcaattttgatctcgaaaatttcttcgagtcagttaccttccggcgggttcgtagcatgtttatgacctactacaagttcaatgagaaagtcgccaccattcttgctaatatctgttgccaccctaatgggtttttaccccaaggcgcggccaccagcccaatcatctccaacattatctgtaacaggttggataaagagttcagtcagattgccaagaagaatcgatgccagtataccaggtacgccgacgatattaccttcagtaccaataagagacagttcccctacgacatcgcatatgtgagagagggatccctgtttctgtcaactaatatcatctcgatcgttgagagtcaaggcttcaagattaacaaggaaaaaactaggctgcagaacttcaagcagaatcagacagttactggcattactgtgaacgaaaaactgaacgtcaaacgtagctatgtgaggcgcatcagatctattctgcattgcatcgaaaagaactccaacaacctccacaaggctgaacagatatttaaagagaaattcccgtttcgacaaaagaagctttttgacttcaacaacatcaatatgttcgcaatcctcaaaggcatgatttcgcacgtgggccacgtgaaagggaaggacgacgccgtgtatctcaatctggcaaaacgctttaatgatactgtctatctggaccctacaatcagccctttcaggttagagtctcttgagaaattccacaaatcctatacgtacattatccaggacgatgagaaagtacctctagcacattttgaggatggcatggaagtaattggttatggccaagggactgggtttcttctgaagggtgttggactggtgacaaacgcccatgtgatcgaagacgtgatcaaagctattgaggatggcaagaaattgaacattgagtacggcatctcattcttcaagggtaacgatccaaacattaagtataaggctaaagtggctaagtatgatctggacaaggacatcgcaattctggacatcaaaaatttcaatatcggggagcacggatacgagtacaatattaacatgacaaccggtcagaagatagaactgataggataccccgactactctattggtcaggaaatcaaaatcgagagtggctatctgaaggggatacgcaagcacggagattccacgggaaagtttcatacaagacatgagatctctgccatcatatatgggggaaacagcggcggaccgattataaacgagtctaacgaggtcatcggcgtggcggtcaagggagctacattacgcggggtagcgccctccgaaatcatccccattgaggagattattaatctcaatagcaaccttaccgatgtaagtaagcggatatga

SEQ ID NO: 8678 - RNA, 1761 nt, synthetic construct
  source 1..1761: mol_type = other RNA
atgtcaaaaaaaatgaatgtgcgcctcctgtcagaggaagatgtgatcaagaaaaacttcaagtccttgaaagacttcgcagacattgcgaacatgctggagatccctaccaagattctacaccagattttggtggaaagcaagaagaacaattatagtacctttgtcatcaagaagaagaacggtaccgataggacaatccatgcccctaaaaagaacctgtcaatcattcagaagaagctctcaaacatcctcgccttggtgtacaacaaccatttaaatagccatgggttcatcaaaaatcggtccatcgtcactaatgcggcgcagcaccttaagcagaagtatgtccttaattttgacctggagaactatttcgagacaatcaatttcggccgcgtgcgggctatgtttatccattactacgggtttaatgagtccgtggccagcacactggctaatatatgctgtcaccatgagggatttcttcctcaaggagccgctaccagtcccattatttcgaacatcatctctttcaagatggataaggagctcaccaaaatcgccaaaaagtaccactgcacgtatacgcggtacgctgatgatatcactttttccacaaaaaagagcgtatttccgaaagaaattgcctttataaaggattccagtgtacaaatttcccacgaagtggtgaagattgttaagggcaatggctttttcataaataaggacaagaccaggttgaaccaccaacaggaaagactgagcgtgacaggtatcactgttaacgagaagctcaacgtcgagcgacggtacatccgtaagatcaggtcaattctgcactgtatcgaaaaaaatagctctgacattgaggttgccaaaagcatcttcaatgaaaagtataccttcaggcagcgacgcgacgaggggaacccagatatgttcgacgtgctgagggggatgatcagttacgtgggtctggtcaaagggaaggaggacgaagtttttctgaaactggcacagaggtacaacaaatgcgtcgatgctatgggcgtcagtgttattaaactaccagtagagagaagacgattccaggagcttaacacattcgtgatagagcaggagtattgctactataagtatgatggagttccagataactctcaatgtgtagtcgtgggacagggtacaggctttctgctgaagggcattggccttataaccaacgctcacgtcataggaaaagattactttgacctatgggagttaagcggagtcgaattcaatggaatatcaatcaatcggtccaaatacgagaaggataaaacttactacgccaaactgctctgttacgactatattaaggatatcgcaattctcgacgtggacggcatcgatatcgacaaagtaggcttcgaatataatgattccatatcgactgacgaagaaatccaattaatagggtatccctcctaccagaaaggaattgggctgtccgttaaagacgggaaagtgttggaacagcgctacaccattgaggacgagctcagtcgttctatcagatatgagatttctgcaactgtgttcgggggtaactctggcggccccgtcgttaatatgaacaatgaggtgattgctctggccgcaaagggcagcagcgaaaagggaaacgtgcctaatgaagtgataccaattaagcaggtgattgaccttgccattaaaaagaaactgatcccctctagagaggaaatctctgtgtga

SEQ ID NO: 8679 - RNA, 1734 nt, synthetic construct
  source 1..1734: mol_type = other RNA
atgctgaataggatgaagcctgaactggtgtgtgaggatgacgctataaaacggaagttcaagaacctggaaaactttgaagacgtcgctcgcatgctggaaattcctgtgaaaaaactacgagagatcattgtcctgtccaagaagaacaattacattaccttcaagatcaagaagaagaacggaaatgataggacaatccatgcccccaacaaaaatctttcaatccttcagaagaagttctcatacattctgagcttggtctacaataatcaccttagcgcacatgggttcataaaagacagaagtatagtgtccaacgccacccaacacataaagcagagatacgtgctcaattttgaccttgaagactacttcgaaaacattaactttggacgagtacgtgccatgtttatccactatttcgggtttaacgaggcagtggcaagtaccttgagcaacatatgttgtcatcacgatggttttttgccccagggtgcagccacttcgcctgctatctccaacattttatccttcaagttagacaaagacctcactaaactcgcccgcaaacatcactgcatatattcccggtacgcggatgatatcaccttttccacgaaaaagaatcaatttccgaaagacattgcgtttattgagaattccagcgtgcagctctctaatgaggtgatcaagatcgtcaaaggaaatggctttttcattaatgagaacaagacgcgtctgaacaacaataaagagcacctatcagttacaggaattacagtgaacgaaaagctgaacgtggagcgaacatatattagaaagatccgctctatcttgcattgcatcgagaagaatatcgatgatatcgaggttgccaagaccatgtttaatgagaagtacaaattcaggcagagaaaagagaataagaatcccgatatgtttgacgtgctgcggggtatgatctcatacgtggggcaggtcaaaggcaaagaagacgaggtcttcctgaaactcgctaataggtacaaccgcgccattgagttcttcgaccttccactcattaaaataccggtgcccaagaagaagtttcaggaggataatacttacgtcatcgaaagtctgaactacgattataccttcggtggcgaacggcattatagcttggtcagtcaggggaccggctttatcctcaagggaatcgggttaatcacaaacgagcacgtgctcaaggagtatatagaaatgctagaactgggggtgcagtatgattcttcggagaacattgtcattcacaggagcaagtactctcatgagaaacagtacgcgaaacttctgtgctacgataaaattaaagacatagccatcctgagcattaaaggactcgacatcaaaaaggttggcttcgactataacgtatcaatcgagcccgatcaagagattcaactggtaggctatcctaacttcagagagaatatggacatttctatcaagaacggcgtgatcctgggagaacgctatactgacaagaccggcttcgtgagcgaaaaacggttcgaaactagtgctcacatatatggtgggaactctggcggaccagtagttaacatggccaatgaagtaatcgcagttgccgtgaagggggctacagaaaacggcgtggtcccaaatgaggttatcccaattaaggaggttatcgatctggcaaaaaagaataagatcattaccacttga

SEQ ID NO: 8680 - RNA, 1746 nt, synthetic construct
  source 1..1746: mol_type = other RNA
atgattaaaaagatgagtccagagctgctctgcgaggatgccatcctcaaggaacggttcaaatctctgaatgactttgagggggtcgcacacctcctggaaattcctgtgaaggagctaagaaaggtgctggtgctgaacaaaaagtataactacaccactttcaagatcaaaaagaagaacgggaatgataggactatctacgccccccagaagaatctcagtattatccagaagaagttctcctacatactgagcctcgtatacaacaaccatttgaactcccatggattcatcaaggaaagatctatcgtcaccaatgctgagcagcacatcaaacagaagtttatcttgaacatcgatcttgaaaacttctttgagagcattaactttggccgggttcgcgctatgttcattcactacttcaagttcaatgaactcgtagctaccactctggcaaacatttgttgtcactatgacgggttccttccacagggcgcagctacatcaccaatcatctccaatatcctttctttcaagatggacaaggagctgaccaagctagcaaagaaaaatcactgcatatattcgaggtacgccgacgatattacgttttcaaccaagaaaaaccagttccctaaagacatcgcctacatagagaactcattcataaagatcaacagtgagcttctgaaggttataatggggaacggctttttcatcaacaaaaataagacacggctgaattcacaccgcgaaaaacttagcgttacaggaattaccgttaatgaaaaactgaatgtggagagaaagtatatccggaagattcgatccatcctgcattgcattgagaagaacattaacgatatcgaagtggccaaatccatcttcaatgagaaatacaggtttagacagaggaaggagcacggcaaacccgatatgatagacgtgctccgtggaatgatctcctatgttggccaagtgaagggaaagaatgaccaggtctttttaaaactggccaaacgctacaatttaattgtggagctgatagacatggacttgcccattatcaaattgccaatatcaaagcggaaatttcaagaggataacacattcgtcattgaatctctgtattacccgtactttatcgatggagagagcgcgggggaggcacctatcggacaaggaacagggtttttgctcaaaggcatcggtttaatcaccaatgcccatgtgtttaaaggtgagtacaccgagatgctcgagattggagcgacatttaagaagatcgaaatccatagaagcaagtactccagtgggaaaaagcactacgcaagtcttctgcactacgacaagattaaagatatcgcgatcctgagcgtggacggcctagatatggctaaaatgggtttcgaatataacgagttcattgagccaaatatggaaatacagttgctcggttatcctaattttcgagacaatatggacatctccattaaatcgggaactgtgttaggcgtgcgctataccgacacttataggctgaacagcgaaaagcgttatgagattagcgcccatatatatgggggtaactctggcggccctgtcgtaaatgaaaataacgaggctgttgccgtcgctgtaaaaggcattacggatgatgggagcgtcccctctgaagtgattccgattaaggaagtgatagaactggccaaaaaaaagaacattatccccctgaaaggctga

SEQ ID NO: 8681 - RNA, 1737 nt, synthetic construct
  source 1..1737: mol_type = other RNA
atgacgtataaattaaacgtggaccttgtgcagaacccagaaattatcaaagagaagttcaaaagcctctccaattttaacgatgtagcaaatatcctggaaatcccttcgagctttctgcgccaaattcttatcgtgtctaagaagtccaactacgggacttttacgatcaaaaagaagtctggagatgaccggaaaattcacgcccctagtaagaacctcctgattatacagaaaaagttgacttcaatcctcaacctagtctacaagaatcacaataattctcatggcttcgttaaggatcggtccatcattacgaacgcaaataaacacattaggaagcaatatgtgctcaactttgacttagaggacttcttcaacaatatcaactttggaagagtgagagctatgttcatctattacttcaagttcaacgagactgtggcaaccatcctagcgaacatttgttgccattacgacggatttttgcctcagggcgccccgacctcaccgattatttcaaatatcctggcgaataagctggataaggaccttactcgccttgctaaacgtcatcgatgtgactacacgaggtacgccgacgatatatcaatcagcaccgacaaaaacaaatttcctaaagccatcgcccatacaaaggataaaaagacctatcttagcagcgaaattatctccatcgtcaaaaataacggctttttcattaacgacaagaaatctaggctcaattctaaattcgaaaacctgtcagtgactggactaacagtcaatgaaggccttaacgtaaagcgctcttatattcgccgagttcgcagcattttgaactgcatagagcaaaatctggataacctggacgaggccaaaaggatattcatcgaaaaatacccctttagacagatttcttatgccacagaacctgacatgtttgccatcctcaaaggaatgattgctcacataggacacatcaaagggaagaccaattcggtgtatagaaagttggccatccggtataatgacattgctgagattgagaacattctgtccataaagctgcccagcacacgtaggcagttccaggagactaacacctttgtcatagagagcagtttcttttacaagagtggggacgatgaagagtttgagccctgcggccaaggcaccggctttttgctcaaggggatcggtctggtaaccaacgcacacctgttcgacatatacttcaagaagagcaatgacggttacaatataaccaacttctcaattgaggtgcaccagtccaaatatagtaccaataagaaatacgcgaagctgttgtggcatgaccggattaaggatatcgctatcctccagttcacaaatggcaatctgacagatcaagggttcgattacaacacctccattaagactgggatggagatagaactcctgggttatccagcccacaccctggataattccatcaagattgagtctggagtcgtgagacaggagcggaataaccctatgcccgataggcagaagcagacacgatttgaaattagtcccctgatctacggtggaaacagcggcggtccagtagttaataaagaaaaccaggtcatcgctatcgcaacaagagggataacctccaatggggtggtgccaagtgaggtggttccaatcggcgatgtcatcacactgttcgaaaagcataatcccatcttaactaaaaacgtttga

SEQ ID NO: 8682 - RNA, 1713 nt, synthetic construct
  source 1..1713: mol_type = other RNA
atgactaccatctacattaatctgaagtcagatgatgacgtgatcaagaacagatttcggacactggatacgttcgaagacatcgctaatttattggagatcaaacccaaaatgcttcgagatattctcgtcattaacaaaggaaagaactacaagagtttcgtgattaagaagaaaaacggcggagagcgcactatttactctcccgaaaaaaacctttcaatcctgcagaagaagttcttatacatactcaacttggtgtataggaatcacgaaaacgcccacgggtttgttagagacaagagtattaagaccaatgctacaagtcatttaggccaaaactatatcctgaatttcgacctgaaggacttctttgagaacattaatttcggaagggtgagaagcatgttcatgagttactttaagttcaataccatcatcgctaccactctagcgaacctctgctgtcatgaagatgggtttctgcctcagggtgctgcaacctccccagctatcgccaacatcctctcctacaacctggacaagacattttcaaaactggcaaaaaaggagaagtgtgtgtacactcgatatgcagacgacatcacgttcagtactaacagagaaaagtttccgaagaacatcgcttttcaaaagaaaggtcaggtcctgctctcaagctacgttgagaaaatcatcagggaaaatggcttcctgataaacgaaagcaaaacaaggcttcacaataaataccagaatctctctgtgaccggcattacagtcaaccagaaactgaacgtgtctagaaagtatattaggaagattcgcagcatcctccattgcatcgaaaaaaatatttcgaatctcgagctggccgagaaacttttttgcgagaaatataccttccggcaaaggaagaactccaatactccaaatatgttcgatgtgttaaaggggatgatttctcacctgggcaatgtacggggcaaatccgatgacatatacataaagttggcaacacgatataacatcctggtcaacaacattgacaaacctgagatcaagctgcccatctccgcccagaagtttcaggaacgcaatacttttgtcgtagactccctgtattctaaatatagcctctatggcgccgaggatcaggttctaaatggacagggcacaggattcctgctgaagaatgtaggacttatcacaaatgcacacgtgttgtatgataatatcgatcttctagacgacggagccgagtataaaactgaatattacatccgcgttcatcagagcaaatactcaatcgataacaaacagtactacgcgaaaatcgtgtactatgattcttttcgtgacattgctatcctgtccataaaggatataaacttgaataccgagggctattcttacaacgaagagattaaccccaatcaaagcattaagctcatagggtatcctcagtacattgatggtcaggatctgcgtgtattggacgggcatattatgaattcacggatacacaccgacggtacccgcacgcaaaaacggtacgagatcagtgccaccatcttcggtgggaatagcggagggccaattgtgaatgccaacaacgaggtcattgcagtggccgccaaggggatatccgacaagggctcggtgcccttcgaggttatccctattagcgacgtcataaagatttacaactga

SEQ ID NO: 8683 - RNA, 1773 nt, synthetic construct
  source 1..1773: mol_type = other RNA
atgaacgttgaactcaccaaacccgatactctgctgatatacgagttccagaacttgcacagctttagtgacatcgccaatcttctggagattcctatcgaagtcttatggaagaatgttgttgacaagaaaaagtaccactccctaaagatccccaagaagcagagcgacaaattccgcatcattaacaagccgagtaagaacttgaatatcatccagaagaagttcaactacattcttagcctggtgtataaatcctcacatagcactagtcacgggttcgaaaagcataagtcaatccgtactaatgctatctgccacctcaataggcaattggtgctcaatctagacctcgaggagtttttttcatctatcatcttccctagagtgcgcgcaatgttcatgacttacttcaagttcaacaatgaggtggccaccacattagccaatatttgttgcgacaacaacaacaaactgccacaaggcgcagctacctccccaatcgtctcgaatatcatcgcttataaactcgataaacagctgtcacggcttgctagaaccaatggatgtatatattcccgatatgctgacgatataaccctgagcacgaataacaagaagttccggtttgagattttcaacgggaacgacggggtcaaagaagtaggcgagaaggtaaaacagatcatccaatctaacggctttaagataaactccagcaaaacaaggatttgtgagaacagcaaagcacagtatgtgactggagtgaaggtgaactccaaactgaatgtgaaccgcacctatgtccgacggatcaggtcaatacttcacaccatagagaagaatctggacaatatcgaggaggcagtcaaaattttcaaagaaaagtacccctacagagcgaccctctttaataactacgacatgttcaacatcgtcaggggtatgatttcccacattgggcatattaagggaaagcaggatgccgtgtttcagaaatttgttatacgctacaaccgcattatcagtgagatcaatacaaaagaaggcacaaattatgcgtttctatatcgaccatacacctggacagagtttaggcagcagaatatttatgtgatcgaggaggatgaaatttcttacaggctcggaagcttgaataaaaagatcatctctagtcaagggtcagcctttttactgcaaggaataggtctggtgacaaactggcatgtggtaaagtgctttatcgaaggagtcattaacaatgaactggcgacgtttaattctaactactacatacctgtaaccaagtcaagatattccgacaagatctggttcgccaaaattatcatgttcgacaaaggcagagatattgccgtgttgaaaattgatggcgtggatgagaagctgtatgggttcgactactctcttgatatcaaggaaaatatggaatgctgtctgctcggttaccccgaatacattcgggatcagaccctgcacgaggtggagggcaaaatacaatcccagagaattagtcggtactatccgaatgattacgttcgttatactacgacaatggccattcacgggggcaactctggcggaccagtcgtcaacaaggaaaacaatgttattgcaattgccgtgaaaggctctaacaatactgtggctgaagtaatccctataggtgacctgctggagagcatcaaccagcagcagatgattaaaatcgagcagcataacatcgtgcagacaactgaagtttcgaagagctga

SEQ ID NO: 8684 - RNA, 1728 nt, synthetic construct
  source 1..1728: mol_type = other RNA
atgcacgtagacctgaaatcagaagataccgctatcctgaataagtttaacagcttgcaaacttttgacgatatagccgacctgctggaaataccacccaaaaaactttgggaggctgtgatccagaacaagacttattccgagttcaccattcctaaaaaaaacagctccaattttagggtcataaacaaaccctcaaagaacttggatatcattcagaagaagatgaactacgtgcttagtctagcatacaagagtaccagcaatgtcagtcatgggttcgagaaaaacaaaagcatcagaaccaatgcccaggtgcacttaagaaaaaagctgatcctgaacatcgaccttgcgaattacttctcttctataaccttcccacgtattcgagcaatgttcctatcctacttccgcttcaacgaggtggtggcgacaaccttggctaacatttgctgcgataataacaatgagttgcctcaaggtgccgcaacttcccctattatctccaacatcataacctataagctggataaagaccttgtcagactggctcggaagcatcgatccaactacacacgctacgccgacgacattactttttctacgaatcggaaagaattccagagtgatatcttcaatatggacgaagacttttatgacgtgggtgacaaagtcattgagctcatctcgaagaatgggttcagcatcaacactagcaaaacacgcatccacgactcatctcagcccaaatatgtaacaggcgttaaggtgaacacaaagctcaacctcaataaacgatacataagacggattaggtcaatcctgcactgtatagagaaaaatatcaatagcctggacgaggccattaccatcttcgaagcaaagtatccctttcggaagactaagtttaagaatcgggatatgttcaacatcgtgcgggggatgatttcacatctgggacacattaagggcaagcaggaccatgtgtaccagaagctggctattaggtacaatttgatcatttccgccgtcaatggctcttctaatgaaaactacccctatattcataggccgctgacgcacagcgagttcagagagcagaatgtttatgttattgaatctgacttcgtcaactataagtttttcgagtccaaaaagaacatcgtgacctatcagggtagcggctttctcctgaaagaggtaggattagtgacaaactatcatgtggtgaaagagtacatcgagatcctggaagaggagaatacgtcttttgaagaagagtattacatccctctctccaaatctcgttactcccaagatatttggtttgcgaagatcataatgtatgataaggctagggatctggccgtgctccacataaatattgtcgaccacttcgagcatggctttaattacaatcaatccattaccgaaggaatggatagcgtcattataggctacccagaatataaggagagttcaagtctccatatcgatcagggaaagattcttggggaacgcatccactactataacgataagaggtttacccgctacagcactagaatgccaatccacgggggtaactcaggagggcccatcgtcaacatgaagaacgaggtgattgccgtggccgtaaaaggcaaggacaatagcgttacagaagttatcccggtgagtgatctcttaaagtcgatcgaggcaaaagaaatgtgtctagtttga

SEQ ID NO: 8685 - RNA, 1746 nt, synthetic construct
  source 1..1746: mol_type = other RNA
atgtccttccagggttctccgaagttacaggacagcgatgacaacattaccaaaaagtacaagtcactcaacagttttcaggatatagccgggcttctggaaatcccccaggagttgctgtggaagactctcatgaaaaataaggaaaacaactaccggacgttcaccttgaagaaaaagagtgggggcgaccggataatcaatgcacccactaacaacctgtcaatcatccagaagaagctgaactacatcctctccatttcctataagaaatctcacacgaatagccacggctttgtcctcaaaaagagcatcgtgaccaatgcatcacagcatgtggcgaaaaagtttgtgctcaattttgatcttgacaatttcttcgggacaattacctacgctagggtgcgcgcaatgttcatgacgtactacaaattcaacaacagcgtcgctagtaccctggcgaatatctgttgcaacaatgatggcgtcctgcctcaaggggccgccacatctccaattatctccaacattatctcccgcaggatcgacgaagatctgagtaggcttgccaagaagatgaattgtacatattccagatacgccgacgacataaccattagctgcgacagcaactatttcccttctgaaatcgcctactttgaagaatccattaccaaaatcggatcccaagtgaagtcgataatcagcaaaaacggcttcagtattaacatgaaaaagaatcgactgaggtcccagtaccagaatcagagcgtgacaggcatcactgtgaatcagaaaactaatgtagacagacagtatattcggaagatacggtctatcttgaactgcatcgagaaaaatatagacgacattagcatggctgaaaagacttttcgggagaaatatagcttcagacagtctcaaataaagaaacccaagatgttcgatgttctgcgtggcatgataagttatgttgggttggtgaagggaaaagatgaccagctttttctaaagttggccaaaagattcaacaaggtgatcaaaaatcagaacctggcattcatccgagttccaattagtaaggtggaactccgcgaggagaacacttttgttatcgattccctgtacagcatttattctatggacggcgaaaagtcagaggcgtgtaatgggcaaggtactggggtactgatcagaaacatgggattagtcaccaatgcccacgttttatacgagaacatcgaggtgctggagtacggagctgagtttgagcgggaatactatataaggatccataagagcaagtatggctcccaggaatacttcgctaagatcgattactttgattcttttcgcgacattgccattcttacaatcaaagactttgataccagtaagtatggtttcgaatataacgaggagattgagttcaatcaaattatcgagctcatcgggtatccttcgtataaagatggtcaggacctgcgcgtcagctcaggtgtagtgatgggagagcgtacccacgctgatagagtccgtaagcaaaaacgatttgagatttcagctcagatcttcggcggaaactcaggcggacctattgtcaattctgacaacgaagttattgccattgccgcaaaaggatctacagagaaaggctcggtgcccaatgaggtaatcccaatttccgatgtgataaatgtgttcgataacaagacaaggaaattttaccatctagcacactcatga

SEQ ID NO: 8686 - RNA, 1071 nt, synthetic construct
  source 1..1071: mol_type = other RNA
atggcaaaaggccgggtgacaaccgccctgcttcttatgctcccccggagatgtgagtttatggagattgaaatccggaataccgacgaggacgttaagcgaaacttcgagaacctcataaatttcaaagacgtagcacatttgctcgagataagcgccgaaaccttgtacaaaattctgttcatcaacaagcacttgaactataaagagttcaccctaaataggggaaaggtgcgtaccatttatagccctaagaagaacctgatgattatccagagaaagctggcctatatactgagcctgctgtatagccaccatacgaagtctcacgggtacatcaaggagaaatcaattattagcaacgccaatgaacatgtgcagcagaggtacgtgctgaacttcgatttaaaggacttctttgacagtatctcttttggcaggattagagccatgttcatgacttacttcaagttcaacgataaggtttccacaacattagcaaacatttgttgccacccgaatggctttctcccacaaggagctcccacgtccccaatcattagtaatatcatcagctataggctggataagaatctggattcgatctcccgcaggtacaactgcaaatatactcgatacgtggatgacatcacaatttccacaagtcgcatctattttcctaaggctataggccacggccaaaagggttctgatcaggcggtcgtgtcggaaaaaatcaaatccattgtccacaagaacgggtttaaggtcaatgacaaaaaaactcgtcttaactcaaagtatgagaatctctctgtcaccggtatcactgtcaatgaaactctaaatgtgaaacgcagctacgttcggtacatccgggtgatcttgcattcaatcgaaaagggaatagaggaagataatctcgacaaggctcagaaaaagtttaacgagcagtacaactttagacagcgcaaaaaaggaaatcttcctgacatgtacagtgtaattcgagggcgctctcccatgctggataaactgaaggggagaaaaatcatgtccattatatcatga

SEQ ID NO: 8687 - RNA, 1728 nt, synthetic construct
  source 1..1728: mol_type = other RNA
atgaacgagaaggttagcgagtttaagaacatcaacggcttcgagtccattgccgagtttcttgaaatcccgaaacccgaactatggttgatgctggtcaagaggaaaaaattcaactacacgcagttcaagatcccaaagaagaatggcgagtttcggattatacacagcccatccgagaaacttgctgagagccaaaagcgcctggcaagtgttatcgggcatctttatgcttcaaatcacaccactcatgggttcgtagccggaaagtctatcaagaccaatgcccaggaacacgtgaggcagagttctctgctgaatctggatctggcagattttttcgagaatatcagctatggtcgcgtgagagctatgttcggcgagtacttcaagttcaattacaaagactcctctaccctcgccaaccttgtgtgccatcccgatggatttttgccccagggcgccgtgacgagccctatgatttcaaacatcatctgctactctcttgataaggaaatcaatcggctggccaagcgaaatggatgcatttatacaaggtacgctgacgacttgacaattagcagtaagaaaatcgtgtttcctagatcgattgctcacaaaaacattaatgagggtgtggttctgaatcggcagctggaaagcatcataaacaaaaatgggttcagtgtcaacgcgtcaaagactagattaaacaccaaatacgagtgtttgtcagttaccggagtgaaagtgaacgacaaactcaatgtgaatcgggtttttgtccgtagggttaggtccatcctcaatagcatcgaaaagtgtgagggggatctcatcagtgcccaaaaaatattcgacgaaaagtatcactcccgtaaccagggctctggaaactcaccaaatatgttcgaagcggtgcgcggcatgattgggcacatcggatttatcaaaggggaagaggatctagtgtttatcaaattggccgacagatacaactctataattaacggcacctctaggtccggcttaataaaggtccctctatctattgagaagtcccgacagacatacactttcgtggtggaatcaaacgacttcatcaagtacaagtatgaagaagacgacggttattttatttgtgagggcggcagcgctttctttctcaagggtataggcctggtcaccaatgctcatctcttcggagagctgaaggacacactgaagtattgcgagaacggcctgattgacttggtgatggatgaggaatattacatcctcactcaccggtcacgatataacgccaagaaaatgaagttcagattagtggcgatagactttatgaaggatatcgcaattctgcaacctgagaataaagatgcgtacaaatatggatttgagtacagctgtgatctgaagaagggagataaagtagtcgtgcttggctaccccgagtataaagcaaaccaggaactcagatccatggtaggggagattctgggggagcggagtcacgagctggaaactaaaccagccgaatacgccgcacgttatgaggtgtccgctactatctactccggaaattcgggtgggccggtagtgaacgaagcaaacgaagtcattggcatcgccacaaaaggtacgacagaacgcgggcaggtccccaatgagtttgttcctattgtcgagattgtagagctccataaagcaatgataacccgcgaatga

SEQ ID NO: 8688 - RNA, 1341 nt, synthetic construct
  source 1..1341: mol_type = other RNA
atgcatttgcaggagctgaagagcttcacagatatcgcctcttccctggatgtgacagccgggcatcttagacggctgttgttcgaggaaaagaacaacttgtactttgagttcgaaatccccaaaaaaaacggaagtcttcgaaagatctacgcaccaaacgattctctgttattcatccaaaagcggctcagcgcaatactcagctctagcgtgaagctgcacgataaagcgtatggcttcataaacaagcgatccattgtcgacaacgctcagctacatataaggaagaacgtgctcctgaatatcgacctcgaaaacttttttccgagtatcagcttcgggcgggttaggtccatgtttatgaactactttaggctggacaagaatgtcgccaccacacttacaaatatctgctgtcaccccggtggctttctccctcagggctctccaacctcccccgtcatttccaacattttgtgtaagactctggacaaagacctcgaccgtctggctaaaaattcatttggtgctacctactcacgctatgcggatgatatcacttttagtacaaagacttcctgggaggaaattatctcaagcaaagtgactctcttccaaaagctcaacgatatcctatttgaccagaccattgttttggacatcgcttcgagctacaacccttcaatacacaagtatgaggaacgccttttgaaaaaaaagtattactctgcactgcagagtataggcttcatatccaaacacgagctcgacacagatttatctgtgctgcacggagatattggggagtttctgatgcaccatttagtgtccaactacatttcagacaataactctgttaagtacttgtatccaaagctggtgctgaagagcaatcctaagatgcccgcatatgggaatgatggaactatttacgtgccaagcaagaaagaaatcttttaccttgaggccaaattctacaccaatctcaccaaagccattaataaagccgtggatagtctgaaagaacataatgaggtcacgcaggaaaatattgaccacaagaccgagctgtttagaaacatcaaaacgaagagtaatgacgagattattgaaattaccgacgatgtcaatgagaagctagttttattcctgatctgcgacaacattttcaaggaagaggacgtgcttaaatgcctgaaaaagaacaatggcctgatcgagctgaagaaatcattcgaggtaatcatcttcgtactgcctatactttcgaaatctgagttcctcgaatccttcaagaagcagagcatcctaagaggaaatcagtattatgtacaatga

SEQ ID NO: 8689 - RNA, 1641 nt, synthetic construct
  source 1..1641: mol_type = other RNA
atgaagatgcggcttcaggagcttaagtcttttaatgatatcgctagttcactgaacgtgaccaccggccatctgcgtagattgctattcaaggaaaagaacaacctgtactttgagttcgagatcccaaaaaaaaacggcaccttcagaaagatctatgcccctaatgacagcctcctgtttattcagaaacgcctgtgcaagatactgaatagctccgtgaaactgcataataaggcatatggcttcataaatgagaggagtatcgtagataacgctcaactacatctcaagaaaaatgtcctgctcaacatcgatctcgagaacttttttccttccatctcattcgggcgagtaaggagcatgttcatgaactactttaagctggataagaacgtctcaacaatcctcgccaacatatgttgtcacccaaatggtttcctgcctcaaggctctcccacctccccggtgataagcaacatactgtgtaagacactggataaggatttggaccggttggccaagaactccttcggggctacctactcaagatatgccgacgacataacctttagcactaaaaagagcttcaaagagaacatcgttattgaaaagaacggggaaatcattctgggttctagtcttacagatattattcggcgcaatgggttcaagatcaatccaaataagacgcgcctgcagaaagccatccagcaccaggaagtcacggggataatagtcaatcagaaacttaatgtggacagacgctacatccggaaaatccgtgcgatgctttactctatcgaggagaattctaacaatctgtccattcccctcgaaaaatttgccgaagctggctataaggggaacgacattgagaatattctaagagtgattaagggcatgatcaactatgtctctatggtaaaaggtaagtatgacgccgtgtttgagcaacttgctaacaggtacaataccattctcgaagaactagagattgaaaacctgaaaccaattttcataccgcccaaaatttgcttagaggagagtgtgtgcgtcatcaaggagacagcgattaccttattcagcgataaggagaacatgattacagcatattatggacagggctctggattcctgctgaagaatcatgggattatttcgaattaccacgtgttcgagtacttgatcgaggacctgtcccgaggatttagcactatcaaaaacgagttcttcgttgaagtatttttcggaaaaaggactagtaagttggtcaaggccaaaattgagaaatacaacaaagacaaggacctcgtgctgttagttcctgaagattcctcattgcttgactttggctttgagaaatttgaggacgtgttagagcaaaacactgaagtttatctcctgggttaccctgacttcgcagatggagatcagatgaagtttgaaaagggacactatctcaggacagtgaattccaaaggaatcaagaaatacgaaatctcgcagatcatctttggcgggaatagcggtggacccgtgctcgatcgggaaaatcgcgttatcggcgtggcaactgagggcaaaaggatttcaatcaaccgaatcattcccatcgaatacctgcacgacttgaagtga

SEQ ID NO: 8690 - RNA, 1659 nt, synthetic construct
  source 1..1659: mol_type = other RNA
atgcgcatacaggagtttgagtctttcaaggatatagccgacgccctgggcattaagtcaggccaccttagaaaacttctattcgaagagaggaacaacctctactcggattttgaaattcccaagaaagacggctccttgcgcaagatctactccccttctaaaaaactgttatttatccagaggcggcttctgctaatactcgaaaactcaattaaggtgcaccctcaggcttatggcttcgtgaaaggaaaggggactgtcagcaacgcctccttgcatcttcggaaaaattacctcctgaatattgacctgaaagacttttttcccaacatcacgagcggccgagtcaggagcatgttcttaaactacttcaagttgaacaacactgtggcttcaacactgacaaacctgtgctgtcacccgaagggtttccttcctcagggagctcctactagtcccattatatccaatattctctgcaaaaccctggatcggaacctggatcgactagccaaaaacagtttcgggtccagctattctcgttacgcggatgatatatcattttccagtaacagaccgttcaaagaaaacatcgttagcgaacagaacggaaatgtgatcctcggctcctctctgttagacatcatctcatccaacggctttaagattaatctggataaggtcagactccaaaagaatcatcaacaccaagaggtgactggtatcgttgtcaatgaccggttgaatctggacaggagatatataagacgcgttcgggcgatgctgcacagcattgaggttaacattgacgatctctcaatcccaaccaagaaattcgaagagtcaaattacaaaggaaacacctttgataacctcctgatggtaataaagggcatgatcgattatattggcatggtaaggggaaaggcagacaatatctacgagaaactcgcagtgaagttcaattatatcctagagctgctcgagctggacaacatcaaaccacttttcattacagagaaaatcgagaacaatgtgtgtgtcattaagttcaagaagatcttcctgttcaaaacggactttagcgagatggttgagctggattatggtcagggaagtggtttcctcctcaagtcttatggcattgtcacaaattatcatgtagtggagggtcttatagaatccggttttctgaacgggtttcctaagtctacaaacgagttttacatcgaaacctttttcggaaaacattcttcgaaaatcgtgaaggcaaagatcaataagtacagtaaggaaaaggatctggtgctactgatcccagaggatttgagccttctggacaaagggttggacatttctaccgatgccttaaatctgaatgaggaaatccgcttattgggataccccgaattctatgagggggacgaactgaaaaacgagctgggcaattatctccgaaccgtcgtagacaatgtggaaggcaacagtattaagaagtacgagttgaataccatgatttttgccgggaattccggggggcccgtgataaatagcgacggcaaagtgatcggggttgcaaccgaaggacgtaagattgaaacaaatcgcgctgtgccaatcgactacatcaaaactctgcagagcttggatatttga

SEQ ID NO: 8691 - RNA, 1629 nt, synthetic construct
  source 1..1629: mol_type = other RNA
atgaagatccagaatatcaacagttttacggagttatccttcgtgctgggatacaagagcggccacctcagaagaattctgtttaacatcaacagcagcagctatacttccttcgagatacctaagaaaaacggtgaggttcgcaagatatacagtccacagagtcaattactgatcctccagaagaaagtggcagctatactagaaaactcgttcaacccacactacaaatcatttggattcattaaagggaagagcatcgaaaaaaacgccaagctgcatttgaaacggaagtaccttatcaacattgacctcaagaattttttcgagtcaataaccgcgggtagagtttacagcatgtttgtgaactactttaagctggatcggaatatcgccgcaattctcactaatatttgttgccacccagaaggattcttacctcagggggctccgacttctcccatcattacgaatatactgtgcaagactctggataaggagttgaataacctgtcaaagaaatattccgtgacctatagcaggtacgctgatgacatcacctttagttctaacaaggccttcaatagctgttttcttacccgggaagagagcctatcagatgacattaagcgaatcattgaacagaacggctttttcatcaatgacaataagtttcggtactctaagtttaaccagcgtaaggaagtgacaggcattatcgtcaacgagaaactgaatgtggatcgaaggtacatcaggaagatccgcgccatgttgtactccattgagaataatcttgacaatctggaggtaccccgcactaagttcgacaaatcccattacaagggtgactccattgagaacctcctgaacgtaatcaaaggcatgatatcttataccaccatggtgaaaggaaacaacaatattagcacaaaactcgcaatgagattcaacgatatcttggagtgtttagagatcgacagtgtaaagccaataaaggttaaacctctggatattaacgaggaaaaggtctgcgtcatcaagctggagaacgtgttcttttattctaagaacggcgaaccttatgacatagactatgggcaagggacaggctttatcctgaaaaatgtgggaatagtctccaactaccatgtttttgaattcatcatcgaggagattgagaaagaaaagaaaccgctctgcgaagataagtatttcatcaacctgtatttcggaattaactgtaccaaaaaggtgaaggccaaagtgctgaaatatgacatcgacaaagatctggtgattctgcaacccaaagacttgaatatccttgaaatgggcttcgagcttgaagagggcacaatcgagaataactctaaggtcacacttctaggctacccctcatataatgaaggtgatcgcataaaagaggagcaggggaaactcctgcgtaagattaatgacattaagggattcgagaaatacgaaatttcctccgtcatccacgctgggaattctggtggccccgtgctcaataataaaggcaaggtactcggggtcgccacagaaggaagggggaatgatattaacaaagttgtgcctatcaccaatgttctgtcgatgttgaagtga

SEQ ID NO: 8692 - RNA, 1683 nt, synthetic construct
  source 1..1683: mol_type = other RNA
atgagaattcaggatatcagtacctttgatcaaatcgcgaaggccctcggtatctccaccggatacctgcgcagactactcttcgaggaaagagacaacttctacactgagattgagatacccaaaaaaaatggcgactcccgcaagatttttgtccctagtgatgaactgctgcagctgcagaagaaactcaatacgattctcatcagttctttcaacccctccagccgagcttttgggtttgtgcagggcagatccacagtgcagaatgctagcctgcacttgaagaagaagtacatattaaacatcgacctcctagacttttttccttcaatctcctctggaagggtgcgctcgatgttcatcaattactttaagctttcctctatcgtcgctagcaccctcactaatttatgttgccaccctgacggtttccttccacagggtgcacctaccagtcctaccatttccaacattctttgcaaaacactggacaaagagctgatcaacttagccaggaaactggggaaaatcacctattcacgatatgccgacgacattacattcagcaccaactcaacctttagcagaaaactggtgaggagaaataacggggagatctgcttggggaatgaactgatcgaaattgtcgagaaaaacggctttgaaattaactctagcaaaactcgccttcagaataataaccagcatcaagaggttactggcataaaggtgaatcggaaattgaacatcgacaggcgattcattcgcaagattcgcgctatgcttttttctattgaaagcaacctggacgacttgagcatcccggccacaaaattcgcagagtcagattataagggagattctataggaaggctgatgaaggtcatcaagggcatgatttcatatgtgggcatggtgcgtggtaagaatgatgcattgtttatcggtctggccaagaggttcaacaaactgttactcgttgtggatcaatttaaggacgaaaagcccatagtcattgatagtggcctgtcgcagctaccaaacttagtatgtgtggtcccgcagactaatattcagctgtggaagaaagataatgagatgaacatcttcagcgagattgactacgggcaagggacaggatttttgattaaggggataggaatcgtttccaattaccatgtgttcgaattcgtgatcgattccattaaagatgggtttctgcccagggagacggagtacttcgtgaaccttcggtttggcgccagccaatctaagaagatctctgccaagatcagttttttcagtgaggagctcgatttggtaattctgatccccgaagaccagattatactaaacaacggtttcgagcgggagctgagagagccagaacagaatgagacaatcactctgctcggatatccagacttctctgaaggagatcagctcaaaatggaacgtggcgattacctgcggacaaccttctcaaagaaggttgagatgtatgaaatcagcccaataatcttcgccggcaattcaggcggacctatcattaacaaatccgacaaagtaatcggcatcgcgacagaggggcggcgtatagctctgaatcgggcaatacccattaaatacgttgacgaagaaaagcttaccaccctgacttatacgctcttcaagttttga

SEQ ID NO: 8693 - RNA, 1767 nt, synthetic construct
  source 1..1767: mol_type = other RNA
atggccggtaaagtggagttaccattttgcttcggcggctttctgttgctgctgaaagagcttaagtctttttcagatatcgccgaagccctgtcagtatctagcggcaacctgaggaatattatcttcgagtacaagaagaattcctacgaaaagtttgacattcctaagaagtctggcggcattcgaacaatttacaagcctaactctcagctggcagctatccagcatgaactgtgcgacatactatataatagctacaaaccgcactacaacgctcatggctttatcaaggacaaatccatactgaccaatgccgagaaccacgtcggtaagaagtacatcctcaatctggatctggaaaacttctttgagtcagtgaaattcccaagagtgagggggatgttcattaactacttcggcctgaaagagaatgtggctacgatcctcgcaaatatctgctgccacccagagggttttctgccacagggcgctgcaacctctcccgtcatcacaaatattctcctgaagacccttgataaggaactgaccagactcgcaaaagaaagtaattgggcgaaatattctcgatacgctgatgatattacctttagctccaacaagaagttcataaagaacattgtggaggagattgatgggcagattgttcttggcaaagagttagtttggctaatccagaaaaacgggttcaaggttaacgaaaaaaaaactcgcctgcaaacgaagtatgatcaccaagaggtgactgggattgttgtgaacaagaagctgaatgtcgatcggcggtatatcagacgtatccgcgccatgctccatagtatcgatatgaacaagaatgatctcaagattcccaaggacaggttcaagaaaaaatattttcccaggaactgtaactgtagtggcgacttgttcctcacactgaaaggaatgatcacccacgtcgggcacgttaaaggaatatacaacctcgtgtacaaaaaccttgccatgaaattcaatcgccttttgcttgagtgtcggctgccatacccagcacccatcaatattttagagaagagcgatgtctattacgacaacgtatttgtgatagactcgagcaaggacatattctttattgacaacaatggcgacatggaatcctacgactacggacaaggaactggattctatttgaaagggtacgggatcattacaaattatcatgtgcttgagtacgtgctcgacgaaatcaattccggcaagaaaccgatctcttcctcaggcaatcagtatttcatcgaattctttagcggtcgggacccgtccactataatgaaggcgaagtatctctatggatccaaggaaaaggacattgtggtcctagagcctagcgactccagcctgatcggtcagggattcgacatattcaaatcaaagatcatcccccaaaatatggaactgaatctgttgggttatcccgattacaacaagaacgatgacttgaaaatcgaatcaggaaagtttctccgtaaaattgtacctgatggtaactctagaattgagatcactcagacaatttttggagggaacagtggggggcccgtattgaacagcgataatgaggtgatagggattgccgtgcgcggcgacggaaaatatcctaataccgctatccctatctatgaggttgagaatctacacgcctcgcatatcgaaagcttacctaacagtagtgtcaaagataataacctgtcaatgcagaggtga

SEQ ID NO: 8694 - RNA, 1728 nt, synthetic construct
  source 1..1728: mol_type = other RNA
atgtctctaatattccacatttccgacatcaagaactatcaggacctggctgattacttggaggtaacaaccggctatctttcaaaagtgatcaatgaccctaaccgctatcaatgtttcgaaatccccaagaaagataattccctccgatccatatattctcctactaaagatctgctggttattcagctgaaaatcaagaagctcattgaacagaatttcaatccccactacaaggcccatggtttcattaatggaaaggactttatcaccaatgcctataatcatatcgggaagaattttgtgctaaaccttgacctgaataatttcttcgagtcgatcagcattaaacgggtcaacaacatgtttcagcgttactttaaagtgcggcccaatatctccactgtcctggcacatatctgttgccacccagatggctttttaccccagggtgcgccgacgtcacctattatcagcaacgtgatctgtaagtctctggacaaggacttgactgagctggccaagagtttaaaactgacttactacagtaggtatgcggacgacatcacctttagctgcaaaaaaaaagacttcccaaagattctggccgaggacataaacggaaatatcgtgctgtcgaaccatctcaccaacctcattgaaaagcatgggtttaaagtcaacttgaacaaaacccgcttgcagagtaagtacatgcaccaagaggtgacaggtatcactgttaacaaaaagatcaacctgaacagaaggtatataaagcggattagggccattctgtacagcttcaagaaatatgtggatgaaccggatatacctattggcaaattctgcgagttctataatatcaccaacaataacatcgaggagacaaagtaccgcatttttaacatcttaaaggggcacattatccatatcagccacgttaagggatataatgacagtaacttcctggacttcatgcgaaagtttaatgaactccttgaactgtactccttatctattccagcaattaaagttctcgactctagcaacaatttctttaagcgtaatacactagtcatctacccacttaactcactggatgatccccagtactttgtggatagagacttcataaagaatggcaacttcgaaatcgattcagtctgttatgggcaagggtctgggttttaccttaaggacattggcattgtgacaaactatcacgtggtatcactgataattgaagaggtcctcgagaaaaaattgacgttctgcaaagagtattaccttgagtactttaccgagagtaatggcaagcagtacaaataccatgccaaaataatcgcatacgacaaagaaaaggacattgcaatcctcaagcccaaatatccagatctggttgactccggattcaagtacaataagaggttcaacatcaacgattccataacgctgttgggctttcccaatcacacaactggtagcgagtttcggagcgataaaggcaagataatcagaaagatcaagaacaagaacatctctacatacgagattgatgctaagatattcgccggcaattccggagggcctgtcctcaattataaaaacgaagtaatcggaatcgctactaaaggctttaccgatagaggaattgtgccgccagaatttattcctattaagtacgctatcgaggtgtataagaaccacaccgataagaaactctga

SEQ ID NO: 8695 - RNA, 1698 nt, synthetic construct
  source 1..1698: mol_type = other RNA
atgaataacccctttagtaatttgaccgtgaaactgaagaaatccgacgacgagctgatcaacgcctttggctctctgtccacttttgaggacgttgctagtattctcgaggtgtcgagccatgccttgtggataattctcgtcaaaaacaagccatataactatagagaagcatcaatcccaaagaaagacgggggcgagagaaaggtgtatattccaaacaacaatctgttcatcctccaacaaaagctaaagtatgtgctggagcttatttattcaccccactttacctcacatggttttgtgaacgataggagcatcatatctaatgccgaacgacacgttaataagaagttcgtgatcaacattgacctgaaagacttcttccccactatcaagtacaaccgaatagtgaatatgttcgtcaaggtttttcgctgttcacctaacatcgcaaatacccttgctaatattgtgacacatcatgaaggcttcctgccccagggctcaccaatttctcctctgatttcgaatgtcattgcccggacaatggatgaccagctcttcaagctctgcaaagagataaaagaagtacagtacacccggtacgccgatgatcttaccttctccactaataggaagaaaattccgaattccatagtcaagaactccaataactcctatgagttgagcgacaaactcatcaatatcatcgaaaataacggctttgaaatcaactacaagaagttcagagtgcagagcgaatacgaccaccagagtgtcactggtataaaggtgaacaagaagctaaacatcaacaagagctatatccgcatggttcgggtttacctatacatattcgagaaaaacgaggatatcaatcaggccattaaagagttcaatctgcgaagacccaaaaaaagcaacttgaaacacaggttgataaaaaacgagttccagaatcagatcttccacctgaaagtccttaaaggaatgatcgagtttatcgggtctgtgcgtggtagacgggataggattttcaacaagttcagtaagaggttcaacacaatttgcgaaaccgcggggcttaacaatatacagatcaacatccctcttctcctggaagaagttattgacaacaaaatcttggtcgtgggaaacaatgaccaatacttttataccctggatcaggggattaatacgaaggagatttccttaagtaagagcctggcagtcagtaataatgaacgcggtattatttccactaaagctaattggactacattccgggatgattttgagggaacacactactatgactttcataccattccgttgtacaggaagaacacgacagatgtgttatcttatctgaagattaaccgtgtggctgaaaatgatctgatttactttgaaggcccagaagaactgactaaaaacctccaagagatcaacacagagatcgagagcctgaaaataggaaatgtaatactggtgggactccacaataatacgatcgagatctttgaggggatcttaaccaagcgcatcctctttggagagtctaaattcatctttaagcctatctctaacgaaaatctgcctatcagcttcggctttgtatttaatcaggtaggcaatcttgtggggaccctgtcccgcggcaactctgagttatacgtcaactcaattaagtga

SEQ ID NO: 8696 - RNA, 1701 nt, synthetic construct
  source 1..1701: mol_type = other RNA
atggcggataaatttacgttactggaggagatcgacgacgtgctgaactttaagttccgaaacttgaacaactttaaggagattgctgacatgctggaggtgtccagtgagttcctgcactccatactgtacaaaaagcgtagctacgaaactttcttcattcagaaaaagagcggaggatatcgcgaaatcaaaacccccaataacaacctcaagctaattcagaaaaagttggcgtacattctctcattgaattataagatgcacaagtctgcatttggcttcataaagaacaagtcaatcatcgacaatgccaatctgcatatcaacaaaaaatgggtgttcaactttgacctcgaagatttttttcaccagttcaatcaggggcgagtcatcggcttactccgtaaatactacaagttcaataacacagtagcaggaatccttgctgagatttgttgctatgaaaatacgctccctcaaggagctccaactagcccgatcttatcaaatatcttggcttttgagctcgacagggagttccaaaaggagtgtaagaaatatcactgtacctacagtagatatgtggatgacatcagcatctccacaaataaatctcacttccctaaaaacctcgcatacaagaactcacaggaggaaatcatcctgggggagatagctcaaacaatacttgacaagaccagttttaaagtcaaccctaagaaggtgtatctgcggcatgagacacaacatcagaatgttacgggacttgtcgtgaacgaaggggttaatgtgtcacggacatacattaagagaattagggccacgctccataatctaagagtgagtaacgaggaggacggtaaaaacaaattcttcctggaactcagcaaacattcaagttcgaggtcgcaacagtttgatatgtatgccatcctgaaaggcaagatccagtttgtgggacaggtgaaggggaaggaaaatcaggtattccggaaactagcgactagctttaatcagctggacctgcctgcatctgtcaagcccatttccattctgtcttccaccgagaagaagcgctgccaaaacacatatatcgtcgaggtcggctacgaaatcggggaggaactgttttattacacaggtaccgccttttatatgaaaggagttggcatagtgtctgccgcacacactttcaaaaactactatgactgcaaagagtacgccgattcccaccacctctaccttattaatgaaaacaagctgaccgagaagatcaacattaccaagaaatacatcgattacgaactggatattgccatattcgacatcgatacacagctgaatacagacgattggggttttgaatacagcaatagcatcattgaaggccagtcttgtgtgcttcttgggtatccacggcatatcgatgggaatactctgaatactgagtttggcaaaattacccagaaaataaaccagaaatgcccaaataggttcaacaagaagaccggcaccttgggagtggaacagactcgcttcaagatttcctctgacatatatagtggcaacagcggtggtcccattttgaacgacgacgatagagtaatcgccattgctgtgaaggggtacggcgataatgccgtagaggttaataccgttgtccccatatccgatattttcacttatatgctgccatga

SEQ ID NO: 8697 - RNA, 1698 nt, synthetic construct
  source 1..1698: mol_type = other RNA
atgacagaaaagttcacgcttcttaaggagattgatgacgtgctcatatttaagttccgcaacctgaacaattttaaggagatagctgacatgctcgaaatcagtccagaatttctccacagtatcctgtaccagaaaaagtcatacgagacatttttcattcagaagaagtccgggggcagccgggagattaaatcgcctaacaacaatctgaagatcatccagaaaaagcttgcctacatcttaagcctgaattataagatgcacaaaagttctttcggcttcatcaagaataagagtattatcgacaacgctaaacaacatacaaacaaaacttgggtctttaactttgacctgaaagactactttcaccagtttaatcagggtagagttatcggcttcttccgtaagtactacaaattcaataacgtcgtcgctggagtgctcaccgagatatgttgttatgaaaatactcttccgcaaggcgcccctacttctccaattctcagcaatatcttgtcctttgaattagatcgggaatttcagaaggaatgcaaaaagtccaactgcacttactcacgctatgtagacgatgtctcaatttccactaacaagttctacttcccgaaaaagatcgcatacaaagatgcccaggaagagattacgctgggtgagataagcaaaaaaatcctggacaagaccggatttgaggtgaaccagagcaaggtgtgcctaagacataagacacagcaccaatatgttaccggactggtggttaatgaaggcgtgaacgtctctcggaaatacataaaaaggattcgagccgccctcaacaatctcagaaccaataatgaaactaacggcaaggagaaattcttcattgaactgtctaagcattcccggaactcaagccagcagttcgacatgtattctattctgaaggggcagatccacttcgtggggcaagtgaagggtaaggataatcaagtgtttagaaagttagctaccagcttcaatcagcttgacttgcctgtttccattaaacccatcagcatcctgagttccacggagaagaaacgttgtcaaaatacatacattgtcgaggtgggttacgaaaatgatgagggcattcagtgttttaccggatctgcgttttacatgaagggcgtcgggattgtgagcgcagctcacacattccgagattattataggtgcatcaaagaggccgttaacccctatttgtatttgataaacgagaacaagcctacagaaaaaatcgaaatcaccaagaaacacatcgattatgacctggatatcgccatttttgatatcgattcatcagaggacaccgcaaactggggattcgagtactccaattcaatttttgaagggcagagttgcgtgctgttgggatatccaaagcataccgacgggaataacctgaacaccgaggtgggtaggataactcagaagctgaaacagaagcatcccaacaaattcaacaaaaagatgtccgatctaggggtggagcagaccaggtataaaatctccagcgacatttacgcaggcaattctggagggcccgtactaaataatgatgagcgcgttatcgccattgcggtgaaaggattcggcgacaatggcactgaggtgaacacagtcgtaccagtatctgacatcttttcgtacatgatatga

SEQ ID NO: 8698 - RNA, 1737 nt, synthetic construct
  source 1..1737: mol_type = other RNA
atggataacaaaagcattctgttaaacgccattgatgacgtgcttatctttaagttcagaaacctcaacaacttcaaagagatagctgacatgctcgagatttcgccccagttcctgcattctatcctttacaagcggaaatcatataacgtgtttcagattcagaagaagaatggcggcacccgcgaaattaagagcccagacaacaatctgaagatcgttcagaaaaagctcgcttacattatatccctgaattacaagatgcatcggtcttcattcggcttcattaaaaaaaagtccatcgtggacaacgctaagccccacacaaacaagaaatgggtcttcaatttcgaccttaaagacttctttaaccagttcaatcaagggagggttataggcctgtttaagaagtactacaagttcaacgatagcgtggctggcgtgctggctgaaatctgctgtcacgagaatgtgctgccgcagggtgccccaactagtcctatcctgtctaacatcctgtccttcgaattagacagggagtttcagcacaaatgtaagaagtataactgcatctactccagatatgtagatgatatcacgatcagtacaaacaaggcctattttccgaaaaaaattgcacgacgggacgccgagggcgagatagttctcggtagcgtctcacaggagatcgtcgataaggcagattttcaggtaaatcaatccaaagtgtatctgaggcattcctctcagaatcagcacgtcactggtctgaccgtcaacgagggagtcaacgtgtccagaaaatacataaagaaaatccgggcgaccatccacaatcttaaggtgaacaacgagaaggttgcagaggaaaagttctttaaggaatacttgaagggacccataccaaagaagactgacctgaacatgtacagcatcctaaaggggcgtattcagttcgtcggacaggttaaggggaaggaaaactcattgttcaggaaattggcgaaggagtttaatgatttgaaacttcctaagcaagtcaatcctatctctatcttgacagccctcgaaaagaatcgccgaagatattgctttatcgtggaagttggccacattctcggggaggatatataccattataccggtagcgccttctatctgaaaggaatcggcctagtgtccgccgcccataccttcaaggaatactacgaaaacaaagagtatgctgataaacactacatgtacgtggtaaatgagaataagccagacgagaagatccctattgtgaaaaaacatatcgactacgcgttagacatcgcaatctttgaaatgccaacaaaactaagggataataatgaggggtttctgtatagcacaactgtgaacgtcggccaaaagtgtgtgctccttggatatcccaaacacttcgtggggaacactctgaataccgaatttgggcagattaatcaagagttgaaggtaagactgcccgacaaatataatagcgttacgggagaactcggggtgatccaaaaacgctataaaatttctgccgtgatctacgccgggaattcaggcggccccattattgatgaacgcgagaaagtcattggaatagcagtgaagggacatggtgagaatggcgtcgaggttaacacagtggtacctatttctgacatttttacctacatacaggactatagtctcgaacaccgtacctcgctgagtagtaaatga

SEQ ID NO: 8699 - RNA, 1695 nt, synthetic construct
  source 1..1695: mol_type = other RNA
atgcaacagattcaattgaaggaaatcgatgaggtccttgtgctgaaatttcgcaacctaaacaactttaaggaggtcgccgatctcctggagatatctccccagttcttgcgcgatatcctctacgagaaacgcaagtactcccacttttatataagcaagaagaacggtggcgagcgcgagatcttttctcccgtcaacaacctgaagatcattcaaaagaagttggcatacatcttcacactggactacactcctttcaaatcttcattcgggtttgtgaagaagaaatcaattatcgacaacgctgccctgcacactaacaaaaaatgggttttcaactttgacctgaaagacttcttccatcagtttaatcagggaagagtgataggcctgttcaggcggtatttcaatttcaataatgtggtggccggcgttctcgccgaaatttgttgccatcagaacattttacctcagggcgcccccacgtcacctattctcagtaatatgctgtgcttcgaagtagaccgtgagctccagaagctatgttccagcaaacagtgcacatactcgcgatatgtcgatgacattaccatttcttcctcgaaggattactttccaagattgttcgcgtttaaagacggggagggaaggatgagactggggagactgctcgaggagatcttgaggaagacaggtttcgatgtgaaccaagagaaaatatatcttcgaactcccaatcagaatcaaaatgtgaccggactgaccgtgaatgaaatcgttaacgtgaatcgaaactatgtgaaaaggatcagggcaagtatacataatcttaaagtcaacacggaggaagcggcccgcgaaaagttttttattgaatacacgaagcggaaagcacacattaacccgaatgcaaatgtgtatagtatccttaagggccagatccagtttgttgcgcaggtaaaaggtcgtgagaaccccgtatttaaaaaactcgcttcccaattcaactccctgaatctgccgagcaacattaatccaatttctcctctgacacgggtggaaaagtttcggcgtcggaattgtttcatagtcgagattagttttgagagagaaggcgaatttttttgtaataccggtagtgccttttaccttaaaaagatcggcctggtatccgctgctcacattttcaaagactacttcgagcactatgatagcgccgttaagcgcgagatatacatcgtgaacgaagtcgacaggaagcacaagatcaagatcaataagaagtacatcgattacgacttagatatagccattttcaatcttgacactaccatcgacaccatgaattggggtttcaacagatcagataccatctatgagaaccagaagtgcattttactagggtacccagaggactgcaatggcaacacactcaatacagaattcggaaaaattactcaggttatcagcaacagctttccaaacaaattcaactcaatagaacaggagctgggactgacccagattcggtataagatcagcgctactatctatggcggaaacagcggcgggcctatcctcgatatccatgaaaacgtgatcgggatcgcagctaaagggacctccgataatggaataactattaacacattcgtgccaatttccgacatcaagttcttgatgaattcttga

SEQ ID NO: 8700 - RNA, 1686 nt, synthetic construct
  source 1..1686: mol_type = other RNA
atgactaaacgcatagatcagctaaagacagaagacagcaacctcatctcaaactttagaaagcttaactcgttctatgatatcgcaagtctgctggaagtgacacctaagttcctctactatattctgaatgtcgaaaagtcatacactcctttcaaaattcccaaaaagaatggcgacatgcgaacgattatggctccctccaaaaacctgaagatcatccagaagaagctaagctacatcctgactaagtcttcctctctgaataagagcgcccatggattcgtacagggcaagtctattatcaccaacgcagccatgcatgttaacaaaaaatgggtactgaatttcgatctgaaaaactactttgaccagtttaaccagggaaagcttatcgggttctttaagagctactacaaattcaatgacgaggtcatcgggatccttgtgtccatatgctgccacaacaacatactgccacaaggtgctccaaccagtcctatactgaccaatatcctcacctacaatttcgataaacagatgagtcagctgtgtcggaagaataactatatatacacccggtacgtggacgacattacaatttctaccgacaagtacgagttccaaaagaggtttgtgtattataacgagaacaacgatgtgcagatcggaaatgcgatcaacaagattctcgagaaaacaaatttcgagatcaacactaagaagaccagactgaggataaattatcagaatcagaccgtgaccggaattacagtgaatcgtaagttgaacgttagccgcaagtatatccgaaagacgagagccatactacacaaccttaaagtaaataacgacaacgtggcccagaaaaaattcgacgaatactaccccgtccgccactatcgtgactataaggcatccgacaagtacaatgttgtcaaaggaatgattgagcacgtggcacaggttaaaggccgggacgataggatcttcaagaaactggctctgtccttcaatgatctcaacttacctgagcacgtctatgagctgaatttgtacagccctttcgagaaaaacttgcgcaagaactgtttcgtggttgaaatcgagtattcattatatggcgacttttaccccgccactgcttcagcctttctccttaaaggggtcggtgtcattacgtccgcccacacctttaaacagtatctcgagtataaagacgaagtggaggatataaagatctgggcatttcgggaaaatgaaacaactttgaagaggccactggatatcaagaattttgacttcacactcgattttgcgatttgccatgttgccggcatcaatcatactgaatacggctttgagttcagcaaacatatcagtctgggcgaagatatcacccttttggggtttccccagtatcagcacaagaatctgttgaataaagaacacggcgtaatcacgcaagagattaatgagtacttccaagagaagttaaacccaaagacacagagtccaggttacaaccaaaaaagatacgggattagctcacagatttttgaaggtaactcgggagggccggtgctcaactctgactacaaggtgataggcattgccaccaaagggattacttccgatgctgtgaaagtcaatacaattgtgccgatctctgatatttttcaatga

SEQ ID NO: 8701 - RNA, 1746 nt, synthetic construct
  source 1..1746: mol_type = other RNA
atgtcctacttccgcgctaaaccgaccctgcaagcctctgatgccaaactggtgtcttctttgaagagtctgcagaatttcgatgatgtggcatctctgttggaagtaaccccaaagcacctgcgatacatccttttcgagaaaaaggtcagtggatattataagtgcttcgacatccccaagaagtccgggggttctcgcaagatttgggctcctcaagggtccttaaagatcctccaggaaaaattgaacaagatctttagcctgacatataagcccaacattacttcgcacgggttcgtcaaggataggggcattgtgagcaacgcaactgttcatctccgcaagcgacatgtgctcaactttgacatagaagacttcttccatcggattaattttggaagagtgagaggcgtcctgaagagcttttttggtatgtcctgggacgcggccacagtgatcgcgaatatatgctgctacaataatgtgcttccccaaggagcacctacatcaccaatcattagcaacatgatttgcttcaacatggacatggaaatgcggaaattggcaaagaaacacaactgtcactacacgcgttatgctgatgatcttacattttcaaccaccagacagacttttccttctgccatcgctcacctcgatgaggaaagggtcgtctacctgggatccaaaattcagaagatcctggacaacaatgatttcgccgtcaagaagagtaaaactaggctgaataatcgggatcaaaatttatcggtgacgggcatcaccgttaataagatcacaaatgtggagcggaactatatcaagaaggttcgtgctatcctgaagtgtctagagagccatcccctgtcagaggcccagaagatcttcgagtccaagtattactctaaacctgggaaaaaaaacgcagaaatcatgaacgttgtcaaaggcatgatctcccacatcggatatgtgaaaggaaaacaggacccaatttacgagaaactggcccgccggtacaacagactggcagggattgagacgttaaaagtgggggaggcctttcttaaggactggtcacagaatgtcttcgttattgaagttggctatgacaatagcggcgtattcgatccacagcaacaaggcaccggattttttctaaaggacgtgggcttcgtgacaaaccaccatgtcgtaaaagaatacatcgatgacccggatatttatgaaattcgggtgcaccgttcaaggtacaataaaaaatgcttccaggctaaagtgaagatgtactgtaaggagcgcgacatagctatcctcgagatagatgggtttaacatcacagggtttgactatgatctgataaactatgacggccagtccataaaagtgataggttatccaaggtacgggcatgaggatagtttgtttgtggaccagggtaccattgtgcagtacagaagtgagttcatgcgcaccatctacaataagaaaactcaggaactcggactctaccaggaacgaatcatatgtagtgccaggatcatttatggaaactccggtggccccgtgataaacaccagaggccaggtgattggcattgccactaagggtttcagcaatgtaagcaaaaaggaggaagatgacgactccagcgctgcctcataccttgtaaaaatcggcgacgtttttgacatgattggggagaaggaggagtctgtcccctcacctgttagcgcgatttga

SEQ ID NO: 8702 - RNA, 1737 nt, synthetic construct
  source 1..1737: mol_type = other RNA
atgtcccactttatggccaaaagccaacttaaagcctccaatgagaaactcttggaaagtttccgcaccctgcagtcctttgatgacgttgcagacatattagaggtcagtccgaagcaccttcactacattctattcaagaaaccaaagtcgcagtactacaggtcattcgctataccaaaaaagaacggtgggtaccgtgaaatcactgcccccactaggtcccttaagattctgcaggaaaagctaaatcggatattcagcctggtgtataaacccaatattactgcacacggttttattaagggccgcgggatcgtgactaatgctacagtacacgtaagaaagaagcatgtgctgaacctggatttagaggacttcttctcaaccataaatttcgggagagtgcgcggaatcttgaaaagcttttttaaaatcggcgatgacgcagctactgtgatcgcgaacatctgttgttacaacaatgttctgcctcagggggctccgacctccccaatcctgtcaaacatgatttgtttcaagctcgataaagaaatgcggaatatcgcaaagctctataattgcgattacacccgctatgccgacgatattactttcagtaccaatcatcagacgtttcctaaggagatcgccctgtttcgggaggaaaatatcgtacacctggggatcaaggtcgagaatattatagagtccaacggtttcaagacaaacaactctaaaacgagactcaacaataggaatcagaagctggccgtgacgggcctcactgtgaataaaatcgtcaatgtgaaccgtggctatgtcaggaagacaagatctattttgcgctgcattgagaaatatagcctcgagaaagcccaagaaatttatgtggagaagttcgccaaaaaccataagggggttaagatcattaacgtggtgcagggcatgataacccatattggacatatcaagggaaaacaggaccaggtttatgagaagctcgcgaggcggtataatcggattcgaggcgaggaggtgctgaaaatcggtgatacatttttgagccagaacatctgcgtcattgaggtggggtactatgacgacgagcagaattttatgcctgaagtccaagggactgggttctttctgaggggtgtgggactgataaccaaccgtcacgtgattaaggaacacttagaacttcccgagatctatagcatcaagatccaccggtctaaatacgactacacatattataatgcggtggtgagaatgtctgacgaggaacgagatatcgccattttggatgtcattggcatcgccccagagggcttcgagtacgataacgacaactacacaggccaaaacattaagctgatcggataccccgactacggccataaagattctctgtacatggaccagggcgtcatcacacagtacagaaaacagtggatgcctaacgtttacaatctcgataccgaagaattgggagtttttcaggaacgaatcgtctgcagtgtgcgcatcgtgatcggcaactctggaggtcccgtcgtaaaccttaacggacaagttattggcatagctaccaaaggattcaaaaagattgacaagtccgagaaagacgacacatcaaccgaggcaagccatctggtaaagatagaagatgtttttgaactcctggctgaacaggagcaaaagcttctaaccaacaccctggagaatgtgtga

SEQ ID NO: 8703 - RNA, 1740 nt, synthetic construct
  source 1..1740: mol_type = other RNA
atgaattacttcaacgccaaaccagaacttatggccaacgaccagtcactgatatccagctttaagtccttgcagtcattccgcgacgtctgcaatctcctggaagttactcctactcatctgcgctatatactttttgagaaaactccaagccagtactatacctttttcacgatatctaagaagagtggcggtattcgggagatcattgcccccaatggcgctttgaaaatcctgcaggagaagcttaataagatctttaaactggcttacaagcccaacgcctccattcacgggttcacaattgataggagcatagtgacgaatgcgcggatgcacctcgggaaaaaccatttgctgaactttgacctggctgactttttcccctcgatcaacttcggcagggttaggggggtcctaatatccttctttggtatgggatccgaggccgctaccgtaattgctaatatctgttgctacaagaactctctcccccaaggagcaccaacgagcccgatcctttctaatatggtgtgtttcaacttggacaagcagctgcagctagtcgccaggaagaacggttgcacctacaccaggtacgcagacgatattacctttagtacaaccaagcacttatttcctaaatcaatcgcattcgtggagaatgagatcgtgtatatcggacccaaaattctgaagatcctggaggacaactcgttcaaagtaaatcacctgaagacccgtctcaacaatcgcctccagcacctaggggttacaggaatcactgtaaacaagatcttgaacgttaagcgggattatatcaagaagattcgagcgattctgcggtgcctggaaatcaatagccttgaacaggcacaattcatctttgagacaaagtacacaaagattcgcaataaagcacctaacagtgagtatcccagtatactcaacgtggtaaaaggtatgatcgactacgtgggtgcagtcaaaggaacccaagatcctatctacgagaagctcgccttcagatacaatcagatctgtaaattaccagtgtttaagatcggggaggaaaataccgagtcttggaacaaaaaagtgtgggtcgtcgaactctgtatcgaggccgaagacgatggcaagatagaatatataccagtgatacaaggcactggattctttttaaatgatattggcttcgtgacaaacgctcatgtcgtgagagactaccgggaatatgatatcattcgaattagcagatccagatacggcagtgaagtgaagaaagcctctgtcatcaagttggatcgagacagggatatcgcaattctgaagatagacgacttcgaggattggtctggcttcaaccattccttcgttcattatatcggcatggacgtcaaagtgattggatatcctaattttggtggcaatgattcactgtatgtgcacaagggggagatcctgcagtatagagttgaacacttcccggacaagtacaataaagcgactgattcactggggatgaaccagcatcgtaccgtgatttctgcccgcattattgccggaaattccggaggccctgtcgtgaacatgcagggcgaagttgtgggggtggcgacaaagggctttaaagagatcagcccagggaaacacgacgatgatactgccacaagcattatgatcaaaattgaggacgtaattagctttgctaacgagatggaacccaccaaagcttga

SEQ ID NO: 8704 - RNA, 1728 nt, synthetic construct
  source 1..1728: mol_type = other RNA
atgtcatattttgacgctaagattgaactccaggcgactgatgaggaactcatccacagttttaaagacttggagaactatcgggacgtgtgcagcctactggaagtgaccccgaagcacctccattacatcctatataagaagaagaacctgtactatcagttcgacatcccaaaaaagaatggcggcacccgtgagatttatgctccgtgcgactcacttaaaatcctgcaacagaagctgaattacatcatgagcctcatatacaaacccaaatacacaatccacggctttgtcaaaagcaggggaatcgtatcgaacgcaaagcaacacctgggtaagagctacatcctgaatttcgacctgtacgacttctttccatcaataaatttcggaagggtacgcgggatactccggtcttattttgggttgggcgatcatgcagctacaattattgcgaacatttgttgcttcaacaattctttaccccaaggtgcacctacgtctccaattctctcaaatattgtgtgcttcaacctggataaagagttgcaatttatagccaaacagcattcttgtatctacaccagatacgctgacgatatcacgttcagcacaacgaagaaagatttccctaaaagtgtggccttcaagactgattcccagatttttctcgggaagaagattttgaaggtgatcgagaagaacagcttcaaagtgaacgagaataaaactaggcttcacaaccgctatcagaatctttccgtgacagggattaccgttaacgagaaactgaatgtgccccgaaactacattaagcgcatacgcgccatgctgcgttgtatcgagacaaatacaccagaagatgcccaggttattttcctggagaaatacaagtttcggtatagagccaatatggaacctcctaatattatgaatgtcctgcacgggatgatcaactatgtcgggtttgtcaggggcctggacgacgaaatctttaagaagttagccttgcgatataatctcattgtcggcaacgataaaatcaaggtcaagaaagacaacctcgccctgtgggaatcttacgtttgggtggtcgaggtgggatacaaggatgacgacgatttttacgccgaggaacagggaactggcttcttcttaaagaacgtgggtttcgttactaacgcgcatgtaattgagaaatacgatggtgaatccattaatgcaatctatctgaatcggagtcggtacagtgaggaacagaaattggcctccatcataaccatcgacaaagacagagacatcgctatactgtacgttgagggctttgatattgattatggctttagctacaacatccatcacaacttggggcaggaaatcattttactgggttaccccaatcacggagacggaaattccctttatatcaacaaaggccagctcgtacagtatagatcccactatatgcctaacacccttaataaggagacaggaaagctgggagtgaaacaggagagggtgaccatctcctctcgaatagtgactggcaattcaggaggcccagtcattaacctgcaaaacgaggtgatcgggatagctaccaaggggttcaaggatatcagccccaatctaaaggatgattccaccgcagaaagcatgatcgttaagattaaggacgtgctgtcggtccttagtcagatgtctaaacttcatagagaaaactga

SEQ ID NO: 8705 - RNA, 1743 nt, synthetic construct
  source 1..1743: mol_type = other RNA
atgtcctacttcgatgctaatatcgagctacaggcaaaagatgaggacctcattgttgccttcaagaaactcaaggattttcgagatgtgtgcgatattctggaagtgacgcctacccatttacactacattctgtacaaaaaaggtccatcaaaactttaccatcccttcaatatccccaaaaaagggggtggcactcggcagatcttagcccctaacgactcactgaggatccttcagcagaagctgaactacattatgagcctaatctataagccaaagtttgccatccatggatacgttaagggccggagtattgtgagcaatgcaaagcagcacctcaacaagaactatatactgaacttcgacatagaagatttcttcccgtccataaattttggccgtgtccgcggagtgctgaagagtttctttggaattggcaaagatgcagcgacaatcatcgctaatatctgttgttacaacaaccttctaccccagggagctccaacttctcctattctcagtaacatgatctgctttcaactcgacaaagagatgcagttgattgcgaaacaacatagctgcgtctacactcggtatgcagacgacctcaccttctccacgactaagaagtccttccctaaggccattgcttatcacggggacgattgcgtccacctggggaagaggatcctggctacgatcgagtctaacggattcaagatcaacaataacaaaacccgcttgcattctaagtatcagcacctgggcgtgaccggggtgacagtgaacgaaaagttaaacgtgaagcgggactacatcaagaaaatacgcgcaatcctgaggtgtttggaaattaactctctcgacgaagcccagaaaatattcgaggacaagtacatccgccgccacaccaaggaggtgaattttccgaatattatgaatgtggtcagaggcatgattaattatgttcggcttgtgaaaggccccgaggattctatctttgagaaactggcaaggagatacaataaaatcgccggtgttgaggtcttcactgtaggtattcagcactccagattttggactagctacgtatgtgtggtcgaggtcggctgcaaggacgaggatgaattctatgcggatgaccaagggaccgggttttttcttcaagggatcggattcgttactaacgctcacgtggtgaaaaagttcaatggcattgaattcaacgccatatatatcaacaagtcaaggtatgaccaaaccaaaattgccgctagcatactgactatggatgaggagagagacttggctattttgaagattgatgggtttgagagcaacatcggattttcatactcgacaaactactatgggggccagcccataacactgctgggttatccgaatcatggtggaacagacagcttgtacacagaaaatggagaaatcaagcagtatcgtccccactatatgcccaataagtacgacgaaaaaaccggcaaactgggcgttcatcaggagcgaattgtgattagtcctagaattgtgaccggtaactcaggaggccctgtagtgaattctcaaaaccaggtcatcggcgttgccacaaaggggtttaatgaaatatccccagggagtaaggatgaaccaaccgccgactccatcatcgtcaaaatcgaagacgtactggccctccacaccgagatgcgaagcgatgagacaccaatagccaatcagtga

SEQ ID NO: 8706 - RNA, 1746 nt, synthetic construct
  source 1..1746: mol_type = other RNA
atgaacactaatttcaaggccaatttgcagataaagagctcggtagaggacatccaaaaaaagttcaagaacttatccagcttcgacgatgtgagcgatctgttggagatctcccctaaacacctgagatatatcttgttcgagatgaaggacaggtacaagagcttcgaaattccgaaaaagaacggggagacaagatctattgttgcgccctctaaaagtataaagattctgcagcggaagctgaactacatcctgtcattaaactattccaaccgacctacgagtcacggttttattaaagggaaaagcatagtgaccaatgcccagccacacgtgaaacagtccgtagtgctgaatttcgacctgaaggacttttttagtacaatcaactttggcagggtgcggggtgtctttattaagtttttcgacattggcgacgatgctgcaaccgtactagctaacatatgttgcaaggacaatgttctgccacaaggggcacccacctctcccattatctctaatatcgtctgttataagctcgacaaagagcttctaaaattcgccaaaaaacatagctgtgtgtatacccgctatgcagatgacataacactctcaacgaataaaaaacacttccctaacgaaatgatccagctcaacaagcagacatacaccctatcaaagtctctctttaataagatcgagaacaatggcttcaaaataaacgacaataagacacgcatccgctactgctctcagcgtatggaagtgaccggcctcactgtaaatgaaaaacctaacgttacaagacactatattcggaacatcagagctataatcaggtcaattgaaaaatacgggttagaggtggcccaagagatccacgagggcaagtacatcaaaattcatctgaaatctaccccacagattaccaatctgcttatcggaaagctgaactacgtgaagatggttcgagggattgaggactccgtctttaacaagctcgccaagcgcttcaacaaagctatgggtgacgaacttgtggagacgtacaagtctaaaagggaattgcgagagttgcatacttacgtcgtagattgcggctttattgtcgacggcgaattcatcaacgagtcacagggcagtggttttttcctcaaaggagttggatttgtcactaatgcccacgttgtgaagctgtataaagaaaacaattccaacgagcttccatacgagattcgtattcatcggtcgagatacagcgatactgtcctcaaggccattctgactatctacaatcgggacttggatattgcaattctgaacgtggaaggatttaactccgattatggttattcctacaaccttgacaatgaatatggtcaggaaataagagtgatgggctatccgaatcacaacaagagggacagcctggccaccgatagtggagagataaagcaatacagggacaattacctcaaagaaactgttaatcaagagacaggagagctgggagacttccaggaacgctttgtggtgagcgctcggatcgtggatggcaattcagggggccccgtgatcaacaatgacgatgaggtcatcgggatcgcgacaaagggattccgtactcttacagatagtgggtacgatgaagataccgataccagcattgcagtgaagatcgaggatgtcatcaaactgatcgagtccaaggatcagaaggacctgaattatcagcattattga

SEQ ID NO: 8707 - RNA, 1464 nt, synthetic construct
  source 1..1464: mol_type = other RNA
atggacgagagccaaatcaccaatatttgcacgtttgacgagttggccaatgccctggaaatcgaaccatcgaaactgagatacatcttgtggggaaagaaacctccatcatattatagccgcttcactattcctaaagccaatgggaccaagcgacaaattagcgccccacaggggcctatcaaggtgttacagtaccggctcctgagaatcctgaacgcctattattcacctaaacgggtggtgcacggttttactaagggccggagcattgtgtctaatgccaactcccacattaacaagaattgggtagtcaacattgatatcaaagacttctttccctccattaattttggacgggttcgcggtctgtttctgaaatctttcccagggatgactaaggaatccgcaaccgccatagctcagctcacatccgtcttcaatagccttccccagggagctcccacaagccccatcatctcgaacatgatctgttctagattagatcgagatttaatggactttgctcgccaagataacataaaatattcacgctacgctgacgacatcacactctcaggcgatggcgcagtgaggtccagtatcggcgaatatagtaacggactcttggttttgtccagcaaatgtatcaagatattcaacgacaatggtttccagatcaacagtgataaggtcagagtaagcttcaagtaccgcagacaggaagttacaggccttgtggtgaattctaagattaacgtctctcgcaagtatatccgcaatctgcgggcacttctgcacaacatcgagacactggggttgagtgaggcgcaggagctgtacaccgaaaagtaccatggccggggttcactgcagagttatattcacgggaaactcttattcctaagaatggtgaggggatctagcgacaatctatatgatcggctggttaacagttttaatctcaacatagctgaccggccgggaaatgactccaacacccacctcccgaccagggcagagattaaagctatcctcagcaggctagatccctcctacggcaataggtaccatcgaatatggagggaactttacgacgagacggattcaacaggagagaacctgaaaactgccctgtacttaatgagagaggtgattggcgggctgatacgtaggttcgcgaagaatgagtccgtagaaaactatttgaacctgtcccctaacctgcgtataaccaggttgcagcgttgcaagtatctctcagaaaagtctcttgcaactggggaggaaagactggccaaactttttatgtacatcccaggctactacaatgatctgaacaagctacattctctcgagatcgttgacaaagtcgatgtgaaagtgctggtcgacaaggtcaatgagctgattattgaggtggtgaagagcattgagatgctggaacttttccgactcagttga

SEQ ID NO: 8708 - RNA, 1659 nt, synthetic construct
  source 1..1659: mol_type = other RNA
atgtcctttgtaagaaacagggtgaattcgaatcggaataggagtgagacgataaaagagttttgcgataacatcggggtgtcaaaagagggcttcctcctgtataacaaggaaaacgagaaagaatacaaggtgtttgatctcataaagaagaatggctctctgcggaaagtgaaagctccatctgcaggactggcgggcctccaacgcaagatctccaagatcctgcagacaatctacaatcagccaaactgtgtgcatggttacgtgcccgaccgaagtgtcgtctccaatgcccagtgccatgtcaacaagaggtatattctgagcatcgacattaacgacttctttggatccattaccagaaatagaatcttggggctttttaggtccatcttttctgatcaaaacctctgcgaggctttgacaaacatatgcgtcgtagacggatgtttgcctactggctctcccgcctctcctgtgttatctaacatgatcatgttcaagatggaccgtaaaatcatgagcatctgtaaaaacaaccacgttttttatacccggtatagcgacgatctgacattctccacaaaaaccaagtcattcccctctgagttcgtatatttagatgcttgtggttccctgactctcgggaaatcaattgtcgcgatattcaaggagaatggattcagtataaacctgaagaagaccaagctgcgcagccgaagtaaccgtcaagttgttaccggggtggttgttaacaagatcaccaatatcccttcgagctatatgtctaatttgcgcgccatcaaaaatagcatatcaaagcacggtgtggacggggcccagaagattttcgacgagaattacaaggaaacacggtacaaaaatagagttaacattggccatcacatttctattaaggacatggtgcgcggcaaaatcgaatacattgggatggttcggggaaagcaggacgccctatacagaaagaacctggattggtacaataagaatttccgatcactgggcgacccagaagaatgtgtgtaccccatctactttatcatcgatatgccagagaaaagtaaacagaaggaccataggattaagaatgactgcggccagggtacttgctttttcctggaagatgtgggcatactaactgcagaccactttcttcctagcgtcgaggatgtggaagcagctggagatcaccttcggctgtattttgagactaaggacggctgcaaacacaacgtcaagattgagaacaggtatccgaagattgacatggcagtactttccttagaggataatctgttcagaagcaaaaagctctacgtgaataccgacttctcacacagcgatcgccttaccgtgtcgttgtatggatttcctgactgcgccgtgggcgaaagtctgcaggtgagagattcagtcattacgggaacacgcaacagagccgatgaaaaagagattataattcgagacggcatcaaagctggtatgtccggcggtcccgtaactgatcaggccaacagggtcgtgggggtcattcataaagggggaatcgatgagagtgggaaatgttactacaaaccgatcaacgatctctatcacatcatcaagccaatgcattccagcaatcggagccgttga

SEQ ID NO: 8709 - RNA, 1707 nt, synthetic construct
  source 1..1707: mol_type = other RNA
atggtgctgaataagaatttccccgtagacatccctgaggacattagagactgtcggaatatcacagaccttgccaagcttctgaatataaatctgaaagccctgttcttctttgcatataaaaaagaacggctgtacttgtccttcaatattaagaagaagaacggcggcgctcggaacataagcgcgccaattgaagccctgaagaacacaaccaaaaaaatcaactcttacctctcagtggtctatgaggagtataagcctaaatctgtgcacggtttcgtttatgatagagatgtggtcaccaatgctgggaatcatctggataggaagtacatcctcaatatagacctgcttaacttctttgaaactatcaccgcccagcgtatctatggcctattcaaacgctatccgttcattttcggtaacaagttcgcttccatactcaccggaatagttacatataacaattgcctgccccagggttctccctgttccccagtgctcagtaatatggtatgtctgaagatggataaacagctgatcaacctcgctaatgagaacggctggagatatacacgctacgccgacgacatcacatttagtgctaacaagatatcgtccaatttagcaaacttcgcaagtgacggcattaacgtcggggagaagatcgtgaatatcatcaacaagaatgggtttgccatcaatgaaaagaagacccgactgagctcgcacaatcagagcaagtgggtgactggaattaaggtgaacaagaaatgtaacgttagcaggaaatatgtccgtaacgtacgcgcgatgcttcatgtttgggaagcatacgacgaaaaattggcagaaaaaacgtacaatgccaagtataactttggcaagaacaaaaagttccggagtgtcgtaaacgggaaaattgagcacattggccatgtcaagacgaagaaggacctcatctacatcaaactgcacaaccgatactgcgaattagtgggcgagtcacacaagaggctgccggagacaaagaaagatgaatacttgaacaaggtgctaatgatacaaggacagagtggctacggatctggctttttcattacgcagcatctcatcttgacttgcgctcatgtagtcaagggttctaagaaggtgaagtttaccacaagactcaataaactgccagtggagtttaaagaggcctccgtgattgacatcaatattgagaaagattacgcgattctgttttcagagaagaaattcaacgagttcgtttttaagtgcaaccttaataaaggactgaacatgtattcccacaatgacgcctacatcagcgtgggatacgccgggtttcgcactgatggaaatttttgggttgaaccttccattgcagaccaaaaaatcgtccagactaaccagaggaaaaacgtcaatagcttcgatgtgtcaggggctatgtggaaaggcatgagcggtgggccaatcattcttgagcacaccgattacgtggaagggtatatcgtgaacggcgcctcttccttagatacctccgaagacgttaaatcacacagcttttaccccattagcaacattccaaaaaaatactacgagcccaagtttttgaccctcctaatcgatgagatgtatggatctaggtttaccgagactaaggaagtgggaatgcctgatcaattcttcacttga

SEQ ID NO: 8710 - RNA, 1584 nt, synthetic construct
  source 1..1584: mol_type = other RNA
atgaacctaccagaggctgcttaccatttctttgagatgagcttgtttgctaaagatgataaatccctgctggaagccttttattcggccaaaaattacattgacttggcagatgttttcgaaatcacacccaaacaattcaaatttcacgtcttcatggtacctggggacaagaagtacgtgcagttcactttgcagaaaaaaagcgggggggtcaggaacatttacgccccaaacggtaacctcaagttcatccagaacaagctttcctacattctatacaagatctacaagcctacgtttagcgctaagggctttgtgctgaatgaatcgattgtgagcaacgcccgcctgcattctggcaaaaaggcaatccttaacatcgacattaaggactttttcgaaagcataaacttcggcagagtctacggacttttcaagtccaaaccgttttctttcaatactgaaatcgctgccgagctggctaacatttgctgtttcgataataaactcccgcaaggcgccccaacctcacccatcgtgaccaacatgatctgcgtgggccttgataaaaatctgcagtccttggcaaagaaatataatctgatttactcccggtatgcggatgacattacatttagtaccgatttcaagttcctacctcaggctatcgccctgggcaaattgaatgtggttgaagtcggcgagacagtgaaaagcattctgattaagcacggattcaagataaacgacaaaaaaagcaggatctactaccacttcaatagacaggtagttactgggctgatagttaataagcaggtgaatgtgtctcgaaactatattaggaacctgcggggtatcatacactctattgagaagtttgggctccccgccgcagagatagagtttcagcggaaatatgacaagcagcggttacccggaaagtccgtaccaccctttactttttatttaaagggcaagctgtcctttctggcccaggtcaaggggacagagtcctctgtctatatctctatcgttaagaaactccgatcactcatacctggggagttcgagaagaccctcaccaagttagaagagctgcgcaaagactttgacgacctgaacaaactggtttataaaggtgcaagtatcaccgctcgtcagaggggatttgaattcgaaaaattcctcgccgaactttttagtttctttaagatcgacgtgacggaatcattcaagcgagtgggcgatgagcaaattgatgcggccattaacttcgactcctggcattacctgatcgagtgcaagtggaagtcaacacaatgtgatactagggatgtcgacagcctgaccatgaaactgtcaagaagcggatctcaaacaggcggactttttattagtataaatggatggagcgcaaatgtggtggaaaacttgtcacgcaatccaatcaagaataccatcctgatcaacggtgacgatattaaagacatcttggtggagaaggtagcgctcgatcagctcctcaagttcaagttacagagactgaatctttatagtgagccttatgcacgctgggagtga

SEQ ID NO: 8711 - RNA, 1401 nt, synthetic construct
  source 1..1401: mol_type = other RNA
atgctgtccatcacaaacaacaccatggaagttgtcacagacacctttaataagaagtacagtaagtacttcaggaatattgacgaatcaactataagcgaggaacaattttctaatcgtctgaagtcgtcctggaagtcttcatcttgggtcaatgataacgagagcttcttcgctaattatctcgtgaatgacgacttcctgctgcaaatcatcaaaaactcaacattacccgatttccagaagcatttggccctagaagagtttaagcggcggtggcagcagtatgaaattgccaaggaaaaattcctgcagattgtctccgggagggatctggccgtcttctttgagctgaaatatcagagtttcctttctaccatcggtcttctcaagttcaacaaccagaaaaagtattccgagttcacaatccccaagaaatctggcggagctaggattatcaattctccaaatcaacagctcctgcaccttcagcgcaagctgaacttcatactaaatctgttttacgatcctccaaaagcggcccacggctttataaacaagatcatcaacaaggagaaggttagcagccgtggtattgtgtcgaatgcaaagtctcactccggcaggaaattaatccttaattttgacctggaggatttttttcctagcataactggaaacagaatcttcagctttttcagggcatcacccttcaattttaacaaagaggttgctggtctgctcaccgagatatgctgtgatccgaatataaaagggctgccacaaggggcagcaacatcccctatattgtctaatatgatcgccagaagattggacatcaaattgattcatctcgcgagtaagcacaaactgatttacaccagatacgctgatgacattacctttagcagcaacaagttggacgtgccctccgacttcctggacgagttctactcagtgattactagcgagaaattcaagatcaaccgagaaaaaacgagacagcatagatactcccagaaacagatcgtaacgggcttaattgtgaataagaaagccaacgtcagccgcaaatatatccgaaatgtacgcgccatccttcacaacattgagaactatgggtacgataagtgcgaagaggtgctgaatgagaagtatgctaaatcaaaaaagggcatgatctccctcgaaaactacctacggggacgaattgaatttatcggcaatgtgcgcggaaagaacaaggagcaggacaagaatgatatttacaacaagctgaagaaccggtttgagaacctcgtggtggggcctagttttgaaccaagtccgattatcgaaaacgaaactagtaaccgcaattccaaaaccctctcagagcggatgaaagagattgataaatga

SEQ ID NO: 8712 - RNA, 1734 nt, synthetic construct
  source 1..1734: mol_type = other RNA
atgaagataattcggttcctgctgaatatcctggaagaattttatctccttcataccaggaattttgagtatgccctctggaatatcagggaatatggttaccggaccaaaaagataaccaagaaaaatggaacagcacgcgagttgaacatcccaccctcctttgtcaaaacgatgcagaaaaagatcaatgaacttctgcaagaacagtacattgctccaaaaccagtgcacggctttattaaggcggatgagaacaacaaaaagagcataatcagcaatgcaaatatgcacacgaaaaagtacatagtgattaacctggacatcaaagacttctttgactctatcaactttggtcgcgtccgggggttatttctaagtaaaccgttcgagattaacgaaaagattgctaccaggctggcccagcttgttataaatgacaacaagttacctcagggcgcaccgacttcgcccatccttagcaatttcatctgtaaacaaatggaccataacctgatcaaagtggccaagaagttttcgctcacttattccaggtatgccgacgatatcacattttcctcccataaaaagaatctgaacctgaagtacatcataaaagagattaccgaggtagttaagaataatggcttcacggtaaatactaaaaagactcggtttcagatggcccatcatacacaaatcgtgaccgggttgaaagttaaccagaaggtgaacatcaacactaagtataagaagcagattcgaagtatgttatactcatggtttaccgatggactcacaaaggctacacagcttcactttaaggagtacaataaacagaagcgtaaatacctccctgaaaaggagaaatcattcaagaacattgtgatcggaaaaatcaacttcctggggttagtctgcgggaccgataaccccttgtatcaaaagtacagacacacatactttctactgagcgataagttcattctcacaagaaaattggatgagtacgaggagctagatattaacgacatcaaacgcagaaaagctcttagcatcttcattcagatctacaattccatactcattttcactgaaggcgagacagacatactatatattaaaagcgcgctccagtcttttcaaaagaagggtatgtacttggatctcaatctgcgcttttgtaacttgagaggatgggtgaacgtgaaaaacattcacgagatcttctacaagaataccaacaagtctaatgatctcactctgataaaccgacgtaagtgcgtcagtccctttatcccaaagtctttcaagctgtgttttatacttgatgctgacgacgatggcattaggaaatacttcaaacatcagaagcacaaaaactatcacctcatcgatgaagccaatcagggctatattgagaagttcatcgacaagaacatcatcattgacattatcaagaactctggatattcaattgaccctaccaaagccgggaccacaaagcagaaattgattgaccacctgaaggacaataaggaaaaagatgagatcttcagtatcgacaattatattgtctacaagctgctgctgattaaaaagactgagctggcaaatatcatatcaaagaaggacatcgacttcagcaacttcaaagagatgttcgatttcctgaaaaaactggaacctgataatgactacgccgatgaactgtgctgcaactccctgtattga

SEQ ID NO: 8713 - RNA, 1707 nt, synthetic construct
  source 1..1707: mol_type = other RNA
atgaatgaactcgaagacttttacacgcataataaaaaggtgatcgagtatgcccttttgatcatccgtaaagaaaactataccaagaagtacatctcaaagaagaatggatctctgcgcgaactaaatatccctcctcctttcgttatgcagattcagaagaaattcaacagcttgctgcagaaactgtattccccccctgccccaattcatgggtttatagagaagaaggatgacatagtgaagtccatcgttacaaatgccaatcagcacattcagaaacacattgttatcaatgtggacatcaagaactttttcgctacaattaacttcgggagagtccgcggtctttttttagcagaacccttcaaaactactgagcagatcgccaccagactcactcagctggtaatcacagaaaaccaactcccacagggatcgccaacaagtccgaccattagcaacttaatctccttgaaaatggataaccagctgacgaggctggcaaagcggcacaagatggtatttacaaggtatgcggacgatataaccttttctagctaccgtaaaaacattaacgttcaggaggtgatagaggagattgagaaaattgtcaagattaacggcttttcccttaatccccaaaaaacccgagtgcagtatccacatcagagccagaccgttactgggctcaaagtcaaccagaagattaatctggaccggaaatacgtccgacaaatcaggtctaagctgttcagctggtattcagccggattggataaagctaccgagctgcacttcgagaagtttaacaaacaatccgtgaaatacgcgagcgccgacaagaccagtagctataagaaaatcgtcctcggtaaaatacatttcttaggacaagtgttaggccaggataatagtcactttatcaggttccttcatacctattacttgttggagtctaattttgtccttgaccgggagaaggtggaagagatttacgaaaagttcgatctgaataatcctaatcccaacgatgtgatcaaaacgttttctcagatctatgactccatgctaattattactgaaggcattaccgatgtgatctacatcaaacaggctctcaagtacttccaatctaaagggaaattcattgatcttaagctcagatattgcacaatgggcggatacgtagatgtcatcaagctccataaaattctgcatgacaaagacctctgcaaaagtttttgtgacgtggagaaaagaaatttcatcctcccccttataaacaagaacctgaagacatacttcgtgctggatgctgacgagaagcaaatcctggattacttcaataacaagaaccagctaatgaagaattacttcctactggacgaagtgaaccggggctatatcgaaaagatgatcgacaaggaaatcataatcgactttatcatgtccaagggctacgatattgatccaacacgcgaggagctgggtgataaatcaaagaatggcctgaaagagtacctgaaaagtagcaagtttactgacgaagagatacacgcaccgaagaacacttcatacattgcacacaagaagaagattatagaaaagacccgcctggccaaacacataaagaacaaggaagacgtagattatgggaattttgagtcattgttcctgaaactggacgagatcaaaaaccactga

SEQ ID NO: 8714 - RNA, 1725 nt, synthetic construct
  source 1..1725: mol_type = other RNA
atgcataaaattgaagaattttaccacagccacaaaaagatttttgaatacgctctgtatcagatccgcaccaaaggatattccgagaagatcatcaccaagaaaaatggcggccaaagaaagttaaatattccacccactttcgctaaagtcgtacaaaagaaactgaacaccttgctgcaggacatctatatcccgccaaaacccgtgcacggatttatcaaaagctacaagttcgacacaaagaatattgtgtctaatgcccttaaacataccaagaagagcatagtgattaatgtagacatcgagaatttcttcaacactgtgaatttcggccgtgtgaggggactctttatttctaagcctttcgaaatagacaaggatattgcaactcgactggcccagcttaccgttttcaataatgaactcccccagggtgcccccacctctccaatcattactaacctcatttgcaagaagatggattttcagctcctgaaagtagcaaaagagaactctcttgtgtttagcagatacgcggatgatatcactttttctacgaacaaacagaacatcaacatagagaacatcatttcagatatcgagcaggttatcgtcgataacggtttcaagattaacacaagcaagacacgcgtgcaattgcagaaccagacacaaacagtgaccggactgaaggttaatcagaaggtcaatctggacagaaaatacattcggcagatacgctcgatgttgttctcctggtatacagatgggcttaaggaagccgcagagaaacactttgagaagtttaataagcagccagataagtacctgacagacttagagagttcctttaagaatatcctgatcggcaagattaactttctgggtcaggtcaaagggagggacaattttctatacattaagtaccggcatacgttttaccttctcgacagtaattttagcttaagcaaaaagctcaacgaattcgaaaaactggatctgaatcacctgaatcagcgatgtgtgactaccatattcacccagatttattctagtatcctggtctttactgagggcatcactgacataatgtacatgaagaaagcactgaagtactttcaagaaaaggggaaatatgaaggcctacacctccggtattgcaacttagaatcctggtccaacgtaagtaacattcataaggttttctacgagaatcaaaaggacctgtccatcattaatatgaggaagtgcatactgccttatgtcaaagacgacttgaagttctgtttcatcctggatgcggacgataggaacatcaagcagtatttcgagagatataagcataccaactatttcctgatcgatgacgaccggagcgggtacatagagaagctcttcgagcaggggatcgtgatcgacaaaattaaaaagttgggctacacgatcgacaccactaaagagggactccagaaatccacgataaaggctcttaaagaatatgtcagctctgaactagtgacagaggaggctattcactccatcccttcaacctcatatatcgcctacaaggacaaaattatcaagaaaaccgatttggccaacttcataacaaaagatgactcagtgacatacgatgatttcgagtcaatttttgtgtacttggacagtatgaaacacaacaaggattacgttaaacctctctgttgcaactcgctgtattga

SEQ ID NO: 8715 - RNA, 1740 nt, synthetic construct
  source 1..1740: mol_type = other RNA
atgaaaatcttagagcagttctacaacgattacgaaaagctgttcgaactggctttgtatgataaccggaaaaagaagtacaagaggaagaacatatccaaaaaaagtgggggcaaacgtagactcttaataccccctgagactaccgacaaactgcagaaaaaactaaatagaatcctgcagacaatctataatgcacctaatagtgtacatgccttcattaagtcaaaggaaaacgaagagaaaaagtcaatagtcagcaatgccaagcagcacgtgaagaagcagattgtgatcaacatcgacatcaaagactttttcgacacgatcaattttggtcgggttagaggcatttttctcgctaaaccaattagtctggatgagacactggccacgaaatttgcgcagttgatctcgtatgataataaacttcctcaaggcgcctctacatctcccatcatttccaatatcatctgcaagaaaatggaccacaatctgatccagtttagcaaaaagcactcactaacttacagtcgctacgccgatgacattacttttagcacacataagaactcccttgatacggactttattctgaatgagatcgagaagatcatagtcgacaatggtttcgaaattaataccctcaagacccgaattcagctcgccaatcagtctcaagttgtcaccggacttaaagtcaaccagaaagtgaacgtgccccgcaaatatattcggcaagtgagatcaatgctgtacagttggaaaactgagggcattgaagaagcatccaagaaacatttcaaaagcttcaacaaccagaccaagaaatatatcgacagcaaagaggaatctttcaaaaatatcgtactggggaaaatcaacttcataggacaggtgaaagggaccgacgacttgaattacatacgcttttaccatacatactacttgcttgacagctccttcagtctcaaagagaaactagattactttgaacacttcgatttctacaacatgcagcaggatagggccaaactgctgctgacccagatctatgactccttactcgtgtttactgagggcgtgaccgatatcatttatattaaggaggctctcaagttcttcaagaacaagaagatgtttacaagcctcaacctgcgctactcttattttggaggatatgccgatgtgattaagatgcatcggattctgtacgatgaacacattgtgcgaatgtccaagcttaacgagttggatatagctaatatacgtaagtgcatactgccaaatatagataagagcctcaagttttgctttgttcttgacgcagatgaaatcgcaatcgaaaagcacttcgagaaacacgattacaagaaccattttctcttggacttaaagaacaaggggtatattgagaaactcctggacaaggagctgattaaaaagatcatcaagaagtacggtttcaaaattgacgtcaacaggaaggaattctcggagaaaacaaaaaccgagttgaacaaatacatgaagatcaagaacaagtacagcaacatctcagctgtgagcaattatattgcgtatggcgtcaagattatcgagaagactaacctagcaaagtttatctcaaataaggacgatgttgactattctaagttcgaagacctgttctgtgtactggagaagatcaatcacaattttaggtccccgaagcaactttgttgtcaatctctgtattga

SEQ ID NO: 8716 - RNA, 1737 nt, synthetic construct
  source 1..1737: mol_type = other RNA
atgaacgagctggagaacttctatctcactaataagaagaatgtcgagtatgctctctttctcatcagatcagagggttaccggaataaaacaatctcaaagaagaacggcaatactcgaattctgtctatcccacctgacttcacgaagattattcagagcaagtttaacgagatccttcaggagctgtatatcgcaccaaaacccgtgcatgggttcgtaaagacaaacaatgatatctccaaaggcatcatcacaaatgctagcatgcatattcggaagagctatgtgatcaacgtcgatatcgagaactttttcgacacaattaactttggcagggtgcgcggcgttttcctgagtgagccttttaatactaacgagaagatagctacgaagttagcccagttggtatcttttgagaataaactaccccagggagcgcctagctctcccacaatctctaatatcatctgcaagaaaatggaccatgagctgattaaaatagcaaaagagtactcgctaacctacagccgttacgccgatgatataacattctccacccacaagaagaagatcaacaaaatccgcattctgagagcgatctctaaagtgatcaaaaataacgggtttaccataaacgaaaacaaaacgagagtccaaaaatacattcacacccaaattgtgactggcttgaaagtgaaccagaaggtgaacattaaacgtgagtatattaggcagatacgcagtatgctgttttcctggtataaggacggactcgcttcaagcgcagataaacatttcgaccggtttaataagcaggagtcaaagtacatcgacaaccgggaagaatcctttaagagtatcttgataggcaagattaactttcttggacaggtcaagggtaaggagaataggctgttcattaagttccgacacatatactacttactgagagatgagttcaaactgctagaaaaaaccaacaccaagttttcattcgagcacatagacgtgaataatctgacaagtaatgaagtgcttaagattttcacgcaggtttacgattctcgactgatcttgacagaaggggtgacagatgtaacctacatcaaaagcgccctgaagtactttcaatccaaaggagaatttcagtcactcaaactgcgctattgctgggttgggtccatctccattcttgtcacctttttcaagatcttgtatgcccataaaatgaaagagctcgacattatcaacaaaaggaaatgtgttttgccactcgtcgataagaatatcaagatctctttcgtcatggacagcaatgacgacaaaattaataccttcgttaaggccaagaatttcaacaactactatcttctggacctgagcaacaaaggctatattgaaaaactgctggataagaacaaggtgatcgaatttatcgagagcaatggttacattatagacaccactaggcccgaactcaaaccggactcaaaaagaggactcgaggagtatttactgagttctcagaagagcgatggggaaattcactccgtgcagaaaacctcgtatatagcctacgaaaacaagattattgagaagactaagctgagtaagctattcgaagagagtgaagatatcgaatacgaaaaattccgggagttattcactcaccttgaaaagatcgaatctatatccatccaaaatgagaagctctgtactggctccatttactga

SEQ ID NO: 8717 - RNA, 1725 nt, synthetic construct
  source 1..1725: mol_type = other RNA
atgaatgaactcgaaaacttttacatcacgaacaagaagaatgtggaatttgccttattgaaagttagggacgagaagtacgtcatcaagaatatctctaagaaaaacggcaagaccagaatattacacattccaccctcctatacgaaaataatccagaagaaattctcccaaatcctgcagaaacaatatattcctctcaaacctattcacggatttgtcaagattgagaataatacatcccggaatataatcaccaatgctagtaaccatatcaacaagagatatgtgatcaatatcgacatcgaaaactttttcgataccatcaactttggccgcgttaggggtctatttatgagcaatcccttcaacattaatgagtccattgctaccaaactcgctcagctggtgacatatgaaaataaactgccccaagggagccctacttctcccatcattagtaacttgatttgtaggaaactggatcaccagctcattaagattgcgaaagactatagcctgacatatacacgttatgccgatgacataaccttctctacctataacaagaagataaactacatccgaatcatacgtgacatagacaagattatcaagaacaacggattcattatcaacaaatctaagaccaggatacagaaattcaatcaaactcagattgtcaccggcctgaaggtgaatcagaagattaatgtgtctcggaaatatatcaagcagattcgctcaatgctgttctcctggtataaaaacggattagagaatgccagcaatttgcacttcgacaagttcaataagcaggagtccaaatatattctggaccgcaatgaaagtttcaagaacattcttatcgggaagataaactttctcggccaggtgaaaggaaaagaggatcgattattcattaagttcacccatacgtactacctcttgagagatgaatatttcttgaaagagaagcagaacaagttcgagatccttgatatcaataatctcaagtactgcgagatcatcaagatctttactcagatttacgatacaaagctggtgctgactgaagggattacagacataatttacatcaagcaagcactgaagtacttcaagaacaataacaagttcaagaaccttaagctgcgcttttgtcaggtaggcagcataagtaacctaatcgaaatctacaaagtcctatttgagaacccaaaagatctgactgtcatcaatcggaaaaaatgtctgctcccgtacatcgataagaaactgaatatgtgctttgtgatggacagcgatgataaacagattgagcttctgaagaaaactctccactttcataactattacctgctcgcagaggacattgggggttatattgaaaagctgttcaacaagaacctgattatcgagataatcaacaagaatgggtacgtgattgatacatcaaatccaaaactgcaggactcatcaaaaaaaggcctggaggaatacttgcggtctacaaaaaagagcgacaatgaatttcatgcagttcctaaaacttcgtacatcgcctatgaaaataaaatccttaagaagaccgagctttccaagttcataattgatagtgagaacgtaaactacgacagatttgagaatttgttcaactacctagagaacatcaagatcatcgactttaaatacgacaaactttgcagcaactcaatcttttga

SEQ ID NO: 8718 - RNA, 1809 nt, synthetic construct
  source 1..1809: mol_type = other RNA
atgttctttaagaactttttacgcaataccaccaaacacgtcctgaatctgttcaagaagaaaaagaactatgagaacatcctgatcgacgagtttcacaatcgagagagcaagatcttctacaagaacaacaagaaaatcatcgagctttcactgagcaatattcgtaataacaaagcctatttccacaaagagatttctaagaagaacggaggtaaaaggaggctatccattccagattcatataccaaggttgtgcagaagaaaatcaacattctgctcacaaagttctatcacgccccaaagtccgtgtacgcttttgtgaaatcgtcggacaataagaaaaacattgtgactaacgcttacatgcacatcaacaagaaaatcgtcattaatgtcgacatcgagaacttctttaatagcatcaactttggccgggtacgaggtcttttaatgtcctatccctataacattgacaaagacctggcaaccaagatagcacagcttactatattcaataaccagttgcctcagggcgcccctagtagtcccgtgataagtaatatgatctgctacaaactggacaaacagcttatgcatctggccaaggagtataggtgcatgtatacgcggtacgccgacgatattacatttagcacgaacgataagtatctgaatcagaaagctttcttcaaggaactcaacaagaaaatcaacgaaaatgggtttagcctgaattcctctaaaaccagagtgcagaaatactgtcattctcagattgtgactggcctcaaagtgaacgagaaagtaaatctgagtaaaaagtacatccggcaaattaggagcatgttgcactctctccataaggatggcttagcagaggcctctgtcaaacacttcaaactctacaatatcgatgagaagtattcaaaggataaggagaagagctttaaacgcatattgagagggaagattgactttatgggaatggttctggggaaagaggactacaagtataagaaatccatttacctgttctacctagccacaaataattacttgcccctgaactattaccaaaaactcgaaaagatgaacagcgaagacgaagattttttgaaactgtccctccaagagatgtattccagtatcgtagtttttactgaaggcgagacagatataacatatttaaaggccgcacttaacttcttccatagcaaagacaaattcctggaactcaaaattagatttgtcagcctgggagggtttcctgaagttataaagtaccacaaagcgatttttctgactaagaatgacaatgtcacactggaattacgcgagaaactgtctccctacctgaataagagtgtgaactattatttccttctcgatgctgacgacccagatatcaagaactactttaacaagacctatgtgccaaattcattctacctcataatggaaaagacagatggttacatagagaaatgctttcagaaggagttgattaaggacatcatcaataagcatggatacaagattgagccggaaaaatcaaccaaacagaaggtgacgaatcaactgttgaaccatctaagaaacaactcaaaaaaggatgacttcttctccatcgattcctacatcgtgtatgcggagaagcagattttcaagaccattctagctaagtacatctgtgacaataaagaagttgactactctgtcttcaaagatttcttcgactttatcatcaagaacaagaccaacaatcttatccctactaagctctctatagatgatgaatacaagtga

SEQ ID NO: 8719 - RNA, 1572 nt, synthetic construct
  source 1..1572: mol_type = other RNA
atggcgaaagtacgtaccctgatttgggctttcctgtatcacatgctgaccctagatgagttcgaagagaaaatcggcattagcatcggcaagctcaactatatcggttacattctaaaagaggaggacaagtaccttaatttcgagatttccaaacggaatgggaattcccgacaaatcaattcaccaaactcaatcctgaaacatattcagaatcggataaagcttatcttagaagagaatttccacccttacagtgtcgtccacgggttcgtgaatgacaagtccatattgtccaatgccaaaaagcacctcaatgctaaatggatcctgaacttggatatcgagaacttttttggtaccatcaatttcggtcgcgtgctgggcctcttcctcagtaagccatacaaatttgacaagaagatcgcaacactgatagctcagctggtgacttatcagaatgtgctccctcagggatcacccgcatcaccaatcattagcaacctgatctgcaacaaaatggaccgggatttcatatctttttgcaagtctaagcatctaatctatacaaggtatgccgacgacataacgatctcttcgcaaaagcgcaagtatatgaatttcgatagcaccctggacgaagatctcttagaggatatcaagaagctggtgaacgagaatgggtttaagatcaatagcgacaaggtatcttttagctatgggaaggatggaggcatagtgactgggcttagagttaacgagaaaatcaatatcccacgcaaaacaatccggagtttgaggggtttgtatcatagcatcagatccaacggctaccaggtcgctaacgagatttataaccgcaagtacaaaaaccttaacaggctgcctaaagaaaataaagagctcatcaaccacattaacgggcacctgaacttcatttttatgataaagggccagtttgacgacgtatactcgaactactacaacaaattcaagacccagttgaagcttaatataaaatcaccgatacccaaaagcgtttgggactacatttttatcatggagagtgaatctactcagaaacaaggcacggcctttaagctgaacaagtttgggattatctcctgtgagcacgtgtacgataactatagcaagatctttctcaagaacaatttctccaagaagtttgatcttgaactcatcaagaaagacgaacgtattgacttgattaaatcaagggccctggatcttttcattgaagatggcctcgaaattaatctcgacttccattacaaaatcggaagcaaattaaggctgctgggatttcctaattatcgaatcggcgattctggaatggacaagctgataacaattgtgagtaaaagaactgtgtctggcgttgaaagaatcttagtcgattccggcattgtggcgggaaatagtggaggtcccattttggacctgaacggggccgtggttggaattgcagtcacaggtgccgaagatcacgataagctagacgtcaccgagaaccattccttcattcccattaagtacctgctgcagttctga

SEQ ID NO: 8720 - RNA, 1857 nt, synthetic construct
  source 1..1857: mol_type = other RNA
atggataacccgttttccgagctggacacgaacgaaataagcgccagctttcgccatatctccaatgtctcagaattagcgtcttttctgggtgtgacccgccaaaaactattttattactgcgccgagcatttgaacaagaagcactatgagctttttgacatccctaagaaaaacgggggcacacgaacaatagaagaacccacaaaaggtctaaagctcatacagaaaaagatcgccttcgctgtgagcatcaattaccatccagccgcttgtgtctcagcattcactgagggaagaagcattagatatggcgcagagcggcacaaaggcgcacggaaagttgtctgctttgacctggagaactttttcccttcctgtccacaatataaggtctttggggtgttctacaagttcttcaaattacccaaagaggtgtctgactgcctcgctaggctgtgctgctataaaaaacatctcgcacagggggggcctagcagtccaatcctctccaacgtgatgctgaatagtatggacaagaagtttctgagtcttgcaaagaaaactaagactgtttatacccgatacgccgatgatatgagcttcagttctaagggcgatatgcccagcttgatttggcagaataacaacatatccagctatattacctctattgtacaggaaagtggttttcacataaagcaggaaaaaactcggattctgggaagatcgtgtaggatgcaagtgaccggtgtggtaatcaacaaattcccaaatgtacctcgaacctactaccgtagagtgcgcgccatgttacataacttcaaaactaccaaggactatgaggagacaaaaaagaactttttgaagtactacggcaagtccgacgactgtaatcccgctaaggtgattcagggaatgatctcgtatatcttccaagtcaggaacgacggcggaacacattcaacgctcgcgagaaacatgatgcaggaattcaataccatccagtggccagggaatgaaaagttcaaagttgaaatggccatgccccactcatataagctgcacaaagcggtgtttgccgtcgaaaccaagatcggcgaggatttcttttatggcacagcttttctctgcaataacaagatcatttcctgttcacacatcttcaaaaaaggacacgagaagaaacttagtgacgagattgaatatgttcacctgatcgagcataatgtggaagacaattctatctacaagaagtacaatgtgacgaggatcgaatattggcccgacttcgatgttgcttaccttcataccgactcttgtatcaataaggcaaagcagaagcagttcagcactcctaattttctgcaccagggcggcaataaggtcttcgttgtgggattccctgccagcctgcagactgggtctagttcgcggatgtacgaagaaaaggagacaattcaggaggaccaccgcgtggagctgcagtacaacgagttcgccgtggggcaaaagcaaaccattattgataaaaggcgcatgacctttatctctaaccagaacgggggaattaacccaggaaactcaggtggccccatcctggatataagcgaaaaaaaggtgataggtattgctctcaaaggagataatgtaaaggattccaagtctttgtccaataaccggtcagagttcttcgatctgtacgagtggcttaacatggacaaaccgaaggccttcacatgggagaagattgtcgggaaactcaaatttgagtttaaacacctgtacttgttcgtctacatccataattccaaaaactgcgatcttctgggccgtctgcacaataagctattttga

SEQ ID NO: 8721 - RNA, 1221 nt, synthetic construct
  source 1..1221: mol_type = other RNA
atgctgtccaatatcattctctacgcttttgacaaacagatgctggaattggcccgaagaacgaaaacggtgtacaccaggtatgtggatgatattacattttcaagtcagaacaccatgccgcgtctgctgtggcagggagagaactggtcaaccactgttaaaaagatcgtggaagaggcggggttccaactatcagaggagaaaactagaaagtttgggaaggggaatagactttctgtcactggagtcgtggtcaatgaaaaaatgaacgtgcgtcggatgtatgtccggaagattagagcaatgctccataactttaagatcacggaggattacgactccacagtgaagaagttcaacggcttctatttgaaagataagatcgtggatcctgaacgcgtgttgaaaggaatgatttcgtacgtatatcagatacgatccgatccagagcaggaccaggttctcagtcggaggctgatgcaagactataattctatcaattggccagggggctccagattcgagctgaagctggccatcccccagaagttcaaaaggtataacgcaatctttgcagttgaagtagtcacactcttcaaggattttttctttggtaccgccttcctttgcgacgggaaaatctactcctgctgtcacatttttgagaatcgaaacgagcctgacgaccagccaaagagcatcaaactaattgaattcgaccccgagactctggaggtccacaagacatacaaggtggacaaagtggatctctggagtgaggatgatatcagtatgctttacagctctgccctgaacaagacaaagcggaagtcattcaatagccccgcgcaccctctcaaaggacctgccaaagtggacattttaggttatcccgaagcttttcagattggcgaaaaaagcaggatgtacactgccgaggagactacaattataaccataggggacaatatcagccagtcacataagagtgaaaattcccggtccgtagtgttgctgaccaacgacaatggaggcatccaaagcggcaactctggtggtccagtagtttctattggaaacggcaccgtggtcggcatagctatcaggggcgctcaaccgaaggatggcaattacgaagtggttcgctctgagatggttgacttctacaactggcttcatagcaacaaacgcacccccgaaacattacgcctgcgctga

SEQ ID NO: 8722 - RNA, 1743 nt, synthetic construct
  source 1..1743: mol_type = other RNA
atgaaggatctcttttggacgaaaaataacaccgacattaagcgccaatttcccgacctgaaatcagccagagaactggcctcatttctaagcatcaagtatagccagttaacctattatgtttcgaaaggcaagaagtataagtccttccaggtgaaaaagaagaatggtgaaatcaggatcctggaggccccaatcgtggggctgctgctgatccagaaaaaacttgcatacacccttggattgatttacactccatctccctctgccatgggatttgtaaaggggcgcggcattagaaagaatgcccaggtgcatgtcaatagcagagaggtgttgaacctggacgtcgaaaacttctttccttctatccgttcaaacctagtgttcggggtgttccataagttcttcaggttcaatatcaagcttagtgacacactgacaaagttggtttgcttagacggtgcactgccacaaggggcacctactagccctattttgtccaacatcattatgaactccattgatcgcaaattcactgccctcgccaggtctaatcactgtctgtacactcggtacgtcgacgacataacttttagcagtcgcaataccattccacgaacactgttcaggaacaaggacgtgagtgatctcatcaagcaaatactcaaagaaaagggactcaaggtgaatgagaacaaagtaagactccgaaaacgctttcagcggcaggacgtgacaggcgtgctcatcaataagaagatcaacgtgcagaaaaattacctgcgcttaaccagagcaatcctacacagctttgagttgaatgagtacaaagacgctaagaaagtcttcttatcacattacaggaacgaaaaccatctgggaaagaaaatcgaacccgagcacgtagtcaagggcatgatctcctatatataccagattcgtaaggatcctaaggacgatgaggcagtatcccggaaactcatgcagcggttcaacagaatcaattggccatacaactccaaatttgaccaaaagattagcaatcccgttctttttcagaaactcaatagtaccttccaggtttatgtcagcttcaaaaaggagaacggggactttgatagattcactggtaccgcgttcctctgcaacggcgaaatctattcatgttctcatactttcgtccaaggctccaggaagaatgtgggccccgaattaaacgatgcccagcttgttgagttcgattctttcaagaaaaatcagcggaaatgctacaagattaccaagattgagtacaatacggatctggacttttgtcacatttacaccaaccacaaatttgaggggggctttaggaagccgacgacagctccctatgaaaacgagaaactgcaggtggtgggatttcctagtattctcgatcacaacaacacagtcggtctgtatcagaagtccggccggatcaccagcacattttctgaacccaacccagattatgacaaagagaaaggggaggtggaggacggaaagttgttcatgcctctgaagcaacgactattgataaacaccgatgctacaatcctggaggggaacagtggaggtccgatactgactaaagatcttgttgtcattggcatagtgctgaaaggacagaatcgtgaatcggctacgaataatacagctcttgacttcaattttgcgctgaactcagatttcctgatgaagaaatactatctgaagtga

SEQ ID NO: 8723 - RNA, 1617 nt, synthetic construct
  source 1..1617: mol_type = other RNA
atgaacgcagaatccaaaaagattaggagccaattcacacaactctttaacgttgatgagctggcaagttttgtgggtactaacgcgcaaactatacagaccatcacaaataagacaacctcctattataagtcgttcgagttgaaaaaacggagcggcggaagcaggacaatcctggctcccaagcaacagctcttgagcatacagaagaaaatagccactacgcttgaaaagatctatcctgtctctatctacagccatggtttcatttataagaaggggattaagaccaacgccgaggagcatttacgcagcacggaacttctgaatttcgacattgacaactttttcgacaatatcccagagtatcgcattttcgggatttttcggtactacttcaatatgaacaactacatctccggcatattgaaagagctcacatgcgtagagcggcacttaccacagggggctccatcttctcccattctgtccaacataatatgctataagatcgacaaggatctgggaaagcttgccaggagaaatcattgcaagtatacaaggtacgtagacgatatcactttttcatctaaacgaaagctgccaagctcaatctacaatcgtattaacaagtcttgtagcaacaacatcgtcaaaatcctctcagactctggattcaccattaaccaccgaaagaccagacttttgaccaagtcacagcggcaagaggtcactggtattaccaccaataagcagctgaatgtgtccaaaacttacattagaagcactagggccatgctgtacaacttcaaaaacagtaaataccaggtggccaacgcgaaatttaagaaatactacaaggcaaagcagaatctgaatccgaattccgagattttacctgaagagattattaaggggcgtattagctacatatatcagattcgcaagtcgagaaaagaacagtccctagacaattctgtgacacacaagttaatgcagagtttcaatatggtgtactggcctaaaggctccaagtttgaccagaaaatcgccaatcccgaaaaattcaagctctataacagcatctttgaaatcgaagttaaggctaaggatgaagacctctgtgagaaagacaatattatgacctacaccgctacagcatttctgtgtgaaggcaaaatttactcatgtttccacatcttcaagaaaccaaagcagatcatcgagcctaaactgaaagagtatgattgctataccaagaaaatccgcgctacgtatgaaattgccagtatcgatttcgatcaaaattttgacgtgagtatcatacaccttaacaacacatgcaagatcaaaaaatccggcttcaagagtcctaaaaaggatgctacagagaatgaacagttgattctggccggctttcccgaattttcccatcaccagggaaacacgctcaatctctacaagaaaaatacccagatcgaggatatctacaaggagaacataactaaactgaacaaaccgccctattcatttagtaacaagatgaaggcagagaaaaatctactgttcttccagtatttctctctgtttaacaagatcatcgccgtttttgtgtga

SEQ ID NO: 8724 - RNA, 1755 nt, synthetic construct
  source 1..1755: mol_type = other RNA
atggacgaagacaagaagtacaaaacatttacaatcccgaaacgttcaggcggacgcaggcagattctggctccctgtggacccatactgggcctgcagcataaattaagagacttcttggatgcctgctacgaaccaccaccaagcacacatggctatgttcccggcaggagtatccgtacaaacgccgtgcctcatgagaaatgccaatacatgatgaagttggacattgtagacttcttcccaagcatcaccttcgccagggtatatggcctcttcaaggctgctccattccggtttacgaataaggtcgcctccactctagctaacttgctctgttatcgcgaagtgcttcctcagggggctccaacctcacctgtggtaagtaacctcatatgtcagaggcttgatcgggatctcctgaagtttgcacgagagtattcctctcaattcacgcgatacgccgacgacctgacattcagcacaaaagacggtgcccagtggggtttggtggtcctgaatgataagcgtaagtgccctcatcccgagatcgaaaggatcattcaggaaaacgggttccgacttaatgaggcgaagacccggtttctgaacaaatattgccggagaatagtcacgggtgtggtgaccaacgagcggctgaatgttcctcagtcttatcttagaaccaccaatcggatgctgaaactggcgggcactaacgggcttgacaacgtgggacggtggtactgtcaagacaatcacatttttagctcgaccgtcatgaatttcgccgattacgtggtcaaagttctgcagggccgcatcgcttatgctaagatgattcgtgggtcagacgatcccatctgccagaagcactccatttatctagacaacattgtttctgggaggcccctgacttacggagccggtaactacatgaagtttgctaaactaacacctctgcgcgtactccacctctcagacttccattttcgggttgagacatcctggaacgccacccccctgttagaggatttagtgaattgcataggcgaccccgctagaatgagtctcctccctcctgatttggtcgtggtcaccggagatatcgcctttagtgggagaaaagccgagtacgcactggccgccgattttttgtcccagctgtgcgcacgcatatcacttccgatcaacagagtttttatggtgccaggcaaccacgatgttgatagagcggcagtgtctgacgtggccctccgagaacagaaggacttgctgaaactcgacgaacctggcgcaagaatcagtgcaatgtttaaagacgctgacatcaggcgggtcttactccgccgcctagatagctacgtggatttctgtaagaatttctatggttctggactccgagcagagccgtggtggaaggagactgttcaggtgagggatatgaatatcgggatttcgggcctgtgtagttcctggatgtccgtgtcagacggagagcaggggcaactgatgctgggtctgccacaagtcaatgaggtgatgcacagaggctttactcacgatctgactatgactcttctgcaccatcccttaaattggatttccgagaaggacgccgaaagcgtggacgaaattagggcgtggagcgacgtagtgttccatgggcacgtccacaccagcgatatcgcaaccacttacagccagtgcaggggcgatgatgatatcggatctcgctctggagtgagatggtga

SEQ ID NO: 8725 - RNA, 1041 nt, synthetic construct
  source 1..1041: mol_type = other RNA
atgaaaaagctgtacttggcggacattgaggagcgttcgcgacggttcttagggtgtcgcacaatcgatgatctgtgctgccttggtttcgtgaaaaatgagttgttactccacagcctcaatatatcatactactcctttgagttgcgcaagaagtcaggtaagatgcgccagattgaaagccccaacgagagcctgaaaaaggtgctgcggcaattcaactattatctccaatgcgtctattacattcaccagaccgatgcttcccagggctatataatcacccctaagaaaagtaaggtgtgcaaatcaatcctggaaaacgctagggtccacctcaggaacaggttcatgcttaacattgactttcaggactttttccaccagatctcattcgaacgtctcgccaagcggctttccgagacaccctttaaattcgacaccagtacttctaaactcctggccctgctcttcacatataagggaaggttacctatgggcgccccgactagcccagtgttgtccaatctgtgtgttatgaaactagacatggaaatgtctgaatggagtaagaagaatggggtgacctactctagatttgtagacgatttgaccttcagcagagatgatagcgagtttatcagcgatacctatacagaaatcaaccatatatgtctgaagcattctctgaaagtgaatccagcaaaaatcaagtacttcggagaagggtccctaagaaaagtgactgggctgattctgcgagagacgattgatattgaagacggcttttaccacgagctggacaaagacttcaatcgcatgaagaaccttgtggaggttgtgatcattaaccatggcgtaaagtccaacgacgaagtccaaacgttcaagaaggagatcgagggacagatcaattttataggcatggttgagggatataactctcctatctttaatcagtaccggcagaaactgaaggccgttatgaaccccgcagaggaagtccttagtgtcagatggactaattttaattacgtgtga

SEQ ID NO: 8726 - RNA, 1041 nt, synthetic construct
  source 1..1041: mol_type = other RNA
atgagaaagctctatcgagatgaggttaaaaatagggcctgccagttcctcgagtgtcaaaatatgattgaccttcacaggctgggctttgatacagcccgtattaaactgctggccctcgccccaccgtactattgctttgatatgcccaaagagtccgggggagtcagacacatagaggcacccgaagagcacttgaaggacgtgcaacggcagttcaacaggtatctgcagtgcgtatactttgaaatccagacgcccccaagttatggttatatcataagaacgaaaggacagactccatggaaaaatgtactggaaaacgctcggcaacatctgggtgcccggtacatgttaaatgtggacttcaaggactttttccatcagtttactctgagacgaatacaccggatgctgcagtgccctccattccagtttgacaataagaccgcccacctcctcgctcggcttttctgttacaaagggcgcttacccatgggagcgccaacttccccggctttgagcaacatcggcaccatcgctttcgataacgacatgtatgcctgggctagcaaccagaaactaacattcacaaggttcgtggatgatatgaccttttcttcacctatcgttcccctgactgacgaacacttggcacatatcaacaccatctgtcagaagcacgcactgctcattaaccctgacaaaacagtgtttttcggcgaagccgataccaagaaagtgaccaaactcctgcttcgcgataccgttgatatcgatcctgacttctacagagagttagacaaggacataattaggctgaagcatctaactgaggtcaatattctgatggagaaccataagcgcgggcagcttctgcgtaagttcaagaaggaagtcgaaggccaagtgaattttattggcatgattgagggattcgactcttcaatcttttacaagtaccgcatgaaaatgaaggaggcattgaaacctgataataaggcgcttagtagccgatggacaaactttaactacttttga

SEQ ID NO: 8727 - RNA, 1041 nt, synthetic construct
  source 1..1041: mol_type = other RNA
atgaggaagctgtatctgaaagaagtagagcaactggcaaagcagttctgtgcgtgcgaaaacttaaaagatctggagcgccttaatttcgccatcaaccgaattaggttgctgtccctgaaccctcaatacgatgttttcaaagtgccgaaacccaacggtaagactcggctcatagaggccccagaggtcgaactgaaggaagtccaaaaacagttttctaactggttacagtgcgtgtactttctgctccagcctaagtctgtttttggttatattcagagagtgaaggatgttctcccagcaaagaacatcttggagcacgcaagacaacacctgggcgccatctatctgctcaatgtggactttcaagactttttccatcaggtcagccacactgatcttgtgaggcttctgcagcggccccccttcagatggaccaaaaaggctgcagctattctcgcaaagctgttcacccgtaatggccgcttgccaatgggggcccctaccagtcccgtgctctccaattttgcggctatacagctggacctggatatggagaaatgggcccagaagcagggaatcaattacacaaggttcgttgacgatctgtcctttagcactaaggaccaggccctaacaaccgctcacctagaccaagtcaagaccatctgcgccaagcatcagttcgtgattaacccacaaaaaatcaaatggtaccctcccggggtcagcaagaaagtgacaggcttagtaatcaacgagacagtggacattgacccgtcattctatcaggaactaaacagaaatctcaaccggctgcagggcctttcagacgtgaatgctatagtaaatcagagtcgacagaatgacttgtaccaggatttcaaaaaggaggtccagggaatgatcaacttcattgggatgattgaaggatacggctcgcaactgttttttgattaccggcagaagctcaaagaggccttgcatgtgtctcctgaatgtcttagcgtgcgctggacgaattcccagtatttttga

SEQ ID NO: 8728 - RNA, 1020 nt, synthetic construct
  source 1..1020: mol_type = other RNA
atgaatcggtgtttctcttcattcatggctatgagagagccaggggatatgtgcgcgctgttgcggctgccactcttcaagctgaaactgctttcgctgcgcagcgtctataatactttcgagatcaagaagaatggcggcgcacgcttaattgaaaccccggcccagcctctcatgaaatacctgaagagtctcaaaaacttcttgcaagccgcctattactacctgaaaaccgacgctgcctacggatatatactcaaccccggtcagacaaaaaacccccggaatataatgactaacgccaagatccatctaggaaacccttggatgctgaacatcgatcttgacgacttcttccatcaggtcaaggaaaaacacgtacagcaaatctttggcatgctgccatttcgtttttccggcgagctcgtccagctgctgtgcaaactaagttgctacaagggaagattaccgatgggaagtcccacctccccacctatgtcaaatttcgcaatgattcccgtggacaaccgtctcctgaagtgggctaggtccaacggtattgtctacacgcgctttgtggatgatctgaccttttcttctcagaaacccatcaatagctgtacacttacaaggattgaagagattctatacgagtacagatggaagattaatcaggacaaagtggtgttgtttggcgaatctgacataaaaaaagttactggcctggagcttaggaacagggtgtccgtccctgatacgtattttgaggaggtggccaaggatattgtgcggcttgagaaggctaaggaattagtgatccgagcaccctttcacgaaagcacagcctggatcaagaagttggagcaacacgttaatgggcagatcaatttcctggggatggtttatggttacgggagccctgagtatctcaacaaacgaaccaaggcggacgcagtactccagagagattacgaaccagaatcattgaactggctggacttcccttatcaattcttttga

SEQ ID NO: 8729 - RNA, 1011 nt, synthetic construct
  source 1..1011: mol_type = other RNA
atgcttggcaagataaagaccaccaaagagctggctttgtacctggggacatcctatgagaaactgaacaagatagaccccgaaaagagcttcgcaagcttctacataaacaagcacggttctactgaaaagaggttgatcgaatacccacgaggtgagctgtttcgcattctcgaccggctaagtgatggactgcaatggctttacctggatcacctgacaacggccgcttatggctttatcaggaagctgaagcctaataaggatcctcggaatatttataccaacgcaaaacgccacttggggaaaaagtaccttctgaacatcgacctcgatgacttcttccatcaagttgatactagaaaattgcagaacctgttcagtgattattccctattttccctcaatcaggagagtgaacagttattggtcaagctggtgtcataccgagggcggttaccaatgggcagcccaacatcaccctctctgtcaaatttcgccacaattggcatcgacaatgacctttcggtgtgggccggacgcaattctttcgactatactaggtacgtggatgatatgtctttttcaagcaacatcaagatcacccagaatcatattaaccagattatcgagattctctttgcacatagatttctcatagatccaaacaagaccaaaatcttcgggcctcaagacaccaaagaagtgacgggactcgtcctgggcaaaacaattactgttcccgacgagtttatcaatgcgttcatgaaagacatcaacagattcagcgagatgcatcacctggcctgccagaatcccgacagtagggtcttcgagtggctggaaaagatgagaaaagtgctacagggtcggatggcctttcttaaaatggtacacggcccgaagaacgaaacctacaagctctttcagctgaaactcgataacatttacaagcctgaactgttagagactagcgtgtcctggcgttatgctggatatgagtactcctga

SEQ ID NO: 8730 - RNA, 1047 nt, synthetic construct
  source 1..1047: mol_type = other RNA
atggcagtgggctatcgccacatttatagaacagcccgctacctgcggtcttgcagacaactctctgatctcgagggacttataaaagtatccaaggctgacattaccctccacagcctgcatcctaaatactacgaattcagggtcttgaagaagaatggtggctttaggaaaattgaagctccacagccgggtcttatggacctattacggaagctgaactttgttctgcagtgcctttatttctttgagaaacctcccgcgagctacggtttcgttatgtcacataaggggaacaaacaaccacgcaatatccgtaccaatgccgagcggcacatcaattctgcctgtatgctgaatgtggattttgaggacttctttcaccaaatcaaagtagacaaggtgtatgcagtgctcgtgaatccaccattccacttcagtagggaatcggcagatgttctggccaccctatgtactttcaagggcaggttacccatgggatcccctgccagtcccgctttgtcaaatttcgccgtgcgtgacatggattggatgcttgacgcttggtctaaagaacgggggtacagattcactcgcttcgtcgatgacttgagctttagctcagaaaccagcgcgttccatcccacaatgatgccggagattaacgctatactctccaacttcaacatgaagattaaccctacaaagaccaaatggtttggccccggcgaagtgaaagtggttacggggctggaggtcactgatcaggtcagaattccaggaagcttttattatgacttgagtaacgatctgaagcgactgaagtactcaatcgaggcccaggtccaggtaatgggatcccagcacaacgagatggtggagaaactcaagaaacaggtccgaggcaagatcaactttgtggggatgatacaggggaagggagatcggaaatacacagatctgctgagggactacgacaatgcaatccatcccgatatcgacaagctgtccgtgagatgggtggattttccttatcaggacttttga

SEQ ID NO: 8731 - RNA, 1035 nt, synthetic construct
  source 1..1035: mol_type = other RNA
atggccacgcccatcaagaccatccgcacccggaatcacgctttcaggtccatgagagtgattggggacctttgcaggctcaccggtgaaagtaatctcgtcctgggcttgatggccgataaacctagatacagacagtatttcatgcgcaagaaagatggatcgaagcggccaattgaggatcccgatgccaggctgaaggcggtactgcgggtgattaacgaccatctccaggcagtttactactacttgcgcccaggggcggttcacggctttacgattagcagcacttcagatgaaacagagaggaacatcctatctaacgctcgggcacatatgcaatctcactatatgctgaacctggacctcaaggacttttttcaccagatcacccaaaaatccgtcgttcagctactgagctctcacttcgatcaatgggacgactcattaatccatcttgttgcaggcctgtgttgctttagggggcggttacctatgggttctcccgccagtccggccctttcaaattttgctatgactgacttagaccatgagctcatgacactgtgtaaagtgtatgatgtggtgtatacacgatacgcagacgatcttacttttagctcccgtgaaccaatgtccagtgtcttccgcgacatggtgaacgacgctgtgagacaccgaggatttgagataaatcctaagaaggtccgttattacattatggaagatagcaaggtggtgacaggaataatcgtaaccaaggacgagctgtgcctgcctgaagagtacatgcaccagttgagaaaggaaatagacctctaccgcaacagcgtgatcgttgataccatgtatgagactgggatgtctggcaaaaagctgagtctcttcgagcaggaaatcacaggcaaactgtccttcgccaaaatggtaatgcccgatgacgacgaggtcaaagagctggaagacttgttctacaatgaggtggatgtccattcagtgatgcagtcctggctggatattccatatattttctga

SEQ ID NO: 8732 - RNA, 1053 nt, synthetic construct
  source 1..1053: mol_type = other RNA
atgcacatgggcagtagttcactgagatttttccggagcaacgctaagaggtttgcatctgttcgctccaaggaacagctcgctcgggagcttgatagctccaaatatactctggagctgttggccgtctcacctccttaccgttcttttaaaatcccgaagaaagatggtacttggaggagcatagaggagcctgaagaggagctgaagctggtgttaaagctgcttgcctttcatcttcaaaccgtgtatttcttcattaaacccccttgtgcctatggctacatcctgagtcacaggtcggatccagacaaacgcaatatagtcaccaacgcacataggcacattcaggctcatactttattgaacgttgatatgcgggacttcttccaccagtgcgacgaagccgaggtcgtgagcgtattgaggccacactttccggaaatggaacaggactgccttgagctgattgcaaatttgaccacctaccacaacagactacccatgggcagcccagcatcccctgttctctccaattatgccgcttttagactcgatcacgctatgctggcctggtcccaggaaagaaacatcgtcttcacgcggtacgtggatgatatgacgttcagcagccgtaccgtgctgcccgtggagtatgtgaagcaactcgaagaggcctgcgcgaaatttggattccccctcaacccagctaagaccaaatattacggacccgaagacgaaaagtatgtgacagggctgatgctcacaaaagaagaggttgtcctcccagggaagtacttctcatttctgcaggacgacctggacagattcgcggctctgtacccagtattcagttgtctatcagacgagcgatcttctgcatgggtgtggcattttgaacaaggcttgacagggcgcatcaatcacattggagcagtgtacggtcggtcttccgccacttttcgacattaccagaagaagcttcaggccgccaaacgccctgtagcggaggagatctatatgaattggctggatttaccctacgagacatga

SEQ ID NO: 8733 - RNA, 1050 nt, synthetic construct
  source 1..1050: mol_type = other RNA
atgacctttggcgacatccaaaccaaagctagcttggtgagtaagtgtgataccctgactgagctgtgcttcctgcttaagactccacggaaagccttactggcaatcgccgataagcctgactataatgagttctttatgccgaaacctgacgggaaaggacgacggttgatcgaagatcccgtggcggtcctccaatatattcaggagatcctgaacgactatttccaggcagtgtactacctgatccgccccgaagccgcttatggctttcagttgagttttgatgacgatcacgcaggccgcaatataagaacgaacgccgagaggcacttacataaaccatggctgctcaacatggacttcaaggattttttccatcaggtgacatcacagaaggtggaaatgatcttacgtggggacagctttagctttgacaaggagtgcgtcgaggtcctttgttctattctgacttataagggtcgcctacccatgggtgctccaacctcacctgtacttagcaacatggctgtcatggaaatggacaatcaactgggccagatggccaaagaaaagaggctgatttatacgaggtttgcagatgatttgaccttttctggacaccaggagataaatgagttcactataaaggcgatcaaggccgtggtggctcaattcgactacttcttcaatgagaataagactagactgttcacaccagagatggagaaaacagttacaggagttaagcttggcgatcggctggggctagaacccaagtacctggataaagtatctctcgaaattcagaagtacgagcataccaaggagattcagggaataaacgggattgagagttcggaatacctcaccaaatatgaacagcagctctcaggtcacatcgaatttattggcttcatctatggaaaacaggcccctgagtacgttcatctcaaaaaaaggtacgacaaagccgagtcctcctcctacttcgattccagatcttggatggaattcgaccgacactacacattttttaacaagaagtga

SEQ ID NO: 8734 - RNA, 1047 nt, synthetic construct
  source 1..1047: mol_type = other RNA
atggcccggctgaacaagatcaagaagataaagaagttggcagagtatttcgcttctatccacacgaccgaacagcttgcaacattcgtcggggtgcctgtataccagttgactcttctcgccgagtttccggcttacaactgtttctctattccaaaacagaacggcaagccaagaatgattgaggatcctcataaacctctcaaaaaggtccaacagatactcaatagcgccctccagtgcggttattactgtaataaaacacatgctgcctttggcttcctcctcaatccagaagacgatacggatcccagaaacatcctgaccaatgcacagaggcacatcaaccgactgtggctattaaatgtggactacgtggacttcttccacgccgtttccacacaccgagtggtcgagctgctgctgtctgactacttcagcttcgatgaacccactgcccttctgattgcgcagctgtgcacctataaaggccggctgccaatgggggcacctactagtcctgtgttgtcgaactgggcggcaaggaccctcgatgaggagctgctggcctggagtcatcgccatggatttgtgtatatgagatttgccgatgaccttacatttagtagacaagaacccattttgccccaacacgtgcaggagatcagggcgataagcactgtgaatggattcacttttaacgagcagaagttaaagatctgcgctccaagcgccgaaaaaattgtgaccggtctagtggtcggaaagaacggcgtacagctgccctccggttttttaggggaactggaagccgaaatcctgaaatttcgtaccgtcttggaggttcaagctcgcgcagggcgtgcccaatccgtttgggtggaggaattccggacacagctcgagggccacctttcattcgcttcctttgtccttggagaggaccacgctgactaccggcgcctgtcaaggctgctagaggaagccatgcagccgtctgtagctcatgactcagttagctggctgcacttcaattattttttttga

SEQ ID NO: 8735 - RNA, 1098 nt, synthetic construct
  source 1..1098: mol_type = other RNA
atggctaaaaaagtctctatctatgaactacggcggagagcgaacagtttcctcgcttgcaaagggaccttagacctggcccgccactggagagtggataatgtgcggttggcagtgctagcaattgagcccgagtatcgggaattcagaatccctaagaaaaagcctggaaccttcagggagatagaggatccccgtccaaagttaaaagctattcttcgcaagctcaaccgcgatctccaagctgtctactattttcagcgcagcccagccgcgtacggctttttaactagcccggccagggacccagatccacgaaatatcctgactaacgctcagcagcacctaggggcaaagtggctgatgaatgttgacatgcgtgacttttttcatcaaatagaaacacacgaggttgcagagctcttccggcagccacctttcagcttcccgaaggcaacggctaagctgctggccggcctgaccacctacaaagggagacttcccatgggtgcgcctacttcaccaatcctctccaactggtacgccatccccctcgacaagactctgaccgaatttgccagacagcgtgaatggacatacacaaggtacgccgatgacattacatttagctcgaagacctctcctattaagtttgaggatgtgggtcgggttaacgtgctggtaagggggagggagctggaactcaaccataacaaaaccgtcatttatcccccagatgccccgggaaaggaagtgacgggactgatcgtaggcgctgaacaggtacaactgagttctgagtttttggccaaggtcaaagacggactcagacgattgaatgacgtggtggatactaagtatctgatgccttccggccgcctggccaaaaccccatgggttgaggagatagcacagcaggtgcgaggccttgtctcattcgcacaaaaagtgctgcctcccgccgaccctttgggcatggaacttgaggaagcttacgccacagccttggctcccccccagaattacggtcccgtgtcctggcttgagttcgggtatctggacttcaggattgatacaaatcctgaccagatcaagtga

SEQ ID NO: 8736 - RNA, 1083 nt, synthetic construct
  source 1..1083: mol_type = other RNA
atgccaaaaaggcctaccattcggaccttgaggagacacgccgagcagttcagagcctgtcgcggccagacccaattgagttggctgcttcgaacagagcctgtgagactggcaatgctggcagcggaccccaagtacgcgacatatagaatccccaaaaaacggaaggggaccttccgcctcgtggaggacccagagcctagattgaagcgggtgcaaaaacgcttaaattactaccttcaggccgtgtattactttcacaggcctaagaacgccttcggctttatcaccaatcccgtggatgacccagatcaacggacaatcgctactaacgccgccaggcacctgggatgccagtggatgttgaatgtcgacatgaaggactttttccacttagtaaatcgcgaacgagtctatgagctgttccgtgcttcccttctcaagttcccgaaaaatctggctagagtgctagctgatctgtgcacctacagggaaaggctacctatgggggcgccaacttcccccgtcctctctaacctcgcttgtatccccctggatcatgacctggaccatttcgcagagcagcgaggcctcacttattcaagatacgccgacgacctgacctttagctcgagggaacagcccatcaactgggagctgatacctcagattaacgagtggattacggcatatgattttcagctcaacccggctaaatctaagctgtacggccctgcagacccccataaagaagtcacaggccttatcgtcggagtacagcaggttagcttatctccagattacattgccagtctgcggaagggtattcagcaactggatcaggtggtgaatgctaagtacgttatgccatccggacgtctgcgcgccactacctgggttgacgaaatagcccaacagcttcaggggcggctggcatttgccagccagatcctaccagacacggatcctctccgcatagagcttgaaacagctatggatgaagcactggccccacccacagagtatggtcccgtgtcatggttggatttcggatatactctctttaacatgccgcctgcgtga

SEQ ID NO: 8737 - RNA, 1128 nt, synthetic construct
  source 1..1128: mol_type = other RNA
atgccaggttacagatatgagtccgatggcgaggagatttctatcgcccggggtcataccatcgatatgaaatacacccgtaagagagtgaattggctcgctagacagtttgggcaactcacggaccccgcttctctgtcacagctgttaggagtccagctccatctgctgcaactgcttgcgctgcagccgcggtataacacgttcagagtaccaaagaaaaatggcacttttcgcttaattgaagaccccgaaccccaccttaaacaggtgcagaagcgccttaacacatacttgcagtgcgtctactatttgcggcgcacacctgccacatacgggttccagatatcagtggacggggacaacgatccgaggaacatactgactaatgcaaggcgtcacgtggggaacccttggatgctgaacgctgactttctggactttttccatcaggtgaactacgattgggtgtatcggttgttcacaagagaggttttcaccttcgagcctgatcttgcagagttgctggccaaactaaccacttacgggggacgcctagctatgggcgctcctactagccccgtgttaagtaatctcgctacaatgccagtggacgatgcgctgactgaactggcccgatcctacgattggacctacacccgctttgccgatgatctcacagtcagcgcacaagcctgtatcgcccctgcccaagtccaggaatttctgaatactatcgcgccctttggacttgcattcaatgaagccaagttcgcagtcaggagcccggcgatgcccaagaccgttacaggcctggtggtaaccgcacaagacgtgcagctgccagctagtttcgtgaccgacaccctgacggagatcgagaagctcggacacttactggaaattcattataggtccggccgacctgtcacccgatggttggagcagtatcaacagcaggttgaaggtcagctcgcattcgccgaatttattctagacgatgctgactcccagctgcactctctcagggcagcttttgtacggatccagcagacacccgacttgggcgagccagtttcgtggattaatgccgcctatctcgagccagccagccacactctttactga

SEQ ID NO: 8738 - RNA, 1053 nt, synthetic construct
  source 1..1053: mol_type = other RNA
atgaaaaaccagaaactgacactcaatcagatcaagcgaaacgatgtactcataaagaaatgcaaaacatccaagcaaatcgcgtccctgctaaattgttcagctaaggagctgacacttcactcctttgaacctatatattaccatttcaaggtgccaaagaaacgcaagggcgcctttaggtacattgaggcacccagccaggaaattaagcacctacagagaaagcttaattactacttgcagtctgtgtattacctcaatcagtctaaagccagttacggatacatcattaaggctattggtcaaaagaacaccaagaacatctacactaatgccttacagcatctgggatccacctatatgctcaacgcagatttcaaggacttttttcatcaaatcgcactgaatgatgtggtccagatctttaaatcgaaactgttcaacttcaacaagaatacggcttataccttagccaagatctgcacttataaggggagactgcccatgggagcgccaacgtctcctgccctgagcaatttatattcaatcgctttggatcacgacctctcaacctgggcaacattgaacaaactaattttcactcggttcgtggatgatctgtcctttagcagcaaaaacaatttgctgaatcaaacccatttcaagcagattaacaatatcgctctcaaatatcaccttaactttaaccccaacaagaccaaatatttctcgaaaaccgacaagaaaatcgtgacggggttggtcctgaataatactgtagacatagacaagagttactataatgaactcgacaaggacataaaccgtctgcagaaggttattgaggttcatcacattactggtaaaacacaggggctcgcctttcttaaagagtttaagcaacagatcatgggcaagatcaatttcattagcactatcgagggcaagaacagcaaacagtacctgacataccttaactctttccacaacgccctggaagtcaacaatgagctggtgaacaggtggaccaaattcagtaattacatttga

SEQ ID NO: 8739 - RNA, 1050 nt, synthetic construct
  source 1..1050: mol_type = other RNA
atgaagcagcagaagcccaccctgaaccagctcaaatggtacgaaaaccagatatttaactgcaaaacgctcgaggaaatttctgtgctgctcaattgttcaaaaaacgaactgctattgcatagttacaaccccgagtactaccaatttagcatcccaaaaaagtcagggactttccgcattattgaagctccgaatgagtcactcaaacggctccagaggaatctgaatcagtacctgcaggccgtgtactacctgaaccagagcgtgtgctcctacgggtacgtgatatctatcctgggcgagaaacaaacgaaaaatatctacacgaatgccacacagcaccttgctaaaccttttatgctgaataccgatttcaaggatttctttcaccagatcaagatcgatgacgttacacaaatttttaagagcgagttcttcaactttgatatctatacagcaactactctcgccaagctgtgttgctataaggatcgtctgcccatgggaaccccaaccagcccagtcttatccaatctgtatacactgaaattggataacgaactcttgcagtgggctaagaagcataatacttcttatacgcggtttgtagacgaccttacctttagttccgtaaccactagtttttcccctcttcacttcaaacaaattaatgaaatcgccctccgacacaaactgaatttcaacgaggaaaagactaggtatcttaattctgacgacatcaagaccgtgaccggacttgtgctaaataccactgttgacatagacaacgcgtattatttggagctaggtaaggacttaatcagacttaagaacgtcatggaggtctattacatcacaggcaaaacacatatcataaccttcttgaagactttcaagcaggagctgttcgggaagattaacttcattggtaccattgaaggcagaaattcgaaacagtttctgaactatctcaacctgttctataacgcattagagcctgatacagacctggttcaacgctggacaaagtttagcaactacgtgtga

SEQ ID NO: 8740 - RNA, 1044 nt, synthetic construct
  source 1..1044: mol_type = other RNA
atgaagatcacattcaaaaaactgaagaaggaggcagatctcttctgtaaactgagtacgttaaacgatcttgccgcagtcatatctgtgagcaagaatgaaattttgctgatggccttcgaaccagtatattaccatttcacggtgcctaaatccacaggcggccaaagatatatcgaagctccggacattgagctgaagaaaatccaaaggaggctgaactactttctgcagaaggtttactacctcaatcagtctcgcgcggctcacgggtacattataagtgtgatcggtgagaaaaacccaaagactattctttcccaggcagaaaaacatcttggagctaactatatgctaaacgtagatttttccgacttcttccaccaaataagcattacagacgtcaagaatatctttcagtgttctccctttaagttcaaccagtacgcagcctacacattagccaaaatatgctgctataaggatcgcctgcccatgggtgccccaactagtcctgtgttatccaatttctacacccgttcattggatgaggacctcattaaatggtcaatgccccagaagattacctatactcggttcgtggacgatctatcgtttagttctctggacagccccttcaacattacacactatgaacagatcactgagatcaccaacaattacggactggtcctcaatccaagcaagaccgtctactatgacattaaggatgaaaagattgtcacagggctgatcttgagagaaaccgtggatattctgcctgagttttatgaggagcttgataaagacatcaatcggctgaaggctatcaatgaggttgtttacatcactggaaaaatccagaaacccctcatgctgagcacctttaaacaagaggtgatgggcaagatagcctttatcgcccagatcgaagggaagaattcaccggagtacaaccattatatggaaaaatacgaggacgctgaggcgcctgacgaagagttgtccgtgcgatggaccaagtttggcaactatctcatctga

SEQ ID NO: 8741 - RNA, 1053 nt, synthetic construct
  source 1..1053: mol_type = other RNA
atgtccaagaagcacactaagaagcagattctgaataaagccgctgagttttctaactgcaaaaacatcaagcaagtttcttttgtgctcaaagtgtcccctatgcaactggcaacaagcgccttactgccgcaatactactacttcaagatgaagaagcttaaggggggatttaggaatattgaagctcccgaaccccccctgaaaaagttgcagcgcaagttaaacacgtacttgcaatattgctactattcagaacagaccaaagccgcttacggtttcataattaatccgcgtaagcaaaaagcgaagaatattgtgagtaacgcacagcagcataaaaacaactcgtacatgcttaacatcgacttcgatgatttctttcaccaaatcagcattaaggaggtgattgctatattcaggaagagcccattcaatttcaacaaaaacacagcagggattctctcaaaaatatgtaccaataagggaagactgccaatgggcgcacctacaagtcctgttctgtctaattttgcctgttcaggcctcgataaagagctgcagcagtgggccgatactcggatcatcacctatactcggtttgtcgacgatcttaccttctccagcaacatgccaattaccaaacagcattacaacgagataaaggaaatcaccgacaagtacgactttcagatcgagactacgaaaaccaaatggtatgggaaagaacaggaaaagactgtgacgggtctgaccgtaggcgagacaatcgcaatccctgaggcgtattatacagagctagacaaggacctgcaccgcttgcagaaaactaccgaggtgcatattattacagggcaggtctataaggccgacgccggaaagaagtttaagcaggaaatcatgggcaaaatcaatttcatcgccgtagtccacggctatgacggaaataaatacgagacatacatgcagaagtatgaggatgctatcaatcccccagataaagacgaactcagtatgcgatggctaagattttccaactacatgcagttctga

SEQ ID NO: 8742 - RNA, 1050 nt, synthetic construct
  source 1..1050: mol_type = other RNA
atgaagctcaaccagaagctcacaagaaagcagatatacaaaaaagccaagatgctgttttcctgtactactctgaaagacgttgaacagctgattggtgccgagctcaatagcatctctctgcatgcttttgacccaggatactttcacttcacgatgccaaagtcaaatggtgaactcagatacattgaggctcccgaggatgaacttaaacgtctgcagaggaaattaaaccactatctccagtgcgcgtattttgtcgtgcggaccccctcctgctacggctttacaattggggccatctccgagaaaaacccgagaaacattctctcgaatgcacagaagcacttgaactgctcttatcttatcaatgtggatgtggatgactttttccatcaaattagtaccgaacgggttcagtttatattcgagaacgatccgttccgattcgataggtacatttctaagacattagccaagctgtgtacctacaaaggaaggcttcccatgggcgcccctactagccctgtcctcagtaacttctacacaatcgaacccgacacagaattgcagaagtggtcagagaaccagagcattacatatactcgcttcgtggacgatctaacttttagctccaccaaaaatctgaacagccggcatatcgagagcatctctgggatactggatggcttcaatttgccactgaattctggcaaacacaaactgtatggaccagaagaccccaaaacggtgactgggctagtggtaggtaactcagtggagatcgctccttcattctactgtgcactggacgaggaccttgtccgattaaagaaggtcgttgaggtgcaccaaatcaccggcatgacctccggattgagtttcctgaagcgctttaagcaagaggtcatgggcaagatcaatttcgttaagcagataaaagggaccttttccgaagagtatgtgagatacctggatcaattccatgaagctctggaacctgacgagaggtttgtggcacgctggaccagtttcaacaattatgtatga

SEQ ID NO: 8743 - RNA, 1053 nt, synthetic construct
  source 1..1053: mol_type = other RNA
atgaacaagcggcacaccagcgagtggaggcgattaggtgaggatctgctgcagacaaggaccccagacgacctctcaagactgcttggcattaccactgctagacttgctgacaccgcggaggcaccagcatacgccactttctacgtcgacaaaagaaacggtggaaagcggttaatcgaagacccagcccctcccttgaaggctctacaacgacgcctaaatgatctgttgcagggcttatactggctggaacggtccgaggctgcatacggctttgtcgttaaccctctcgacgatccccacccccggcacattgtgacacatgccgagcgtcacctgggatgcagacgcctcatcaacgtggatcttgagggctttttccatcagatagacaatgatagagtgaggaagacattgctggcccctcctttgcagcttgaggcagaagctgtcgagctcctggtggccctgacgacatggaagggacgcctaccaatgggagcgcccacctctcccgtcctgagcaatctggcttttcgtgacgaggatttgtatctgaccaggtttgcgagagacagggggtggctgtatacgagatacgccgatgacctgacattttcaagccggaaccaggacatggaacctcatcacttacatgagattgttcagcacctcgaggatggcctcaaatataccgtacatccagagaagcggcgttatagtgatgatggcgatatcaaatccgtgactcggctcgtgctcgaagggaatcaggttactctccccgaggagtatttccaccaactggacgaaacccttaatgaccttagttccgcccgccgagtgcatcaccgaatgggagggaggcacactctgtggttggaagactacaatgctagaatcgaaggtctgctgtcgtatgcccgctacgtactggatgaaagggatccggtgtacatggatctcaaaaggcgctatgatgacgcaaaccaagcctctccggacgacttcggggcctacacatggtttgacttcccttacttcgaatga

SEQ ID NO: 8744 - RNA, 1044 nt, synthetic construct
  source 1..1044: mol_type = other RNA
atgttaagtcttagacagctccagtacaggcgcaatcggttgactaaacttagaaccatgcaagaactgtgtctgctgctcggcaagcccggtcataagttggaattgctgtgtgcacaacccatgtacaacgagttccacatccggaagcgaaatggaggcaagaggcatattgaggatcccaggccccctctgaaaagggtgctaggaatcctgaatgacctcctgcaaggggtctattacttcgaaaaaactgaagcagcctatggtttcatcgcgattgcgcgggatgatccagctcctccaaggcacatagtcacgcacgccgagaggcatttagggtgccggtggctgatgaacatcgacctgacatccttctttcaccaaatctctaccgagatggtcttggatcgcttgaaagatccacccttccattttgatgacgaggtggccgatctgatggctcgcctgtgcacgtataaggggcgccttccgatgggagcccctactagccccgtgctgtccaatctggtatttcagcgagaggatgaagttctcaaagcatgggcagacgaccacgggtggctttacacaagatacgccgacgatttatccttttcttcgcagaaggagattagctcatgggaaatgcagcagaccataaacctgctagagaaccacagctacgctgttcacccagagaagcgccggctttatggcccagacgacgttaaaaacgtgactagattggtactgggagatggagagctcgagctaccgcctgacttcctcgaggagcttcgggactgcattgaggacctgcgccgtacaaccagaacccacctccgaatgggtgtggccaggccacctgcttggctgacaaagtacagacagcgtctgaatggcatgatgggctttgctaagcatgtgctcggcgaatatgacgaagatttcctccagatccagagatcatacgacgaagccgtgaaccccccggatgaagacttcgggacctatagttggttagactttccttattggtga

SEQ ID NO: 8745 - RNA, 1038 nt, synthetic construct
  source 1..1038: mol_type = other RNA
atggacaacagcatagccgccctcgccggactgcgaaaggcctttttcgctatgaggacagcgggagacttggccgaactcctcgcggtatccccagcgcacttggtggctgttgcctttagaccatggtatcatattttcgagctccctaaaaaagacggcaccatgaggcttatagaggacccagatgaccgcttacagcctctgcaggatgggctgaacgattatctgcaggcagtttattggcaccaacggagcccagctgcttacgggttcctggtcattcctactggggaccctgagcccaggcatatcgagacaaatgcgaggaagcatattggaaagccttggctcctcaattgcgacctagaggactttttccaccaaatcaccgctggccgcgtgcacaagctctttgctgatgccccctttggatttgacgaggaagtgtgcgatctgcttgtgcggctgactacttttcggggaagatgtcccatgggtgctccaacctcaccggttttatctaatttggtgttctctgccacagatgcagatctaaccgatcttgctagacgccgagggtggacttacacacgttacgcagatgacctgtcctttagcagttatgacccactggactgggatgattacacccacatccaacgggccgtcattcgccatgactatgagttcaacccagaaaaagccgctctttttggcccggatgatcccaagatcgtcactggcctgctgttgggcacgcaggatgtagaagtgcctcccgatttcttccctcagctgaccgacgacattcaccagctggccggtgccatgcgtgtgcagttcagagtcaacccccgcggtagtcgtacaacggccagattccggaggtcagtcgaaggcaagttgaggttcgcagagcgcatcatggggagaaagcacccgggcgtggcaaaattatggaaagactaccgaaatgcagtgaaaccccccgcaaagcatatccagcggtcctggtttgacttcgaatactggtga

SEQ ID NO: 8746 - RNA, 1068 nt, synthetic construct
  source 1..1068: mol_type = other RNA
atggccgataccattactatcaagggaatggagtcccgcgcgaggaggtttctcgacgtgcagacagtcgaacagttggctaaaatccttggaaaagacccaatgaagctggcagttctggccgccctgccacagtaccgggaattcgacatcccaaagaaaaatggagggaagagacatattgaggaccccgcccctccactgaaaaaggtgcaacgcaaactgaacgatttccttcaggccgtgtatttctttcaccgcacagacaatgccttcggcttcattacaaatcctgtggatgaccccagccctagacacatcctgactaatgcacaagcccatctcggttgccgatggctactgaacgttgacatgaaggacttcttccacctggttagccaggagagaacggagcagctattcgaagctccactatttgggttcggcgagcacgtttccaccctgcttgctagcctcgcttgttacaaaggcagattgccgatgggggctccgacaagtcccgtgataagcaacctggtgtcaattcccctggatgaagatcttaatgcatttgcccgggagcggggctggacctatactaggtatgctgacgatatgtcctttagttctcaaacggaaatccctccggatgccgtgcaggagatcgaggcctgggtaaaggcctatgactttgaactgaaccccgcaaaggtgaagctctttgggcccggctctcccaatccaaaagaggtcacagggctgcatgtcggagagactgaaatcggccttggtgcagattacaccggtcaactgactggggccatacagcacttgaacgacatagtggacgcgcagtacctcaccccttcaggtaagtcccagccttctcggtgggtcgaagagctggaagcgatggtacgtggcaaattagagttcgcacgtcagattttgggcgaggcagatcctctctatcaggatctctcgttacgattagaaaacgctctcgagccccccgagacatacggaccactgacctggttggaatttggatacgctacccctaggtga

SEQ ID NO: 8747 - RNA, 1062 nt, synthetic construct
  source 1..1062: mol_type = other RNA
atggctgacacaattaccattcggggcatgagaggacgcgccgatcgattcctagcttgccagactttcgaccagctcgctcggttacttgggaaacagcctctgcaactcgttggtctggcggcccacccgcaatatcgtgagttctatatcccgaagaaatcaggcggtaaacgcctgatagaagacccagtaccccccttgaagaaagcccagcgtagactgaacgactacctgcaggcggtgtactattttcatcgaaccgctagcgcatatggattcctcaccaatcccgtggacgatccacaacctaggcacatcctcacaaatgcaggccagcacttgggtcgcccatggatgttaaacgtcgacatgaaagacttcttccaccagatcacacaggaaagggcccaggagctgtttaaggcacccattttcggatttaacgacgagatctccactgcccttgccgccctgtgttgctataagggaagactccccatgggcgctcccacttcgccaattctgagtaatctagcctctattccactcgatcaggacatggaggattacgctagagataggggatgggtctacacgaggtacgcggatgatatgacctttagcgccaacgaacctattacagaagcacacttctccgagatagagaactggataaccgcttacgactttatcttgaatcctactaagaagcggttttacgggccaggggacaagaaagaagtaaccggcctggttgtgggagattcagaggttgagcttgctgacgattatcttgatatgctcaccggcgccatccaacattttagtgatatcgtggacgcccagcatctgacacctagcgggaagaatcagccctccccttgggtggccgaattgcaagcacaggtgaagggcaaattagaattcgcaaggcagatcctgggggaaaacgatgagcggttcattgacctggagacgcgcctgatcaaggcagcggagcctccagaatcttacgggcccctgacttggcttgagtttggctatgacgtcaaattgtga

SEQ ID NO: 8748 - RNA, 1065 nt, synthetic construct
  source 1..1065: mol_type = other RNA
atggctgacacaatcaccatacaaggcatgaggaatagggccaaacgcttcttgtcgtctggaacactggaaggcctggcactctcactgggcaaggcgagtctcaagcttctagcgctggcagagcagccatcctacaatgagttccggatccctaagaagtcaggaggtatgagacgcatcgaagacccaacgccagaattaaagaaggcacaaagaaagctaaatgactatcttcaggcagtttatcacttccagaggactgatgctgcgtatggtttcctggccaacccggtggacgatcctagcccaagacacattcttagtaacgcccgagtacacatgggctgtcgatggctgttgaatgtggacgccaaggacttttttcacatggtgtccgaggagcgtgtcaagcaggtgttccagagcggccctttccattttgaagagcccattgccggtcttctggcctccctatgctgctacaagggacggctccctatgggggctccaacaagcccaattctctcaaacttcgcatctgtgcctatggaccacgcactgatggagctcgccaggaaatacgattggaaatacactcggtacgccgatgatatgaccttcagcgctcaggaagaaatcactgaggctcattttgccgaggtaggcgcgattatacgttcccacgggtttttactcaaccccgaaaagaaaaaacattatggacccgaggatgaggataaggaagtcaccgggctgcttgttcgcgaatctagaatcgatctgcctgagggatatttggagcagcttgagaaggccatcgatcatctcgataaagcaattgacgctaaatactctatggccagtgggcgcgggcaaaaaaccgcctggctggaggagctggagcagcaaatccggggaaaactcgaatatgccaggcagatactcggcgaaggcgacttgctgtatctggatctggtcgtgcagttagacgaagctctgacaccccccgactactacggtccgatggcttggctggactttgggtacgctttgcccaaatga

SEQ ID NO: 8749 - RNA, 1053 nt, synthetic construct
  source 1..1053: mol_type = other RNA
atggccaatcacccaagccgcctcgagttgagagcacttaaggatgcctttctggccatcagaacacccgccgacctgtgttcactgttagcagaggacatgctcgagctctctgccctggccttgaaggaagacaactacgaggctttcttcgtgcaaaagcgaaacggagaacagagattgatcgaaaatccctctcctcccctgaagcgaatccagcggaagttaaatgactgccttcaggctgtctaccatttccaccgctctagtgcagcctacggctttttatcggcatgttccgacgatcctccctgggcacaccgtgggattgtggcgaatgctaggcagcatcttggccggccgtggatgctgaatatggacgttgaggatttctttcatgcgattttggcagaccgggtcgcgtgggtctttctgaacaaaccattcagttttgacaccgagctgactaatttgctcatgcgcctgtgcatctacaagggcagactacccatgggcgctcctaccagcccgatactgagcaactttgccgccaggctgcttgatacagatctggaactgttggccagatcaaagcaatggctgtatacccgttatgcagacgatatgacaattagctcccggcaggagattacagaggatgatgtgcaacttctccgggattattatagggctcacagctttgaagctaacgaaaaaaaaacgaagcttatgggtcctaaagacgtacacactgtaactgggatagtgctactcgagaacaggctggacttactaccagaattcttcgaggatctcgactctgagattggtaaactgagtgagatcgccggcgttaagggacgcctcggcatcaccctgatggactgggttgatgattatgctgagaaaatacaggggatgatctccttcgccgcgcatgtgctgggtgaatcagacgcaagggtggtgaaagctgaaaaggctctcggaaaggcccagcacgggccaaaagactacggagccgtctcctggctggatttcccttaccattga

SEQ ID NO: 8750 - RNA, 1044 nt, synthetic construct
  source 1..1044: mol_type = other RNA
atggataagaagactagacagaggcaccagcacaacaaggcagtgttttgctcaatcaggtctatcaggagtctctgcagtctgctcaaaaccgaccagagacgcctactgctgctagctcgccagcctccctataaggtttttactgtgcccaaaaaagacgggggcgagagacaaatagaggcgccaggcgctgaactaaagaaggtactggggcacttgaatcgctaccttcaatccgtgtactattttgagaaatcaagcgccgcttacggcttcatcgtgggagtcctcaatgatgatgatcgtcgaaatgttgtaacgaacgcccggaagcatgcaggtcggccctatttgctgaacatcgacctgatcgacttcttccatgccataactcgggagcaggtcgttgagatattccagagcaagccgtttcagtttaaaaaagaccttcctgagctcctggccgatctggtgacgtaccaagggcggcttcctatgggcacccctacatcccccgtgctcagcaacctggcctgtagagaacttgacgaacagttgagcgcctttgctgaagacatgctgtgggtgtacacaaggtatgcagacgatatgtcctttagttcccgaaagccaattgacgccgacaaaatcgactcggtgcgcgctattattgagaaagccggtttcgaggtgaatcagaggaaactgaagacctacggcccggaggatgataagatcgttaccgggctcctggtgacagacaaggtcacattggcaccagactatctgccacagttagatgaagacattaggcagttgcagaatgtcttactgatccaaaatgaacagggacagctgtctactcgctgggtagaacagttcaaaaagaacatcattggacggttaaacttcgcaggtttcgtccttaagcgttctgatgagagatacattgacctcaaagatgcttactataccgcgattaacccaccccaagaagatttcggagccgtgtcatggcgaggctttccttataatctctga

SEQ ID NO: 8751 - RNA, 1044 nt, synthetic construct
  source 1..1044: mol_type = other RNA
atggataaaaaaaccattgctcgccatcagcataacagagacgtcttctgctctattaatagcattagatcactttgctccctgctcaaaatggaccagaggcggctcacattattggtccggcagcccccctataaagtgtttaccgtgcccaaaaaggatggaggagagcggatcatagaggccccgggtaccgacctcaagggcgtactgggcagactgaaccgttatcttcaatccgtgtattacttcgagaagtcctctgctgcgtacgggtttatcgtcggcgtgcatgacgacaatgaccgtagaaatgtggtaacaaacgcacgaaagcacgccggacgggcctacctactgaacgtggatcttacggattttttccacgctgtctcgcgggaaaggatcgtggaaatctttcagtcaaaaccattccagttcaaacgcgacctgcctgacctcttggccggcctaacgacttaccagggtcgcctccctatgggtacacctacaagcccagtcctcagcaacttcgcttgtcgcgagctggacgcaaggttgactacctatagtggcaatatgttgtgggtgtatactagatatgcagacgatatgagtttttccagtaataagcctatagatgcagacaaggtggatagcgttagagcaattataagggaagaaggattcgaagtgaacgaacgaaaactgaaggtgtttgggccggaggatgacaagatcgtcaccggtctgttagttactgataaagtaaccctggcccccgactacttatcagggctggctgatgacatccaccagctgcaaaacgttcttttgatccaaaacgagcaaggacagctgtctacaaggtgggttgagcagttcaagaagaacattattggcaggcttaattttgccgggttcgtgctgaagcgaaataacgaatcttacatggagctgaaggatgcgtactatactgccatcaatccaccccaggaggatttcggcgccgttagctggcgcgggtttccatacaatctctga

SEQ ID NO: 8752 - RNA, 1044 nt, synthetic construct
  source 1..1044: mol_type = other RNA
atgaagaaagacacgcgcgagcgtcaccagcatcgaaaaatggtcttctgttcaatcaatagtgagcacacactgtgccgcctgctccacattgatcagagaagactgcagttgctcgccaagcagccagcctacaagagcttcactgttcccaagaaagatggcggccaacggcagatcgaggcacccaacgcggagcttaagagagtattaggtaggctcaacaggtatctgcagagcgtgtattattttgagaaaagttctgccgctttcgggttcatagtgggagtaaccaatgacgacgatagaagaaatgtgataactaatgccaggaagcatctggggaagccttacctgctgaacatcgatcttcttgatttcttccactcgatctctcgggaccgagtctaccagatatttcgggaaaagccattcaacttccggcggaacgttccagacctgctcgcggatttgactacataccaggaccatctacccatgggcactcctacctcacccgttctgtctaacttcgcgtgccgcgatcttgaccgcgaactgttgattttctcccaaacccacgactggacctacacccgatacgctgatgatatgagctttagcgccgcagagcctatccttcagggtcaagtcgaggctctgggggccatcattcagcaggctggttttgccattaatccgaggaagactcagctctttggaccagaagatgagaaaatcgtgacaggactgctcttaacagacacggtgaccctggcccctgactacttgccactgttgcaagctgagatcgaccagctgcgcaacctcctcctggtgcagaatgaacagggcgagctatccacacggtgggtcgaacaatttaagaaacaacttatgggcaggctaaactttgccggatttgtgctgaggagaaatcaccctgattatatggcactcaaagacgcatactatgctgccattcatcccccgcaggaagaattcggggcaatttcctggcgtggctttccctataatttatga

SEQ ID NO: 8753 - RNA, 1044 nt, synthetic construct
  source 1..1044: mol_type = other RNA
atggacaagaggactgtggagcggaacctgcacgtcaaaacagtatttttcggagtgcggtctatccgcgctttgtgtggggtgctacagattgaccagcggaggctgttgctgctggctaagcagcctccctaccgctcatttactattcccaagaaagacggaggcgaaagacacatcgaggatccgggcgcagagctgaagaaagtcctggggaaactgaaccgatatcttcagagtgcctacttctttgaacgttccatggctgcttacggattcatattaggcgttcagaacgataacgatcgccggaatgtggtgactaacgccaggaaacacctcaagcggccatatttattgaacacagacttgcgcgacttcttccacactattgcgagggatagggtttacgctatttttgctgggccaccttttcattttcctaaagaaatccccgaaatcctggcagatctgaccacctatcagggcagacttcctatgggtgctcccacaagccctgtcttatccaacttcgcatgcagaaatcttgacctggagctagcagcgttctctgagaatatgctctgggtttatacccgttacgcagatgatatgtcgttcagcagtcatcaaccaattgacgccgataaaatccagtccgtgagaaccataatagagaaagaaggatttgccgtgaatgaaagaaaggtcaaggtatatgggcccaatgacctcaagatcgtgaccggtctgctggttgccgacgacgtgcagttggccccagattaccttcctaatctcgaggccgagatcaaccggcttcaagaggtactggtcgcacagaacgagcaaggacagctgtttacgaactgggtggagcaatataagaagcagatcacggggcgcctcaatttcgccggctttgtgatgaaacgatcaaatccagaatatatgaggctcaaggacgcctactacacagcgattcatccaccgcaggaagagttcggcgccatgagctggcgaggtttcccctacaatctctga

SEQ ID NO: 8754 - RNA, 1041 nt, synthetic construct
  source 1..1041: mol_type = other RNA
atggacaaaaaaacgcgagaacgccaccagcatcaaaagatgttgttttgcgggatcgggtcggtacgcgcactatgtgggctcctgcagactgaccaacggcgactggctctgctggctcagaaacccccatacaagactttctcagtgcctaagaaagagggcggcgaaagattgattgaggcccctggagaggagctgaaaagaatcttatcccgcttgaatgggttgcttcagtccgcctacttctttgaaaaatctagcgccagttatggatttattgttggagttctgaacgatgatgataggcgtaatgtgcttactaacgcccgcaagcatgctggacggaaatacctgctgaacgtggatctaaaagacttctttcactacgtgagcagggacatggtccttaaaatcttcaccggcgaacccttccggttcaagggagagctcgcagatctgttggccgacctgaccacatttcagggaagactgccaatgggcgctcctacatcacccgtgctgtccaacttcgcatgccacgatctcgatgccgggcttatcacactctctgaaaatctgctgtgggtttacaccaggtatgcggatgacatgtccttttcagcaaaccagccctttaatgcagagaagatcgctagtgtcggggcccttatacataatgccggctttgtggtaaaccagcagaagatcaagatatttggcccaggtgacgagaagatagtcaccggtctgctggtgacagacactgtcgcgttagctccggactttctgcctaggcttgaggcagacattagccacctccaacagattatgaaggcccagaatgaacagggccagctcctaacgaagtgggtggaacaattcaaaaagcaaatcatcggtcgtctcaatttcgccggcttcgtgttaaaaaagagcaacgacgcttatattagactcaaggatgcttattacaccgccattaatccaccggaggatgagttcggtgcagtctcttggcgggcgttcccctataactga

SEQ ID NO: 8755 - RNA, 1047 nt, synthetic construct
  source 1..1047: mol_type = other RNA
atggataaacaggctctatatcaacaccagcaacagaagacagtgctgtgctcaataaactccctgaatgagttggcgcgccttctgagactcgaccagcggaaactgacattgatggccgaaaggcctaattacaggacatttgagataccaaagaaggatgggggtatgcgagaaatcgaaacaccaggggacgacttaaagcgtaccttggggattcttaatcgctatctgcagagcgtctacctgtttgagaagtcctccgctgcctacggctttgtggtgggcgtcaaaaacgatgatgaccgaagaaatgtactgtccaacgcacggaaacacattggtaagccttatcttctgaacattgacttggccaacttcttccacagtattacccgcgagagagttctgaaggttttcaccgaggcccccttcaggtttaagcgcgaactccccgatgtcctcgctgacatttgtacttaccgtggcagactgcccatgggcgcaccaacaagtcccgttttgagcaacctggcatgtatggatctcgacagggacctcagtatactggcaaattctctgttctggaactttactcggtacgctgacgacatgtcgttctcttcagatacgcctattaccccagagaacatcgtgtctctgagaaagatcatcaccgacgctggtttcaccctgaatgagcaaaaattaaaactctacggccctgcggatccgaagactgtcaccggaattctattggaagctgatgattgcactctggacccttcatatctcgatctgctagacgaagagatcaaaagattacatgaagtgatgagggcccaaaacgaacttggacagcttaatactcggtgggtggagcagctcaaacagcagatccgaggcaggatggccttcgccggatttgtactcaagcggaagaacgagcggttcgtggagcttaaaaacgcatttcatagcgccatcaatccgccaacggaggaattcgggtctatcagctggcgcggatttccctataatttttga

SEQ ID NO: 8756 - RNA, 1044 nt, synthetic construct
  source 1..1044: mol_type = other RNA
atggataagcggacgcgacaacggcatctgcagctgaaaacacaattctgcagtctcaggtctgtcaccgagttctccatgctcgttaagacagaaaagaggaagctccagctgctggctgcgcaacctgcctacaatacttttaccgtccccaaaaaagatggcggcgaaagactgattgaggccccagcccccgctttaaaaaaagcccaggggtcaatcaatcggtttttacagagcatctactaccttgaaaagactacggctgcacacggctttgtggtgggtgttcgaaatgacgacgataggcgcaacatactcaccaatgccaagaagcatttgaacaaaacttacctgctgaatatcgacttgcaggacttcttccacaccgtaactagagacgaagtgttagacgtcttcatgaagccaccgttcaacttcaaacgccagctgccagatcttctggccgaccttttgacctatagcggtcgtctaccaatgggtgcgcctaccagccccgtactttctaactttgcttgtagggagatggatcggcggctaacagcaatggccgaggatatgttgtgggcctatacccgctatgcggatgacatgagcttctcatccaaccgtaacattgatgaagaaaccgtaaacacagtgattcgaataattagagaggagggatttgttccgaataagcgtaagatcaaagtgtacggccctaaggatcagaaagtggtgacagggctgttgatttccgacaaagtgtctctggaggacaattatctggcacagctggaaactgacatcagacaactcggagacgttctactcgcccagaacgagcaggggcagctcgctacaaggtgggtcgagcagctcaagcagcaagtgcggggccgcctgagtttcgcaggctttgtccttggaagacgccacgaaaggtacaaccagctgaaggatgcttactataacgccgtgaatcctccccaggaggagtttggggcaatctcgtggagaggatttccctataatttctga

SEQ ID NO: 8757 - RNA, 1044 nt, synthetic construct
  source 1..1044: mol_type = other RNA
atggacaagcgcacacgtcagaggcaccttcagaacaagaaaaaattctgcggcctgaggtctgttagcgagctatgcctcctgctgaagacggataagaggaaattggagctgctggccaatcagccaccctacaagacctttactgtgccaaaaaaggatggcggagaaaggctcattgaggcaccaggaggtcctcttaagaaggtgcagggactgctcaatcgctatttgcagtcagcctacttccttgagaaaagcacagcggcctatgggttcgtggtgggtgtacgtaacgacgaggaccgccgaaacgtgctgacaaatgcaaagaaacatctcggcaagacctatttgctcaatatcgacctgcaggacttttttcattctgtgacacgggatcaggtccttgacatccttttgaagccgccctttaacttcaagcggcggttacccgacctgctggccgatctgctgacctataacggcagattacctatgggggcccctacctcgccagtgctatccaatttcgcctgtagagaattggaccgccgattatcagctatggcggaggatcttctgtggacgtacacccggtacgctgacgatatgtctttctccggcaatagaccgttcgacgaggagaaagtgaacagtgtactcagactcatcagagaagagggttttactccaaaccctcggaaaattaagaggtttgggcctaaagacgagaaagttgtcactggattactcctgactgataaagtccagctcgaaaagggttacctcgatcaactacagcaggacatacagcagctggcagatactctgagggcacaaaacgaacaggggcagctggccacacgatgggtggaacaattcaaacagcaagtcagaggcagattgagctttgctgggtttgttctggggcgccggcacgaacgctatcagcaactgaaggatgctttctacaccgcttccaatcccccccaagaagagtttggcgccgtcagttggaggggattcccctacaatttctga

SEQ ID NO: 8758 - RNA, 1035 nt, synthetic construct
  source 1..1035: mol_type = other RNA
atgaaaacattatcaaaacggcgcctgaagcaaaggagggacaagtttctgtccatgaggtatgtagacgatctcgcagagctaactagcttcgtccggtataaactgacactcattgcaggagtccctcagtaccatttcttcagtgttccaaaacgaaacggaggcctgcggcacatagaaaaccccgcgcgaaaactgaagaaggtgcagaggactctcaacaattttttgcaggcggtgtactttttcgagaagactgaggccgcttacgggttcatcatccgcgcccgtgatgaagcccctcgagacatagtgtccaatgcccaccagcatctgaacgtcccttggctgatgaatatggacctgacagacttcttccactacgttaagcgcgaagatgtctttcatattttctgccatgtgcccttcaatttttccgaggacttggcggaaattctgacccagctcactacgtataagggccggctgccaatgggagctccgacatctcccgtcctctcaaattttgcaacgatcgacatggatatcgacctactggcctttgcacaggcacggggctggaccttcacaaggtacgccgatgatatgtcttttagcatggatactgcccccatggatagtgagattgaggctatcagacaaattgccggcaaacaccagttcctcttcaacgaaaccaaattaaagatctacgggccagaggacgaaaagttagtgaccgggctgagacttggtgaagaggtaaccctttcgtctgcattcttgcaggagataagagaagagattgatcgcctgcagaaggttgtggaagccagagctatggccggccaaccgccaagcaaatgggtggagaagtatacccagcaagtgcagggtcgcatggcttttgccgagaaggttcttggggagtatgaccccatctatgtggagcttgaaaaagcttttaacagagctttgaaccctccagatcgttttagctccgtgaattggctcgactttccttaccactga

SEQ ID NO: 8759 - RNA, 975 nt, synthetic construct
  source 1..975: mol_type = other RNA
atggcacggttgttaggtatcgagcataggacactggattacctggcagaacgacctcagtataatgagttcgatgttcccaaaaagaacgggggattccggcatattgaagaccccgataacgaattgaagaatgtactgcgtttgtttaacgattaccttcaagctgtttactatttccgcaagtcagatgccgcctatggattcgtcagagttccagacaacgacaccgcgcctaggaacattctcagcaatgcagagaaacatcgcaatcgtccctggatgctgaatgtggactttctggattttttccaccaaatcaagcagatcgaaatctacgagctctttgtgtgcccgcccttcaattttggggaggaactggctgtcctgttgtcgaagctaaccacctacaaaggaagactcccaatggggagccctactagcccagtactctccaatttcgcgaccctgctcctggatcaggatcttctgggtttcgccacaaagaaagacctggtgtactctcggtttgccgacgaccttactttcagtgccaactcacctctctctgtggaacacttgacaggcatccgccagatttgtgctttctacggcctgaagctcaacgagaacaaaattaacttctttctgccccatcagacgaagatagtcaccggcttaattgtcacaaaccgcgtggacataccgcacacctatttagaggacctacgaaaagagattgacaagcttaggacggtgcttgaaatcaattataggactgggagacaggccagcgagtgggtgcagaggtttcaccagcagatagagggcgccattgaatttatcagacagatcgagacatccaagtctccagactaccagcaaatacggcaatattatgctgagagtcaacagatggcagaaaattaccagcctacttcctggctggatttcggctaccacaaatttatctga

SEQ ID NO: 8760 - RNA, 1071 nt, synthetic construct
  source 1..1071: mol_type = other RNA
atgaccctgtttgagcagcgcaataacccggcgatggccggaaaaatcaggacacaaggaaacgctgcacggttcatccagctacgtaattgccaagatctcgccgtttccctaagaatcgatgcgtatagactgcagctcttggtgctccaaccaaagtataattgctatagtgtacgcaaaccaaagggaggctttcgcttaattgaagacccccagggacggctgaaatccgtgcagagccgacttaatgatttcctgcagtctgcttatctgccactccggcccgagtgtgcctacggtttcactcgggcaaagagtgaagatgacgacagaacagttgtcgggaacgctcttcaacatctcggatgcagatatcttctgaacatagacctcaaggacttcttccaccaggttagtgatgaaaaaattgatggcgtgtggcagagccatttccgtaggtttgatgctgggctgaggcagctcctgaccggccttgtatgcttccgccagagactgcctatgggagctccaacatcaccggcactgtctaacttcgcctctttggagatggaccaccacctgactgaatacgcgcaccggagctgcatgcactacaccaggtatgccgacgacctgagcttttcaagcacagagcccataggcaagggggaataccatgatctacgcaacatcattggcgagtgtggttttgaggtgaatccttccaaggtgaggtggtttggtgatggtgaagcaaaagagatcacgggcatcgagttgggcgaagaatgtctgagattgcctggcaattatctgggccgcctggccagagagattgaacgatacagggccttttttgagttagaatcgcgataccagactggggcctcagggaaaaagcttaagctctttgagcaggagttgagggggaaactggagttcgcccggcaagtcttgaccgaggacgaccccgtgtggcagaagctggccgagtctttcgagcaggctcagtttgcacttgaagacttcgaatccgtcgattggctcgactgtccttacttatactga

SEQ ID NO: 8761 - RNA, 1038 nt, synthetic construct
  source 1..1038: mol_type = other RNA
atgagcattaaaactgccattaagatcagggccaaaaggttttccaagatagaaacattgagagacttgtgttccctaattaggaaacatgagcagcaagtggttctgatggctcaccagcctcggtatcatcggtacgaaattccaaagagcaagggggggctacgcctggttgaagatccagagaagaagttgaagatcgtgcagaccttcattaacgagcacttacaggctttctactcgctgattcgacccgagtgcgtctacgggttcgtcatcaaaagagaagcgggcgaggacaggactattaccggaaacgctatgcagcatctcggatgcaactatctgctcaatgtcgacttaaaagattttttccaccaggtgtcacgtgtgagagtagaggagatctttaagatccacttcaatcacttccacgatgagcttatcgatatactcgcccgcctaactacataccacgacagactcccaatgggggcaccctcctctcctgtgcttagtaacatggcctctatcgagatggaccgcgagttaattcaatatagtaaacacaccggattggtgtatagccggtatgctgacgacctgtcattttccacgctggatctgatggaacctgagcatctggacaacatcaagtccattatctcacagtgtggcttcaatgtgaaccctcaaaagataaaatggttcggccatgaggatagaaaggaaataaccggtatccttctggacggtaatcggcttggcctgccggaactctacctggagggactccaaaaagagttgatgcgatacaaaagctacatggaagtagagtctcgttatcgcacaggcgcaagcgccaaaaagctcaagctgtttgagtctgaactcaggggtaagatcaattttgccctgacagttatgcccgaagatcagggcgtggggaaacttttcgatcagtttgaagaggcaaaggaaatcatgcaggattttgagagtgtctcatggctggacctgccctacgaattcttttga

SEQ ID NO: 8762 - RNA, 1035 nt, synthetic construct
  source 1..1035: mol_type = other RNA
atggccaaccgctctacaattcgatcgaaagccaaaagatttgaaaaactccgcaccgtgtttgaatttgcacattggttaggcagagaagaggcaaaactccagctgctgtctttcaagccgcgttataaagagtatcaaattcctaaacccgggggtgggtggaggcaaatagaggatcctgaacctaagttgaaaagtgtgctccagaagcttaatgagcatttgcaggcctgctactacagcgttcggcccgccagtgcttatggttttgtaatctccgcttccgaagacgaagaccgcaatatcgtaactaacgcaaagaaacacctcggctgtaagcacttactcaacatcgatttgaaggatttcttccatcagattcgggaggacaaagtcgtggccattttctcccgccacttcccacagtttgaggacgctctgatcgatctactggcccggctggtctgctacaaggcgagattaccaatgggggcaccaaccagcccagttctgtctaactacgctgcgatacccctggatgaacagctaatggcttactgtagccagtcaggcatctcctacacccggtacgccgacgacctgtcattctcttcaaaacaggcgatcagtaggattgactatgaacactttctgcactgcgtgcaaacctgcgggttcgaggtgaatcccaagaagattagatgggccaaggagaacaatcccaaggaaataacgggccttttccttaagatgggagaggtttgtcttgaagaaaattacctgaggcagctcgagactgagatcggaaggtatatcacatattacgaggtggaggcccgatatagaacaggcgcctccatgaagaagctcaaactgttcgagcaagagctgcgtggaaaactgagctttgcacagcttgtcgagccggataacgagcggattgactatttgagggaccagatggatcaggctaaggaggctctggaagacttcgaaagcgtgcattggctggatttgccttacggattttga

SEQ ID NO: 8763 - RNA, 1038 nt, synthetic construct
  source 1..1038: mol_type = other RNA
atggcagcgagtagcactgtaaaactccgcgcccggaagtttagtcagctcaggtctgtgtttgatctcgcacatgtgctgaaggttccccaacataatctggtgcttatgggcagcaagccaagatatcgcgtctacgagattcccaaacctaagggcggaatgagattggttgaggatcctgagaagagtctcaagaaaatccagagccacttaaacgacttcctgcaagctgcttactatctgatccgaccggactgtgcttacgggttcacgatcgcatgccctggagatcagctgcgtaacatcaaaacaaacgccgaaaggcacctgaactgtaagtacctgttgaatattgaccttaaggattttttccaccaggtgaaggacatccacctaatcaacctcttcaataggcattatcccgaatttgactcagagttggtgtcttgcctttcaaatctattttcctaccatggtagactgcctatgggtgccccaacctccccggtgcttagtaattatgccatgttggaacttgaccacggcctgcagaactattgcaagtcaggggggatagtgtattcacgctacgccgatgatctgtcgttttctagcaccaatcagattcaggacttcgactttgtgagcatagacgcgatgattaaagattatggattcgagccaaacccaaagaaaatcaaatggtacgaacctaaagataagaaggaaattacaggcctggttctgggtgatgacggcgtcgagcttcaggacgggtacctacagcacctgtaccaagagattcagcggtacaaaatttacttagaggtcgaaagcaggtatcgaactggagcctccctcaagaaactgaagttgttcgaacaggaactgcggggcaaaatacaattcgcaaccatgatcctgcccgagaatgaggagctcttaaattggatgcagatggtagaggacgctatgtccgtcctcgaaaacttcgaatctgtcgattggctggagctcccctattccatctactga

SEQ ID NO: 8764 - RNA, 1002 nt, synthetic construct
  source 1..1002: mol_type = other RNA
atgaaatgccggacaacagacgacttggctcaggcatgccagaccgatgccaaccaactggttctctttggactcaaaccacgctataaggagtattatattccgaagaacaagggcgaaatgcgattgattgaagatccaagtaaagaactgaagaagatacagactcaccttaacaagctcttacaggcctggtactatacgcagcgatcagatgcctcgcatggatttggtattgccacctcaaaggacgagcaggccaggggcatcaaaaccaatgcatccgtgcacctgcaatgcaattacttattgaatatcgacctgcttgattttttccatcagattgagttccctaggctgcagaagaccttcgagacgtatctgcctaagcagaaggcggacatcagaaatctgctgctccaagtgtgttgctacaaaaacaggctgccaatgggggctcccacatctcctgtccttagcaatatcgcatgtctcgatctagacgggtcccttcagcaactgtgtaaacacgctaatctgaacttcacacgttacgccgatgacctctctttctccagtttactacccatagagaaggaggtacaggatatgatcaaagatgccattatgcacgaaggcttctccatcaactacaacaaggtgaattactttagcatcgaggacgagaagctggttaccggtcttgtgttgcacccagatggcgtgagactaccgaaagagtacgtgcccctgctcctcaaggagatcgagcggctgaaaattataaacgacgtcgaatacagataccagactggaatgtctcggaagaaactcaatttgttagaacaggagattcaagggaaaattcgcttcgtatctgacgtcctgggcagccatgctatcgaaactctgtcaatcgaaaaagcgtatctgaacgctatacaggcacctgaagactttgaaagcctgagttggttggagctgccctatgagtttctttga

SEQ ID NO: 8765 - RNA, 1026 nt, synthetic construct
  source 1..1026: mol_type = other RNA
atggccaccgggatcccaatcattagaaagcggcagcgcgcggtgctgaacgtcaagtcaatgtccgatttgtctaagctccttcagtgtcaggaacacgttatggctgcccacgcgctcacaccagaatatgacacgtatttcatacccaagaaaaatggcaaaagactgatcgaggaccccaaccctgttctgaaggaaatgcaagggatactaaacgatcacctgcaggccgtgtacttttatatccgccccgcaggcgtgtttggattttgcattagctcaacaacaggcgaagagaagaatatcgtgagtaatgcaaaaaagcatatcggcaacgactacatgatcaatatcgatctgaaggacttcttccaccagataaaaaccaatagggttgctcaaatcatcaacgatgtcttccttcatagcgaaactgaggttaaggaaatgatgaccgccctgatggtctataaaggtcgactccctatgggtgcccctacctctccgattctttcaaacttcgcactgcagaatctcgatcatgagatcaccaatatttgccaatcctttggagtcaccttcacacgttatgccgatgatctaactttcagcagtatggagtacatgaatgacacttttgaggccatgattaaagatgctatcgtgtacgagggatttgaaataaacccagagaaggtgaagcactacctgccctccagtatcaaaatcgtgaccggaattgtagtcgggagagaggacttaaggctgccagaactgttcttagaccaacttcagaaagaggtgattatctatggcaacgtggtgctcgctgaacataggtaccagactgggatgtctcagaagaagctcgaccagttccggcaggagattagcggtaaaataaacttcgcagcaatggtagactccgaaaaccccaaattgttgaagattacggacacatttaacgccaatgatgagattgagaatttgtcgtttgactggctggatattccttacgcttga

SEQ ID NO: 8766 - RNA, 1035 nt, synthetic construct
  source 1..1035: mol_type = other RNA
atggccacaaatccccgaataatcaagaaacggaaggacgccatcgacagagtccgaacaaccgcggatatatgtaagattctgggggagaatgaactcagactccagctcatggcaaattctccccggtacaaagtgtatactatccggaagaagaacgggaatctgaggctgatcgaggatccagaaatccagttaaaagaagtgctgaggaccattaacgatcacctacaagcagtctattactaccagcgccctgattgcgtgcatggtttttgtatctctagcactcacgacccagacaggaatgtcgtgtcaaatgctcaagcacatatgatgtccgctacaatgctgaacatcgacctcaaggacttttttcatcaaatctccgtttctcaggtgaaaggcattattaaacgccagttccacagatgggacaactatctggccgccatgattgccagtctatgcacctataaaaagcgtctccctatgggatcaccaactagtccgatcctgagcaactttgcaatgctggaattggatcatgagttaatgcagctctcgagggtcttcgaagtgacctatactcgttatgctgatgaccttacgttcagctcaggcagcgatttgccaaccgattttgttaaaatggtgcgggacgctctgcagcaccacggcttcacagttaatgagaacaaggtaaagtactaccaggcctccgacatcaagattgttacaggtattattgtgaaccctacgggactgagtctccctgatgactacatgacccaactgcgcaccgagattgacttgtataggaactcccgcctggtggacgcgatgtaccagactgggatgtctgagagaaagatgacattgttcgagcaggaaatcataggaaaacttaatttcggctacatggtgatgccggatgatcccgaactgaacgaattaaaccagctttttgaggtcgagatagacgtagagtccatgacccagagctggcttgatatcccctacaatatgatgtga

SEQ ID NO: 8767 - RNA, 1038 nt, synthetic construct
  source 1..1038: mol_type = other RNA
atgatgtcttcactgaagattaaacagcaggttcagtccctccttcggtccaaaagtgtcgatgacctggccaaagtgttgaaattcacagctgagaacatcacgctgctcagcatcagtaagaagtatgaggtgtacaagatccctaaaaaggacgggagctttagaatgatcgaggacccctacgcacctttaaaggccttgcagaaacgtctcaacgaagttcttcagtgctattatgccactattcggccatccccagtgtacgggttttgcatctctacatcaccggataagcccctcaatattaagactaatgcccaaaggcatgtcggaaacccatggatgatcaacatcgacctgaaagattttttccaccacatctctgaaaagcgcgtccaaaatatctttagcaccaacttcaaacactgggataagaatctagtcaagactatggcggcgatcgccacctataagcatagattacccatgggagcacctacttcccccgtgctgtccaacttggcttgtatcaatctggatcacgagctgcagaatttcaccaagaattcaggcataacctttacacgatttgccgacgatttcacttttagcgctcatcacgaactcaacaagaacgacatcgacattattttctctgctctccaccactacgggttcttagagaaccagaagaaagtggtgatttaccccccagatgatattaaaatagtcacaggattggttgtgggtaatgatgacgtgagtctgccgaaggactatattccacagctgcttattgagatagacaggctgaaaaacattctcagcgtagagaagcgctaccagacgggcatgtcgaacaaaaagctgcaactattcaaacaggaaatcgaaggcaaaatcaatttcgcaaccaccattctgggtaatcaacatgtagacatccagcatatagagcaggcatatatagatgccacagctcctgaagatgactacctgtcaatgaactggcttgagatgccttacagcctgtga

SEQ ID NO: 8768 - RNA, 1026 nt, synthetic construct
  source 1..1026: mol_type = other RNA
atgaagcgaaagaagcttaacaccatctacaagaagataacttccattaggttcatagagcaactgggatttctgactggtatctcaccccacattatggttctccagtcggttctgcctaaatacgacatgttttacgtcagaaaacgtacaggcggaaaaagactgatagagaaccctaacccaatcctgaagaatattcagcgcaagctcaacaagtatctgcaggtggtgtattatattcattgtcctcaaccatctcatgggtttgtgatcaatgtaaaacggggcaagaaaaaagggataattagcaacgccaaagtccatatcggcaatgactatatgctcaacatagatctgaaggacttcttctactacatcaagtacaacacagtgtacaaaatcttcaactctgacctgttcaatttcaatacgtatctcgtcaagatattggcggacttgtgctgtaaagacgaaaggcttcccatgggagctccaaccagtcccgtgttagccaacttagcatgcatcgatatggatctaaaactcgagagcatttgcaatagtttcgccattaagtacactagatatgctgatgatatgacattttccggcctcaatccgatccccgatcacttgattaagaagatctactctatcattgacgaatatggatttgtggtcaatgagaagaaggtcaaattgcgcgggatcaatgaccagaagaaggtgaccggcattatcgttggtgatggtctgagcctggccgaattcttttttgaggaaacccttatcgagatcagcaaactgaagacactgatggagctaaattacaggtatcgggggaacaaggacaaattagtgaacaaacacaagcagaagattgatgggtacatcaactacgcaacccaaatttatggcaaagacaatgagaaagtgcagcagctgattgatgagcttgacaaagctatgtcaatcgaagacttcatcgaaccaatgtcctgggatgattttccttatgtatga

SEQ ID NO: 8769 - RNA, 1032 nt, synthetic construct
  source 1..1032: mol_type = other RNA
atgaaaaacagtgggatcacttaccaatctaacctgttccacgccctccagagaactgccgatttggagaaactgctgcatacggacatacccgggctcatccaattgttcagggagaagccatatcagtccttttacattcctaagaagaacggagggcgccggctgattgagaatcccaagccggtgctgaaagagatgctcaaacgcctgaatctgctcctccagtgtagttacctgcagtttcgaccgaagtgcgtgtatggatttaccatcaggaaaggcagcgagaaatcccgcaacattatcagtaacgctagacgacatgtaaggaaaaagtttctgctaaacatcgatctgaaagagttcttccattcagttaaggaaaatagagtgcggcaaatttttgaaagcaaactgggcaagaaagatcctttgctagttctgcttttgtccaagctggtgaccctcaatggtcgcttacctatgggctctcccaccagccctgtcatcagcaacctagctcttctggacaccgactgggaactggaggccctctgctctaacctccagttagagtacacccgtttcgcagatgatttatcattttcatcgaatcagcgtatcacaactaaggatatccagttgcttaagcaggtgataagataccacggcttcgagattaaccgggaaaaggtcaagctttacggacccgaagatacaaagtgggtaacggggcttatagtggaagagacagtcaaactgccaccagactacctcctgctgttggagaaagagatcttccggttcaaagaatttactcttctccaccacaagtataagtctggtgcggacgaggacaagataaagcttattcagagcgagatcaggggaaagtggaatttcgccaatatggtgattcccggcgacgaaaaattgatggaattacagctgcaaatggaatatgcattcaaccctgttgaggaatatgagtccacaaattggctggacatgccatatacctttttttga

SEQ ID NO: 8770 - RNA, 1011 nt, synthetic construct
  source 1..1011: mol_type = other RNA
atgtacaccttcagcgagcaaaagagtgagctaaacacgacccaagtgacagccctcggcaagcgatttgagaacttgaggtcagtcgccgaattggccggtctgttaggcactacagaaccacttctgagtaggcagatggcaaggcccgtatactataccttctacatacccaagcccgggggacagaagcgactcatccagcatcctgccccggccctgaagatcgtacagcaaagcttgaaccgctatctgcaagctatgtactatggggttaagcctgattgcgcttatgggttcattctgtccccttctgacgaattgcgcccaagaaatatctactccaatgcactcgcccacctgaaaggtgagtggttcctcctgttcgacctgaaagacttttttcatacagtgaccctgacgcacttacgggacctgtttagaaacgtcctcttttttcccccagagttgtgtaacgcgctttgccagctctgtgcctaccagggtcgcctccctatgggagctccaacatcaccggtgttgagtaatctttgctgtctgttctttgactaccagctggagaggctagctgcgggtgcacaagcagtgtatactagatatgctgacgatcttaccttctcctttagaagcgaacctccctcaggcttcgcagatgaagtgcgcatggtcgttctgaggcatggattcgcggtgaatgagtctaaagtccgtctgcagagccggccagagcagccagagattactggcctggttttaggcaaaaatgccctgcccgtgcctggcaagaactggcttaagtcgctgaaacaggaaatcaagatctacacttggcttatgtctgaggccgtgcgagaaaggggactattccacgcttgggtttttgatcggttcagacgttccgtccaggggcagattgagtttctcgggttcatactcgggaaagatcaccgcgaatatcggaagctggcaggaaaagtgcggtggggctga

SEQ ID NO: 8771 - RNA, 1005 nt, synthetic construct
  source 1..1005: mol_type = other RNA
atgtacactttctctgagcagaagtcagcccttcataccacacagctcgctaccctgggccaacgttttgaggccttgaacgatgtgcaaggactggccaaactgttgtccgtgagcgaggcggttatagcgaagcacgtggataagcctgtatatcacagttttcacattcctaaaccaggaggcaggaaacggctgatccagcaccccaccgctgcactcaaggccatacagcaggttctaaaccactatttgcatgcggtttacttcggagtgaaacctgattctgcttacggtttcatccttagtccggtcgacgaactgcgtccccggaatatttactctaatgccctcgcccatagcaagggagaatggttcctttcgtttgacctgcaggatttttttcacacagtgacgctcacacagctgagagatttattccggcgcgtattcttttttccccccgaattgaccgccgcccttactggcctgtgtacttaccagggccgccttccaatgggtgcaccgtccagtcctgtgctctccaacttgtgttgcctgtttttcgacttccagctcgaacaactggctgcatcagccaaagctgtttatacaaggtatgccgatgacctcaccttctcctgccggcaagctccacccccagaattcggcgaccaggtgcggcaagtcgtgctgagacatggttttgtcgtcaatgagagcaaggtgaggctgcagactagactggagcagcccgagattacgggtctggtcctcgggaagaaggtgctgcctgtcccaggcaaggcctggttaaaaagactaaaacaggagatcaagatgtaccgctggttgatgtcagaggctgttcgcgagagagggctattccatgcatgggtgttcgacaggttcaggcagagcgtggcagggcaggtcgaatttgtaggctttatcctggggaaagaccacggagaatatcgaaagttagcagggatggtgcgatga

SEQ ID NO: 8772 - RNA, 1011 nt, synthetic construct
  source 1..1011: mol_type = other RNA
atgtacgcttacctccctcctaagagtgatctgaccaccctgcagctgaaagctctggcacagcggtttgaggctctcacagacgtgcccggtctggccaaacttctcgggattaccgaaaatagtctgactaaggctgccgccaagcaggattatttatccttttatgtccccaagccgggaggggagaagcggttgatccagcatccagcatctgcattaaaaatgctgcaacagacactgaatgggtacctgcaagcggtctatcacggaatccgtccagactgtgcctacggcttcatactgagccccgccgatgaactgcagcctcggaatatatacttcaacgcaatgcgacacattaagaatgaatggttcctgttggtagatctgaaggacttctttcacaccgtcacgaagacccatttgaagaacctgttccggcacctcttcttctttccgccagatttgacatctgtactcactgacctttgctcctgtcaaggccgcctacctatgggcgcgccaacttccccagtgcttagcaactttgcttgcctcggcatggaccatcagatggaaaaacttgccgagacgcacagggctgtgtatacaagatacgcggacgatctcacattctcattctctactccccctcccgccgatttcctggagagcgttcgcgccatcgtgctgtttcatggatttgtcgtaaacgacaaaaaagtgaggttgcagtccagactagagcaacctgagattaccggattagttatcgggaagggtagcaaaccagtgcccgggaaagaatggctgaagcaccttcgtcaggagatcaaaatttacaggtggctcatgtcggaagccgtgcgagagagaggcctctttcacgcctttgtctttgacagattcaagaagtcagtgcttggccaggttgaatttgtgggtttcgtgttggggaagggtcataaggagtatcgcaaactagcaggaaaagttaggtggggctga

SEQ ID NO: 8773 - RNA, 1011 nt, synthetic construct
  source 1..1011: mol_type = other RNA
atgtattacttccagcaatttaaaagcgagctctcgacagcccagctccgaactctgtcaagtagattcgaggctctggaaagcgtaaaggatttaagcgtgcttcttaagaaggagacgcccgcactgatgaaaatggccgagtccccttcttatcaggagttttatattccgaaaccaggcggggaaaagaggttcatacagcacccggcaccaaccttgaaggccgtgcagcaggagctgaatcggtatctccaggccgtttactatggtattagacccccctgcgtgcacggattcgtcgttagtccaggggatgagtcccaaccccgaaacatctatactaatgcgctggcccacacccggggtcattggttcctgaacatcgatctcaaggacttctttcacactgttactgcccagcatgtgttcgacctgtggaggcacattttttggttccctgagcacctgagcacactgctagcctgtctctgctgttatggagggcgtttgcccatgggtgccccaacctcaccagtgcttagtaacttggtattttacgaactcgacgggcagttactccaactagcgcggtcttccgacgctatttacacacggtacgctgatgacttaacattttcttttcccaggcctcctgcagacgattttacggaccgcgtgcgccatctgctccttacccatggcttcaccgtgaatgagaagaaagtccgcctacaggggagattggagcagcctgaaatcactggcctggtcgtcggccatggagctaaaccagtactgtcaaaatcctacctgaagacacttaaaaaggaagttgtgatctaccgctggctgatcagcgaagcagtgcagaagagagggttctttcagcaatggttgtttgaccagttcaggaaatctatcaccggccagatagaatttgcaggtttcgtcctgggaaaaggcgatagagtgtaccaaaggctggctggaaagatgcgttggggctga

SEQ ID NO: 8774 - RNA, 1002 nt, synthetic construct
  source 1..1002: mol_type = other RNA
atgtatgatatcgctccgccttcacttgaacttaccctagctcaaatggatgccaaggccgcccgcttcctcgctattaagcaccccggggaattagcaggtcttctgaaggctgacgccgcgctccttgccaaattcgcagccaaacctcactacgcagtgttttcaattcccaaacccggcggagctaaacgcataattcataacccacatcctgatctaaagaccatacagcagtctctgaacctctacctgcagtgtgcctattgccaattgatgccaccatgcgcgttcggttttatccctagaccgacagatgagccccggccaaggaacatttataccaatgccctcgtgcacttcggatcccagtgggtgctcaatttggatctgaaggactacttccataccgttacatcgagacacctgacatgggtcttccgggaactctttggattccccgaggccctagctaaccagcttatcgctctggcatcctaccgaggcgtgttaccgatgggagctcctacgtcccctgtactgagcaatctggccgccttgcccctcgatcaggagctgcagcctttcgcgaatttactggacgcagcttatacgcggttcgtcgacgacctcacattttcttttgacactcagcccactcccgaagtaatcgccgcaattcgacagaaggtggaaaagcaccattttatccttaacgagacaaagatacggttgactgcaaaaaaagacaatcctgaggtcaccggcttgatcctcaagagtccacacccagacgtcagtggcagcttcctgaagaagctgaaaaaggacatccgcctgtacagaaggctgaccactccagggatgatgcaaagggggatctttcatgcctctgtgctggataagctgcgtaggagcattgcgggccaggttcaatttgtcaaatttattcgcgggagagtggagaagggtctgaaacgttgggagaaagtggttggctga

SEQ ID NO: 8775 - RNA, 1002 nt, synthetic construct
  source 1..1002: mol_type = other RNA
atgtacacaatttatcctccctcattagatcttacattggcacagtccgacgcaaaagccgcccggtttctcgccattaaacaccctggcgagctggcttccttgctgaaggccgatgcggccaagctcgccaagttcgttgctaagccatactaccaggtgtttagcattcccaaaccaggcggagcacggcggatcatccataacccccatagtgacctgaagacaattcagcaaaccctgaacatgtatttgcagtgtgcctattaccagcttaagcccccttgcgcctatggattcatccctaggccaaccgacgagcccaaaccaagaaacatttttacaaacgcaatgacccacctgggcagcgaatgggtacttaatctcgacctgaaagattacttccacacagtcacgtccagacatttgacgtgggtgttccgtgagctgttcgggttcccagaagcgctggctaatcagcttttggctctggtgagttatcgtggcgttttacccatgggggctcccacttcgcctgtgctatctaatctggcagctcttcccctcgacgctgacctgcagtcatttgccaatctgctggatgctctgtacacccgctttgttgatgacatgactttcagccttgaacagcagccaactccggaggtgatcgcggccctgaggcaaaccgtcgagaaacaccaattcactctgaatgagactaagatcagactgacagcaaagaaagatcacccggaagtaaccggtttattgctcaaggagccacatcctgacgtgtctgagcactttctaaaacggctaaagaaagacatccgactctaccaaaagctgaccgaacgcagcatgatggagaggggaatatttcatgcaaacgtcctcgataagctccgacgctctatcgccgggcaggtccagtttgtcaaattcatacgcggcagggtggaaagagaactcaaggtgtgggagtgggcccctggttga

SEQ ID NO: 8776 - RNA, 999 nt, synthetic construct
  source 1..999: mol_type = other RNA
atgtatggggtgattccacaggcccttgaactgacgctggcacaattggacatcaaggcaaataagttccgcgcactgaggcaccctggtgacttagcagggctgctcaaagctgacgccgcccagctggctaagttcgccgctaaaccacactaccaggtcttccatatccccaaacctggcggcgaccgtaggacaatccataatcctcaagctgagttgaagacaattcaacaaaacctcaacgtttttcttcaggccgcgtattacgggatcaaaccgccctgtgcttacggcttcatacctcggccaaccgacgagccacgcccaagaaacatctatacgaatgccttggtccatgaaggaagcgaatgggtgctgaaccttgatatgaaggactatttccatactgtgacctctagacacctcaattggatctttaaggagctctttgaattgcctgaggcactgtcacttcatttaattggtctatgcacatacaagggcgtgctgcccatgggagctcctaccagccctgtattgtcaaatctggccgcactgccactggatgcggaactgcagggaatagctgcacagtataacgccctctacactcgctatgtggacgatctaacctttagtttcgatgccgaacccgacatcctctttaccggcgtggttagggaggctgtcgaacgacacggattcatgctgaacgagtccaaaataaaactcactagaaaacgggaccaccccgagatcacagggctcattctgaagccccccaagccggatgtatccaaaactttcctgaaacacctgaagaaggacatcaagctgtaccgggagctgatttctgccgatatgatgcaccgaggtatttttcacgccagtgttcttgagaagttgaaaaaaagcattgatgggcagctacagtttttagcattcataagaggcaagcaggataaggcttacctcaggtgggccgcgcttgcctga

SEQ ID NO: 8777 - RNA, 1029 nt, synthetic construct
  source 1..1029: mol_type = other RNA
atgcagtacttcaggcagagcttcaaaaagctgacttcacagcaagttctggccaaggggcaactacttgtcaaagcccgaaccgtgaaagccatcgctgccctgaccatgacagaggagacttggatgagagaacaggctgtgaacccgcaatactatgccttccaggcccctaaagccaatggtactttcaggcttattgagaatccccatcccaagctcaaggagtttcagagggcactggcagacatgctgcagggcgtatactacggaatccgcccaagggcgtcatacgcttttgtaccatctaccgccgatgaaacttctccctgcaacatatatacaaatgccctgaggcattgtaagagcaagtggatattgcagctggacttgaaggattttttccactccatttcggcccatcgtatcaaagagctgtttatgcggattccctttgaatacccagaggatacagctcaggtggttgctcgcttggtgacatccaagaacagactgcctatgggggcaccaaccagtccggtgctctcaaaccttatctgctttgaacttgaccacttacttgacaaactctctagagatcacgggtggacatatacccgatatgcagacgacatgacgtttagtggcgcaaagcggttcagtaacgagagcgtggagatcatcagacagcagatcgagggaaatgacttcgtgctcaattatgaaaagactcagcagcaccgcattgaggacgagcctgaagtctgtggattagcgttaaaagaggacggaaaacccgatctctccaatatgttcgtcaaggatctgaaggctgatataaagacctataaacaactcacgtccgacaagatgatcgctcaggaaattttcagcgctgaggcactgaaccggttccggcaacacattgaaggtgaactggcgtttgttcgctttattaaaggccctaataacgggttgtacctgaaactacgtttcatgctggccgatggcatgctcggcgtcgaatga

SEQ ID NO: 8778 - RNA, 1029 nt, synthetic construct
  source 1..1029: mol_type = other RNA
atgcagtattttcggcagccgtttaagcagctgactgcacagcaggtgctaaccaaaggacagttcctgcttaaagctcaaactgtgaaagctatcggttctcttctactttgcgaggaagcctggatgagagaacaagccgcaaatccccagtactatgccttccaggcccccaaggctaacggcgctttcaggctgattgaaaatcctcatcctaaactgaaggattgtcaacggctgctcgctgatctcttacagggcgtgtattacggaattaaaccgcgagctagctatgcctttatcccttcaacagcggatgagactagtccctctaacatatacacaaacgccctccgtcattgtcaaagcaagtgggttttgcagctggacttgaaagatttttttcacagcatctccgcccagcgaattaaggaaatgttcctggcgatcccattcaattatcccgaagacacagcccttgtaatggcacgcctcgttacctccaaaaatcgcttacccatgggagctccaagttctcctgtcctgtcaaacttagtctgcatagacatggaccaccaactggataagcttgcgagagatcagggatggacatatacccggtacgcagacgatatcacgttctcgggtgagcgccggtttaccaacgagactgtggagttgattagacagcagatagagggcaatgacttcgtgctcaactacgaaaagacagccctcaacaggaccgaagacgagccagagatctgcggcttggccgtaaaaccaggcggcaaacctgatctgagcgagcgtttcgttaaggacctgaaaacggacatcaagatttacaaggtgctcacctccgataagatgatcgcacaggaggtcttttccgcagaagctattaatcgcttcaggcaacatattgagggggaattgtcatttgtgaggttcatcaaggggccacaccacgggctgtacctgaagctgagatttatgctggccgacggtatgatgggggtcgagtga

SEQ ID NO: 8779 - RNA, 1029 nt, synthetic construct
  source 1..1029: mol_type = other RNA
atgctgtactttcgacagccctcaaaaaagctgacgacacaggagctgctcaccaaaggacagttccttctgaaggctcgaacactgaaggctatcggcgctttgctgatgtgcgacgattcatggatcagagagcaggctgcatctccgcagtattacagcttccaagcgccaaagagttctggggcttttaggctaatcgaaaacccccatccaaaactgaaagaatgtcagcggctgttggccgacctcttacagggagtgtactatggcattcgccctcgtagcgcctatgcgttcgttcctaccactgcggacgagagctcaccatgcaacatctacacaaacgccttgcgtcactgtcggtccaagtgggtccttcaactggatctgaaagatttctttcacagcataagcgcacacaggattaaaacaatgttttgcgcacttccctttaattaccctgaggacatcgcccaagtgctggccaaactcctcacctcaaagaacaggttaccgatcggggcacccactagccccgtagtgtctaatctggtttgtattgaactcgaccaccagctggataagttggccagagactacggttggacctacacacgctatgccgacgatattactttcagtggggagaaacggtttaagaatgagactgtcgaacatgtgagacaacacatagagtccaacggtttcgtcctgaattttgaaaagaccgctatttcgaggacccaggatgaacccgagatctgcggactagctatacgccctgaggggaaacctgacttgtcctctcggtttattaaggatctgaagatggacatccgcatttataagacgctgtccagtgacaaaatgatcgcacaggatctattcccagccgaagccatcaacagattccggcagcatatagagggcgagttatccttcgtgagattcattaagggccctaatcatggactctatctcaagcttaggtacatgctcgcagatggccttccaagtgccgaatga

SEQ ID NO: 8780 - RNA, 1038 nt, synthetic construct
  source 1..1038: mol_type = other RNA
atgagcacgccggagtatcatcagttaactccagccaccgtcaagttgagcacgcaccaggttgcagcccgagcacggacattcctgagtcagcctcatctgggccagatggctcacctgctagggctggataagaatcagctcgtgcttctctcgaagtctcctcggtatgactgcttttttatccctaagccaaaggggggaaaacggttgatcgaggcgcccagagagcccctgaagggtacccagcaaagattggccaagtggctccaatgcgtgtactttgtccatagatccgaggcagcttttggctttatgatggtccctgtggacgacgaggatccccgccacatctacacccacgcacaacgtcacagggaagccacatggcttcttaacatcgacttgaaagatttcttccaccaaatcccggctgatcgagtgctgaggcttttccaacaggcgcccttcggcctaactcccaaagctgcagcttgtctgactggcctttgtacattccagggccggctgcctatgggagctccaagcagtccagtactatccaactttgcctgccgtgacctggatgcagaactggaagcgctcgctcgcagagaaggctgggtatataccaggtacgcagacgacttaacattctcaggaccaaaaccgtttactcaggcccattgggagtctatttcaggtttgataggggccgccgggttcaaaatgaataccaagaagatgagactgcgccacagaaaggacaagcccgaagtgaccgggctcattctgaaaaagaatccagatgtgtctcccgatttcctggccggaatcgaggccgatctcctggtgctcgaggctctcgtttcagaacggatgctgcttagggatattttcagtcggcagcctgttaaacgcctccgtaggagcattcagggacagataaactttctgaaagccatccgaggtaaagaccataaatcctgtcgcaaattacagaacaggttggaccagtccgtcattaagctgaagtga

SEQ ID NO: 8781 - RNA, 1023 nt, synthetic construct
  source 1..1023: mol_type = other RNA
atgtatctgaaaatcagcacacagaccggggacaagccatcggcatacgaacttcaggaaaaaggtaggcagtttatagccgctgacacttttcccgcccttgcagagctcctgaatattaaagaggaaactcttcgggccaagatgtataaccggaaatacacccaattcttcgtgccgaaacccaacggcgagaagcggcttattgagaatccagaggattggttaaagtctcttcaaggacagctgaataagcattttcaggccgcatactatatggtccgaccaccttgcgcatatggggctttactagccgtggcagacgaggtgaaaccaagaaatatttataccaacgcgctcaggcacatcggtcaaaagtggttgttgaacgtggacattcgcaggttttttcccagcatatcctacgagaaggtttacatgacactccgcagaccccccttctcttttaaccccaacgccgctaaatgtctgagtatgctcacgacattcgaacagagactgcctaccggcgctcccacttcccctatactctcaaatatcatatgcctgccgctcgactcaatgctcctgcagctgtctaaaaaacatggttgggcttatacccgctttattgacgatctgtcctttagcggagagaataagttcaagaaaaagcatctgagggccatccagggcatcctgctgagccaagggttccttatcaacgagaagaagctgaagattaaccgagtcagagataagccagaagtaacgggcctgattctgaagaagaaaaaacctgacatttcccctagtttcctaaagcgtctcaaaaagtacatccacctgtaccacattatgacagaacaggatatgttgaatcgtcagctattccctgccgaattgatccagcgctaccggaattttatcaacggccaattagcgttcatcaagttcatcaggggagagggggataaagattacttgagactgttcaaacggtttcagccacgaggatattga

SEQ ID NO: 8782 - RNA, 1035 nt, synthetic construct
  source 1..1035: mol_type = other RNA
atgaaaagaggaaagactcgggggtaccagaagaacgccgctaattttttggggattcgaacacatatggaattagccaatctgctggggatcagtctgtctcagcttgaagtgctaattaacaagcccacctacaaagagtacactatccggaagaaaagacatggtgtacgaatcatatacgacccttcccctatgttgaaggccgtgctgaaacagttgagcttcttcctgaatgctgtctacagcaccctgcagaatgactgcgtctatggattcatcccacacctcgataagaccggcccccagaagaatatccgggagaacgccatcaagcacgtaggcaaaaatcatctgttcagcctcgaccttaaagattttttccacagcatttccacaaagcgggtgttccaaatttttcaggaagaaccctttaacttctataagtcaatagccgtccctctagcactgcttaccacctatcgcaagagcctgccaatgggtgctaatacatctccaattttgtcaaactttgcctgtttagagctcgatgcggagcttagtaggctggcgagtcgctctgacctcgagtacactcgttatgcagacgacctgacattctcttccgacttgcccttcaccgatcagctcaaatccgatatcagagagatcatacaaaaacacggattccaaattaacgagaaaaaagtgcgggaacgcagcaagaacagaaggcaagtggtgacgggaattaaggtcaacaccaagccgaaccttgaccgtaaatatattaggaatctgagggcattactgtttgattggcgcattaatggtatctataaggctgttatccatcactacaacctagacggaatcccaacgtttcagcagataactcactttctctcatcaacacgaggcagaatctcctttgttggctttgttaggggcaaagaagatcctatataccagaagctccaggtggagttcgagcgcctgactacattccatgggcacaaggaactgtcgggctga

SEQ ID NO: 8783 - RNA, 1089 nt, synthetic construct
  source 1..1089: mol_type = other RNA
atgaaagatatacagcagacagccattgagtttaactctgaaatatccaatggagcctttgagacaacactagtaaataagaagcagtttaccagaacccaaaagaaggccttagagcttctcagaatcgagtctgatcaggaccttatcctgttcagcggcgtttcagcaaatgctctgctccgaaacattaacgcccctgtctattccgagaaaaacatccggaagaaaaatggcggatttcgctctctggacattcccgagaagtctcttaaactgctgcaggaaaagctgaatgatcatctgcaaagtgtgtacacatacctgaggccccagacaacgcacggatttgtgagatatcctaatcggaagtcctgtaacattttgaaaaacgccagcgtgcacaccagcaaaaactatgtcctgaatatggatctgaaggattttttccacagtgtaaatgctctgcgcgtgaaacatgtgttccagaacagcccattcaagtttaatgaacacctctccaactgtctggctttgcttacaacctacaaagggaggttgccccaaggtgcgcctagctctccagtgctctcgaatttcgccgcactgagcctagactacaaaatatgcaaactgtgcaagacttatgcgatcgactacagccgatacgctgatgacctcaccttcagttcccagtcatttatgccggaagcgttcaagaatgagttaaataacctcatcgaaaaggaggggttccacgtcaatgccgataaaaccagattacggagtaaaaaccgcaagcagctggtgaccggcgttgtggtcaaccacaaagctaacgttgatcggacctatgtgcgtaagctacgcgctatgatcttcgactcggaaatcaacggcctcccctccgcagcagcaaagcatttgaacttgactactaagcctactacggaccatatttcattttttgttcggaggcttaacgggatgctggccttcatgtcacaaattaggggtaaggacgacgccttgactctcaagatgaaaaaccgtttccttaatgtcctgtctatcccactcaatcagtga

SEQ ID NO: 8784 - RNA, 1137 nt, synthetic construct
  source 1..1137: mol_type = other RNA
atgataactattgaagagattctcaccctatctaagacaaataagtcagagcttcagaaatacttcagtggtggctcctaccacttggacaaaagcatggaatcttttcagaagcatgagctcaacgccctctatttcttgagcattgaggaacccaaggagctcacccggttttttaaaacctccttttttcagcttgaggagatcttgaataatcctctgtacaagaactacaccattaagaaaaagagaggcggggccagacaaatctgtgagcctgaaaagcatctgaaaagtattcaaaaacggctcaactatttcttgcaggcatattatctttggatcaagcctaatgaagtgcacgggtttgttgtaaatccccattatctcggaatccactgtaacattgttgaaaatgccaaggtgcacgtgaacaaaaaggatgtgcttaacattgacctgaaagactttttcccgtcgattagcgcccagcaggtgaagaacatcttttccagcaattacttcaacttcaacgagcagatttcaactgcactgactctgttaactacatacgagggaaagctaccaattggtgctcccacatccccagttatcagcaatttcatttgccaccaactcgataatgatctgataaccttttgcaagcagaacaatctgacatttactcgctacgcggatgacttaaccttcagctctgacaacaccatctctgacgataacaccctgaatatattcgacctgatcaagaagaaccagttcgaaataaacgagaaaaaagtcaggttgaagcgatctcacaggaaacagacggtcacaggcctgacagtgaactcaaaagtgaatgtcgaccgcaagctgctgaagaaaatacgcgctatgctgcatgatctggtaaagaacggaatagaaacgagtgtcaaaaagcatttcaatatcggcaatatcgaacaacgtcacaaggtgatcttcatcaatcggcttaaaggctatatcaactttgtcggacaagtgagggggaagaacgactcattatacctgaaacagaagtccactttcaacaatatcctcatcagctccaaggggaaaagtctagagattgatatgaaacaggcttga

SEQ ID NO: 8785 - RNA, 1305 nt, synthetic construct
  source 1..1305: mol_type = other RNA
atgagtaatatttacaacatcgcagtggtgttcctccagcctaaatctagttgcaagcaagaaaatatcgcgatctactgtgatgcgcattgtgtgccactgttaatcaactctaaaaagaccaaggataacctgcagcgtctctttctgaacaaaaatcgcatgactgtaccagagattcagcagctggtgcagaggcacaagaaggaatttaaaaagtacttctcggacgacttttatctgacgaatctggcccttcaggatttcaaaaagcatgaattaaacgctctgtgtctgctgagcattgaggaacccttcgaattggccaaattcctgaccactccgatctatcacctggaagagctgcttaataatcccccatacaaacatttcacaatacagaagaagagaggcggaaccaggcaaatcttcgcccctgaaaacagcctcaagggaatacaaaagcggttgaattatttcttgcaggcatattacctctggctgaagccacatcacgtgcacggatttgtcattaatccgcactaccttggcacatcatgcaatatcgtggagaatgctaaggttcatgtctctaagaatttcgttctgaacattgacttgaaagacttttttcactccattaccgctaatcaagtcaaggatatcttttcaagccacttcttcaacttttctgaacccatcgccatcgcactcaccttgctcaccacgtataaggggaaactgcctataggcgcccctacatcccccgtgctatcaaactttatatgccatgagttagatgatgacttactccgctttagtgctgagaatgatcttacattcacacgatacgccgacgacctcacttttagctccaacttcaaaatttcccatgatatcactctggacatcatcaacctcattaagaagaacttcttcgagatcaatagcaaaaaaatccacctcaaaacccaaaaccgaaaacagattgtcactggtctgaccgtgaatcagaaggtcaacgttgacaaaaagctactgaaaaagataagagcaatgctacatgatgtttccattaatggcattgagaaagccgcccagagacactttaaactgaacaagatcgacaaacggtacagctcacagtttatgaaccggctagagggctatatcaactttgtggggcaggtgagggggaaaggtgatacattggtactgaagtttaaggaagagttcaagcttatattcgagattgagattcacaaggaaagtaacaaaaagcttgacgagaacaatatcaagtga

SEQ ID NO: 8786 - RNA, 1131 nt, synthetic construct
  source 1..1131: mol_type = other RNA
atgccgaccatcgaggagatcgtgaccttttcgaaagcccataagtctaatatccagaagtacttcaacggagggcatccctactccaccctgccaaaacttgtgcagaaaattaagaagcacgaacgaaacgcactgttcctgctgtctacagaaacccccaccgaactgtgcactttcttgaaaactcccttcttccagctggaggagatcataaacaatccaatctacaagcagtatgagattaagaagaagcggggcgggaatcggcagatctacagtcctgagaaaaagctgaaagcaattcagaggcgactgaattatttcttacaggcctactacctctggattagaccgaatgaagtgtttggattcgtggtgaaccctcactatcaagggaccttctgtaatatagttgaaaacgcaaaacctcacactggcaagaagcatatcctgaatatggacctgaaggacttttttcccagcataagcgccagtagaattaaaagtgtgtttgcatcctcctattttaacttctcagagcaaattgccactgcgttagctctcctgaccacgtatgagggaaagctgccaatcggcgctccaacatcccctgtaatcagcaacttcgtttgtttccagctcgacgctgatctaaagaatttttgcgagactaccggactgcagttcacgaggtatgccgatgatctcacctttagcagcaatctgctcatttctaatgagacagtcctcgacattatcaacttgattaagaagaacggtttcgaaattaacgaaaagaagcttcgcttgaaatcttccaataggaaacaaacagttacagggcttaccgtcaatgagcgcgtcaacatcgaccgtaaacttttgaagaaagtccgggccatgctacacgatttaactacaaacggtatagacgtggcggctaagaggcactttaactggtcaggcgagacggatgcaaaacagcgctcaaaatttatccatcggctcgaaggctacatccactttgtgggccaagtcagaggtaagaacgacgctgtatacactaaacttaagcagcccttggataaattttcagccacacagcaaagagccgaacagatgtggtga

SEQ ID NO: 8787 - RNA, 1119 nt, synthetic construct
  source 1..1119: mol_type = other RNA
atgccaatcgtgaaggaaattcttaccttcagtaaggaccataagtcaaagatccaaaagtatttcaacggcggctacctttattccaaaacaccgaagctactgcaagagaagaagaaacacgaactcaatgcactgttcttgcacacaatcgaaaccccagctgagctatgcaagttcctgaacacatctttctttgagctggaggaactcattaacaatcccgtttacaagaattacaccatccggaaaaaaaaggggggcgagaggcagatttacagccccgaaaaaaaactcaaggctattcaacgccggcttaactacttcttgcaggcctattatctgtgtattaaacctaacgaggtctttggatttgtcgtgaacccccactacttaggtaattattgcaatattgccgagaacgccaagccacatactgggaaaaagcaccttctcaatattgacctgaaggacttttttcctagcatctccgcaagccgaatcaaatccgttttcacctcaagttactttaatttcagtgagcagatcgctactgctctgacattgctgactacctatgagggcaaactcccaattggaacccctactagccctgtgatctctaattttgtctgtttccagctggatgccgacctcaaaaatttttgtaaaactaacggactgcagttcacaaggtacgccgacgatctgacctttagctccgatacccttatctccatagatatcgttctggatatcataaacctgatcaagaagaactcttttgaaatcaacgagaaaaagttgcgtctgaaatcatcgaatagaaaacagactgtcacgggcctcacggtgaatgagaaagtgaacgtagatcgaaagctgctcaaaaagattcgggcgatgctgcatgatttgacgacaaacggtatagacattgccaccaagagacactttaacttaaacggtgaaattgacaccaaacatagggggaagtttatcaatcgcctagaagggtatataaacttcgtgggacaggtgagaggcaagaatgacaccgtgtacataaagttaaaacagcccttcgacaaggtattctctaatactgcaacatgctga

SEQ ID NO: 8788 - RNA, 1101 nt, synthetic construct
  source 1..1101: mol_type = other RNA
atgacaaataccagtaccatcattgaatttgcacgacgaaataagggcgtgctgcagaaccaccttgctgacggttccttaaggctccccgtggccttagagatcctggagaaacaccaattgaacgcattgtatctcttgtcgatagaaacccccatagatttgtgttccttttttaagtccggtttactgcagctggagtctataatcaacaatccgcagtacacccattatacaattaagaagaagcgcggaggaaacagacacatttatgcccccaacaaaaagttgaaagccattcaaaaacggctaaactacttccttcaggcgtactatctgatgattaagccagaggaagtccatggcttcgtcgtaaacccacattatctcgggagccactgcaatatcgtagagaatgcgaaagcccatacggggaaaaagcaccttctcaatatcgatctgaaggacttcttccctaggatcactgccaaacaagtcctcgatctcttcagcagccctgtttttggatatagcgaccaggttgcaaccgctatcaccctgctttgtacgtacgaagggcgtcttcccgctggagccccttctagtcctgtgatttctaacttcatttgcctgaatctggacgcagatctgaaagccttttgcgctacccacaatctggaatacactagatatgctgatgatctgacatttagctcaaacgccgcgattgagactaacacactactagacatcatcagtctgatccagaagaacaatttcgagatcaattccaacaaactccgcataagaccagccaaccggcgccaaattgtgactggactgaccgtcaatgaaaaagtgaatgtgaaccggaagatgctcaaaaagatccgggctatgctgcacgacctttcaactaacggcgtggagactgccacaagaaagcatttcaaaatatcaggcaaggcaaagccattccaggagggcaagtttctgcagaggctcgagggttacatcaatttcatcgggcaggttagggggaagacagacgcactgtacattggctacaaagaacagtttgaacaggcttttgagaattga

SEQ ID NO: 8789 - RNA, 1071 nt, synthetic construct
  source 1..1071: mol_type = other RNA
atgatccagaaatatcatttcgagggcttatacctgaataatatcgtgctgcaacagtttacccgacatgagctgaacgcactgttcattctgactgttaaaaagcctctagagctggtaaaaatcttcaacgtgagtttttgtatgctcgaggagcagataaaccacccagcttaccgctattttacgcttcccaaaaagaatggaggttctagggacatctacgccccctccgtgaaactcaagtcgatccagcaatgtctgaactactatttccaggcctactatttgttcattaagccagaggaggtgcacgggttcgtcataaatccccattatcttgggaaacgctgcaacatcgccgaaaatgcgaaagctcacgttaagaagaaatatgtgcttaacattgacctgcaggacttttttcctaatatcaaggctaagcgagttaaggaaacatttctgagtcccgtgttcaattttaatgaacagatcgcaactgccttgacattgctaacaacatacaagggcctgcttcctgccggtgcacctactagcccggtgatctcaaacttcatttgcctgaaactcgacaaagagctcaagtatttctccgaactcaacgatctgacttacacccggtacgccgatgacctgaccttttcaagcaaccatgagatcccaggcgacatgattctcgacattatctgtattatacaccggaacgatttccggatcaacgaaaagaaattaaggctcaaaccatccaacagaaagcagacagtcaccgggataacagtcaatcaaaaggtaaatgtggacagaaaactgctcaagaagactagggcgatgattcacgatctaggcacccatgggctgtatgccgcaacctctagacactttaaagtggctgaagataagaacagctctcttaatgccaagttcattagaaggctgcaaggatacattaattttatcggacaggtccgcggccgtgatgacgctgtctacttgaaattgaagaccacgtacctgagcttattctcctttcagaccgaagatttctgctga

SEQ ID NO: 8790 - RNA, 1116 nt, synthetic construct
  source 1..1116: mol_type = other RNA
atgaactcacaggaagaaatcctctcgattctaattcccgcaaaggataagatctggaattctttttatgggatacccatccggaagaaatctaagcaacttgagcagttaaagaagcatgaactgaatgcgctgctgctcctgaccattaataaaccgagtcgcttggcacagttcctaagcactcccttctttgaacttgagggcatcatcaataaccctaattacaggcactataccatcccaaagaaaaaaggcggcatgagagagatctacgcgccagcaaactctctcaaaaaaattcaacgaaggctgaactatttcttgcaggcctactacttgtgcattaagccaaaggaggtgcacggattcgtggtaaatcccgcttatttgggaaagaaatgcaatattgtcgccaatgctaggctccacataggcaaaagccatgtcctgaatatcgacgtgaaggattttttcccttctatatcagccaaacaggtcaagggtatcttttctagccacctgtttaacttcaatgaccagatctccaacgccctgacacttctcactacatttgaaggaagattaccagctggcgcccctacttcccctgtcatttccaatttcgtgtgtaccaagttggatagtgatctgattgaattctgttccttaaacagtctttcatactcccggtatgctgatgatctgaccttctcaagcaataacgttatcgataacgacattatccttgacctcataaatatcatcaacgccaacaacttcaagattaacgacaagaaactgcgcctcaaggctagcaataggaaacagacagtgaccgggctgaccgtgaacgagaaggtaaatgttgatcgcaaactgttgaagaaaattcgtgcaatgctgcatgacctcacaacgaacggtatcgataaagccgccaaacaccattttaacattaacaaggacatcgacgagaagctgagaggcaaatttatataccgactagaggggtacattaattttgttggtcaagtgcggggaaaaaaggaccttctgtatgtcgggctgaagtccaagtttgacaacgagttcaaagtgataccgctcagctga

SEQ ID NO: 8791 - RNA, 1107 nt, synthetic construct
  source 1..1107: mol_type = other RNA
atgaactcccctgaggagctgatctacctagccaggaataagaaatggttagtttggaaggacaacttccttgaactcgccgggaaagacttggcactgcacaagttcaagaaatatgaactggttgctctgcgcctcctgagcatcgaaaccgctagcaacctggtaaaactcgctagcgtgtcactggatacgcttcagaacaaccttaatcatcccgagtacaagcattatcagacaaagaaaaagaagggcggctctcgcctaataaatgccccgacaggcgaactcaagaagatccagaagcggctgaacaattatctgcaggcgtactacctctgtctcaaacctaaagaggtgcacggatttgtcttactggctccattgattcagcaacgctccaatatcgtggccaacgcagaggtgcatgtgggtaaaaagtttgtgctgaatctggacttgaaagattttttcccctctatcaccgccaaaagagtcaaagctttctttatgagccccttgttcaactataacgaacaaattgcaaacgcgctaactcttctttgcaccttccagggaaaacttccaattggggcccctacttccccagtcatatccaactttatttgtttgaagctcgatgctgatctacagaatttttgcgcagccaacgaactcaattatagtaggtacgccgatgacctgagtttcagctcgaattcatctatatccaatgacacaattctcgacctgatcaatctgattaccaagaacgacttcacggtgaactacaagaaactgagactgaagtcaagtaataaacggcagacagtgaccggcattactgtcaatgagaaggttaacgttaaccgagtgttacttaagaagattagggcaatgctgcacgatctgacatctaatgggttggaggtcgccactcacaaacacttcaaatttaacgggttcgtagaccagaagtataaggaacgatttttattccggttgaagggatacatcaattttatcggtcaagtgagaggcaaagaggattttatcttcctgaagtttcgtaatgagctgaaaatgatcctcatagagatcacctga

SEQ ID NO: 8792 - RNA, 1161 nt, synthetic construct
  source 1..1161: mol_type = other RNA
atgaaaaaccttcctgatatctccattgcactcaaaaatgtccgggagaacttcaatagctactttaactggaatagcctgccacagaataagtcagaaaagtataagctgcatgagattaacgctctcattttactatccattaagattccaacccatctgtgtttagccctatcaaattcaatcagcggcatcgaagtgctgataaataatcccgtgtatacggaattgaaagtcaagaaaaagagcggagaattcagacagatatacgcacccaattatgaattgaagagagtgcagaaacgactgaactattttctgcaagggtactacctgtgcatcaagccaaacgaagtcaatggcttcgtcatcaacccgtttccctttgacgcaaaatgcaacatcgctgagaatgcaaagtaccacgttaataagaaacacgttctgaacatcgacatcaaaaacttctttccttctatatcagcgtatagggtgaagaagatcttcactagtgagttgtttaatttcaacgaacaggtcgcgactgccctgacactcctttgtacctacaagggagtgttgcccatcggtgctcctacctcgccagtaatttccaacttcatatgcttccagctggacagagatctgaagaacttctgcaacgagaaaaacataagttatagccgatatgctgatgacctgacattttcctctaacgagaaaatcacagatgagattatctccgagatcaccctgctgattaacaaatacggattcgagctcaacaaaaataagtttagacttcgcctctctaataggaaacaagttgtgactgggttggtggtgaacgaaaaggttaacattgatcggaagcttctcaagaagattcgggccatgttacatgacatgtctcgtaatgggatcgaagtagccgccaaaaggcactttaaaagtgagaatccgcctattaagacaaatagcctcaccaacaaaaacaccgctattttcgagtccgagcagagtgacaatgagatcaatatcgcctttgcctgtcgcttcaaaaagatcgtgataggctacatcaattttgtgggtcagattaggggcactgatgaccgcctttacaactctttcaaggcagcctacaagaatagctggtga

SEQ ID NO: 8793 - RNA, 1179 nt, synthetic construct
  source 1..1179: mol_type = other RNA
atgatgacggttgaagagattttaaagttgtccaagacctctaagtccaagcttcagaaatacttttcagggggttcttaccacctgggaaaaagtatggaaaatttcaagaagcacgagctcaacgcattgtattttctgagcatcgataaacctgcagagctgacacgttttctcaaaacttcgtttttccagttggaggagatactgaacaatcccacatacaagaattacaccatcaaaaagaagcgcgggggcactcgacagatttttgctccagaaaaacacctgaaatcgattcaaaagaggctgaactatttcttacaagcgtactatctgtggatcaaacctaacgaggttcatggtttcgtcgtgaacccacactatcttgggactcattgcaatatcgttgaaaatgccaaagtgcatgtgaacaagaagtttgtactcaacatagacttgaaggacttcttcccatccataagtgcccggcaagtgaaagaaattttcagctccacctgtttcaatttcaatgagcagatttctactgcgctcgcccttctgactacctacgagggcaaactcccgatcggcgccccttcttctcccgtgattagcaacttcgtctgccttgagttagatctagccctgaaggaattttgtcagaagatcaacagcgaatatttctacaacgataacaacaaactgctacataagaagaaacagttcgtgtttttcgagacatacgatatcgcctatagcaggtatgctgacgacattacattctccagcaacattcccatttcaaccgagatgctctcaaacatcatcagtatcatacaccagtacggatttgaacttaacgagaaaaaactgcggttcaaactgtcaaatagaaaacagacagtcactggactcaccgttaatgagaaggtgaacatcgatagaaagctgctaaaaaagatccgggcaatgctccatgacctgacgacgaatggaatcgaacaaagcgtccagaggcactttaaagtgaccaatatagagcagagacacaaggctacctttatcaatcgcttggaaggctacattaattttgtgggccaggtccgcgggaagagtgactccctgtatgtgaagcaaaagacagctttcgataatgtatttgaacagcgaaagtga

SEQ ID NO: 8794 - RNA, 1002 nt, synthetic construct
  source 1..1002: mol_type = other RNA
atgaagcatgagaaaatcatcaatttcgtagagtccaacctcgaaattattcggtccaatatcaattcgagagaaatcattttcggcatcctgcagggtccccagcacaaatttcaacggaatgccgccgtgttcctttccatcacccatgcctatgacctctgcaattttctgcagctgtcatatagcgtcctgcagaatcaaatcaacaatcctgtgtacaagcagttcgagataaaaaaaaagtccggcgggatgcgttccattgaagagccaaacgacatcttaaagggaattcagaaacgccttaactactacctgcaggcctactacttatggatcaaacccgcagaggtacatggcttcattatccgcccacagcagtatgagcacaggtataacatagttgaaaatgcccgggcacatatcggtaagaaacacgtgctgaacttggacatcaaggactttttttctagcataagtgttgcacagatctttgagcttttccagagtgattacttcagattcaacgagaacatgtgtgtggcgttaacactcctcgttacccaccaaaagcacctccccacaggggctccaacttctcctgtgctatcaaattttatctgcttgggactggatagggatttgagagagtttgcggaagccaatcaattgacatatactcgctacgctgacgatctgacgttctcaagtgacgtgcatattcctgaagacgttgtgctcgacgtgatgaatatcctgaaaaaacacgcttttgacattaacccgaagaagatacgaatgtctagtagctttagaaaacaggtggtgactggaattaccgtcaacgataaggtgaacgtcgacaggaagctgctgaagaaggtacgagcaatgctacacgatttcgccgaaaacgggcttaaggaagctaccagcaaacacttcaagattagcgtcgatgaggatagcatttattgtagggtcctgtctatagattga

SEQ ID NO: 8795 - RNA, 1089 nt, synthetic construct
  source 1..1089: mol_type = other RNA
atgttgactccatttcgcttcgctagccttgtgtttaaaattcgctacgctcctcccaacttcgtgaagaaaatgattcggatagttaataagcgataccatttcctcaaaatcaagaatgccagtgacctgagcaaactcctgttcgtgtctttcgaaaacttacaaatcgagattaaccagccgacttacaagacgtttgaaatctccaaaaaatccggcgggaagaggatcatacaccagccccttgacaatactcttagaatacagaatgaactgctatcaatcttccagaactactatacgaagataaaacctaaccacgttcatggttttgtgtcatatagcaagaaagacggaaagaagagcaacattttagagaatgctaagccccacgtcggaaaaaagcatctccttaacattgatctgaagaactttttcccatcaattacagccaagaaggtgaagcagctgttcgagtcggattttttcaagttcaataccaacattgccacaagtctggctttgttgaccacttttgaaggaaagctgaccatcggcagccctacttcccctgtaatatctaatttcatctgctatcccatggacattattctggccgagttctgtaaaaagaacaacctgacatttacccgatacgcagatgacctctccttttcttcatatgattacatcaagaacgacactctgttggacatcatcaatatcatcaccgagaatggctttgacgtcaactataaaaaactccggtttgccaattccaatgccaagcagacagtaaccggcatcacagtcaatcaaaaaccaaatgttgataggacctttctaaagaagattagagcgattctctacgatataaatcaaaacggtcttgaaatggcagcattcaagcactactctatcagtaaaaaaggggaaaatacactgagcttcttaaacgtcctggagggctacattctgtttgtgcggcagatccgtggggtgaatgatacctattatcagtgcttcaacaacaagctcaaagagattaggttgaagaacctggagatcgagaacaaaaaaatctga

SEQ ID NO: 8796 - RNA, 1095 nt, synthetic construct
  source 1..1095: mol_type = other RNA
atgaataacataaaaaacaaggcgaagcagtggcgcaataagtacgtctccacggagactaaaagatttacgttcaataagaacgagcgcaaacggtatacatttaacgcccttcatttactgagcctagaaaacgaaacacagctctgcaggatgctcgatatctcactggatactctttccgaggtgattaataaccctgtctaccagactttcgagatcccaaaaaaaaaaggcggcaagcgaactattgatgctcccgaagatattctgaaggacatacagcggaaattgaattacttcctgaatgcatactaccttatgatcaatccggaggtggtgtttggtttcgtcatacaaccccatgaactgggcaaaatctgcgccattgccgaaaatgcgaagccacacgttggtaaacggcaggtgttgaacatcgatatcaaggacttctttccatcaattaagactacccacgtcaaggctctgtttcagtctgaattgtttcagttcgacgagcacctggcatccctgctggctctccttactacatataaaggcaccctgcctattggagcccccacatcacctgcagtggctaacttcatctgttaccaattagacaaagaattgcaggagttttgtaaggaaaatgatctcagcttcagcagatatgccgacgaccttacattctcttcggacaccaagtttcactctgacaccatactggacattgtgagtatgatcaacaagagaggattttccatcaacgagaagaagtttcgtattcaaagtgccaacaagaagcaaaccgtgaccggactcgttgttaacgccaaagtgaatgtagatcgcaaattcatcagaaagctgagggctatcatgcacgacattcgactcaatggggtcaaaattgcagcccagcatcattttaacttaaagcaggagcccgatgagaaactgttggcatacttcatccacaggctggaggggctaatcaacttcgtaggccaggtgagggggaatcatgataagatctatacccggtttaagtatgaattcgacgagatattcaccacaagcctcaatgtttga

SEQ ID NO: 8797 - RNA, 1107 nt, synthetic construct
  source 1..1107: mol_type = other RNA
atgaataataggaaggagatggcacgtcggtggcggaaaaagtacgtctccgccgacaccaacagattcaaattcaataaaaaggctcgacagaaacacacctttaatgctctgcatctgttgtctttggagaacgagaatcagctctgccggatgctcgatatccagctgggctccttaagcaacgtgataaataaccccatttatcagagtttcgaaatccccaagaagaagggagggaagagaaatatcgacgcgcccgacgatgagcttaagaacatccagcagaaacttaacttcttcctgaacgcctactatttaatgattaagcctaacgccgtgtttggatttgtaattaggccaagtgagtatgggaaaatctgtgccatcgctcagaatgctaaacaacatgtaggaaagtaccaagtgcttaacgtggacataaaagatttctttcccagcatcaatgccgcccaggttcgcgcgctgtttcagagcgaaatcttccagtatgacgaacacttagccaccctcctggccctcctgaccacatacaaggggaaactgccgattggcgcaccttcctctcctgcaatctctaattttatatgccagcagctcgatgatgaactgcaattgctttgtaatgccaaagagatcgcatataccagatacgctgatgatctgacattttcgagctccgtgaaaattgatactgacttcatcctagacattgtctcaatcatcaataagcatcactttcgtatcaacgagaaaaagttcagaattcagtcagaaaaccggaagcaaactgttactggccttgtcgtgaatcagaaagtcaacattgacaggaagtacataagaaacctgagggcaattttgcacgacattcggctcaatggtgtggaggaggctgccaaaaatcactttaagctaaaacagcgaccaaacgacacaacgattaactatttcatcaaccgcctggggggactgattaattttgttggtcaagtgcgcggcaaccaggacttcatatactatcgctttaagggcacattcgatgaactgtttgcgtcaaggctcaagcaaccaaagtacttctga

SEQ ID NO: 8798 - RNA, 1059 nt, synthetic construct
  source 1..1059: mol_type = other RNA
gcagacacgggacgttttttctttagacgggatgcaccacaacgatatccattcaacgggttgcacctgctgagtgtggagcacgagtcgcagttttgcaaaatgcttgacgtcacactcaaggcgatgagcgcccttattcatcatccggcttatacgactttcgagatatccaagaagaaaggcgggaagagaaccattgaagcgccagatgaagacttgaaggaggtgcagagacggctcaactactatctgaatgcctactacctgatgatcaagcccgcaagtgtgttcggttttgtgattcagcctaaggagaacgggcgatattgtgctattgccgagaatgcaaggccgcatgttggcaagaagcaagtcctgaacatagatatcaaagatttctttcctgctatcaaagccggacgggttaaggccttatttacctccgaaatctttggctacaatgagcatctagccactctgctggccctgcttgtgacacacaaaggagcattaccagttggcgctcctacctcacccgctatcgcaaattttatttgttatcccctggacatggaactcatgcaattctgcagcgaccacggattgacatacactagatacgccgacgatctgacattctctgctgaagaaaccatagacactgacgatatccttgatatcgtctctatcatcaactcccatcacttcgctattaacgagaaaaagttcaggattcgcagtgcgcaccagcagcagatggtgaccggggtagtggttaatagaaaagtgaacatcgaccggcgcctcattcgccgagtacgtgccatcctccacgacatccagcagaatggcctgattgctgccacaatgcgccacttccggatagacgagatgcccgacgatgcagccatttcttattttagccgcaggaccgtgggtctggtgaatttcatcggtcaggtaaaaggccccaaggatcctgtctacttgaggtataagaggatactcgatgatctatttccttcaagcgtctcctcaccaaaaacttacttctga

SEQ ID NO: 8799 - RNA, 1080 nt, synthetic construct
  source 1..1080: mol_type = other RNA
atgacccttatcaataagattcacacccggctcgccgagtataattcctattattacggcccatttgaggccatcgagtttagatttgaacagacattctttgtctcgaaactcctctccctgatcgaaatctctgatctctgtttgctgcttaaaacaagattgttcgacattgagcatgtgattaatcaaccacagtacgagacttttcagatacccaagaagaggggagggtcacggctgatccagactcctgaatctcaactgatgtttatccagtcacgcctcaacttctatctacaaaactactaccacttgattaggcccgaatgcgtccatggcttcgtgatcaacccgaacaaaaacgagaagaagtgcaacattgtggagaacgccaaaatacacgtacagcagaagtatgtgctgaatctggatctcaaagacttttttcctagtatacaggcataccgagtcaaggaactcttcttgagcgactacttcagatacacagaacatattgcgaccgctttaactctgttagtgacgtatgacggcaaactacccattggggctcctacaagccccgtgatttccaattttatctgtttagagttggacgaagcactgtctgtttattgcaagaagaatgaaatccgctacagtcggtatgcggatgaccttaccttcagcagcaatcatttcatttctaagacgataatcaccgatctggagtacattatcaacagtttccagttcaaactgaacccaaagaaaacccgtatcaagacaaagaatagaaaacagaccgtcactggactggtcgtgaatgaaaaagtgaatgttgaccgcaagatcataaagatggtaagggccatgcttcacgacacactgcagaatgggatttccaaagccgctaaaaagcacttcaaatcaatcaacgagatcaggaacactagcgaggcctattttctgaaccgactggagggttatataaacttcattgcacaagtgcgtggtaatgatgattccatcgttattaagtttcggtactactacaagatgatcttccagcttgcttga

SEQ ID NO: 8800 - RNA, 1080 nt, synthetic construct
  source 1..1080: mol_type = other RNA
atgatcctgataaataaaattcacgcccggctcgaagagtataattcatactactatggaccatttgaggcaattgacttccgattcgatcagactttctttgtttccaagcttctctccgtagtcaaaattgcggacctatccctcttgtttaaaaccagactgtttgacatagagaaccttatcaatcatccacagtacgaaacgttccaaatccctaaaaaacgcggtggaaaccggctgattcaaacccccgaaagccaactcatgtacatccagtctaggctgaatttctatctccaaaactactaccacttagtgcgcccagaaggcgtgcatggttttgtcattaatcccaacaaaaaggagaaggtttgtaacattttcgaaaacgccaagatccatgtacaacagaagtatgtgctgaacgtcgatctcaaagatttctttccgtctatcaaggcataccgggtgaaggaactgttcctgtccgattatttcagatttaacgagcagattgccacggccctgactctgttggttacttatgaaggcaagttgcctattggctctcccacctcacccgttatctcgaatttcatctgcctggagcttgacagcgccctttccgcatattgcatgaaaaacgagattaggtatagccgctacgccgacgacctgacatttagttcaaatcagagtatctctaaggctcagtacactgagctcaaggagataatcgagcagaaccagtttgaactaaacgtgaagaaaaccaggttaaaaagtaacaatcgaaagcagacagtcaccggcctggtcgtaaatgagaaagtgaacgtggacaggaagataataaaaatggtgcgggcgatgttgcacgacacattacagaaaggaatttcaaaggctgctaagaatcacttcaagagcaaaaatgagatcagaaacaccagcgaaacatactttcttaatcgtttggaggggtacattaatttcatcgctcaggtgagagggcatgatgatcctatcgtgctgaagtttaagtaccactataagatgatcttccagctggcatga

SEQ ID NO: 8801 - RNA, 1092 nt, synthetic construct
  source 1..1092: mol_type = other RNA
atgaacaacccgcttaaaaccattgataaaatccatacccgcttggaagagtataacgcctattactatggctatcagggcgatgttgtgttcaagttcaatcagacatttttcgtccagcagttgctgtccgtggtcaagctgagcgacctgaaggtgctgttgaagctcaatttttcctggctgggccctttaataaatgcgccccactacgatagctttagtatcccaaagaaaagcggaggtatgcgcaagattgaagcacccgaagttctacttagagccactcaggctcggttcaacttttacttacagcattactatcacctcgtacgtccagagggggttttcgggttcgtgatcaaccctaataagaaagagtccttctgcaacattgttgagaatgccaagctgcatgtgcacaagaaatacgtactgaacctggacctcgaggactttttttcatcgattaaagcatatcgggttaaagccctgtttcagagcgagtattttaggtataccgaagaagtggcgaatgcccttgcactgctggtcacatacaatggaacactacccaccggtgcaccaacctctcctgtgatctctaactttatctgccttcaactggacgctatgctcttggcctactgtaacgaaaacgctctgcactactcacggtacgctgatgacctgacttttagtagtgacagggaaatcactacgctacacctggaagagctcagcaagatcattcactccaaccatttcaccataaattctaaaaagacccgccttaggctccatcacagaaagcagacggtgactgggctgattgtgaatgaaaaggtgaatgtcgaccgaaaaacaataaaaatggtcagggctatgttgtatgatgcactgcagaacggcgtatccaaggctgccaaaaagcatttctcaattactaaggagacaagccaaatgtctgacacatactttttaaaccgacttgagggctacatcaatttcatcgcccaagtcagaggaaaggaggatgccatggtgcaaaagttcaaagaggagttcaaaatggtgcacctcctctcatga

SEQ ID NO: 8802 - RNA, 1125 nt, synthetic construct
  source 1..1125: mol_type = other RNA
atgaaacacaaactccttctggacaaaatccattctagaatcgaagactacaatcggtacttctactcatccgaaaacgacgtgatttttaggttcgaacagaaattctttgtgactaagctgttgtctatcgtcaccatacctgatttgaagatcttgttcaaagtgcacttatcttacattgagaaagtcattaacgagccgaactacacaagcttcttgatcccaaaaaaaaatggaggcaatcgcctgattcagagcccagagtcagatctgaagaagatacagatgaagctgaacttttatctgcaacagtattatcactggattagacctgacggcatttatgggtttgttataaaccccaataagaaggagaagatatgcaacatcgtggaaaacgctaaagtccatacgaaccaaaaatacgtactcaacttggatctgaaagacttttttccctctatcaaggcataccgtgttaaggagctttttctctccgagtatttcaagtttagcgattgcgtcgcgactgccctggcccttctgactacatacgaggggaagctgcccattggagcccccacaagccctgtgctgtctaattttatatgtctcgagctagatgctgatttagttgccttctgtaacaagaaccagattaattttagccgctatgcagacgaccttacctttagttcaaacaatgaaatcaccgatgagacgatcaacatcatctccgaaatcattaagaagaaccagttcagtatcaatccaaaaaagaccaggctcaaatccagtaatcgaaagcagaccgtgaccggtctagtggtgaacaagaaagtgaatgtagatcggaagacaattaagatggttagagctatgctgtacgacgcctcgaataacggtatcactattgcagcgattaaacatctaaagctggatcggaatgctaatgtggtggacgtcagttatttcctcaacaggctggatgggtatataaatttcatcagccaagtaaaaggcgacgacgaccttctcgtcttaaagttcaagtccgaattcaagaacctggccaaaatgaaaacaaaacacatcaagagcaactcctacaataattcatga

SEQ ID NO: 8803 - RNA, 1203 nt, synthetic construct
  source 1..1203: mol_type = other RNA
atggttactgccttcacatgcttctgcgtggctcactgtgttccacttctgaaagcggatgaaattcagattatcagtaatggaagcttcttcatgcttacctctgatgaactgatctctactgcaaggcgatacaagcggtggatgaaattaaactatcggcttcgatattcgatgcgcccagccgtcctgaaccatctctccaagaatgaatttgaatctgcccggctcctgatgatcgagaatagtcatgacatgatatgcttctttgaccagattcccaaaagctatctggagaagatactcaacgagcctaattacacagagtacgccctgaacaagaaaaaggggggacagagaaagatccagatacccgaacccgtgcttaagcgtatgcagaagaagatcaatgccgctctgcaggcgtactacctgctgatcggctatgaaaattcatttgggttcgtcaagaagacctcccatgctgcttttacctcaggaattgccaccaatgcttcaaaacacatcgggcagcaggtagtgctcaacctcgatctaaaggatttttttgagtccgtgtccgcagcacgtatttttaccctgttcaaatctccgttgtttaagttcaatgaggacatcgccgcagctctagctctgctgtgcacgtggcagaaaagactgccaaccggcgcgcctacttcacccattctgagcaatttcatatgtctggagctggatcagaacttgcacgagttcagcctcaaaaataagcttaactactccagatatgccgacgacctcacgtttagcacaaacgaaaggattacagaggagatgaagatcgaattgaaagagattatctgtagaaaccagtttgaaatcaacgcaaagaaatggcggattaggacacagaatcaaaagcaattggtaacaggcctagtcgttaacgagaaagtgaatgtggacagaaaattcataaggaagatccgcgcaatgattcacgatcttaagctgaacggattagagaacgccactggcaaccactttcgcaagagcactaaaaataatcacgagttacaattccggttcatcaacaaactccatggttatattgacttcatcggtcaagtcaggggccgcgaagacaccatctacaaaaagtttaaatgggaattggtgcctttcgggatggccgatagttga

SEQ ID NO: 8804 - RNA, 1095 nt, synthetic construct
  source 1..1095: mol_type = other RNA
atgaccaaaacaaacgatataatacagtacgccagggccaacaaaaagtgggcacagcatagaaaagtctcaattgcaaacgggaccgctggaataaaagacgttatccagcagagggaaatggccgctctgcacttcttgtgtatggacagcgctcatgatttaacccgtctattcaaacgggatatcagcttcgtggaatattgtatgaactacccggtgtacgtggagcacctgattgcaaaaaagacagggagtaaacgcattatcctcgcacctgacaaaaatctgaagcggatgcaaagaggacttaattattaccttcagtgctactacaacctgatcaagcctgatgttgtatttgggttcgtcaaaacaatacggaggcagaagaacccatcagctattgtacagaatgcctctatgcaccagaaaaagaaatatctcctgaacctggacttagagaatttctttccttccatctcagccaagagaattctgactctgttttctggaccccacttccaatttaacagcgagattgccaccgccctcgcgttgctgacgacttaccagggcaaggttcccgttggtgcacccacttctccaatcctcagcaattttatttgcctggagatggatgaacaattgatcgagctggctagtcgtcatcagcttacatattccagatatgctgatgacctgactttctcgagcaatgagttcatcactcctgagatacttaaggagattcgctccgtgatcgaacagaaccagtttaaactaaatgagaagaagctccgctttagaaacgctggcaagcagcagattgtgaccggcttaacagtgaacgaaaaggtgaacgtggaccggaaattcctcaagaaagtcagggcaatggcccatgatctggaaaagaatggcctggaggacgcggcgcaaaagcactttcggcgaaattctccctccgaagagatgaatgccacgttccttaacaccctcgccggatacgtcaattttatcgggcaagtccgaggcaaggaagacggtgtgtatttgcgctataagaggatcttcagtccaatcccatcctga

SEQ ID NO: 8805 - RNA, 1059 nt, synthetic construct
  source 1..1059: mol_type = other RNA
atgaagctcaagataaacagtaccatgaagtgggaatcaattctggaaaaacgcgactcacacgcagcgaatatcagacggttaatctgcacaagtaatggggtgatcccgtctttttctcactccttaagggaggggcgagtcttgacatttctctccgtcagcaattggatcgaactgagctgctttctgcagctctccccaattaagctcgaacaggtgatcaactgtccgaattaccggcagttcacaatccctaaaaagaagggcgctccaagacttattttccagcccgacccagatctgatgaaaatccagcggaaactgaatcgctatctacaggatgtctactccttccaactccctgaatgcgtgcatggatttgtatgcaagagcaaccaggtatcaagaagcatagtgactaatgcgcaaccccacataaataagcaacgggtcctatctattgacctggagaactatttccccagtatttctgccaagcgtataaaggtgctgttttgtagctggggctttaacgaagaaattgctacagccctgacgctgttatgtaccttcaaaggaggcctgcctgctggagcaccttcctcacccgttctggccaatctgtgtaccatggagttggattccaagctgatcgagttctcaaaaaacaacgagcttacttatacaaggtacgccgatgatctgaccttctcgagcaacgactatatcctagacgacactatactccgtgtgcttgagatcattaagagtacggatttctctattaacatgaagaagaacaggtgcatgggcaggaatagtaagcagaaaatcaccggtattgttgttaacgagaaattgactgccgaccgcaaagtgaaaaaaaaattgcgcgctatgctccacgatttggcaaagaatgggcttgagatcgccacccagagacattactccattgtcggtcagccaactgacctggagcaaaacaggttccttaagcatgttatcggcgtgcagtcttttgtgaatatggtgaataaccaccgatttagctga

SEQ ID NO: 8806 - RNA, 1029 nt, synthetic construct
  source 1..1029: mol_type = other RNA
atggataagatcgaagtgaacaagattgttaacgctagcaaactgaatcagttccggacgattgagctactggacaaactctcctgctttttgaaagttaataccgaagtcttcagtaatagactgaattatcccgtatatacaactaaccgaatcccaaagaaaaagggcggttggcgggagctgcttgtacctgaaacagagctgatgaggatacagtccaaactgaatgtgtgcctgcagctgtacttcaacaagattaaacccgactgcgtgcacggctttctcatgaatgaacggaccggcgaagagctcagaagcattgtgtcaaacgcccaggcccatgtgggaaagtcatttttgctgaacattgacctcaagaatttctttccgagtatcagcgcaaaacgcattaacgagctgctgcatgataaactgagcctttttcctaatgagaagatggcaaatgcggtcactcttctgtgtacctataagggttttcttccaaccggggctcccacgagtcctgttttgtccaatatcgtgtgtctcccactcgactacgaattgtcgacatactgtgaaaataaccagatcacttatactaggtacgccgatgatctctctttttccagcaaccgctattttagtgagaagtgtataagcgagattagacagatcatcaaggagcaacaattcgccatcaacgagaagaaattcaggataaactcacgcaagtctcaacaacgtgtcactgggttagtggtcaacaacaaagttaacgtggataggacatatattaagaccattagagcttgcttacataattggaagctaaacggattagaacacgccacagctaaacactactttgtgatcgcaccctctaccgaggaacaggcccagttctcaaataagctgaaaggccagatagaattcatcggcatggtgcgagggaagaaggacgagatctacataaagtacaaaggggagttcaaatacttgatcggatcctctgtcttcccttga

SEQ ID NO: 8807 - RNA, 903 nt, synthetic construct
  source 1..903: mol_type = other RNA
atggtcaatcccaccatatttgaagatcgcttaaattctccagtgtacactaccaaccggatcccgaaaaaaaagggcggatggcgcgagctacttgtgcccgagaaggagcttaagtacatccaaaaaaacctgaacttctatctgcagctctattacaacgacattaagcctgattgtgtgcatggatttttgatgaacgagagaaatggcgataagacgcgtggcattgtcagcaatgcacaggcccacacagggaaagcgttcctcctgaatattgacctcaaagactttttcccaagcatctctgccagacgaataaagcaccaactgtttaacgagctcgatgtctttgccaatgaaaatatcgccaatgccattaccctgttgtgtacatatcaggggtatctgcccacaggcgctcctaccagtcctgtcatatccaatattatctgtttacagctggataaaagcttgatggccttctgcaaggaaagaaatatcacatataccaggtatgcagacgacctgtcatttagcagtgacaactacttttccgatgagtgcattaacgaactgaagaaccttatcgagcagcaccatttcaagatcaacgaaaagaaattccgcataaactcatcgaaatctaaacagacagttactggcctcgttgtgaatactaaggtaaatgtggacagaaaatacatccggaacattcgagcttgcatttacaactggcggatgaacggactggaattcgcaaccgctaaacattaccaggtgatctccccagatatggagaagcagactgaatttgctaataagcttaagggtcaagtggaattcgtaggtatggttagggggaggaaaatgaagttcattagggacacggaggagatctga

SEQ ID NO: 8808 - RNA, 1194 nt, synthetic construct
  source 1..1194: mol_type = other RNA
atgcatgctttctcgacatcttttcacacccacgctttccaccttaaaatctctaccactgccttgttcctgctgcttacaatgacccactctgataacaaaaggaccgagaagattagagaggccttctttgctcaaattcaatcagaggcgaaggaggagcgtaagcaaaatcggctcaaagccatccagtcacgggaaaagttcgtgggacgctttctgagaatgcagctggcaggtgatctgtgcaaactcgtgaaggaagactataactccctgaatgagatgattaatcgccccaattaccacagtttcagcattcccaagaagagagggggaaagcgagaaatcacggcacctgataaaaggctgttacgggtacagaaaaagcttaacaggtatctacagtttgtgtacctcggagtccgtcctactgcagtgcatggtttcgtgatgcaggtttcagatggaagcgtccaggccaacatagttgagaacgccaaggtccatgtcggcaaaagggcggtgctgagcatcgatctggtggactttttcccaagcattagtgccaaaaaagtaaaggatctgctcatgggcagcccgtttaatttcaacgaacatattgccgttccactggccctgctcatgactgcggagcgcaaattgccacagggcgcacccacctcccctgtgatctccaactttatctgtttgcagttagatgagacactaagaatctgggcattaaaccacaacgctaactataccaggtacgccgatgacttgacatttagcgccgacctcgctttctccgaagagcagcaagcagacttgaggaaactcatagaagcttacgggtttgtgatcaatgtcaagaagttgagacagagactgaagaatcgaaagcagactgtgaccggtctgacggtgaatactaaagtaaacgttgaccgtcggtacctaaaaagaatccgagctatgctccatgacctgaatacaaacgggatagaagaagccacaattcggcactttaaactggttcgccgggcaagtcccgagcaacgcctgcttttcgtcaatcggcttgaggggtctatcgcctttattggccaggtgaggggccagtccgaccctatatatcagcgcatgcgaaaggctttcttcgacatgtcttcaagtaagaaggaaaagtga

SEQ ID NO: 8809 - RNA, 1113 nt, synthetic construct
  source 1..1113: mol_type = other RNA
atgaacaaaccagccaacgagttccagccctccataagcaacggtaacttcaagcagacccttgctgaaaggcggattgaagtgaagaaaaacaggattaagaactttcagatgcgggagaactattccaatagattcctgcgtatgcagtgcgccaccgacctttgcctactgctgaacgaaccgttctataatctggaattcctgatcaataagcccaattacaataccttctcgattcctaagaaatctggggggaagagagatattagtgcccctgaaaagaacctcctcagagtccaaaaaaagttgaataggtacctccagtttatttacctgcgactgcgcccaacaaatgttcatggctttgtgctccaagttgggaatcatgagatccaagcaaatattgtggagaatgcaaaacaccacgtgggaaaaaaagccgtgttgaacatcgatcttgaagacttttttccatctatcactgcaagaaaagttaaggagctgctgaagagcgccccgtttcagttcaacgaggaccttgcaatcgctattggcctgttgacaacgcataagggaagaatgccccagggagctccaacctcacctgtgatttccaactttatatgtttgcccctagaccacgccatgcagcagtggtcaatcaaaaacaaagtaaactactcccgttacgccgatgacttaacgtttagcgctgatatagtcttcagcccctcacaaatcctggagctgcgggccatcatcgaatctttcggctttagactgaatgagaaaaaactccggcagcgacttaacaaccgaaagcagagtgtcactggaataaccgtcaacactaaggtgaacgtaaatcgcaggttactcaaactagtgcgcgcgatgctccacgacctcagggttaatggcatcgagacagctacacggaatcacttcgtgagccctgaaaacccatatttcgacaggaagaagtttttcctgaatcgcttggagggttccattgcgtttatcgggcaggtccgcggccttgatgatcctctgtacaccaagatgaagacagagttctatctgctgttagatagtaagaatactgactga

SEQ ID NO: 8810 - RNA, 1080 nt, synthetic construct
  source 1..1080: mol_type = other RNA
atgacagtatacgagttcgtcgaaaaacagcgcccggagcttaagcagtcattaagaactcagaccatgaagatcaagagctcacccgaactgactaaacacacaatctccgccggactgctactctctcttcagaacgcccaggatgtgtgtgcttacttccaactgccaagagcagtgctcgaacaactgattaattcccctaaatatcggtccttttccattgcgaaaaagcgcggggggaaaagactgatccaagcacctgaattaggtctaatgaaggtgcagaggattttgaaccacggactgcaaagtctctacgcctgcaatcctaatccaagtgtcttcgggtttgtgatcaatgacgagcaagccaaccccgcctcacccatcgtccagaatgccgctccgcacgtcggcaaggcatacgtgctgaacatcgacttgaaggattttttcccaagcatccgagcacaccgggttaaagagttgttcatgtctcagcagtttaggtttaacgagcagacagccaccgttctcactctgctcactacatatcagggtaggcttccccaaggagctcccacctcgccaataatcaccaatttcatctgcgctaagatggacgcggagatgcgaaagatagccaacgataagggttggacctacacacgctatgctgatgacttgacgttcagcgccgacctgttcttcgacgcagaagccgtagcggaaatcaggagcatgattgtgtccaaccatttcgtgattaacgaaaagaagatcagacagaagggaaaaggccgcaggaaagaggtcaccggcatagtagtcaacactaagccaaatgttaagcggagttacatcagacaggtgcgcgccatgcttcatgatctggaaaagaatggccgtaccattgcttcagcaaaccatttcaaaaacagccctgttgtgagggagaatgatcactctgtgtttattaatcgactgcgtggctatatttcttttattgggcaggtgcggggcaaagaggaccctatatttctccggtttcaggagaaaatgaaagctctgacgtga

SEQ ID NO: 8811 - RNA, 1122 nt, synthetic construct
  source 1..1122: mol_type = other RNA
atgaaccagactgagctgctcgcttacaaagccacatataacagcgtgtttcggcagtacctgaactccccaagaaaaacatttaagcctccctttttgctaagcaagtcaattcagtatgcgctttatttcctggccatcgagcgcccattagatatgtgtgcgtttttcaagatccaccaccaagaacttgaagatattatcaaccagccaacttacgtaacccacttcctgctgaagaaaaagcaggggttgagaactattaaggcccctattgggaccttgaagctgcttcagcagaagttaaacagacacctgcaaggcgtgtaccttaatctgaaacctacatgtgccaaaggctttgtcatcaatccccccggaagttccttgaaggctaacattgtggaaaatgccctcccccacgtcgcaaagaaatatgttctgaacatggatatcagggatttcttcactagcataagcgacaagcaaatctaccatttattcaagtcctcacctttcgatttttctccgcaaatcgcagctgcctttacgtatctcgtgaccgttgacgactgcctgccgcagggtgcacccacatctccaattctatctaacttcgcctgccgtagcctagacgaaaagctgatggagtttgctaaccatcatcagttgaattacacgaggtatgcagacgatctcaccttctcctcagacatccctttcactaaggagcagatcgccaccataaaaaagaccctccgggaggaggggttcgaacccaatgagaaaaaatttcggctgaggacaagtaacaaaaagcagctggtgaccggccttgttgtcaatgaaaaagtgaatgtcgacaggaagatgctcaagcgagtccgagcaatactgcatgacctgagactgaatggtgcctcaaaggctgcacagaacttcttcaagtccgagagcaaaccaaatgagacagacattctcctttttttcaaaaaactccgtggaatgatagatttcatcggccaggtacgcggaaaagaggacgtgctgtttgtgaagatgcggcaagattattctagttcgtttgctattgaagaagatcgcatggtgtactaccgctga

SEQ ID NO: 8812 - RNA, 1152 nt, synthetic construct
  source 1..1152: mol_type = other RNA
atgctgacagccatcctggatggcattaggaaaaactatacgaaggccacattctatacgtacaggcagattgttgtaaataaaaagaaggggggcaagagaatcatttccatacccggattgctgctgcgcaaatcacagcggagcctcctccctttttttcagcagctccggacgcattcatgcgcacatggttttgtcgtcggaaagagtatcatcacccacgctagcctgcatctggctaaagagtcaattctgaccctggatatccaggatttctttggatcaattactagcgagcacctggagaagattttccgatctcatggtgttcagaaaagtgaggacctggagctgctgattaagttgactactataaacgggaagctaccccaaggggctcctaccagcccaatattgagcaacgccgtggtttttgaaatggactttgaactcaacgagtgggccaccaaaaacaatctgatctactcaaggtacgcagacgacatggtgttctcctctgaaactcgcacaatcgaaaaaacctgtatcgatgaggtcagtcaaataactcagaaattcggcttcaaactcaataattccaaaagtcgcatcatgccgcgcgggaagagacaggtggtaaccggactggtggtcaatactaagttgaatgtcaagcgtgagtatttaaggaatacctctgcgatcctccacaacatcagcaacaatccatttagcgccctgtcccaggtgtctcggggatcagtgttcgcaacctaccaaagttatgaaaaagaatacctttcccgcaatctgtcgctttcttcctttcactacctgatccggaatcagaagcaacagcagaaacttataaacccaacaaagatccgattgcacaggaagagccacttctctaactatcccattttccggctattacttctcctccaaggtgtgaatgggaggatttccttcatttcgtccgtgatcggcgaaaaccagattagtgtgcaaaagcttagaaatcagttcaaggagatcgagaaagagctatttggcaactattctatcaactggagcacaaacacaacccgtctttacaagattattctcagagaatgccctcagttacgaacaagaataaagggctga

SEQ ID NO: 8813 - RNA, 960 nt, synthetic construct
  source 1..960: mol_type = other RNA
atggattacttctacaagaagataaagcggcttattctggcttgggaagacgggacacccaactctgataatattccaagcaattacgactattcccgtttcaagatcattaaaaaagacggaggacaccgcatcatctactcaccttatggccatttaaaaaagatacagcgcggcataagcgagctgctgtacaagaatgtggaattgcatggcgcaagtcacggctacacaatcaacaagtctatcattacgaacgcaaagcagcacctgaaaaagaactgcattatcaacattgatctggagaacttctttcagacaatcaacaccgtgatgctgaataaatccctcaaactttttttcccagacatcaccgatgaacttttgatcaagatcatcgccatttgttcattcgagggctccctaccgcagggtgctcctacttcacccattctgtccaatctcgtgtgttattcgctggacttgaaactctctgaactggccataagccacaatctcgattatacaagatttgcggacgacatgaccttttcaactaacaacaagatagtcgagttgcaactgaagaatgatatcaacgggattatccaaagcgaagggtttagactcaatgagaagaagtacagggtattaaaaaagagacacaggcagagtgttactggtattacggtcaatgagaaaatcaatgtcacccggaagtatattcgagggattcgcgccgccctgtacaattgggagacttacggtaaaaaagaagctagtaggaggtattttgagagcgcaaaaaccaaaatatgccgatctcataactttgaagtttcccttagaggcaaaattgagttcgtgggaaatgtgcggggaaaggaggacgaaatctatagcaagttcaagaacaagttcgagatcatcaacctatttgagaaaatcaaccagttctga

SEQ ID NO: 8814 - RNA, 1893 nt, synthetic construct
  source 1..1893: mol_type = other RNA
atgaacatcaataccggaatcctgtttttcgtgatgaagaagttcaactaccacaagatcaaatacaagaataccgagctagaggaattcataagcaaggagttaaatagtcatctcattaagaacatcctgaagcacaagagttccttttataagagcttcacagtgctgaagaaaaatggtgcaaagcgcagaatagaccagccccattacaaactgatggacatccaaaagaagattgccaattacctgctagtaaagaggaagaaaaacagtagtagtcacgggttcgaatactacaggtctatagtcaccaacgcggagaaacacatcaataagaacatcgttctgaacttggacttcaaagagttcttcaagaacatatcaaagtcccaagtcctgtccgtgttgaggaacagctttgatataacaaatgagtctgcctacttactcacagaactcgtgacctttaataactgcttgccccagggcgcaccttcttcacccgttatctcaaattatgtttgcaacaatctggataacgatttgaagacgtactgtaaggagtacaatatcatttatacccgatatgccgacgatcttacgtttagctttaatttcaagaagctgcctcgtcagattgtagatgagataatcagtatcattgtgaaacacggcttcaagcttaatgatcagaagtttcgatatttccacaaaaactcaagacagttagtcacggggatcgtcgtcaacgaccatgtgaatattaagagggaattctacaagaaggtgcgggccattctgcataattggaaaacaaaaggatacgtcgtgaccaaacagaaatttgacctcgagtatccaaacaagaactttcgtaagactctgcttggctgggtgaactacattggttatgtaagaggcaaagacaacccaatgtatctgacattgtcgtcttcccttgagcttctgttacgcactaaatatccgaagagtgagtttaaaacagacgaaaaatactgcgacaaatgcaaaactgggattctcattgaaaccaaagaaggaggagtgaagaacaacttcaaaaaatctaacgatgctagctatttcttcgagtgcaacaatgaggaatgtaatttctcagagaacatcgatagcaaatacttctttctcaaatcgaaggcctaccttaaaaataataacctggagaaggtgaaggaacttctcgaaaagtccatcgaacttgatagcaataactacaaggcatataacaatctgggcgtgatcagctacaacaaaaaagagtacaaagtgtctgtcgaacactatagcaattccattaaagcttatcgggaacgcgctaagccatattattgtagggggagagcctatgctaacctccaacagtttgaaaatgccatcctggactatctcaagtatattcagctgtctactcggaaagatgttctcaattccgtctactttcatttagggcaagcatattttaagactcacaaatacgaggaagcactgaactacgtgaatctgcatattgagcgcttcgagatcactaaagcggtgatagccttgaaaaccgcctgtctgaacaatctaaataatctgaacaagcggtttgagttgaagatttacaaagacgcctccaaaatatacgacgtgattgagaaaaacgaaaacatttggtttgagtatcagaccatcgacagcgatgagtctgtgaaagttgctctggtatccctgatacccaagggtatcctcttcaacaaggagatcaattccctatcagttaagggctacaatttgattaacaagaaggaagagacatacctgatcgataacatcgctaatctcattaatgtccctaaggaaatctga

SEQ ID NO: 8815 - RNA, 1329 nt, synthetic construct
  source 1..1329: mol_type = other RNA
atgggttcctcatttttcaattttatgagtcgcaagttcacgatttcacagtttaggaagctgaacaacgattttttagacgtggagagtccgaataagctagccgaaatcttggggattaagacctcggtgttgattaagaacattaagtatcagcgctacaccagcttcaccagtatccataagggaaaaaaacgtattgtcgctgaacctaatttcgagcttaaacaaatccagcgcagactaaataactacctgcaagcaatctattactttaacaagcacgagaacgtgcacggttttgtgaaatgcgtgacaaacgaaaagattcggtattcaatcctgtccaacgcgctgcctcacgtgggcaaaagttacgtgattaacgcagacatcttcaggtttttcccctctattaccggcaagatggtcaaagatgttttccttggggagccttttttcttcgaggacaatttggctagcgccctcgccctgttatgtatacagaagaattggttgccaactggagcgcccactagcccagtaattagcaaccttgtatgtatggaactagatgaagaactcaatgtactggctaacaagaacaattactcttacacgaggtacgccgacgacatgaccttttccggggaaaataaacccgatgagaagtttaaggacgaactgacatccatcctggaatctttcggattcaaactgcataagaagaagtatcgtgttctcacaaagcacactaggcagactgttactggcatagttgtgaatgagaaattgaacgtgaagcgggagtataaaagaaatcttagagccctgcatcatgacatcaaggtaaatgggattgaaaatgcactccttaagaatagaagcgtccagatccttaccatccagggcatcgaatctttcaaaaatagcacactgtcaaagtcattattcgttgataaggtcgccgagtactctaaagccatctctaacgcaggcaacatagatggtgaggtcgagtatctgctgtttgctgacctcgagctcgatggctttatcatagatgtgttcgacaaccataagcaggccgtgaaaaaaatgcacgaactgtggcacttcattgcttccctgtggacgctcagccacaacgacatcgtcggaaaaatatccgcaatatcccaaaagcgctataggctgactgaagagacacggtatgagacaattggcctcgagggttgcagtaatgggttctacaccgtgggagtggtcaaactgaacaacaaatttacccaggaggagtacgagaaaaaacgagggcgaatccggtga

SEQ ID NO: 8816 - RNA, 1332 nt, synthetic construct
  source 1..1332: mol_type = other RNA
atggctaagcattacttaagagaactgcaacacatttacaatctcaagatcctgagccaatacctcggaaaagatgagtacgagctgcagaatctcctgtaccgaaaaacatattctagtttcctgatccctagaaaaaatggcaaacaccgttctatcaatgccccttcggacgaacttaagtacgtgttacagaaccttaataggttcttgagcgccatttataacgaaatgcagggccaggagcatcccgcccatggatttactcttggtaagggaatcttatcaaacgccaaaatacattccggcaaggcgtttgtgttaaacctcgacctaaaagatttcttcccctctataagccgaaaccgcatcaaagaggtgttttccagtgaaccattcatgctgaaaacggaaattgctgattatctatcggagctcgtgacctattatgatacacttccccaggggagccccgcatccccaatcatttctaatctcgtgtgttggaacctggacaaaactctgagcgactttgccaaaaagaaccttctcgtctataccaggtacgcagatgacttgagcttcagcagtaaccagaagatcgacaccgagataatcaaacaaatcgaggactatatccagaaggagggtttccagctgaacactgataagaccagaatccagaacaggacagagcgccaggtcgtgacaggggtaacggttaatgtcaaacctaatgtttcacggaagtttatacggaggattagggctattctgcactcctgggagacactggggtatgaggaagctgacaccatcttccagtcatcctataaaaggcgcaagggagtttttaaagcaccgtcactgaaatactatctgataggtaacattgcgtatattggacacatcagagggcaagatgacagtatctacaacaatttctgcatcaagctattccggctgtccgatcgcaaggtattcaagggccagattgaacgttttattcagagcttgcaatccgacatcgataatcagcaatttagtgaaaccaatttggagaatcggattttcaatctggcaaagaaggcctttgagcctcaccagatacgctataataacatcctcagaaagtactacacactgcgaaagaaaactaagatcaacataaccaaggggaaaaattactctagcctgtttttggcttctctggaaacttcaccagagttcaaggaactcctgtacgagtccggccggtttggcgacaaggagtactactctcagtacattaaagaagccaagagattgattcggaacaccaaccttatttga

SEQ ID NO: 8817 - RNA, 1029 nt, synthetic construct
  source 1..1029: mol_type = other RNA
atggccattaagacaatcgctcagttatgttccatgctgcaggtcacagcaaaagagtttcagcatatactggccctgcccgaatacgttagctactccatcccgaagaagtcaggaggaattagagctgtcgaggccccacagggtttactgcgtgagctccagggccgactcgcaaagtatatgcagccattttacacccaacacaagctgccgtgcgtccacggctttgttaaggctttcaataacgaacccaaatatggggtactcactaatgctaaacctcacctgaacaagccttgtgtgctgaacatggacatcaagaacttctttgacagtatatccgctaagcatgtgaagcaggccctgcagcagtaccccttcatggtgtcagatgaagtctctacagccattgccctgctttgcacacacaacaagaaactgcctactggggttaccacttctcctttacttagcaatatcgtgttctatagggttgataaggcacttatcgatctcgttaacgagatcaacagcacgaagtgcaaagacgacgtggcgatctattacactagatacgcggatgacctcactttttcgggggaggtaaaactcgtcaatgagatacaagcaagaattgtggagattctggccagctacggcttcgaagtcaacacaaaaaagactcgactgcagaagacgtacgctgcacaatgggtcaccggcatcaaagtgaataacaaaccaaatgtgagtaggctgtatgtaaggaatctacgggcgaccattcataacctacaaaacaacaccgctaccgatgccgtgaagaaacatttgggtaccacacccaataaggaaatcgacctctcagatgtacacacgatgttggcctctatccggtccaagattgcatgggtgggattggtgcgcggcaagaccgacgacgtgtatctgaagttgaaacggaatttcaaagaggccgaacagaaaatacttcttcacgaagtgccagagaaaaaacgcaattga

SEQ ID NO: 8818 - RNA, 1002 nt, synthetic construct
  source 1..1002: mol_type = other RNA
atgcgcagcctcgaggagctgcttaaaatcctggcgatttcaagtgagctgctccagcagcttctggccgctccagagtatacaatctaccacatttctaagaagtccggagggacccgaactatccaggcccctcaggggttgttacgccagactcaggtgctgctggcaaagtacctccagactgtgtacagccggcaccacctcccctgcatccatggattcgttccgtccgccggtcttttgaagtatggggttttgagtaacgccgtgccacatctcaataagcccttcgtgctgaacatggacatcaaaaacttcttcgagagcatcactgccaaaaaggtcaagaagtccctgtgcgagtttccatattattttaacgaagaagtggcaaccgccatagctctcctttgtacgtaccaaaaacaactaccgaccggtgctcctacaagtcctgtcttgtcaaatatggttttttacattcccgatgtggccttgctacagtggatcacggacgtaaatgagactaaacaaattgatgagacaggaataagctataccaggtacgccgatgacttaacattttctggctctgccaacctggtgctgtcactacaggctcgtataatttcctttttcgcaacagaaggctttgaaattaacgcaaagaagacccgggctcaaacccctcacggcccacagtgggtaaccgggattaaagtgaatgagcgactgaatatctccagatactatattcgcaatcttcgggcagtcatccatcaaatgagggttcatgctgcagaagcggtggtttgtagatacctgaagctgcccgcgaccactcagatcaatacggcccacgtcaaaaagatgctgagctctgtccagtcgaaaatcgcttgggtgggcatggtgaggggcaaagccgaccccatatatctcagattacagacacagttcaacgtggctagggaagtaatgctggtcaaggaaagctga

SEQ ID NO: 8819 - RNA, 1047 nt, synthetic construct
  source 1..1047: mol_type = other RNA
atgaacacaatcattctggacaacaataaccactgggattcccttctgttcattaatgcaaatacgctggataaaatggccttctcactgagctgccacctcagctttctgcagcgccaggtggaaagccccaagtatttccaattcaaagttagcaagaagagtggaggattccgtgaaattaatgctcctaacgctgagctgaagtacctccagcgaaacttgagctggaagtttaacaagatttattcttcacccgatggggtccatggcttcgttaagggcacctttttggagactaggcacatcgtcagtaatgctaaactccatatcgggaagaagtgggtatggaacttagacatagagtcctttttcagttccatcactacacaaatggtcattaaccgacttatggaggccccctttaacttcgacgaaaataaagccaagtacatctctctgctgataatctataagcggcaactgccgatgggctccccatgctcaccagtggtaagcaatcttgtttgtgaaaacatggacgcccagattaatcagtgggtcgcgaaccagaacaaatttcaacctgagatcaatcttgtgtactctcggtatgcggatgatattaccttttccactgacctcgcaatctctgatgagcacaaactcgagatctatgacatcctgaatcagtacgggtttgaggtgaatcgcaaaaaggaaagaatccaatccaacaagcagtcacagtgggtgaccggtattaagataaacgagaaacctaatgtcgacaggtcttacatcaggaacatcagagcagccctccatcagataagggctaagggattgcaggaggctgcaaccaatttcttcaatttgaaggagttagccaacacaacagagattgatagattcctacggatactacagggacgcatctcgcacgtgggctttgtgaaaggtaaagacgacagtgcctacctgaaatactggagagaactgggcgaagtgatggccccaattcagaaagaacccctgatttattga

SEQ ID NO: 8820 - RNA, 1002 nt, synthetic construct
  source 1..1002: mol_type = other RNA
atgaaaagcaaatacaagttcttagactcccagctggccatcgaagacattagcagtatattaaacatccgctttaccgaactcatcaagaacatcgaaaagcccaattatacgacatttcgaattccaaagaagtctggagggcatcgtgtagtgttcgccccgtgtagcgatcttatgaaaatccacaacatcgtcaacaataagctcagatctacctaccacatgatgcagccaaaggttgtgcatggattcacatataaaaccgccaaagagaaataccttgacatcggcattaaggcgaatgctaaaatgcacctcaataagaagtgcatcttgaacattgacatcaaagacttcttcccttccatttcaatcagtagagtgcgggcaatgtttgaatgcccccccttcaactacgaccataatctggcaactggcctggccctgctgttttgttataaagggcaactgcccgcaggggcacctacttcaccactcatctccaatttttattgcctgaaattggacgccgatgtcctggagctatccaactcagagaatatcacctacagtaggtatgccgatgatcttaccttttctagcaatgccattattgatacaaagttcgtcgtgaaggtgtccgaaatcctaaagaacttcggctttgagataaaccggaagaaacttaggaaggcctctaatttccaggctcaatatgtgactgggataaaggttaaccagacactgaatctgaatagaacctactatcgcaacctcagggcggtgctgcactcgatcgaacagattggtgtcagcgcttcaatgttgaaatacaaaggcaagaaacgctacattctgggagaggagcacaagtttttaagcagtgtacgaggaagaatagagtacctcggctatattcggggtaacaatgacgttctgtacaaggagctcaaaaacaagttcaacgctttgatagatagggctcctattaattactga

SEQ ID NO: 8821 - RNA, 993 nt, synthetic construct
  source 1..993: mol_type = other RNA
atgaaagagattacaaaaaaccggttcctgtcactgcagtttgttgatgaactgtcaatgattctgggaatgtccctgggcgattttacgagcgccatcgagaatgcgaactacaaaagctttgaaatcccaaagaaatcagggggaactcgcttaatctcctctcctgactcactcaccaggaagttacaaagcaaactatatgtgtacctgaagagctactatcactcagtccaccctaaatgtgtccatggtttcattccaaaattcaaggccaaggcgagtcaccatatcaaagccaacgcacaggtgcatctcgggatgccctacctcttgaatatagacatcaaggacttttttcacagtatcagtacaactagagtgaggtccctgtttgcaaactcccccttttactttagccacgaagtatccactgcacttgctctgctctgctgctacgaacggaaattgccgatgggcgcttgtaccagccccgtgatttctaatcttatctgtttgcagatggacgccctgttcatcaagtggagtaatgagcagaagataaagtacaccagatatgccgatgacatttccttctctagcatgatggctttcagccataagcagattgaggatatacgtaccattatccagaacgagcgcttcgagatcaacgaaaaaaagctcaggattcaatcgagatatacgtccatgtgggtaacagggatcaaggtgaatcagaagcttaacgttaaccggacctatattcgaaatctgcgagccatcctttacgacataaaaacaaatggctgggaaaaggcttgcaagaaacacttccatctcaacgagaacactaaaaacgaggaagagctgaagtctaagttttacttcaaaatcaagggcaagatccaacacattggatatgtgaagggttattctgatgaggtctactctaaattgaataatcagttcctgggcctacagatactgtga

SEQ ID NO: 8822 - RNA, 1029 nt, synthetic construct
  source 1..1029: mol_type = other RNA
atggagattaaaccatttcatcggaagatcacagatctccagatacagcagtttctgcacttcaattccgtgcatgacctcagtcacctcataaatatcgacacagacattatcgagcatgttttggacgaacctaagaggtaccacgagtttcctataccgaagagaaaagggggaaagcgccttattcactctccctcaagacccctcaaagacatccaaaaacgtttatccatttacttgacgcgcatctaccacgaatatgctccagcttacgtccacgggttcattagaagcaacaaaaagactagtagcaggaacatcctcacaaacgcgacccagcatctcgatcgtccatacgtgctaaacatagacatcgagaacttttttccctcaatcaacgccgaactgatcaagtcagcattcaacaaactgccgtttcagatgtattccgatgaaggtgcatctattatttctctgctgctgactaggaattggattctacccgccggctcgcctgctagtccaatcgtatccaatataatcttctacgagacagatattgccttacacaagtactgcatcaagaataagctggtttacactagatatgcagacgatctgaccttctctggagagctgatcaatgatcacatgaccgaagcgataaagaagataattatctaccacggcttcatgatcaacgataaaaaagtgcgacttcagagcaagcagagtgcccaatatgtgacgggaattaaggtgaacaacaagttgaacgtcaatcggaaatatattcggcagcttaggagcatcctgcatgactgggagtccaatgggatcgacattgcttcaacccgctattatgccggtaaactccatcggtaccaaaatcgcctggatatgtatactagctttaaggcaagcgtgcatggcaagttagccttcttgcaacagattaaacaggaggaacctgtccttcagggcctgtacaagcgattcatcgccctgaaaaatacctatatgtga

SEQ ID NO: 8823 - RNA, 1002 nt, synthetic construct
  source 1..1002: mol_type = other RNA
atgaatacacataggattgaaaagttcatcgctgcaaaatctatgcggcagctagaactgtcacttctcgcatcgaggaatgagttgaaacagtgggttcagaatccagattatcggacctttgagatccctaaaaagaagggaggcacgagacagctgcatgcacctgctccaccgttgaaacgcatccagcagagtataaacgagctgttacaaatcctgtatgtacctactcaaaatgcttatggtttcatgctgaaacaggctggtgaaattaaccggaatactctccaaaacgcgaactgccacctgcagcgcaattttgtctggaacctcgatattcaaaacttctttccaagtatcagcaccaagcgagtgaaggccatttttatggaaggacccttttacatgacagatgaaatagcaagctacgtagccctgttatgctgttaccagaagcagatacctgcaggggccccctcttcacccatgctttcccacttcgcctgtcttcagatggacaatagcttacagaagtttatagcccaggcggcctttaagccgtaccagatttcctacacgcgttatgctgatgatctgactttcagcttggacctactcccatctgacgagattaaaaatggcattgagtccattatcctggagcacggattcgtgttgaataccagtaaaaacaggatccaacataaacaccaagggcagtgggtgacaggaatcaaagttaaccagaagcccaacctggacaggaagtatatcagaaagcttcgagcgattatccatcacgtcgaagctaaggggatcattgccgccactgcccgctacctgacactcgcagaggaacagatcaaacagaaggagatatccttcttcctgaactcagtgagagggaaaatcaactacgtcggcgctgtgagaggcaaggaggacgtggtttttaagaaactcatcaccaccttcaattctgccatcaacggcatttga

SEQ ID NO: 8824 - RNA, 1131 nt, synthetic construct
  source 1..1131: mol_type = other RNA
atgtacttacagtcgtctgaaaacgtagccgacacgaaccctgactttccaagcgagaatcctgaagaagagaaaaggaaatttgcatgtctgttcctcatcatcaagcagttcaagatctacatgaacaaaaactacgacaacctggaacaactggcaaacattaaaacacccgatgagctgcttaacctgttagaagtgagcccctctagtctgattgctatggtggagaatcctcagtatgagacattccacatccccaagaaggccgggggttatcggtgcattgatgcaccctctgaagatctgaaaagagttcagcagaagctggcaagtcacctctcttaccttttcattaacttccagaccaggagtgtcatgggattcgttccccattataagggcataaataatccagcgggtattgtggagaacgctaaaaggcatattggacagccgatagtgttgaacattgacgtggcggactttttcccttccataaaaatctccagcatcaagaaaatgttcatgcaaaagccttttagcttcaacgatgagctcgcccacctgctcgctttgcttacctgctataaaggcaagctgccacagggagccccgacctcacctatcctgtccaatttttttctcctacgagctgatctcaagatcgagcgcattatgaagaaacgggaactaaattacacaagatacgccgatgacatcaccctgtccgggttcctttttccacaagataagttacccgacatcgtgcaggaaatcttgacaccatttgggctgcgtttgaacgagaaaaagataaggtaccaaacttttgtgggcagacaggaagtgaccgggatcaaagttaatgtcaaactgaatctcgacagacggtatattcgccgtataagggctattctgcactgttgggatgttaaaggaatcgaacatgctgccactgtatttcataagcgcaagatcaataacgccctagagtttacttcaacgatacgcggcatgattgcacacgtgggcaatgtccggggtaaggaggacgtgatcttccttcgatttcacgagaagttcaatagcttgtcaattttcgaggagatgaaggtcgtcgccatgtga

SEQ ID NO: 8825 - RNA, 1653 nt, synthetic construct
  source 1..1653: mol_type = other RNA
atggtcgacaacaaacatggagcactgctcgatattgagtcgaaagaagatttcgcctactacctggagaggcccattaaagatctgacaatgctcgcttatgccaagaatgggatccggtacaagaccttcgagatcggcaagaagcgtagcggggaaaaaagaacaatcgaagcccctgttgggtatttaaaggcagtgcagaggcaactgttggagctgtttaacgaggcctacagaccaccacagtgtgtgcacggcttcgtttctagctgttctattgctagcaacgccatgtcacacgtgaaaaaaagcgcagtggtaaacctcgatttgcgggatttttttcccagcatcaccggagataggatccacggactgtttagaaaggaccccttctcattccctgaagatgtcgcgaatctgcttaccgagttagtttgctataagggcagcttaccgcagggggccccaacttctcctatcctttccaacatgatttgctaccggcttgacaagcagctagtgtcctatgctgctaaaaataagcttgtctataccagatacgcggacgacattacgttttccagtactagccgatccgcaataaacaagctcttcaatgagtctgagttgggcattaacagtgtatccccggaggtgcggaacattataggatccaaccgcttcgagatcaatgagacgaaaattcatatagcccggaaatccagccggcagcaagtcactgggatcatcgtcaacgagaaatgcaacttcccccgtaaggaatacagaagtctaagggtgctgtttaataactgggctctcgtaggctttgaatacgctggcgcagagtacgctaaacgcaatcacagttacagctcaaagctcttcaacgaagccggtctgatatccgaaacactcctgaagaagcacattcgcgggagactggagtactacacaatgattaccggtcctaataagaaagcctcacagccactggccaagctgtggaatatgtatcatgacgtgaccggggagaaggtgccaatctcaacccccgagcgaactgtctgccagactgagatctgttattctcgacaaaatgatcagggcgacccaattcctttatgtgaaaatggcacttccttcctgacagacaagggttatcttttcacctgcgcccattgtttgtgcgacatacatcacgaatacaagaaaatcggtgacgaaaggtgttcttttcctacactgaaggtgttgtatgagcccgaattgagcgatttcctgatcgacaagaccctggacgtagcagcaatcaaagcccccccattcatgaaaaacgaggcctttgccctgaccaacggcaattatttcccccaaataggtgaatcagttaaggcatacggcttcgcggggggagactccagtattaggtgcatcgaggctgctgtggctgagacgctgaaagccggcagagtgcgcgtggatcgcccttttatccacggcatgtcaggtggacccgttttcaatactcgcggagaagcaatcggactactcacaggaggctctgcccctgatgactattcgcacgatggggaatttgtcctttttagtgctatttctgaacagctcccgaatgcgtttaggtga

SEQ ID NO: 8826 - RNA, 1650 nt, synthetic construct
  source 1..1650: mol_type = other RNA
atgcgcacacgggctgacgttgctgccttcctcggcgtgactccgcagcagctgggatttctggctttcagtagcgtaccaaaatacaccgtgttcaatatcaacaagaaacgtcctggtgagaaacgagaaatcaaggcacccatcctggtattaaagagggtccagaggagactcgctgatgtgatcgcctccatctatgagtccaacaacccacccaattctgtgcatggttttaggttgaacagatcaatcgcgaccaatgccaagtgccatgtccaccgggaagctgttttgaacattgatctggagaacttttttcccagtattaacggtggacgcattagggggctcttcctacacgagccctttaatttccctgaagaggttgcggatacacttacaaatctatgctgtgacgccggtggccttccacaaggtgctcctagcagccccgtgctctccaattgtatatgcaaaaggatggacaagcgcctgctgagctttgcgcgagaaaacgacctggtctacacgcggtacgccgacgacattactttctctgcctttaacaagaggagactgcggcacgcttgtttgagtgatggcagcccgtcccttcagctgtcctccgagctgctcaagattatcgaggggaatgggttctctgtcaacaccactaaaacccacttatcaacaaggtcttcacggcaggaggtcaccggcgtaatcgtgaacgaaaagtgcaattttaagcggagcgattacagagagttgcgcgtgctattacataattggttggacgtcggctacaaacatgctggcaaagagtacattaagcacaaacctgaaatagcactggccattgtagatgacgacgacacgatatctgagagaaaactgcgctcgcatatccgtggacggctggctttttacactatgctcgccaaccagaaccctgggatttctaagcccctgcgtagactttggaccatgtatgcaggggctacgaaagagattgtgcccaccgtggacccagagagcgcaatctggcaaattgtgacatattacgattatgtcagctcgaaggatggctcagtgaaaaatttctccaaggtgggcactgtcttcaaagcggacggcgaatgcttgataacagccgcccactgtgttgccgacctggatgaggtgaatgtgtgctccgaggccgtgtgtgaaatcgcatatgggcctgtgcctcagttctgcgagctcgggaacgtcgactggaatccaaagagcgattatgccgttctccacgagatgcccgaaatgctgaacaacatcacaggactgacttgtgatgggacctatagggcacaggttggggaaaccgtgtgggcttacggctatagcgatgccaagcctcaactccggtgcattgaagcacgcgttagtgaagttcatagtgatggtcgattctaccgagtagaccgcccgttcatcgagggcatgtccggaggaccaattataaattcaagaggatcagtgataggcatcgcagtgcacggctctgccccaagagaatatgtctacgacggagagtttctttcaatcgcccacgtgaatcttggaactaactaccagaccaatgaaagttgttctgcatcctga

SEQ ID NO: 8827 - RNA, 1650 nt, synthetic construct
  source 1..1650: mol_type = other RNA
atggcatcccaggaaataagttttaccagcattgctacaaacgcacaactagccgagtactgtggggtgtcctgggacgagctcaagatgttagcatatgccaacagaatcaagcggtataccgaatggctggtaccaaaacggaacggagaagggttccgcagaatatccagcccaatggccaacctgcgacgggtgcagcgagcgatcgctaacggactctcagagttctattcgcctttgaagtgcgtctatgggtttgtttgtgagaggaacgtggccatgaatgcattgcagcacgctaggaagagaacagtactcaccctggacttgaaagatttcttcccgagcatcagcgctcccagagtcagggggctgttcatgaaggccatggatttcccccaggatgtggctgacaccctgacaaatttagtgtgttacgagggcagcttgccgcaaggggctcctacatctcccgttatcagcaacatgatttgctttaagatggacagggccctgcttaactttgccgccaattcaggctttacgtatactcgatatgcagacgatctcgtgttttcatctacaagtgcctatagcgctcgaaagatggtggatcaaggcaaaaatgtcgttgacggcattaaccggttcataatcgataccatcgagtccaatggcttcgagatcaatgagagaaaggtacatgtggcaaacagaggatccaggcagatcgtcaacggaatcattgtcaatcagaaatgcaacattcgaaggagccagtacagagaattccgcgcgttgttccatcggtggattcgcgaaggatgttcaagcgcagcggcggcctattttgggaataaaaagaaccactgctacaaggcaaaactgtgtgacggcgatgaactctgcgatgaaaagagtttcgtacgccacattcgcggtcggctagattacttctccatggttgtcggcgtgaatgggcacccaacggagcctatggctaagctctggacactgtttcatcaggccgcccatgagagagtgccatacctcacttttgagaaaagtgctgttcagttaagttacgtgtttgactctaaggagaagaatgacgcagttgccgctgaatcttctggtgtgatcgtccgtgacattctgctgacttgtgctcacggacttccagaagaatcaactgatgctaatggcgatgcggtccctatcgagattcgtactgcctttgatgagaggttctatatcaaggcctcttctttccggaaatgcagcggttttgacttcgccttcgtgctgctcgacgccaaactgggcaatatgggagtgcgctccatcaataccgcatacctgcctcaggccggcgaaaccatctacgcctctggctacgctggtgggaagatgccctcacattgcgtgcaagcctccgtcctgcccaatcggtacggaaacggtagtattgttgtggatcgtgcctttattaagggcatgtccggaggcccagtgtttaacacccgccacgaagtgataggtatagtacttaaagggtcagacgagtccagttactcgagggacggagagtttcttcctttcagcgctatcgcagacctggagcccttcgcattgcttaaaaaatga

SEQ ID NO: 8828 - RNA, 1677 nt, synthetic construct
  source 1..1677: mol_type = other RNA
atggctctcaatttcggaaaggaaacgttcagtgacaatgtcaatattacaaacagtttcctcgaaattcagactcccgaggatctagctgcacacattgaggaaaatgtcaaagttctgaaaaagtatgcctatcccggaaaacgcatcttttacagcatcctgatcatccccaagaaagatcactccccacgactaattgaggctccctgcaatgacctgaagagaattctgcggaagatcacagatcaactgacatatatctaccaacctcctgcctgcgtgcatggttttgtatgctccaagagcgtggctacgaacgcccactcacatgtcaataaatactttgtgagcagctttgacataaagaacttctttcctagcatttctgccaagagagtgcgcggactcttcaagaacatctttttttacgctaacgacaatttgatcgacctgttaaccaatctggtgaccttgcataaacacttgccccagggctacccaacctcacccattatctccaatatgatttgtctgcaaatggataagcagatcactaagtactgtaaggaaaagcatttgttctactctaggtacgccgacgacatcacaatctctgggaattctaagcggctcatctccaatattttcatcagcagcaaagcagaggatttaacgttgtgtccagatttcagtaatatcattgagtccaacggcttttccctcaactctcagaagacacacattagctttaagtcggaccggcagaccgtgacccagataatcgtcaacaaaaagtgcaacattcctcgagaggtctacagatcacttagggttctgttctataattggcagaaaaacggttggcaatatgcagcgaacgagtatgcaaaattcatatccgaccatcattacatttctttcagaaacgacgtgaattcgcctatgctcacagatgaacagctgtttaagaaacacattcgcgggaggcttgcctattacaccatgatcgacgcgcagaacagtattccgtccaccccacttaccaagctgtgggaaatgtacctgcagtgcactaaagagcacgttcctatgagcctcatagagaataacgtgttccagctagaaatcacttatgactacgaaatcgatggtaagagcaataatttcactagttcctctaccgggtttttaactgagaaaggccttttcacctgcgttcacggcttaaaggagctcaaccagaaatatgatatcccggagaacaccaacgtggaggtagcctgcctcaacaaatcactgtctcgtaaattcccaagccaaataccaatcaaggattttctgctttgtgaagaagatgacatagccttctatcggtataagaacattaaacccctgtcaaacctggtcatcaactttaattacctaccgcagataagtgaacacgtcactgggtatggcatccccggaggagagactgatgtgtaccctattgaagcaatagttgacagcttcaagcttgacaaatcatgtgtacgcatcacaccaacattctacaagggaatgtccggcggccctgtgctgaatgctcgtcaggaggtgattgggatcatactggagggctcttcatttgacgatctgagtaggtgtgggttgtttattaggctcctgtcctga

SEQ ID NO: 8829 - RNA, 1626 nt, synthetic construct
  source 1..1626: mol_type = other RNA
atgctcaatgggtttcagtccaaagccgacctggcagggttcctggacctgagtctggagaagctggatctgttcgtgaatcctacctctatgtatcagctctacagaagtaggctcgttccaaaacgctgtgggggctacagggagttgctcattccccggtctgacctgaaaaaagcccaaagaattattgcctgtgaattagagaagtcttatagtcctctcccatgtgtgcacggtttcgtgaaagggagaagcataaagaccaacgctgaaacacacgtgggcagtcaggtgatcgtcggcctggacataaaggattttttcccctcaatatctagcaagcgggtgtacggactcctgattagcaaacggctgggtttaactcccgaggtcgccttctgtatatcacgactggttgctacaccaaaggggcttcctcaaggggctccaagttcaccggtgatctcgaatatgatctgtctgggaatggacaaacagctcatgcatctcttccatgagtaccattatcagtacagccgatacgccgacgaccttactttttctttcagatcctccttctttttctatcgccacttctatagtggaggcaagttgcgtcttcccaacaagctacgaaatgctattacaaactttcacggaatcgccagcttcgagctaaatgaggacaaaagtttctacagcttttccttttcaagacagctggtgaccggcgtagtctgcaacaaaaagacgaatatcaaaagggagcagtaccgccgcttgcggtcaacactgcatcgcctctccgtgggagattgcaatggggcaatgggatgctactatggtaagtctgtcggcgaaatcaccgatgctgaaattaggatgtttgaaccatcactcagaggtagccttgactattataagtcgctgatcaaggacccttggacaagtggccccttaatgcgtttgggtagcctctacaacaacagcaagcccgaggatgccccagtcttccctgtagcgctgcaccaggattctattctttatctggagggagtcgactgtgagcaaaatccttttgaaggtctggggttctacttaaccggatacgggttggtgactgcatggcacgtcatatgcgacgcagtgagccgggacatggaatctggagagattaggatcttttcgagcaataagactcctctagccagattcatctactccaacgatctgcttcaggaaaacaaaagggatgcagcgatccttaaggatgtaccctccgaaatgattaagaacaccccgcagttatcccccaatattgatctgcctaccaagggcgagaaaattactgcctaccaacatcacttctccgaatccggattttcatttgagctgcacggcggcgaattgctacgcctcggggatcccaacgaggaaggcactctgtgctataccaactgctcatttatgcacggcatgagcggcggcccggtttttaacgggatcggccaggttatcggaatcgtgcattctgctacagagcagggcaagctgggttcctttcttccattgcgggattgcttcaggtctacggacgtttatgggaaatggatcatcttctga

SEQ ID NO: 8830 - RNA, 1626 nt, synthetic construct
  source 1..1626: mol_type = other RNA
atggtggacgagcttcaaaccaagaaggagctggctgacttcttaaatctctcccttgataagctggactactttgtctcagctgacagtttttatagtctgtaccggcaccgactagtcccgaaaaggaacggcgggtttagagagctcctgatacctaggagtgacctgaagcgggttcagcgaataattgctaagcagttggagaaacactacaagccattgccttgtgtccatggttttgtgcgaggtcgttctattagaacgaatgcagatattcatgtgggaagtcaggtcatcgtgggccttgacatcaaagacttctttccctctatttcctccaagcgcgtgtatggtctgttaaagtcgaaaaaactgggcctgtcttcagaagttgcgttctgcttaagtcgcctcattagcactccaaagggattgccacagggcgcccctagcagtcccattatctctaatatgatctgtcttggtatggataaacagctcatgcacctctcccgggagtatcattaccagtattcccggtatgctgatgaccttactttctccttcgaatcaagttattggttttaccgtcacttttattctgacagaaagcttcgcattcccaacaagattagggtggctatcaccgaattccacggcaacaagtccttcgagatcaatgaaaacaaatctttctacagctgcaactacagccgccaggtggtgaccggcgttgtatgcaacaagaagacaaacattaaacgggaacagtacagacgcctgaggtccactctgcacagactgagcataggagatgaggaaggagccatgggatgttactacggcaagtccagttccgacctgtctgaagaggaaaagggaacattccgagcctctctccgtgggtccctcgatttttacaagtcactgttaaagaacccgtggagctctggaccgcttatgagattgggcagcctgtacaatcagtccaaagtggaaggagattcagtatttcctatcgcgttgcaccaagactcaatcctgtacctggagggaattaacagcaaagacgagccctttgagggcctaggcttttatttgccctcgtatgggctgctgaccgcctggcatgtgatctctgatgccgtattcgacgatagggagaagcggaacattggcgtgaaaagcagtgccaaaatctctctggggattttctcattcggaaaatcaacagtacaaacgggtaggcacgatgcagcaatcttaaatgatgtgccaccagagatcatccagtccttccctagggtgagcgtctccacagatctccctagcaaaggtgacaaagtttttgcataccaactgcatcatagcgaaaacggctttcgcttcgacctgttggatggagaactgctcgagatcgggtcaccctcggaggaagggaccctctgttataccaattgtctattccagcatgggatgagcgggggccccgtctttaatgggatggggaaggttgtcggcatagttcacagcgccactgaggacggtaagtgcgggagcttcctaccactcagagattgcatcaattctactgaggtgtatggcatatggaaaacattctga

SEQ ID NO: 8831 - RNA, 1713 nt, synthetic construct
  source 1..1713: mol_type = other RNA
atgtgttgcttgcacatcatcttttgttatgtcagcatcaaatacgactcaacggaagagcccgccataaacttcaaggagaatctgatgctcaatgagcttcagagtaaaaccgatctggccggcttcctgggtctgtcaattgagaaactcgactttttcgttaattcctcatccatgtatgacctctacaggaataagctgatccctaaacgaaacggcggttatcgggagctcttaatacctcgtagtgacctgaagaaagtgcagagaatcatcgctaaggaacttgagaagagttacaatcccctgccctgcgtgcacgggttcgtcaagggacgctctatccagaccaatgctgagacacacattggatcccaggtgatagccggaatcgatatcaaagatttcttcccgtcaattagctcaaagagagtgtatggactactggtgagtaagaaactgggtcttacccctgaggtcgctttctgtattagccgcctggttgctactcccaaaggcttaccacaaggtgcaccctcttccccactgatttccaacatggtttgtctggggatggataagcagcttatgcacctgagccacgagtaccattaccaatacaagagatatgcagacgacttaacgttttccttcaagtcaagcttctatttttaccggcacttctgctccgaggagaaactcaggctgcctaacaaaatacggaatgccatcaccgacttccacgggaccgaaagctttgagatcaacgaagacaaatctttctacagctgttctttctcacggcagctcgtgactggcgttgtatgcaaccagaagaccaacataaaacgagagcagtacaggcgtctgcgctctactctgcatcgtctctcaaacagtgatatcgaaggagccatgggatgttattatggcaaatctatcgccaagctaacagatgccgagagggggattttccaggcagcgttgcgagggagcctgaacttttacaagtcccttattaagaacccctggacaagcggacctctcctcagactcggcagcctatacaataagacaaaacctgaggacacacctgtatttcctgtggctttgcagcaagattcgctgctgtacttagaaggcgaggatgataaagaaactccatttgaaggacttggcttttacctcactggctacggcctggtgacagcatggcatgtcatatgcgacgctgtgtctcatgatatggaacgcagggagattaaggtgtcctccagtgacaagaccccattggcaaaatttaagttcagcaagtccattgtgcaagacaataagcgggacgccgttattctgcgggaagtcccgcaggaaattctaaagaagatcccgaagcttcccgcggtcatggatttgccagtaaagggagataaaatcagtgcgtatcagcaacacttttctgagtctagatttagcctggaattgcattctggggacttgctgcgcgtgggagatccatcggaagaggggactctttgctatacaaattgctctttccagcatgggatgagcggtgggcccgtgtttaacgacttgggccaagtaattggcattgtccacacggccaccgaacagggcaaactggggagtttcctcccactgagggattgcatcagatcctcggacgtgtatggtgagtggcaggttttttga

SEQ ID NO: 8832 - RNA, 1713 nt, synthetic construct
  source 1..1713: mol_type = other RNA
atgaagtttaaaaaaatcacagccaacagacggaactttatcaagtttatttcgccgagcgacaatgaagtgtatgacttcgacacggtgaaaaagcttagccagaacagacacaactactacaaaaaggtgaagattcccaaaaagaatggcggattccgagaaattctgattgtcaacggcgaaatcaaacggatacaggagaaaattcttgagttgctgcaatctgtgtacaacgattcatctactccaaaatgcgtaaacggctttgtcaaggggagatctatatatgataatgccgcaatacacaccaacaagaagcacgtcatcaacttcgatatcaaagacttcttcaaaagtgtgacattggagaaaatcaatacatacctgtcctataagcctataagtcttccaaggaaccaatatccaaacgtattaatctcctacttgtgcacgtatgatcgctatttgccccaaggggcccccacctcccctatactgtccaacatcgtgctgaagaactttgattacgccatgatcatgctcgccaagaaacataaactcgtgtacagccgctatgctgacgatctgacatttagtggtaatgaagacattgacttcttcagtttcaagaatacagttgctcaaaagcttaacaagcatggcttcgagatgaatatgaataaatcccgcatccagtacagctggcagcgccagattgtgactggactggtggtgaataacaaggtgaacattaagtcagagttcgttgctaccactaagtctatgatttacaactgggagaattatgggatcgatattgcgaaggaaaagtttaaccagcacaggaagcattctgatgggattcattttgagaatgtgctcagaggacgtattgacttcatcggatcaatacttaatcgatcaggggaatataagaaccctgtctttgcgcagctaaatctgaagtattggatcctgctgaattgtatcgactatagctttgtctcggagaagtctgtccgagacaaactctttaatcggaattacgaatctgagaaaatcgcatacgactctagcctgtatgagtcccaggaatatcggtttatcagctattgtttcaaggtatacactcagatggagataatttacaagtactacttctacctcaggtttaatggcgatttcatgaaaataggaatgttcatgtacgataactccaagaacattcgtaagcaatttaagcgcatgtttagtgagtgcgaagacgaggacaagaaaattaaattggctaaacagcgaatcagcggcatcaagaacctcaaagaaatttccaccttcaatatcgaaagcctgttcatggatcagttatacaggaaaaggaatagatcactgcccaaattctttaacttcatacgggagattcgcaattatcatgcccacgcaggtgaaaaaatcgttaagcagacattcgaagaggtgcagtcagacgtcaagtccatcatcgagagcaaaaatctgtcagaggtgactctcgaaagtaaaaccttcaccggtgttagccacgaggaactgcggaagattaatcactaccagttttacttatggttccagtccagtccttttgacgatgttagggagattctaaaagagctagcatttgaggtaaagctcatcgaaaacagaatcaaaaagaacgcccacaatacctga

SEQ ID NO: 8833 - RNA, 1032 nt, synthetic construct
  source 1..1032: mol_type = other RNA
atgatcaccgagaaccacattcaggctctcaaagcttcaaccgatgcggacagctttgtccaagctatgatgccaggcgttgattatctgatagatagcaagaggtccaaactcgagcattcggaaatcgtcaaggtggtgaagaacttcgagttattcactagcagcgcatccatacgccgctataggaccttcgagatcccaaagaaatcaggaggttcacggaagatcgaagcgccggtcttgccccttaagacccttcagcgattaatcctgctatttctggagtccgtgtatgacgccccagcccaggtgcatggctttgtaaaggaccggtccatcataacaaatgcaatgtcacatagcaacaaagcccacgtgctcaatatcgacattgaacagttcttcaattccgttagacagactagagtgagagcacttttcaataagcatctgggcttttcgcagtatagttctcttatgctgtccaaactcatgtgtcacagagggtgcttgcctatgggcgcccctacaagccctctggtcacaaatctgatttttcaaagggcagacaagcgcattttcgccgctagtaagaagatgaacgtgacatacactagatacgcagatgacttgtctttctcttgtgattctgttgagagtctgcaccgtaccaagcgactgatcgctgtaatcattcggcaggaaggtttcaaggtcaaccccaagaaaacgcggctcttgcacagggccgattgccagtcagtgacggggttagttgtgaatgataaagtgaacgtgctgcgcacctaccggaggactactcgagctatcaatcacaggctggagatcagcattaaagagcacagcggggacaccaatatggccctcattgccgcttctgaataccatgccatgaaaacaggccaaaacgacgcccgtccccctataagtcacctgaactttattaaaggacgccaggcatttgagtacggagtactaaaaagttctcaatcccccgaagaatcctga

SEQ ID NO: 8834 - RNA, 2367 nt, synthetic construct
  source 1..2367: mol_type = other RNA
atgaagtccctcctcaccccctgctccaagaaggatactccgcctgaagatttttccagtcagctgcaacgctggctgatcttccgcccggagttcgacattaaagtgttgcaaaagcagaactgttggccaatcacagggcaacattacaagtcctttaatgttcaaaagcggaacggaagcactagacagctggtgaccgtggataagaaattgaaaagcgttcagaggaacttgcttcactatttcgagcagtactacgatgtgagtaaacatgcatacggattcgtcggcgagacagctaacttcaaggtgaacaagaaaaacctgcggactcggggcgtgataacgaatgccctggcccacaccaacaagaaagtcgtgatttctctagacctggagaacttttttccaagtattacctttccccgagtcatgggcttactgaagagcaagccattcaacttctcaaacaaagaggctgccatcttagcatctttagtttgcctccctaaagccatcgatgataagcgtggcttgccacaaggtgccccaacgagccctattatcagtaacctaatttgcaagaagcttgattaccaggttggcaaaatggcccagaagtatgatttgatctataccagatacgcagacgacctcactataagtacaaataacctcaagaggatcaatgcaaataagatcatctcactggtaagggattgtgtggagcggaatgggtttagaattaataaggaaaagaccaaggtgatgtaccgtaatcagagacagatggtgacggggatcgtcgtaaatgaaggtctgaatcttcccaaaaagaacgtggacgcgctgaaggctaccctgcacaacctggaacatgtttacaaaaacattgacgaggcagttgatggatccaacaaaaataactacgattcattcacccctctcgtgtactgtggtgtcttctacaaaggcaggtatattcgaaccatttcacgcggtcagaaatctactaaacccacatctgataaggaattcaactatatctactccagacacatattggggcgagtcctatggtatggtcaggtggtcaccactggaatcaataccccctatgatttgtccaatagaaagcatatttcccccaagcagtacagtcgcattgttaagtttgaggaaatgcttagctccctatatcggatcagcatcaaattcaactggcccattgagcatattatcttccgactgtcgaataaactgagccacctgcagtctatcgtgaaaaccaatccggagctgtccttagagagtaccgaacctaataaagacgaaattgaactaaagcaccgctttagcaatcttaaaaacactaaagaggaccgcaaacagttttttgacgactctccttcgacactcaagcgggctctcattgtggagaacaggtcccacagcctcttttcatttaaaagcatcaaaaagcacgtcgaggacggctggtatataccaaccgtacagcaggaggtgttcaaggagctcgacaccggacaactctctgacctttttcatagatctgccaatgctcaaggacacaacgtgcttaatttgattctggagatcgtcaaggttgtcaagccacgtagcaggtacctgtctgaagaagtgaaggacaaaatagtgatggtacataaggaactgttgaaactgatccggtctgaaggggagggcgtgtgtatcgaatatagcaaagaatcaacatcaacaaagcttgctattcaggctatcaacgacctgaaactgagcactcgcttgtacgaggacgatacagacaatttttacaacaggatagtcctggatgcggtgaagcagagtggcactgaacatctggtgaatatcgatagacaaggtatggagactcggctggtgaccgatataaaggcatggagagactcaatcgtgcatattctgttctctataaagcagcacgccgataaatccgaagtcggaatcggcagtcctcagcctaagccatatacaataaaattcagggaggaaaaccccattacgaatatccctcgggccgtagagatttaccgactgaatgttgacctccccttcaacaaaaagctgaatattgcgtccaacatagagtatggactgatcgataaatggcttacggggagggacttattacttgccattaaacgctttatgcccatcggggacatcttcactcacgggaactatctcgactgcgacaactttacagtaaatctcacagagcactcattcaagaaggagaataacattacacacaaaagctatggcaagctgttcatctcgctccaggagataaacaattga

SEQ ID NO: 8835 - RNA, 2361 nt, synthetic construct
  source 1..2361: mol_type = other RNA
atgcggaatctgctgaccccactatctaaaaagacatccccgcaggaagacttcttcagtctcctacagctttggctgacttcccgacccgaattcgacatcaaagtattacagaaacagaactgctggccgatcacagagcagcattataagctctttaccgtcgagaaaagaaacggaaaaacaaggactttggttacagtggacaaacaactgaaatctgttcagcgaaacctgctacagtatttcgagaagaagtacgaagtctcacaatacgcctacgggtttgttgggggaacatctaatttccaagctaacacaaaacacctgaggaccaggggcgttgtgactaatgctctggtgcacaccaacaagaagctggtcatatctttagatctggaggacttttttccaagcattaccttcccacgcgtgatgggactactcaaaagcaaaccctttgacttcagcaacaaacagagcgctatactcgctagcctgatctgcctcccaaaggggatcgatgataaaagaggtcttccccaaggcgcacccacttccccaattattagcaaccttatctgcaagaaactggactaccagctgggcaagatggccaagaagtacgacctgagttactcacggtatgctgatgaccttacgatctcgactaacaatctgaagaagataaacgcgaacaaggtaatatctattgttaaatcccacgtggagagaaatggcttccgtattaattccgagaagacgaaggtaatgtattgtaatcagaggcagatggtgacagggatactggtgaatgaaggtttaaatctgcccaagaagcaggtggactcgttaaaggctactctccataaccttgagaatgtgtacaagaacgtgaacgagtccgtgaagggagcaaacaagaacaaatatgattctttctcccctgtgggattttataagggcggctaccgcggtaggtatatccggtcaattggaaagggcaagaaaagtaacaagcctacctccgataaagagtttaactacatctactctaggcatatcctgggccgggtcctgtggtacggtcaagtggtgactacaggtattaacaccccttacgacttgagtaaacggaagtacattagtcccaagcaatatagcagaattatcaagtttgaggagatgctgtcaagcttgtataggatatcgatcaagttcaattggtcaatggaacacatcatatttcgcttctctaatagactctctcatctgcagagctccgttaaaatgaacccggaactgcttattgaacccattgagtttaacacagaagaagtcgagcttaacaaccgattctccaagttgaaaaaaaataacgaggagtgcaaggtgttttttgacaattgtccagcctctctccagcgcgcactaattgtcgaaaataggagccggtcacggttcttatacgggtccatagagaagtatatcgaaagtggatggtacatccctgccatgcaacaggaggtgtttaaagatctcgacaacggccagctgtcagatctttttcacaagtcttcgaatgaaaaagggcacaatgtccaccgtctactgctggacatggtcaagttggtcaaaccccgcatcagatatcttagcgaggaaatgaaggacaaaatcctgattgtccacaaggagttactgaagctgatgcgctcagagggcgagtccgtgtgtattgagttcgggaaggatagcgaaaagtctaagctcgcactgcaggccatatccgatctcaagctctcaactagactgtatgaggacgacaccgacaatttctataatagaattgtgctcgatgccgttaaacaaagtggtacagagaacttggtaaatattgatcgattgggaatggaggcccgtatcgtcacagacatcaaagcatggcgggacagcatcgttcatgtattgatctccattaaacagcactccgaaaaaaccgaattgaatttggggagcagtcagcagaaaccatatacgatcaagctgcgagatgaaaatcccataactcatgaacctcgcgccattgaaatttacaggctgaatgtgagtctgcctttcaaaaaagagctgaacatcaataccgagagcggcctcattagtaaatggctgacgggcagagacttgctccttgcgaccaaaaagttcatgcctatcggagatgtgttttcacatggcaacttcattgattgtgaagattttgtagtgaacctcaccacccacaattacatcaagaaggagaatatcatcagcgacgattacgggaaacttttcatctctctcgaggaaatcaagaactga

SEQ ID NO: 8836 - RNA, 2361 nt, synthetic construct
  source 1..2361: mol_type = other RNA
atgaaatcacttcagacccccctcagcaaaaaggccgtgtccagcactgatctgtcaagcttgtttcagaggcttttaactactcggcctgaatttgacacaaagagcctgcgggaacagaattgctggcccatcaccggccgtcactataaagagttcaccgtgcagaaaaggaatgggtccaccaggagactcgtcaccgtagataaacgcctcaaatctattcaacgcaatctgcagcagtacctagaacagaacttcgaggtaagtcagtacgcttatggttttattggggaagccacccagtctcataaaggtagacaggatttacgagcccggggagtggtgtcgaacgccttagcacataccaataaaaaggtggtgattagcatcgacctcgaggactttttcccgtcaattacatttcctcgcgttctcggattactcaaaagtcagccctacagcttcagtaacaaacaggccgccgtcctcgcatccctgatatgcctccctaaatccattgatgataaacgagggcttccacagggagctcccaccagcccacttatatcaaacctcatctgcaaaaagttggactaccaagtaggactgcttgccaaaaagtatgacctagtgtacactcggtatgcagatgatctgacaatcagtaccaataatgtcaacaaggtgccgcccatcaagatcctctccttagtgaaatcgtgtattgaaagaaacggtttcaaggtgaatagcaaaaagacaaaggtgatgtaccccaatcagcgacaaatggtgacggggctcgtagtcaacgaggggcttaatttaccaaagaagcaggttagttcactgaaagccacactgcataatttggagttcaagtataagaacgtcgacgatgcggtaaaggattccaataagaacaactacgattcctttaaccccgtcggctactattctggactgcatagagggcggtatattaagtctgtggcaaaaggacgtaagtccacaaaacctacaagtgagaaagagttcaactacatctactcgagacacatccttggcagggtgttgtggtatggccaagtcgttactaccggcatcaataccccttatgacctgtccaaacggcagcacatttctccaaaacagtacgttcgaatcatcaagtttgaagagatgctgagtagtctgtaccgcatctctatcaaatacgactggtctattgagcacatcatcctgaggttttccaacaagctgtcacacctaaagtcaagcctccgtctgatgcccaattacagcctcaacaccatcgagcctccacaggaagaagttgaattgaaagagcgtctgctcaacttgaagaatactcaggaggaaaggaagaaattcttcgataacgctcccacttctcttcagaggacacttacagtcgacaacaagtccagaaaggagataagttttgtgagcattaagaatcgcatcgacaatgggtggtataagccagatttccaacaagagctgttcaaggagcttgaccatggccggctgtcggatctcttccacagaagctcaaacgacaagggccacagcgtgcaggagctgctagtcgaaatcgtgaacgtcgtacgcccacgccttcggtatttatccaaagagatgcgcgagaggatcgtcaccgtgcaccgcgaattgctgaaactaatgttgtctgagggagagggggcctatatagagtatggcaaggacagctcagctaagcctattatccaggctatttcttctctcaaactggcaaccaggctgtatgaggatgataccgacaatttctacaacaagattgttctggacgccgttaagcagtctggtacggagaactatataaatatcgatagaagcgacatggagctaaggttggttacggacatcaaggcatggcgagattctctcgtgcacattctgttcagtataaagcaacatctggacaagacagagctggacatcgactcactgagtcataaaccctacactattgtgttcagagatgaaaatccaatttcaagcgaacctcgggctgtcgaaatataccggtccaatgaatctctgccgtataagaaaaagctggaaattcctctgaacagcgattccggctttctggataaatgggtgacgggcagagatttgctgctggcgattgagaagtttatgagcgtgggcgacgtgtttgtgcatggaaattttaaagactgtgacaagtacaaggtcaacctgactgaacactcctacataaaggaagacaatgctacttccaaggtttacggtaagctgttctttacattgcaagagaacaaatga

SEQ ID NO: 8837 - RNA, 2361 nt, synthetic construct
  source 1..2361: mol_type = other RNA
atgaagtctctgcaaaccccccctccctccaagaacattagccatgtggatttatccagtttgtttcagaggtggctgataagtcgtcccgaatttgataccaaagcactgcagcaacaaaactgctggcccataactggccgccattacaaagagtttgttgtacagaaaaggaatgggaatacccgccggttagttaccgtagacaaaaaactcaagtccattcagcagaatctgctgcagtacttcgagaagaagtacgaggtatctcagtacgcatacggtttcgtgggcgaagtccctcgcgtgcagacaaataagcagaatgtgcggaccagaggagtcgtttctaacgccctcgcccacgccaataagaaagtagtcattagtttggatctcgaggatttcttccccagtatcacttttcctagggtgatcgggcttcttaaaagccaaccctatggattctctaataagcaaagtgtggtactcgcctcttgtctgtgcctccctaaatcaatcgacgagaatagaggactacctcagggcagccccacaagcccgattattagcaacctaatatgtaagaagctcgactaccaggtgggccgactcgctaagaaatacgattttgtctacactcgttatgcagacgaccttaccattagcaccaataacattaacaagatctctgctaaggaaatcatctcaatcattaagtcatgtatcgaaaggaatggctttaggttaaacaaggaaaagacaaagatcatgtacagaaaccagagacagatggtgaccggaatcatagtcaatgagggtctaaatctcccaaaaaagcaagtcgacgctcttaaagccaccttacacaatttggagtacaaatataagagcgtggacgaggcggtgaaagggagtaacaagcataactacgatagctttaatccagtgggatactatcgagggctgaataaaggccggtatatcaaaagcattagcaagggtcgcaaatctacgaagccgacttccgacaaggaattcaataagatttattcccgacacatcctaggacgtgtgctgtggtatgggcaggtcgttacaacggggattaacacaccctatgacctgtcaaaccgtaaacacatttcgcctaagcagtactctagaataatcaagttcgaggaaatgctctcctcactgtacaaaatatcttccaagttccactggaagatggaacacatcattcatagattctctaataagctcagccatctgaaaagctcgctgcgcttgatacccgatttctccctgtcatccctcgagctgaacagtgaggatatggacctgaagactaggctccctacactgaagtctactttagaagagaggaaggacttcttcgatctgtgcccaaaaagcttgcaaaggacacttgtcattgacaacaagtcccgaaagaaattcaagatctcctcccttgaaaacagaatcaacaatgggtggtataagccagaagtgcagaaggagctgtttaaggagctggacaacgggcggctgagcgatctgtttcatagatcatccaacgaacagggacactcagtgcaggatttgttgtttgaaatcattgactcggtccgcccccgactgaggtatctgagcgaggaggttaaagagaaaatcgtggtagttcatcgcgaactgcttaaactcatgttgctggaaggcgagaattcccacattgagtatggtaaagacagttcaacaaaaccagctattcaggcaatcaatgatctgaagctgagtaccagactgtacgaggacgacactgataatgtgtacaataaaatcgtgcaggctgctgtcaaacaaagcggcactgagaatctaattaacattgatcggtccgacatggaaacccggcttgtgacggatatcaaggcctggcgggacagtctcgttcacattttgtttagcattgaacagcacgccgacaaaaccgagcttgatagcgccgccctgcaccagaagccgtatacagttgtgttcagagacgagaaccctattacccaagagccacgcgcaatcgaaatataccggttgaacaaagacctcccatttaagaaaaacctgaacatcgcgcctaattcatcctctggcttcatcgataggtggcttacaggccgggatatcctcttagcgacagagaagttcataagtatcggtgacgtgtttgtgcacggaaacttccgcgattgcgagtgttatacggtcaacctaactgaacattcttacatcaaggaacagaaaccaaactcctcaaactatggcaaactgtttatctctctgcaggagataaaatga

SEQ ID NO: 8838 - RNA, 2406 nt, synthetic construct
  source 1..2406: mol_type = other RNA
atgaagaacctcagcataccttcccccaagataaaccctacacaggactcattcctgtccatgttttttaggcagtttgatagtaatcccgaattcgacaccactgttctgaagaagcagaaatgctggccaatcaccactgagcactatcgaccctttacaatcaggaaacgtaatgggaccctgagagaactcgtcacagtcgacaagaacctgaagaaaatccagtccaacctgttgatatacttctctaagaactacgaggtcagcaaatacgcccacggctttgtggcaaaagagattgaaaatcagtttcccaacaacaaagaagaatatttggtggggggcagactgagggcgaaaggagttatcaccaatgctctcagccatactaacaaaaaagtggtgatctcactggacttaaaagacttctttccctcaatcacttttccgcgtgtaatgggccttctaaaatccaagtcattcgactatagcaacaaacaggctgctattctggccacactcacctgtctgccgtcatccgtagacacgaagcggggtttgccacaaggcgcgccaacctcccctatcattagcaacctcatctgcaaaaagctcgattatcagctgggaaaaatagccagtaagtatgatctcacatatagtcggtacgcggacgaccttacctttagcaccaataatctgaaacggatttccgccaataagattatctcccgcgtcacagagtgcgtgaagcgaaacggcttcgtgattaacaatccgaagacgaaaataatgtacaacaaccaacgccagatggtcactggtattatagtgaatgacggactcaatttacccaaaaaggaggtggatgctattcgcgcaactatccacaacctggagaataaatataaatccgtggatgacgctgtaaaagggtttggaaagctaaagaacaagaatccttacgatagcttcgtcccactggggtattacacggggggctataaaggaaggtacattaggaatgcccgcaagggcaagaaagcaaataagccaacaaccaataaggagttcgactcgatatatgctcttcacattttaggacgtatcctttggtatggccaggtggtgacaactggagtgtctactccatacgacctctcaaagcgaaagaatattagccctaaacagtattcccggattaacaaatacgaggagatactggcctctttttatagagtttctatgcgcttcaactggcctgtggagcatatcatcttgcgactggccaataatctgcctcatcttcagagtctggtgaagatgagtccacagttcctgctagagccaatctttttaaatagcgaagagacataccttaagaattcgatcagcaagctcaagaaagagaaatctgactacatcaagtttttcgagtctgccccagagagtcttcaacgagtcttagtggtagagaattgttctcatgacaacttcatcttcaacaccattaaaaagtgtgtggaaaaaggttgggaggttcccagcattcagcaggagctgtttaaagacctgaacaccggtgatttgtcagatctgttccacaagagttacgacagtaccggccattccgtgaaaaagcttattatcgacctggttagagtcgttaaacctagactcagatacctgagtagttccatccagaataagatcatcctggtacacaaggaactgctcgatttgatgcggtctgaaggcgaggacgtgcggatagagtatgggaacgaatccacaaagaccaagcaagctttgcaagccattagagatcttaggcttgccgttcgcctgcacgacgatgacacctataacttttacaacaaggttgtgctagaagccgtcaatcggagcggcacgtctgatctcgtgaatattgatagggatgatatggagtgtagaatggtgtcagacatcaacgcttggagagatagcctgactaaagtgttgatgtctatcaaacagcacgcagatacaacggaaaaagagctatcgccctcacagcataagccctacactatcaaattcaaagatgagaaccccatcaatggtgagtctcggagggtagaaatttaccgcctggaagtcaccctgcctttcaaggagaagctcgaaatcgataccgattttaacgaaggaatcatttctaagtggaaagtggggggagattttaactcagcaattaagcgctttctcgcaattggggacatcttcgttcatgggaacttcatagactgcgaaaattgcacagtcaacttcactgagcacagctacaagttagaaaagaatatcgtcaggaagaaccacggcaagttgttcatttccttccaagaaataaagagcaagtga

SEQ ID NO: 8839 - RNA, 2388 nt, synthetic construct
  source 1..2388: mol_type = other RNA
atgacgaccaagttttctcacccacagaagagaaacttcaattctttcattaggctcaacttcttctcaactaacgcccctgagttctcaactaccgaactaaaaaagaataagtgttggccgattacagaaaaacactacaagagtttcacgatcactaaacgaaataaaacagagcgcgagctggtgactgtggacaagaacctgaaggttatccagagcaatttatacgacttcttcaaacagaagtacaacatcagcaaatacgcccatgggttcgtagctaaagatcctttaatcttgtctctcctgaaagagcaagataagccactgcgcagtaagggcgtgataactaatgcactgtcacacacaaataagaaagtggtgattagtcttgacctgaaggatttttttcccagcatcactctgcctagagtgatcggccttttaaagacgcagccttataacttcagtaacaagcaggcggcgatcctggcatcgcttatttgcctccccaaaaacatcgacaaaaaacaaggtcttcctcagggtgcccccacatccccgatcatcagcaatttaatatgcaagaaactggactatcagctcggcctgatttctaagaagtacgatatcacgtataccaggtacgccgatgaccttaccttttcaacaaataatctgaagaggatatccgcaaccagaatagttgagaaggtcgctgagtgtgtgaaacggaacgggttcaagattaacgacagtaaaaccaagattatgttctccaaccaaaagcagatggttaccggtatcctggttaatgaaggcctgaacctgcccaagaaggacgttgacgctctccgcgccaccctctataacctggacaaagtgtatacttctactgacgatgcagtaaaggggttctggaagttgaaaggcaagaacccttacgacacctttaccccagttgggttttacctaggtgggtttaaaggaaggtacataaaatctccctcaaaaggcattaaaagcactaagcccacaatcgagaaagagttcgaaaaaatatacgcccagcaccttttaggccggatcacctggtatggacaggtggtgacaacagcaattaacaaaccttatgacttggtgaagaaacagcacataagcccaaagcagttttcgcggattaagaaatacgaagagatgctcgcaaccttctatcgaatctccatcaagcgaaagtggccaattgaacacattgtgctgaggagagcctacaatctcccacacctccagtctctgatgaagatgaatcccatttatcttctagatgcaactttcctcgatgagaataaggaaatcgagcagttgaaaaacaaggtgtctgagctcaaaaccgacaaggaaaaatataccgaattctttcgttccgctcccaggagcctgcagcgcgtactcagacatgagaaccggagccacaacaatttttctctggagagcattaagaagttcaccaattttgggtggcaggatcccattaagcagaaaaaagtctttaatgccatcgacaacggcgagctgagtgatatctttcatcaatcaatcaacagagatggggataatatcaaggagactatcatcaagttcgtcacagtggttggaccacagctaatttacttgtccaaggacgtgaagaataagctcatcaatgtccataaggaattgctggccctgttaattagtgaaggagagtccttcaacatagatttttacaaagagaacccaaagacagagcaagccttgcaggccgtgcgcgacctgaaatcagctattcggctttatgaaggcaactccgaaaacttttacactaagattgtactggaagctcttaaaataaccgagactatcgatatggtcgctattgacaagagagacatggcccctcgtatggtgacagacattaatgcttggaggaatgctctgattaaagtgttgatgtccataaagcaacataccgacgaaacagaaaaacacagcaacgcccagaaacaaaaacccttcaccataatgtttcgcgagcacgatgacgatgaaaacatcacaacggcgatcgagatctatcggctgaattccgagctcccgttcaaaaaggagctaaaaatagatactgaggtcaagaatggcaatgtaaaaaaatggaagacgggaggagatcttaagtccgcggtcagcaactttctgagcatcggagacatttttatccatggtaagttcaacgattgcaaggatatcacctttaatctgacagagcatgtctataaagtcaataaggagatcaaggaaaacgaatacgggaaattgtttattacactcgaagagctgaataactga

SEQ ID NO: 8840 - RNA, 2397 nt, synthetic construct
  source 1..2397: mol_type = other RNA
atgaacaagacatctatctcaagcccaaaggcaaagacggtggacctaaaatcaattttcatggccttcgagaaatggagatctaatagacctgagttcgacaccgccgctctgcgcaaaaggaaatgctggcctgttaccgctaagcattataagaaattcaccctcaagaaacgcaatggaagcatgagacaactcgtagtggtcgacaaaaatttgaaggagattcagagctctctggccatccatttcagccaaaactataaagcaagtgagtacgcatacggattcgtggccaaggagagtgagcttacggccgccaagacccagccagagctttctctcgataaactaaggccaaaaggtgtcatcaccaacgctctcgctcataccaataaaaagctggtcatatcgatggatctgaaggagtttttcccaaccataactttccctcgcgtgatgggattgttgaaaagcgaaccctataaatttagcaataaggaagcgtctatcttggcctccatgatctgtctgccaaaggaaattgatgacaagcggggccttcctcaaggggcgcctacatcccccattatatccaacctgctgtgtaagaaacttgactttcagttaggccgcatagcccagaagtacgatttgaattacactcgttacgcagacgatctgacattctccactaataacctgaaacggatttccgctaacaagatcattcatgaagcgacgaaatgtgtggagcgtaacggctttcacgtgaatgtcgacaagactaaagttatgtacagcaatcagagacagatggttacaggaattctggtgaacgaaggcctaaatctgcctaagaaacaggtggatgcgattcgggccacactccataatctggaaaagaagtataagaccgttgatgagagcattacatctttctggaagattggcaaaaagaactcctacgattccttcgtcccactgggctactacgccgggggatacaaggggaggtttatcaaatccgcctctaaaggttataagggaaataagccaactaccgaaagggagtttaactacatttactcaatgcacttactggggcggatcctttggtacgggcaggttgtcacaacatcgatcaatgagccctatgaccttaagaagagaaaattcatttcccctaaacagcactcacgcataatcaagtttgaagaaatgctcgtgagctattaccgcatctccattaaatacaagtggccggtggagcatataattctgcgcctcgctaacaaattgccccacctgcagtcattaatcaagatgaaccccggctttctgctggactcattactgctgtctgtggaggagcacgagcttatagaacggtttcgaaagttagggcgagataaggaagagtataccaggtttttcaagagctccccccctgatctgcagagggtgctacgggtcgcaaatagatcccataacaatttctcacactcaactatcaaagagtgcgtcgagaatgggtggcaatttcccaacaagcagcaattcctttttaacgagctgaacactggcaacttgagtgacctgtttcacaaatctctagacaagaagggacacaacgtggagaagctgctctccgatctcgtccttgtttgcagaccccggctgcgatatctgagccccaacattaagagcaaaatagtggctgtgcacagggaactgttggatctcatccgaaccgagggtggagatgtgtttatcgatctcgagaacgaaactaaaaaaaccgaactggcactccaagctatcagggaccttaaaagtgaaatccgtctgtatgacggtgattctgacaacttctaccagaaaattgtgcgagtagcactgaaccggagtggcgactctaacatctttgccatcgacatggatggcatggcaagtcgcatggtaacagacattaaagcttggcaggatgccctcacaaaggttctcatcagtattgtacagcacacgaagtcacttgacgataaggcccagggtcaggccctctatactattaagttcagggatcgtaatcccatcaattgcaagccgagagctatcgaaatctaccggctcaattatgaactgccattcaagcagaaactggacatcgacgccaatagcaattgtgggcaggtgatgaagtggctaaccggaggtgacctgaccctcgcaattaagagctttttaagtgttggcgacatcttcgtgcatgggaaatttttggattgcgacgatgtaactgtcaacttgacggagcaccagtatatcagagaaaaacacgaaccgatagacaaactgggcaagttattcatcacattgcaagagatatcggagtga

SEQ ID NO: 8841 - RNA, 1239 nt, synthetic construct
  source 1..1239: mol_type = other RNA
atgaacaatgccagtatcagctctcataagccaagcaatagggacctggattcaattttcatggcgttcgaaaagtggctcaagaataggcccgaattcgacacggccatcttgcgaaagcgtaaatgctggccaatcaccgccaagcactacaagaaattcaccataaagaaacggaatgggtccaatcgtgaactcgttgtggtggacaagaaccttaaagagctgcagtccaatctggcagcctactttgcacagaactatgaggttagcgactatgcctacggctttgtaccgaaagagcctgagcggagaattggcggaaaggaacagtccgagcttctggtggagaagttaaggcccaaaggtgtaataacaaacgcactgtctcatactaacaagaaactcgtgattagcatggatctaaaggatttttttcccactataacgtttcctagggtgatgggtctgctgaaaagccaaccctacaacttcacaaacaagcaggcttcaatccttgcttccatggtgtgtctcccaaaagatgtggacgataagagaggactccctcaaggcgctccaacctcgccgatgatcagtaacctgatctgtaaaaaactggacttccagttggggaaaatggctaagaagtatgacgtgtcttacactagatatgcagacgatctgacctttagtaccaataatctgaaacgcgtgagtgcgaacaaaattgttcacgaagccaccaagtgcgtggagagaaatggatttcgggtcaatgtagataagacaaaggtcatgtactcaaaccagcgccagatggtgactggtatcctggtcaacgaggggctcaacctgcctaaaaagcacgtagactcgattcgagccacccttaataacctggaacacaaatataagtctgtcgatgaagccgttgtcggcttctggaaaattgggaagaagaattcctatgactcattcgttccactcgggtattatatcggcggctacaaggggaggtacataaaggccgtgaacaaaggctttaagggaaacaagcccacaagcgataaagaattcaataaagtctacgcactacaccttttgggccgcatcttatggtacggacaggtcgtgacaacttctatcggagagccttacgctttgacaaaacggaaatatatttctcccaagcaacattcccgcatcattaagttcgaggagatgttagctagctga

SEQ ID NO: 8842 - RNA, 2424 nt, synthetic construct
  source 1..2424: mol_type = other RNA
atggctcagctgctgaacatgaacaatatccaaaaggatcctagtcaggataagaacacaactgtggactcttttctggagatgtttgaacgatggcttctgacacgcccagagtttgatatagccgccctgggtaaacgtaagtgttggccaattacatctgggcattatcacaggttttccatcaagaagcgcaacgggtccaaaagagagctggttagcgtggacaagaaccttaaggccttacaagccaacctcgccacttactttgaagaaaccttcgagatctctaagtacgcacacgcttttgtgccaaaggaaagtgcagataaggctacctttaagcagcaggaaggactgctcgtgaataaattgaggcccaagggggtcgtctcaaatgctcttgcccataagaacaaaaaagtggtgatcagcatcgatttgaaggagttcttccctaccattaccttcccccggattatggggatgttgaaaagtaaaccctacaacttctccaataagcaggcggcagtgttggcatcgttaatctgcttacctaaagacatcgacgacaaaaggggtcttcctcaaggggccccaacgagcccaatcatgtccaatcttatctgtaaaaagctcgactatcagctcgcgaagatggccagcaagtatgatattacgtatacccggtacgcggacgatctgacatttagcaccaataacctaaagagaattcccgccaaagagatagtgtcaatcgttaccaaatatgtggagagaaacggcttccaggtgaacacaaccaagacgaagatcatgtttaaaaatcaacggcagatggtgacaggcatacttgttaatgagggtctgaaccttcctaaaaagcaaatcgatgccctgcgagctaccttatacaatctggagcatgagcacaattccgttgaagattcagtgattgaattctgggggctcaaaaacaaacagccgtacgactctttcatccctgtcggattttataacggaggctaccgcggaagatttattaagagcaacaagaagggcgtcaaggcccacaagccaacctccaagaaagagttcgataaaatttatgccctacacttgttgggccggattctctggtacggacaggtagtcacgaccactatagacgccccttatgatttgtccaaacgccagtacattagccccaagcagtttagcagaatcaacaagtacgaagagatgctcgctagcttttaccgtatttcaatcaagttcagttggcctgtgcagcacattatcctaagactggctaataaactgccgcatctgcagagccttgttaaaatgaagagtatatctgagctggatccaaccattctcgacgaagtggggatcgaattacacggtcaggtcctgaaattgcggacagagaaagagaaatacaccgaattcttcaattccgctcccctgagcctgcaacgggttctccgagtccacaaccagtcacatatcaatttcgacctggacattataaagaaatgcataagcagtggctgggaggaaccctttaagcagcagaaggtgttcaaagaaatcaacaacgcggacctgtctgacctgttccacaagagttctaatcgtaaaggccacaacgctaaaaaactgctgaacgagatcgtgcgcgtggtgcagccacaaactaggtacttgtcagataacgttaggatcaagattactaaggtgtattctgagttactcacactcattagacttgaaggcgattcagtatgcatagacctggaaaacgagaatacaaaaaccgaacaggcccttcaggccatccgcgatctgaagtcagagatcaggctgtatgacaatcataccgacaatttttatcagcgggtggtgctgcccgcagttaagaattcggagacatccagtctggtagccattgacaaaaaagatatgaatcccagcatagtgactgatattaatgcatggcgggtagcactgacaaaggtcctaattagcatcaaacagcactgcgacaagacggagctgatggaggatacctcttcccatcgaccgttcactatcacttttcgagacgataatccagttactggagctcctcgcgtcatcgaaatccataggctcaacctagacttgcccttcaagaagaagctcgaagtagatacaactatggtggaggggaaggtcatgagatggcttactaacggagatctctcctccgcagtcagggagttcctacccattggtgacatatttgtccacggcaacttcaaagactgtgagaacgcaaccgtaaatctcacagagcatttctacaagattaatgacgaactgaaggtgtcggactacggcaaactctttttctctctgcaagagatcaaagaatga

SEQ ID NO: 8843 - RNA, 2424 nt, synthetic construct
  source 1..2424: mol_type = other RNA
atggctcagctgtttaatatgcagaacatccaggccggcagcagcaaaccaaagaacacaaatttctctagtttcctgaaactgttcgaacactggttgaaaactagaccagagtttgacattaagacactcaaggagaggaaatgctggcctatcaccgcaggtcactaccatcggttcagtataaagaaaaggaatggctccaagagggagctggtgagcgtcgataagaacttgaaagagatgcagagcaatctcgcaacctattttgagaaaacgttcgagattagcaaatacgcttacgccttcgtgcccaaggagtccgaaaagaaggcgactattaagcagcaagagacactccttctcgacaagctccgaccaaagggggttgtctctaacgccttagcccaccagaacaagaaagtcgtaatttccatcgatttgaaagacttcttcccaacgatcacttttccgagaatcatgggcatgctgaagaccaccccctacgatttttccaataaacaatctgccgtgttggcctcccttatctgcctgcccaaagacatcgatgagaagcgcggtcttcctcaaggagcaccaacttccccaatcatttctaaccttatctgcaagaagctggattatcagctggctaaaatggcacggaagtacgacattacttacacacgttatgctgacgatctgacctttagcaccaacaacctgaaaaggatcagtgcagaagagatagtgtcgtccgtgacacagtatgtcgaaagaaatggcttcaaagtgaacgagactaagacaaagatcatgttcaagaaccagaggcaaatggtgacttccatactggtgaacgaaggcttaaatttgccaaaaaagcaaatcgatgccctgagagctacactacataaccttgagcatgagtacaatagtgttgaagaggctgtcaatgagttctggagtctgaaaaataagcaaccgtttgatagtttcatccctgtggcgttctatcccggaggctaccgcgggagattcatcaagtctaataagaaggggttgaaggccaacaaaccaacccccaagaaagaatttgacaagatctacgccctgcacttgctcggccggattttgtggtacggtcaggtcgtatcaaccactatttctgtcccgtacgacttgtctaagcgacagtacatctctcccaagcaatattcacgtatcaagaagtatgagcagatgctggcgtccttttaccgcatttcgattaaatttaactggtccgttgagcatatagtgtttagactggctaataaactgcctcatctccagtctctgattaaggtgaagtcaaaatcagagctcgaccctacaatcctggacaaaattggcaaggagctgcagggaaaggtgagccggctccgctctgagaaggaagagtataccgaatttttcaattctgcccctcgttcgctgcagcgagtgctacgggtacaaaaccagtcacacattagttttgacctcgacaccctaaaaaaatgtgtggaattcggatggaacgaaccccttaaacagaagaagctgttcaaggagataaatacgagcatgcttagcgacttatttcacaagtcctcaaacgggaaaggccacaatgcggagaagctcctcaatgagatcgttagagttgtcaagcctcaggtacgctacctgagcgataacgtcagggttaaactgactaaagtgcacagcgaattactcaccctagtgcagctggaagggaaaaacgtgtgcatcgacttagagaacgaaaatattaagaccgagaaagcccttcaggctatccgggactttaaatcagaggttcggctctatgataacgacacggataatttttatcagaaagtggtccttcctgcagtgaaatcaagcgaaacttctggtctagtaacaatcgataaaaaagacatggacccctcaattgtgacagatatcaacgcatggagagaagctctaaccaaagttctgataagcattaagcagcattgtgataagaccgagctgatggaagacgcatccagtcacatgccctttacaataaaattccgcgacgaaaatcccgtgaacggggccccaaggacagtagaaatttacaggctcaacagtaagctgccttttaagaagaaactcgaggtcgatacagccatagtcgagggaaaggttatgcgatggctgttcaatggggatcttagctccgccgtgcgcgaattcttacctgtaggagatattttcgtgcacggaaagttcaaggattgtgaagacgtgaccgtcaatctgactgagcatttttataaagtggacaaaaccttgaaggttaatccgtatggcaaactgtttttcacgctgcaggaaatgaaggaatga

SEQ ID NO: 8844 - RNA, 2376 nt, synthetic construct
  source 1..2376: mol_type = other RNA
atgaacaataagcgcaccgcaaagaataataacttcctcgcatattggctgggcattaaatctcccgagctggatatcaaggtcctaaagaacatcaagtgctggcccattactgccaaccactacaaccgattcaccattaaaaaacgtaatggctccaagcgcgagctggtcagcgttaacaaaagcctgaaaactgtgcagtccgatcttgccgagtacttcgccgtgacctatggcatctcaaagtatgcccacgcgtttatctctaaggaacctgagacactcagcgtgttttcacaggaggcaatcctggttgacaaactgaggcccaaaggaatagttagtaatgctctcccacataccaacaaacgtgtcgtcatatcactggatcttaaggattttttccccacaataacgtttcccagagtgatgggaatgctcaaaggtgaaccatataacttttccaacaaacaagccgcagtcattagtagcctgatatgcctcccgaaagatattgatgaaaatcaggggcttccccaaggcgctccaacatcgcctgtgatcagcaatctcatttgcaacaagttagactaccagttgggaaagatgtccaagaagtatgacattacctacactcggtatgctgacgacctgaccttctccacaaataacctcaaaagaatttcagctgaagaaatcgtaagccttgccactcaatacgtggatcgaaatggctttaaggtcaatgaggctaagacaaagatcatgtttaaaaaccagcgccagatggtgacttcaatcttggtaaacgaaggtttgaacctacctaaaaaacaggtcgacgctctgagggcaacactctataatctggagaacacgtataacaacgtggaggatgctgtggacaagttctggaatatgaagaataaaaaggcgtacgactccctggttcctgtggggttctataaaggcggttatcgcggtcgctttatcaaatccaagaataagggcttaaagggaaacaaacccgtgtctaagaaagaatttgacaagatttacgccctgcatcttctcgggagaattttgtggtacgggcagattacgaccacagcaatcaataccccctacgacctttcgaagaggcaatacatttcaccgaagcaacacagtaggattaacaagtacgaggagatgctcgcagctttctaccgcatctcgatgaaattcaattggagtgtagagcatatcgttctacggctggccaacaaactgcctcacttgcagtctctggtcaagatgaacccaaactttctcctggaacacatcctgttggacgacctcgagttagaattgcgagataaggtttcaaagctgaggattgagaaggaaaagtatacggagtttttcgatagtgctcctagaagtctgcagagggtcctcagggtctttaatagaagccacaatagtttcgccctgaataagatcaagtcctgtgtggaatcaggctggccagttccgttaaagcaacagatcctgttcgagaagcttgctacagaagaactcagcgacttattccataagagcactaacattaaagggcacaacgtaaaaacactgctggaagacatcgttaaagtggtaagacctgagttgatttacctcagcgacaatgtccgggtgaaaatcacccgggtgcatagagaattactctccctgatgcgcacagagggagatggagtgtgtattgatttcgaaaatgaaaccgcgaagactgagcaggccgttcaggcgatccgggatctgaagtctgaggtgcgactgtacgagagcgatatcgacaacttttatctgaagattgttctaccagccgtaaaaaactctagaaccctgaatatagtggatatcgacaaagatgacatgaatccatcaatcgtgaccgacatatatgcctggcgggaagcccttaccaaagtgctcatctccattaaacagcatatagacaaatccgaaagcattggcaatagctccgggaagaagcctttcctgatcaagttgcgtgacgagcaccccacaagctctctgcctcgggccattgagatctaccggagggacgtggagcttccctttaacaaaaagttggatatcgacgtgaattctgcagagggcaaagtcatgaagtggcttactgggggtgatttgtcttctgccgtgaaagcatttcttccaataggcgatatatttgtgcacggaaatttcaaggattgtgagaacgtgactgtcaacctgaccgaacatttctacaaggtagaggacaatctggagatcagtgggaacggaaaactattcttctctctacaggagataaaagaatga

SEQ ID NO: 8845 - RNA, 2376 nt, synthetic construct
  source 1..2376: mol_type = other RNA
atgaacaacaagcgcaatgtgaagaatatcaacttcttctccttttggctcggcatcaaagaccctgagttcgacattaagaagttaaaagacatcaagtgctggcccattaccaagaaccattataatccgtttacgatcaaaaagaggaacggctcaaaacgcaacctcgtgagtgtcaacaagaacttgaaaacagtgcagtccgacctcgcagagtatttcaccaaaaactacaagagctctaagtacgcacatgcttttatctgtaaggaaccagagtctctgagcattctgaagcaggaagcgttactgatcgacaaactaagaccaaaaggcataatcagcaacgccctcgctcacaccaacaagcaagttgttataagcctggatctgaaggactttttcccttctattacatttcccagggtcatgggaatgcttaaagggcagccttataatttctccaataagcaggctgccattattgcctccttgatatgtctcccaaaagggatagacgaaaatcagggactccctcagggtgctcccacttcaccagttataagcaatctgatctgcaacaagctagattatcagctgggtaaaatgtccaagaagtatgacatcacctatactcgatacgccgacgatctgaccttctctacaaacaacttaaaacggatctcagccgataagatagtttccctggcgactcagtacgtagatagaaacgggtttaagatcaatgaggccaagacaaaaatcatgtataagaaccaatgccagatggtcactggaattctggtgaatgaaggcctcaacctgccaaaaaaacaaaacgatgcgctccgtgcaacgctgtacaacctggaaaacaaaaacaacaaagtggaggaggctgttgcaaaattctggggaataaagtcaaagcaggcctacgatagtctcgtgccagttggtttttataaatggggctatcggggcaggttcattaagtctaagaacaagggcctgaagaccaccaaacctgcactaaaaaacgagttcgataaaatctacgcactgcacttgcttggtcgcatcctgtggtacggtcaggtggctacaaccggcattaatactccatacgatctttctaagaagcagtatatttcccccaagcaacatagcaggatcaataagtatgaagaaatgcttgccgctttttaccgtatcagcatgaaattcaactggtcagtagaacatatagttctgcgccttgccaataagcttccccatctgcaatctcttgtaaagatgaatccgaatttcagcctggaacatatccttttagacaagctggaattggatctccgggataaggtcagcaaactgcgcaacgagaaagagaagtataccgaattctttttcagtgcccctcggtccctgcagagagtgctcaaggtgagcaacagatcacaccacaatttcacactgatcaagatcaaaagctacgttgaaagtgggtggcctgtgcccctgaagcagaaagcagtctttgatgagattgccaccggagacttatcgaatctctttcacaagtccactaacataaacggccacagcgtgaaaaatctgctgaaagatattgtgaggatcgtccggcccgagctgatctatctgagtgataatttccgaacaaaaatcacacgtgtgcaccgagaacttttgaacttaatgagaaccgagggcgacggggtatacattgacatcgagaatgtgacaccaaagactgaacaggccgtgcaggctatcgtcgacctaaaatcggacatccggttgtttgagaatgacattgacaacttctacttgaagatcgtcctcccagccgtgaaaaattccggaactctgaacatggtcgacattgataaggatgatatgaatcccaacatcgtgacggatatttacgcgtggcgcgaggccctgacaaaggtcctcatttcaattaaacaacactctgacaagtccgagagtatagggaacatacaggggaaaaggccttttattattaagttcatcgacgagaacccggtgaatggctcacccagagctatcgagatttacagaaggaatattcaacttccctttaacaagaagctcgagattgacatcaatagttcggaaggaaaagtggataaatggctcaccgggggagacttgtcttttgccgtaaaggagttcctacctattggtgatatatttgcacacgggaattttaatgactgtaataatgctaccgtgaatttgacggagaatttgtacaaaatcgatggcaagttgaaactgaatgacagtggaaagctgttcttctctctacaggagatcaaagaatga

SEQ ID NO: 8846 - RNA, 2391 nt, synthetic construct
  source 1..2391: mol_type = other RNA
atgaagaccactccgattttgagttctaaagttgactctgacgacaagtttccattcttctccatattggaatcgtggggggtcaattctccagagttcgatacagttgtgctgaaaaaactcaagtgttggcccgtcagcaaaaagcattacaaaccattcaccattgaaaagagaaacggtactgagagacacctcgtggctgtagataagaacctcaagctgatgcagcagagactcgccgtttactttgaacgcgcctatccagtatctaaatacgcccacgcattcatacctaagaggagtaaatttgcctacgagctcaattcatccccccagattaggcccacaggcgtcataactaacgccctggcgcacaccaataaaaaggtggtgatcagtatagacatcaaagacttctttccgaacattaccttcccacgcgtcctggggcttctaaaaagcaaaccctacgatctgagcaataggcaagcagctattcttgcgtccttaatctgcttgcctaagggaatcgatgaaaacaggggccttccacagggtgctcccacctcacccatcatcagcaatctgctgtgcaagaagctggataatcaattgggtgccttctccaaaaagaatggcatcacttacactagatacgctgatgatctcacgttctccacgaataacttaaagcacataagtacgtccaagattgtcgagcacgtgacaaatttcgtggaacggaacggatttaacattaacaccctcaaaaccaaggtgatgtataagaatcagaggcagatggttactggcattgttgtgaacgatggattgaacctgccaaagaagcaggtcgacgcaatccgagccacacttcataatctggagcacaattataagagcgtaagcgaggccgtatacgacttttggctcgtgaagggcaaaaatgcttatgatcagttcgtgcccctggacttttaccctgggggttacaagggtcggtacatcaagtcaaagaataatggcgaaaagcgtaataaacccacttccgacattgagtttaacaagatctacgccctgcatatcctggggagaattctgtggtacggacaggtggtgaccactgcggtcaacgaaccttatgatctcagcaaacggaagtacatttcccctaagcaacacttgcggatcaataaatatgaagagatgttggccactttctatcgcatcagcatgaaattcaactggcctattgagcatatcatcctaagactcgccaataaatttccgaatctgcagagcttggtaaagatgaaccccatgttcttacttgagccagtgactttagacgctaacgagctggccatcaaggacaaagtcaactctcttcgttctgataaacttgagtacacggcattttttgaatcagcccctgattcgctgaaacgggtgctgcgcgttgagaacaggtcccataccaactttgaccttaagaacattaagcagtgtgtggaatacggatgggagacaccaaccaaattgagggaagttttcaatgaattcgataacgggaagcttgctgatctctttcacaaatcaagtgatagaaaggggcacaaagtcgtggacctgcttaaagagttggtgtctttcgtgaaaccacggatccgctactttcccgcaagagtcaaacgtaaaattatcgtggtccagaaggaattactccacctaatccgggccgagggagaggaggtatatattgacctggagaacgaaaccacggttaccaaaaaagcatctcaggctatcagggacctgaaattcgcaattcggctatatgacagtgacacagataacctgtataatagagtggtcctggaagccatcaaaagctccgataccctcgagctgatcaacatagacaaggacaatatgaatccccgaatttataccgatatagacgcatggagggagtcactgacaaaagtgctgatctctataaaacaacacacacatgatgatgaacgcgtgatagaccagaagcaactaaagcccttcactatctgttttcgagaagagaaccctctgacaggaagcccgattgcgattgagatttataaggccaatagtaagatccctttcaaaaagaagctgaacatttcggaaaaatctaactcagggctcgtgaataagtggatcaccgggggcgacttacagcgagctgtgcgagattttatgcctgttggcgacatctttgttcatggcgactttatagactgcaagaacatcaccgtgaatctgacagagcacagctataagaaggagaagacagtctatcataacaagtacggcacactcttcatttccctgcaagagcttcgcgcttga

SEQ ID NO: 8847 - RNA, 2409 nt, synthetic construct
  source 1..2409: mol_type = other RNA
atgaagaagaacaatcagaagaaagtgaaagaagagtcagctacagatttctttgactttatcaaggacttgctggcgcgcagaccagagttcgatacaaaaaaactggccgataaaggttgttggcctattagtaaatctcactatcaccacttcagtattaagaagcgaaatggttcttaccggcagctcgtgaccgtcgactatcgtctgaaagagtttcagtcaaatctgaggaggtacttcgagaaatacttcactatttcgaagcacgctcacgggttcgtgtctacatccacaagccaggtgggcgccactgacctggaaaaggagtttttgtctgaacttaaccggcctaaaggggtggttacgaacgcccttgctcacacgggtaagaaggtggtcattagcatcgaccttaaggactttttcccaagtattacatttccacgcgtattgggaatgctgcgaaagtcaccttacgatctgagcaataaacaggcagcagtgattgcctccctggtttgtcttccgaaagatatggatgaagatcgcggacttccccaaggtgctccgacctcccccatcatctctaatctcatttgcaacaaactggactaccagctgggccggttcgctaagaaatatgacttgaagtatactcgctacgcggacgatctaactctaagcacaaacaatcttaagcgtataacccccaaaaagattattgacgaagtgacccgacacgtagagcgcaacggatttcaaattaatgacgcaaagacgaaggtcatgtaccagaactccagacaaatggttactggtatcctggtcaatgatgggctcaacctccacaagaaacatgtggatgcattgagggcaacattgcataatctcgaaaacaagtacgattcagtagagagggccataaatgagttctggaccttaaaagataagcagccgtttgacgccttcgtgcctttggggtattacaattccggaattagaggcagatacatttcttcctcgaagaagggtattaaacggcccatgcccatcaccaaacaggagatgcacaagatctatgccttacatctcctggggcgcatcctgtggtatggccaagtggtaaccactgctgtgcaaagcccctatgacctgtataagaggccccacatatctcccaaacagtactccaggatcaaaaactatgaagaaatgctggctagcttttatcgggtgtccatcaagttcaagtggccagtagagcacataatccttaggctttcgaatcgtttcaaacacctgcagagtctggtggcaatgcagccaaatctgctcgtagagccaattgtgctgaacgacgccgaacagaagctgaaagttgatgttctgaagttgagaaagaaggaggactatctcgaatttttccgcacgtctcccgagagcttaaagagagccatctggagcatctcatccagccctagtaaccatagcctggaggacataaagcagtatgtgaatcatggctggcctgtcccagagatccagcgagaggtcttcaaacagctcgataccggcacactgtctaatttgtttcacaagagctacgagagcggcggacactccgtgaacgaactcctagaggaaatcgtgaaagtcgtgaagacaaggttaagatacctgagtccagtcgtgaggcgcaagattctgtccgtccataaagagctgctggccatctttagactggaaggaaatgacgtgcggatcgatctcgaaaagaaggtcaaatcacatgaatcagccctccaagcgattagagatctaaaagccgccgttaggttatacgaggatgacaccgagaatttctacaacaagatagtgctgccagccgtgaaggagtctgggatgagtaacttcgtgaaaatcgataacaatgacatggaggtccgcctgatcaccgacatcgccgcttggaagaacgcactcattaaagtgctggactctgtcaaggaacatatggaatcaagtgagcgggtcagaaaggctagcgagcagttcccttttactctcaagtttcgagaagctaaccctgagactgaggagcctatggcactggagctctaccggaccaacgccgagattgggttcaagaaaatacccgatttggagacaaacaaatcccatggccttgtgaaaaagcggctgactggaggcgacttatcactagcggttaaagaatttcttccgataggagatatctatgttctcggcaaatttgaacgtaagggggaatgcatcaaggacatctctataaacctaaccgactttagtttcgttaagtgcaagagcgttaaacattccaaatacggccagcttatgttcagcttggtagaaaaagaatcctga

SEQ ID NO: 8848 - RNA, 2181 nt, synthetic construct
  source 1..2181: mol_type = other RNA
atggtcagcgttgactccaagctcaagtctattcagacttctatcaaagaagagcttgaggagaagtatccaactagtaagttcgcccacgcctttatctccaacaatctggataccctcgatgatattgtgcgtccgaaaggagttattagcaatgcactcgcccacaccaacaaaaaagtcgtaattagcattgacttgaaggacttctttcctacgatctcctttcccagggtgctggggatgttcaagcagcagccttacttcttttcaaataagcaggcgagtatcctggctagcctcgtgtgtctccctaaaggtgttgatgcgaacaggggtctaccacaaggagcccccagttcgccattgatctcgaatttaatctgcaacaagatcgacaagcaactgggccagctcgccaaaaagctcgattgcatttacactagatacgctgacgacataacgttctcaaccaacaatatcaacagggtgaaaccctctgcgttggtgaatgagatccggaagcacgtggtccgtaatggtttcgaggtcaatgaggaaaagaccaagattatgttctcaaatcaacgacagatggtaacaggcatagtcgttaacgatggactgaatctccataaaagacacgtcgatgcacttagggcaaccctttataacctggaattcaagtataagaccacttctcaggggattaaggccttctggaagcttggatctctgagaagctttgattcgctggtcccagtagggtttattaagggggaaacacccattcgcttcgtgaaaagtgcttcaaaagaggatggaaaaaagcggttaatcaagacaacaggcaagtaccaggtgaaaacatatgctttgcatatcctgggccgaatcttgtggtacgggcaggtggtgactaccgccatcagtgatccctactcactctcaaagaattcttacataagccctaagcaagagcgcaggatcaaaaaatttgaagagatgctcgccgcctattatcggattgccgataagttgaactggccggtgaagcatatcatactcaggctggctaataagtatcctcacctgcagagtttaatacattttgacccgcggtacaccttaaagaatatcgctctattggtggctgagtctgaccttattacaaaggtgaacaagctgggtaaggataatcaagagtatctggacttttacaaagagtcacctgagacgttccagcgtcaccttctactgcgctccagattcaagcaatcctttaagatccatgacatacgcaccctggccgagaatgggtgggttgacccaaagttgcagaacgagttgttcgaagagctgaacactagaaaactggccgacctgttccacaaaagcgatgatggcaaggggcataaagtcgaggagatcctcttagaacttgttaaagtggttgctcccaaactgcgctacctctccagtaatgtccgaactaaagtgctgcaggtccacaaggagtttgtgggcctgatcggggcagaaggcaaagacgtgaaactagacctggagattgagactgacctgacaaagagcgctattcaggctattcgagacttgaaaaacgcgaccagactgtacgaacataataacgacaccttttatagtaggatagtactgcctagcattaatgattctgatacaacaaagctggtggatattaacacttccggtatggcaccccggctgatcacagaaattggcgcatggaagaaagcactgaccaaggtcctgcagagcataaaagaatccgcctccaaagtgaacttagactccaagcagaaaccctttaagatcaaattcaaagacgccaacccagtgaccggagaacccgttacgctcgaaattttcaaagttggccacgacaatccattcggcaagaatctgaaccttccagaaaactcctcttcaggatttatccagaagaaccttcttggtcgggatctgacaaacgcaatagaacagtttctccctgtaggcgatatctatgtacaaggaaactttaaagacgtggacaacgccaagatcaatctaacccgccacaagtttgaaagaatcgaggagatgtctaaagacaacaaagaaagcctgttcttcgtgctcaaagagtaccagagcaagtga

SEQ ID NO: 8849 - RNA, 2697 nt, synthetic construct
  source 1..2697: mol_type = other RNA
atgtccgacaccaccgaacctaaagagcccgcagctctcaccttagccgcactgattgaccgggacgaacagagcgccgcaggagacgaacagagaaagattgacagccggcgcgatctggcaagatacatcgggatccccctgcgacatcttgccgatgtactgtacgaggccgacaggtccagattctacacagtaaagactattccaaaggcctcgggaggtaccagaacactccacgccgtttccggaaagctaaaagatgtgcagcggaaagcgctggacaaacttcagcggaaattccctccatctgaccgtgcacatggcttcgtcccgggcaggagtatcatcactaatgctatcccccaccgacgaaaaaagcttgtggtgaaactggatattgtcgatttttttcccagcatacgggtggcaagagttttcgggatgtttcaggctccgcccttccgtttcggcagagaagctgccatgacccttgcgcaattggcctgtgtccctgagcacaatggtcctctcccacagggcggggtgctttctccatatgtggcaaacgtgatttgtcgcagaatggaccaacgcctggcgtcaattgcccggcaacatagatgtaatttcacacgctatgccgatgatcttacattttctaccaatgatgccaatcgcttagatgctgacagactgatcgctaaggttcgggaagttgtggagggagagggctttgcgatcaatgacgccaaaacacgtgtgctgcggcagagtgaccgtcagatcgtcactggcatcgtggtcaatgacgggctgaacgttacaaggcgatatttgcggagcctgagggctatcttgcacaacatggagaaagagggcatcgaggctcaactcattaagggctctggtttaaaggatagacgggcgtcccgcttagaactcgtgcccgacggggatggctatagattaggcaaccacaaactgacaaaggagcaggccgtagaacgctttctgcagcatttggtgggtcgatttgctttcgtgggccaagtcgtcaacgctgaagggcaggataatcagcagattaggtacagacgggtggtgctgtataagaggctgctcaacagatttagacgcagtgtcaggtctgcagttcatgcaggactgggcgacggacccaaacattgcgagagggccatacggtctttgatggaacgttatgccagcgtggagcaggagtccgagtggtataggagagcgaaggagaggcgagaaagcgagctggagcgctggagggaaagtaaagagggccggaggatctcagctgccttggccagaacaacgaacgccagtgagctatgcagattcgtgcaaaaggaggctaagagcgacgttcgatactggccggtgaactgtggcgataatcccgaggccctgagggttcgagtggaggagaacgctcgctacccttccctgaaccggggaaccaccaggcaagtggtgaatgggtttaaggatactagcgatctgggagggcttactcacaggggcgatgcaacacctgcgagcttgcttcagattctactcgaccgctacgagcctcactactatgagctgccgaacgccctccggaaactggtggaccccatgtcagcagcactccgggatatagtcttgcaagacggagaggacgtaagcctggatctctttaaagaccctagactggatcgtcacgtcaagcagctaaaggagggaacgcgcctcatcgcccctggttcaaagaaggacgagggcaaacctatcaccgaactgttgaccgatgcctacgaaaaagggctggaaagggccgagaagaagcccggaacctccgtgccatggaaggaccggtttataagcccacatcaggctatctacacggtcgtacctgccctttggattagtctagtggacatctttcactcaatcggaattcatagtgaacatagggaaatcgaggtggaaacttacataaccgaacagggctgcttccagatccgcatttctgacgctaatagttcagggctcgaaattccaccagccagggacttcgctcacgggaagatacgacacgccgcgttcgaacttttcgctatagccggctattggatttttacgcggtttgaagacggtgcagtgcaccgtgtggatatgctcaccggtaagactgcacgcgcaactgatgctagatatcccggatttactcatctgattgttctgcccaatgaaaaaggcttcatcgaggaaccatcggttggggatgccgcaactgggtctgattccgccgctacaccgagaaggaccgttcgagtactgataattgacaataacgagcagagaaggaacgataacgtacagtgctggtcatctctcccagatgtggagttagatgcagtcgctcagattgaccgcgagtcctaccgctgccgtgagctggacctcgtgctagtacacgagtccaacccagagtcagaatggatccatcaggacgttgaagaccggtggcctgtcgtcttcttctctggtaacaatacactggattgcgaagtccacgagggcaggtggttcgtgtcccccgtgtttttgcgcgaacacttcgggaagctcgtggataagatcgtccacgagggagggaaagactgtgtcggtctgagctga

SEQ ID NO: 8850 - RNA, 2634 nt, synthetic construct
  source 1..2634: mol_type = other RNA
atggaaaagatgactaccagaaccaaaatctactggaggagagacttagcccagtatattggcgtccctctccaggacctgctggaaatcctttataaggagaatagacgagattactatcgaatccgctcaatccctaaagcatcaggggggacacgaaccatccatgcggtatccggaaagctgaaagatattcagagaaaagtcctggacaagctgcaagcagactttccaccgagctctagggcacatggctttgtacctaagaggagcataattaccaatgccattccacatcgcaggaaaaaggtgctggtgaagctggacattcgagacttcttccccagtatcagatttgcccgtgtcatggggctctttcaatccgcgccattccattttggtcgcgaggctgctattaccctggcgcaaattatatgtgtcccaggtgataacggacctcttcctcagggtggcgtgctctccccctatgtggcaaatgtcatttgtcggaggctagatcagaaactggccgccatagctcgggagcacagatgccattttacccggtatgccgatgatttgacatttagtacaaacgacgtcaaatgtctcaaccgcgagcagtttatcgccagagtggaagcggcggtggcaaacgaggggttcacgataaacagtaagaaaacacgcgtcttaaggcagagcgatcgtcagatcgtgaccgggatcgtggtgaatgacggtctgaatgtgacaagaaagtacattcgcaatctcagggcgattctccacaatattgaaaaaaacgggctagaaacccagttgattaaggacggaggcttccacgataggcgggcctcaaggctggagctcaaacgcgacggggacgggtacaggctaggcacacgccagctgaccaaggaggaatcgatcgagagattcctgcaacaccttgtcggccgcttcgcttttgtcggccaggttgttaatgcagagggccaggagaatagacagatcagataccgcagggtggtgctgtacaaaaggcttctgaagcgcttttacatttgcatatgccgcatagagaagaatgagaatcttgggaaaggacccgaaaaatgcaagtcaacactggagaagctgatgaaaaaatacagctcatttgaccagcagagcgagtggtataatcgtgccaaggaatgtaggcaatctaaattggagcagtggcaaaacagcaaggaagctcagactatcagagacgagctggcctgcattacgacattagaagacgcacggaggtttctcaccgctcaggcttgttctgatgtgagatattggattgagtgcagcggaaacttcgaggatatcaaaattaagttggcaaagttcgctcagtatcccgcctttaattttttcgacacacggcaggtgttgcatggtttcaaggacactcaggatttgggtgcactgacccaccacggatccactcccgctcacctcctgaatatcctacttaagagatacgagcctcactattataagcttcccgattacgaaccgccctactccctgcggggactggtggatcccatgtcagatgctctgcgaaacatagttctggaggatggagaagatgtgtttctggatttcaacgaccctcggatcgagtccaaggttgccaagttgaaacaggggacaagattatcagcccgccaaggccaagcacacatcgggaccatgattgaggaaatgctccagagtgcctacgaggagggacttaagagggctaaccagactccgaagaaatccgtcccatggaagggccggttgcagaacccacgggaagatatttatactgtcatccccgccctccaaggcagtttagtggacatcttcgagtctatgtacagaaaccgaaagtccggccaaatcgaggtcgagacgtccgtgactgagtctggctgcttccagatccgtatagccgacgtcgatggcgcttccctgcgcgtaccacctggtagagacttcgcccatgggaaactcagaagggccacccggagcctgttcgtgatcgctggatactggatattcgcccggttcaacgacggcagcgttcaccgagtgaacatgcttaccggagaaacggtaaaggtggctgatgaccggtactctgggttcacccacgtcctcgtgctgccaaataacgagggcaggatcgatccgccttctgttggaaaaagctccctcgacgtgtcggtggccaagacaagccggcgtactctgcgggtactggttatagacaacaatgatcaggaacggtatgataacgaactgcggtggcagactttgccagacctcgaactgaaaaccgtagcagccattgaccgtgagacttgtgccagttacgcacctgatatcgttttcgttcatttcaacaatgacgaacgaaaatggattacgcaagaaaacactaatctttgccccatcgtgctattcagcggcgaatttatgtctgaatgtatgatccacgagggttgctggtgtgttagtcgtacatttctcaaggaacgatttggagacttaatcgatcagatcgtgaggaaagagcgcaaggactgcgtaggcttgtcttga

SEQ ID NO: 8851 - RNA, 2646 nt, synthetic construct
  source 1..2646: mol_type = other RNA
atggaattcacaactaccccgtcatctctgaacagcaggaaagatttggcggactacatcgggcttccactgggtgagcttaacaatatactgtacgctggcaatagatcccgattctacaaagtgaagatgataccgaaagctagcggcggagaacgcaagctgcacgccatttcaggcgaactgaagtcactgcaaaggatggccctggacaaactgcagacagattatccccccagtcctagagcacacggattcgtaccagagagatctattattaccaatgccaggcatcacaccaacaagaagttggtgatcaagctggatttactggatttcttccctactattcattatggaagagttgtaggaatgtttcagaaaccccccttctctttcgggtacgaggtggcaaaaaccctcgctcaaattagctgcctctcacaggaagaggccggcatcttaccccaaggcggagccatgggtccatacattgctaacgtcatatgcagacgaatggacaagagattggcaagcgtggcaagaaaccaccggtgtaatttcaccaggtacgccgacgatctcacattcagtaccaacgacgtgcgccggcttgagattcctcagcttattacagaggtgtccggaattgtggagtcagaaggattcaaggtgaacagcgaaaagacacgggtgctcaggccatccgatcgccaaatcgtgacgggtatcgtcgttaatgatggtttgaatgtacctaggaagtacattaactcgctgcgggcgattctgcacaacatggagaaagaaggcattgaaaagcagctagtgaaaggtaagctgttcggggccaataatcctaagattagccgcctggaatttgaactagttggtgaagggtacagactcggctcacgcgcctattctaaagacgaggccgtggatctctttcttcggcatctgctcgggcggttcgccttcgtagggcaggtcgtgaacgctaatggccaacaggaacgtcagattaagtttaagcgcgttattctctataagcgactcctcaagcgcttccactcttgtgtcattgacccacgtaataacggtctgggcaatgggcccaagaagtgcgccagggcaattgttcgaatgatgaagcagtactcttcctttgaccaggagtccaaatgggacaggcggatcaaagaagtgcgtaagtctaaactggagtcctggcaacagagtggcgacgggcgaaaagtttgtaaggctttggatcgcatcaacaacttgtccgacttgaaagttttcctagagaacgagtcgaaaagggatatacggtattggtgggtgtgcggacgcgactttgttaccgacaaagaacaagctctgaaatacgcatcttatccgcctgtagactatcgttggacgcggcaagtcctgtgcggcatcaaaaacactcagggaaagaatctagggattctgactcactatggggacgatggccacgcaaatactcccgcgaagctgctagaagtgttagccgagaattatgagccctactattattggttgcccattaggcttcgtaaaatcatcgaccccgtgtcagatgcactgcgcaatatagtcctgcaggacggcgagaatgcttccttggataattttggtgatatcaggttagagccagtaattaagacattcaaactagagacacgactctccaacagcgacagagcagccgatggaacatacatctttcaactgttaaaagatgcacatgaggctgggcagagacaggccaacagaaaggaaatcaagagtcttagcctcgtgatgcaccagaagatgcctagcaaacagtacaccgtggttccttcacttcgcatcgctctgatcgacatattccacagcatgtatgtgaactcagagtctgatggtatcagcgtggatactaggataacccatagaaggtgttttcagatccgggtcaccggcccgctgcatcatccactgctgtgtagaccaagcagaaactttgcgcatgggaagctgtccagggctgcccgtgaactttttgggatagccggctactggatctgctccacatttgaagacggccgggagtacagaatagacatgttgactggcaaggctgccctgatctctaacgagcataaactgagtttcagccacatcatcgtgtttccaaatgacaacgatgagatcgatgagagtatacacggcgttgaggtcatagactctgtccctgaaaacgcacctcagcagaaaattcgggtcctcttaatcgataacaatgaccgccggcgcgatgaaaacgtgaagaggtggcgagccctcaaaaatgttgacatcaaggctgtcgcccgaattgatcgggcgagttatgagaagctcgacctggacctcgtgctgatccacgagtccaaccccgaggtggaaaccaatgagcttgtgtttgacgatcagacgcggatcattgtgtttagtagcggaaataagactgaagattgtgtgacggacgagggactcttttacgtctccagtatcttcttacagaaaaatctggccaagcttatcgacaagatcgtcgtcgagggacagaaagattgcgtagacttgtcgtga

SEQ ID NO: 8852 - RNA, 1905 nt, synthetic construct
  source 1..1905: mol_type = other RNA
atggagattcccctgaaacgtctcacatactgcctgtataaaacttccagagagagtgcttatacaaggaaggatcttcctaaaagcaacgggggcgttaggacgattcatgccgttagcggcccaataaaagggctgcagagaaccgctctggacaaattacaggaagatttcaagccgaccgcatacgcacacggattcactcctgaaaagtctattctcaccaacgcttatgtgcaccaggggtccaaaatcatactgagaatagatctgaaggactttttccccagcatcaactttggccgggtgcgaggcatgtttatgagcccccccttcaagttcggcgaacaagccgcgacggcaatggcccagatgtcttgccttgcaggaagcgaagacgtgctacctcagggcggcgtgctgtctccttatatagcaaatatgctctgtcgccgcttggatgctcgcctagccggtctgtcaaggacatggaaatgtagatttaccagatacgccgacgattgtgtattcagcactaatgacaccaaaagactgaatgccgaaaaatttgtggcccaggtggaagaaattattcgggaggaggggtttcaaatcaacccagacaaaacacgggtgatgtacccgcacgagagacaaatggtcacgggtgtcgttgtcaacgacgggatcaacatcaacagacggtactatcgatcactgcgggctctcctgcacaactggaagaagtacggaatctcaagtcagttggtgaaaagtggaggttttaaagatgaacgcaatcccggaccaagatttgaaagagatggggacatctttaggctgaatggttgggagtttagtaaagagcaggctgaagagaagtttgcaagacatgttctgggccgcattttgttcttgcttcaggcgaccaatttcgtaccaccttctactgagggatacctggagggagaaaaggacgagactgctaagaaaatggtggccaaacgaaaggaagcactggctgagaaaccgcgttctcaagccgcacagaagctccttttaaaatatttccacctcgtgagcaagcggaagcatctggatgacttgaagaacgccgcttaccgacagcttcagcggtatcctattagggaactcgtcgcgaggcacccccacttgaaaatagagctcaggagtggcatctcacgctaccaaatccgagctcaggccttgcaggaatatcagaagcgacctgagacaaggaagtgcgtggaacgcatccatgaatgcgacgatctggccgaggccgggggattacttgacgagctggcgaataccgacgtgcgcttcgcaggtttgccacgcggggaccttcgggtcctcctgaaggagatgaccaagtttgcttcgtaccctgccttcggagcgaaccacgcacgttccttcttcgcatcactaagggattccgagacaggtttaggccagattcttcaccacccagagcacagcatgtccgatctgaatgaatccatgggcaagttcgtggaccccgttttctggtggttacccttcgggctcagggaggacattgataagattgatgacctcttggagggcgtgtcgcggcaactaggggacgatgctaaaatcgactggctggcccatgagctcactgaaaaggagacactcaagctgaagaaggatacaagatttcatcggaaggaaggcacccggctgcatgaggccgtaaatgaggtagtgaaaagggtcgccaaaacctacgaccgtgagctgccagagatttgtaacgagctgtccgataagtccactgcctatacccatgttaggtctgtccgcctggccctggacgaaatcatcctttctatgatcactcacagcgataagtga

SEQ ID NO: 8853 - RNA, 2751 nt, synthetic construct
  source 1..2751: mol_type = other RNA
atgcccaagatcttcttaaaaaaacaccagacagagtatatcatcaagaaccgagcaaccaatcgcaagagtatcgtcgcgataatggcaggcaaaaagatgaagaatatgttgagtggcgacaagattaagaaagcgtataagaagttcactatcgccaaagctaagaagggtacccggactttgcacgctccctcgactgagctcaaggacctgcaaaggacaatcctggataaactgcagaaacctttcagacctagtatatacgcccacggcttcgtgaaatcaacaagcaataaagccaggtccatcataacaaacgcctcctaccataagtctaagaagtacataatcaagaccgacatcaaaaacttctttccttccatcaaaaaggagcaaattacacaaatgcttgtgaacgaaccattcgagtttacgatcaaaaccgctgaaaaaattagctctctggcatgcttagatggtaagaagaaggttttgccccagggtggagtcctctctccatatctgtctaatatgctttgctgcaacctggatgacaaactctcgggattggctaccaaaaatcactgcaacttcactcgatacgccgacgacattacctttagcacaaatgataagaagatcaagttcaagcccctaattcagcaaatttacaagatcgtggaatcctatgggttcgtggtgaaccgcgggaaaacaaaggtgttgacccctgcagaccggcaagttgtaaccggcatcattactaatgacggcattaatgtcaatcggaagtattaccgaaacctgcgggccattatacacaactgcgaggacgagtctctgaacatctttaacatagatactatcgccggacagattgggcggttcatcaagtacaagatacagaaaagaaacaagaacaacgccatagaactcaaatactcctggtcttttaaagattctcgctgtagcagaccaaacattttttcagacagcgtcatgcgttccgaatacatactgttgaacaaaaaagttggagtccaggatgtaaaacttatgagagactatggcggagtcaaccttcaggttccatttctgaaaggcgagtttctcaaccagctgtttggcaccgacaaattcaaaaacaatgagaagtacgcgatgaggctttacaagtataattcagatatcgagtctctgagtactggaaggctctaccttaaaaacaaaaagtatgccgagattctactcgacggcaaatggattggttgtgagaaatataccgaaaagaatccgaaaatctacaacatactcgaaaacaagttcaaggttctgcaagaaaagcataaggacaacgaccgattcttctataagtccgtgatctacaacaagggtttcgaagagaaagaatacatgctcgagaattttgccctcacaaaaatcaacacccagcagcagacaattcagtacgagaactacaataaagtcgataagaaccatacaggcgattatcacatcgctgtgaaaaagaattatgccgtgcattcttttttcaagcatttactgggaagattcgtattttatggctccgtggtcctgtccaacaatcaggacaagaattatgatagatacaagcgtgtgggcgcatacgaaaaactgctgtatcggttctacaagttggtggaaaagcattgtaacaaaagcctgcagaaacagaccttaaatcttatcaagaagacgccgaaactgaaggatgactttaacgtcttgaagaaaatgaccgatgattacaagaaacagaaagagaaatctctcgaaaagtttcactatgactcaaagtatgccactgaaattgataacactgagagtattgaggctctcgatgatattgctaagaagctaagcaagaaggacgtgagatttttccgtattgacaaataccacaaagacgagcccaaggactatcaaaattacctcatggcaattttgaagaagcccgcaattgatctgaaaaaaaccatgggtgtgcttctcagttttaagggcagccaggatggcctcggggttatcactcacgacactgagaaactgaactcaaagcagatatttgagacggtgaataagtgtttcacgcagtactactattatttacctcagggaattagggaagaattcgacaattacatagatgccctgaataatcaagacgggcggcagtcacagcgctttcaaagccaggccgaaaaactgaaaaagaataccaggtttgggaataattcagatgaggaatttctgctgaaagacagtgtcgatgaggctatcctaaacgctaagaaagaggttaagaagtccgatatcaagattcacaatgagattaaaagggcaagcttttatactcatgtaccaaccattaagcaggtgttcgagaaaatcatccacagcctgtataagaattccaaaggttccgagattacaattagctgtgaccataaggacgatgagaaaaagtaccaagtaatcatcacagacaacagcgacgctaacatcaccaataatgggcgcgaattcgtgaacggaaagcttagttcagtgatggggttaacatttgggctgtgcgattacttcatcgaaacggagttcaataaaaagcgcaaaaccatcaatatgcacaacggagaattcctgaagacgctacctactcataagaaagggttcacccacatactgcagtttgcgacaaagatctga

SEQ ID NO: 8854 - RNA, 1473 nt, synthetic construct
  source 1..1473: mol_type = other RNA
atgactaatgatattatccaggagatcctccgtaagagaaagatcaaccgatctactccactgatgcagaagatcaacaataaaaaggacctactatcctttttcggagacgagatcgggcaagagaacttcgacaacgtgctgtacggagaggaaaaggagcagtacaaaaagttcgtaattaataaggccacaggtaagcctcggaccctccacgctgtgcccccaaaattgaaacacattcagagaatcgccttagataagttgcagagtgtcaaacagtaccagccttcaagctatgctcatgggttcgtgttgaagagatccatcattactaatgccatcccccacaggagaaagaagaggatcataaagatggacctgaaggattttttcccgtctatccatgaggacagggtgcgcgatatgtttatggggaagccgtttagcttcggaaaagaggcagctactattatggcccatttgagttgcctcaacgacggttcaggaattctgcctcaggggggcgtacttagcccatatgtagcaaatatgctttgtctgaaactcgacaaaaaattagcgaaggtcgcaataaagaatcattgcaactttacccggtatgcagacgacattaccttctccacgaatgatgtgagcgaggacagtatatccaatctgattaaagagacgtccaacataattgagagtgaaggttttgtggtgaacaccgagaagaccaaggtgctgacccccaatcgaaggcaggtggtgaccggcattatcgtgaacgatggggtcaacgtgaaccgcaggtacattagaaaccttcgtgccgctataaaaaactgtgaagaacagggcataggatcacaaatgcagcggttcgtctttaaggaccaccgctgctctggccctgataagttcgatgggacaaatggcgaaatccggaattattttctccaccacctgtttggcaaaattacattctttggcaatgttgtcctgtctaataaccaagacctgaaaaacaagaagaattcggatacatacagaagggtacaaacctacgaggaaatcctctatcggttctatgaccttatcaagaacgtcaaaacttctcggcgattcaagaaaagtgttgtggcggctgtcaacaacaggccaaacctctccaaacgtctgagcttcgcgcaacagggagtctccattcgcggcaaagccctcaagaaataccgctcaacttacaaagccaaaaagttaaaggatgatctggagctggttaccaatatcaatcagcttagaagcttcatcggggacgttgctgagacaaacccatcttttttcaatacagccatccctgttgatctagatgaagcaaaagaaaaactgggtacacgcctgagctttccccccgtgaatctggacatcgccacgggagtgctgcagtcattggttgaagacgaaggctga

SEQ ID NO: 8855 - RNA, 2493 nt, synthetic construct
  source 1..2493: mol_type = other RNA
atgcccaaagagagcaagaacaacaaaatgaccgtgtcttctagatctgacttggcagattttttcggggtgaagaacaagtatattaattgggtgctctacgcggataaatctgccagcggttacaagaaattcactattaacaaggctagtggcaagatccgcactctgcatgcggtgacaaaaaaactaaagaagcttcagcggattgccctggatcacttgcaagctgataaacgatttcaacctacagcctacagtcatggcttcacacaacaaaagagcattatcacgaatgcagcctaccacaagcggagtaagcgcatcattaagatggatatcaaagacttcttccccactatccactttgggcgcgtgcagggtatgttcatggctccaccctttaaattcggtaaggaagccgcaacagtgatggctcagatgagctgtctggatgatggttccggcgcactacctcagggaggcgtgttgtccccttacatcgccaatatgatgtgccgtcgcatggacaaacgactggctgcggtagcacggaaccacagctgcagattcactcgctatgcagacgatctgacattctccactaattgcatcagcgatgagaatattggtaagttggttcaggaggcctcggctattgtggaagcagaacactttattgtcaataaggagaaaaccaaagtccttaccccgaaagaccgccaagttgtgacaggcattgttgtcaatgacgggctcaatgtgaatcggaagtacatcagaaacctgcgagccatcattaggaattgtgaacagtttggaatcaaatcacagattgtcaagctcggcggatttaaggacaaccgcaactcaagaatttcaatcaaaggcgaagagaacctttccgaggaacggtttctgaggcacatcctgggcaaactaaattttatgggcgacgtagtgttcgctaacttaaacgacaaagacgggaagaagatagatgacaatagtgtgaacatgaatcggatggtaagaattaaaacccacgctgacctgctcactcggttttacaagctggtggctaacgaatctggggtggacggcgtatatgacaagatcgagatcagcattgttaataacggcaagaaaaatccatactgtaagattatggacctcatatccgagataaataatcaggctaggaagtacctggatgagtttgaaaggctcgaaggggttaccaggattgtggatgaaaaaaagtatccactggtagacaaaaaacagacacgggtgttccttgattcttttaggaattctatcaacggaatgggagcattcacccatgcacacggtgaggagttcacgatccacaaagccatgggcattttattaaagaagtgtcatccggccatatactatctccctgaggccttcaagaaggaaatctactcatatattcactacatcaccaatatcggaataaagaacggcgctaactatagttggaatgtcatgagcgacactaagtcagttgcgttgaagcgggccactaggttcgattctatggagaactccctgtccagcaccgtcgacagctgcataagatatgtcaagaaacagaacaacatctcctctgaccttaacgttatcaactgcataaagaacaaccagctgttacagatctatacctttgtacccggcatcgagtccgccctgaacaatataatccattccatgttgaagaacacggaagcccagataaataagtatatcctaatcgacgtgaaccaggccactgatctgatcgagataattgtcagatcggaggatattatgatctcatcgttcgtgcccgaagacaagcatggaaaactcacactggcaactaaaagcacaaaagggctttgtgactactgggtggaagttgattcagtgagtctcgatctgaccaacaaacgagtctgcttcgacatgcatacaggaaaaatcatcgacggaattattcctagtttctccagtggatttgtgcacaagctccgattcgatacggccgataaaataagggataccgatgtcgagaacagagagatctcagctatcaccccaatcgagaataagatcgattacctgtacaaggtcctcttactcgaccataatattgacgataggcgtgagattaagcgcaatcttctggaaattgacggtgtgtctgagcagtcactgactattttgaagaatataagccaagtggactttgaatctatgaagcttgacatcgcctttatccacaaaaataacaaagagacatccaacattgcactgtgggagacaagtgggatcaaagtcatttttttttccggggagatacgtcagaattccaccataaacgccgagaagagccagttcatggttaaggaagaaaccatgaagagcgccgcgagactgaaatcttatttcgagaagaaactgagcgggaaaattaccacgtga

SEQ ID NO: 8856 - RNA, 2193 nt, synthetic construct
  source 1..2193: mol_type = other RNA
atggagataatttttggctcgaagacacctgggccgactactgttctagctaaacagattggatttcctgcaaataagctgcgggacatattgtatggaccaaacaatcgctctgcgcactataagcgaattgccatacccaagaattcctctacccccgctaatcctaagatcagggtgttacacgcagtatccaaagacttaaaaaacctgcagcgcgccacgtatgattacctggccgccatttattcccccactaaatatgccaaaggatttgtcatcggagagtctatacttaccaacgcatggccacacaggcgacaggccgtcctcctgaagtttgatatcaaagactttttcccaagcatcaacttttaccgggtaagggggatgtttatggcgtggccattcaatttctcccctgccactgcgactatctatgcacagatatgttgcatggacaacggccccatagcccagggtgcggttacgtcaccctacataagtaatatgatttgcaggcgcttggacaaacggctgtcacagttcgcccagaaacatcacctggtttttacccgatatgctgatgatattaccctgagtagcaatagcaagcatctggctatcaagaaggtccaacaggaagttgtggagatgatcgagtcagagaagttcattgtcaataaagagaagagcaaggtgttattccctagccagcgccagatggtgacaggcatagttgtcaatgacggggtgaacgtgcccaggaagtacatcaagcaggttagagccatcctgtataaatgtgaaaccctgggcgtggccagagtagtgagcgagcatttgacccatgtgaagccaggtcaaccctgcgcacctatccatagggaactgaaacctacaggcgagtacctggacgtcgatgtccctattaacagagatgtgtacatgagaaacggtaccgataaggaaatttccttctaccaggttactctcatctttctcagccatcttcgcgggaggattctctacatcggccaggtggcaaaggccaatcatgaatctatttgggaggtgagttacgctagcgccaacagccctaggggatatccggaacgtacagtttacctcaagcgctacaaaatttatcgggaactgctggaccggtacaactccattgtgaacttcgaggactatggcaaagagcttagtattaaggtgaagtctctggagtctagatacatggaggaggaagagatagatttctttatggctagagatatcgaacagattaagtcagacatgtcagagcgagccgaaaccgaggctcggttcttctattccatctcacccgcaatgctggagaacgacatcaaggacaaattgttaatcatgctgaataggtttcccccggatatcatcaccactcgcgctgtgctacagagcgcgcaggacactgggagcatgatcatgagattgcttcacaatgaagtgatccaaagagaggagttcgacgattactttaatgagtatctgacggtgaaggaaaaattgccatacagactcgaaaaggagattacggcttttcttaaagaagcttcctatctcttcagacgagagaacatcgatgagtataacttctacctagacgagcaattcaatcgggatcgcgtgatcccatttaagaataactctaggttcgtgttgaacccacgaaaaacaagcggcggtactgatgcctacgagatgatcaagggaattgtccattctcgtgccgtgcgggacaaaatgaatgagaactccgtacggattatgattcccgaagaccaaaatgagtggcgtatcgacctctacacccacgtgtctagtgtaaagtggtcacttcacagaatcatcgaaagtatggtcgtaaactcgcaagataccatcatacacatcacctttgaattccagcgcgaaggcttttccacactcagggtttacaatgaggatgtcacagaaattgctaataccccatcccgggcacttgctcacgggaaactgaaaaaagcaatggagtacctggacggcctggcagaatattatatagaggccaactttgccggaacagggtggagttcagtcaacatgtacacaaaccaatctcaggaaattgaaagtctcattggtttcacacaccgtatcgtgttctga

SEQ ID NO: 8857 - RNA, 2040 nt, synthetic construct
  source 1..2040: mol_type = other RNA
atgaaagcacacatatttgaagttgctcaggagttaaatgttaaaccaggtgtgattcgaactgctttgtacgtaggcaataggggggactactacactcttaacgaaattcctaagagaaatggaggagtgaggaccatccatgcggtgaatggacgcttgagggtcctgcagaaggtcgcgtacaattggctgtccaataattatagcccccgccatgaagccaaagggttcgtgatcggaggcggcattattgagaacgctaagattcatcggaacaaaaagctggttatatgttacgatctcaaagactttttccctagtatcacatttgcaagggtccaggggatgtttatgtcttttcctttcgagtttgccaagcccaaggctacgttgttcgcccagatttgttgcctcccagacgagaacggacctattccacaaggcggcgttacctcccccttcgtaagtaacatgatttgccgaagattagacactcgcctgcataagctcgccattaagaaacggatgcactactcaagatacgccgatgatcttacattctccacagatgataatgtgggctatgaaaagtttaccaagattgttcgggaaattatcgaggacgagcacttcgaactaaatgaagagaagtctagaattcggaccaagtctacgaggcaggtggtgaccggtatcgtcgtgaatgaaggactgaatgtaaaccggaaatatattcgcagcctgagagctgcacttcacaattgctatgtgcacggcgtgctgagtcagattgacaagaaaacgaaatataaggatccctggaacacctgcccacccataaagaagatcgccaacaaaaattatgtgctgtacaagaatggtgccagtatcgagatcaaggatgcaaaatataagtttctggagcacttatttgggcgaatacagtttataggtcacgtcgccaaaagcaatgagcatctcaaccctgtgcaccacaacaaacgcgtggagatctacaacaatctgctcgagatgttcgaaaaggtccgggagaacgagaagataactggcaagctcaaaatccaagcaaagaaggccctataccagcagcaggataacgcgttgcttgagtcaattaaacgatacactctcgatgaattgaacgaatttgtagatgagcaaaaacagactgatccaaggtatttcacatatagcttctctgagggagatatcatggagtacagggacgaagtgggtaatctcgctcagtatccgagccccacaaacgaaatggtaatgcaatacctaaactccctgaaggactcagaaaataagatcctgggcaagcttgtccatgacactactatctcattcggagaattcaacaacttccgcatgcagtttgaaaaagataaaatcgagctcccgaaactgctgagagatcgtttggatgggttcatcaataccgacatcatgaattttatcaaggataaagacgtgaacttcaacatatttagcgacataacattcgtcgaaaagtccatcaacaagctgaaaaaggcaacaagattcttcaacgggacagggaatatcggcgacgacgaaactgatctcgtcaagatgatcgagtccgtttttaaaaacgcccgtaaccccaacaatctgaacttgaaaatcgacaggctgaatacctttggtgcttataccgacgttcagtccgtgaagtacgccctgtcactgattattgacagtatgatcgacaacagcaacggatctacggtgttttgtaaaaccgacaaacagaacaaggtgattgagttattcgacgacaactctgagccactggacattctccctaatcgtgattttgtgaatgggaaacttcggaagaccatattcacactaaccgcactgtgtgagtacagcatcatcgctaacttcaagaaagggggctggaaaaatatcaatatgatgaagggcgaggtcattgagtcggaagagtatccgggctttacccatcaacttacattcagatga

SEQ ID NO: 8858 - RNA, 1149 nt, synthetic construct
  source 1..1149: mol_type = other RNA
atgaaagacttaaatttgaacctgatcaccattatcatcatctttatcgtcatcatcatcacgatttttaaggggaaactgagtgtctttaacaaaaagaaacggaacttcaacctgaaattccttaacaagattcccattctgaaccctgattacaatacattctatatacccaaacgggatggtagcgaaaggcaaattgacgctccgaatacccagcttaaaaacatccagaaaaacattcttcgggaactcaacaaaacttatctgtttccatctttcgtaagtggctttaagaagaacgccagcattaagaataatgcgagcaagcatactaacaagaagatcatcatcaatatcgacatagaggacttctttcactctataactgagaataagatccgcaagactctcagggcctacaaagaactgcagaatgaggaaatcgagaagttgataaacctagttacatacaggggccgtttagcacaaggagccccaacctcgccttttattgctaatctcgtgttcctgggcatcgacaacatcataatcaaactcttgaagaagtacgacaagaaggtgtcctacacacgctatgctgatgatataactttctccagtaacaacaccaaaattaagaacgctattcgcataatagtcgatagcatcttgcctaaatatgggtacgtggccaaaaaaaagaaaacgaccatttacagagcccatacaaagcagattgtgaccgggctagtagtgaataaacgggtttcatatcccaggaacaaatatatgaaactgagagcaatggtgttcaatttcctgtccaagggagatggaaatattaacatcattaagggccacctgtctttccttaaatcagtcgaccgaaagaaatacctgaagctgaagttctattacagacgaaattttaaggagaacaacaactacaaggtgctcttcaacaagcagaaaaaaaaacacaagaaggcctcctttacaaatccacataccggcaaaagagaagttaagtttgattactcaggtaagaagatcgagaaaaacgactataagtatgagtccgcatttgagaacatcaagaaaagcaagaagaacaatgacgatgataaaaacgacctcattatttga

SEQ ID NO: 8859 - RNA, 1026 nt, synthetic construct
  source 1..1026: mol_type = other RNA
atgctaatcacaatcatcgttattatcagcatcatcgttttcttcatcacgagcaaaatatggatcggcgcaaaaaagaagtggattatgaagatgtctgatttgttcaaacgggtcctggaatttgacgctcctgatctgtcctataccacatttacaatccctaagaaagattggacttctagacagatcgaagcacctaacgcccagcttaaaaagactcagcagactcttctccatttgctctcaaataacattattctcccatggtatgtgactgggtttcggaagaaattctccatcaaaacaaacgctaagaaacacgtgggtagggaggtcgtaattaacctggacataaaggacttcttcaccaatgtaaccacgcaaaagctgaggcagcgcttagagtacctcaaagtggataatgaaatcatatcccgctttgaaaagctatgctttaacaattggcatttgccccaatgggcccccacaagcccatttcttgctaatttcattttcgtgccgatcgatgaggcaatcattaaaaccgccaagaagtatgacaagaacattatttactccaggtacgccgataacattaccttaagtagtaacgtgaagaacataagtaacctcatcaggataatctcagagtggattatgccaaagttcggatacaccattaatagcaaggttaatctgtcgcgcaaacacaccagacagaccgtcacctggatcacagtgaatgagaagatatctatgccccgtcataaatatatgttactcagagcccaagtgcacgcttatcttactaaatggacgtggaatactctggagattgcctggcgattggcgtttctgtatctgctggacaaaaagaagtactggaaactgcagaagtactacaagaaaaagttctgggagactcaggaactgtcagcggtgtttagacgaaaccctaagaaagtcaaactggacatctacaagaagtggtttattaatccccggacatggcagaaattctga

SEQ ID NO: 8860 - RNA, 1338 nt, synthetic construct
  source 1..1338: mol_type = other RNA
atgaagaaagattttacgaacatctcgacatatcaggagtttatcgagtatatcaaaagctttagcgaatatcagtacttaactcgtactctaagcaaagactttctccaaagaataaatgaaacgcagaatatgggcgacttctatacgaccaagatgatttccaaaaaagcaggtggcaacagggaattagcaatacctattgaagagcttaagcacttgcagaaagctctgctcggcgtgctgaagaaataccagagactgtccattagaaaaagcaaatggtctagcaattacgactatatatccccagcctttaaatccatcaaaatcggttcccacaacaagttctatgtgaataagctagaccttaagaatcggcatactaaggggataccttcacacgtcgtacatgcttctcatcacaccaacaagaaactggtgatcaccttcgactttgagaatttcttcactacaattaggccaaatcgcattaggggcattttcaagggatacttcaaattctcagatttcgtgtgcacccttctgacatctattactactcactttaaggtaggccttcctcaaggagctcccaccagtccgtacctctcaaatctggccacctatgagtttgacaaagcgtttcacaaagaatgtaagaagctggggatctattacagtcgctatgccgatgacgtcgccctgagtaccaacaattattccgttttgtacaacaacagcattttttctgagaagccaaagaatggaaagcggctgcaattttgcgattatctcaacaatctattggagcagaatcacctcaccatcaaaggttctaagacaagggttatgagctactggaatcgacaggtcgtgacaggcatcgttgtgaataagaaaatcagtattgggaaggatgagctggtccgcgcacgttcggtcctgatcaatattggaaaaaccctcactatcctcgactaccggatggggataatagccgtggataagcagattaagaaattctacgacgagtaccaattgcggaactcccatgaggaagagcttcagaccataagagatgataatgaacgctcactctgtatgctgtgcatcgctttgctcacaattcattccctgatcgagtactacagtcaggtgatgcccacaaacagcaaactgatcaagattaaggaactttacaactctatccagtacaacctgttttacaacaagaactatcgacacatcattatcaagaacaaccacttgttcaagttcaacctgcattcattccccatcttcttaattgaaaagctgaacttccagtctcattga

SEQ ID NO: 8861 - RNA, 963 nt, synthetic construct
  source 1..963: mol_type = other RNA
atgtctaaactcagcagcattaacaatgttgcttctttggtcaaggtgatcaatcacaagttgtacatcaaaaagtacgaacccatcaccattgacttcctgaaaaagaacatacataagtatgtggacagaaacattcctaaaaagaggggcgggtttagaacactgaacatccctaacgaccaattactacacgttcaggagatccttctagagttgttctatgaaagtcaggatagaatcgtccgagaaaataaatggatcagccagatcgaccgctccgcacccgcctataagccatctaactattacttgaacaagccagcacattggattcacgcccagaaccatgtgaacaaagccataattgtctcgttcgactttcatgatttttttggatccctctattccggccgtatttacagcgtgttcataaagtacttcaaatgcaataaggcagtagctactattctcactaatctcactaccttcaatcattctctccctcagggggcgcccacaagtccatttctgagtaacctggttatgtactatttcgacaaaacgatgatcaagataagccgggagaacagcgtccggtattccaggtatgctgacgacgtgattctgtcaagtaacgattcacagttccttgataataccaactttttcgagaagtcctttaataatggccagaatatcgaattttccgagcaaatcagcaaactccttctgggttaccacctgtcacttaatccgaataaaacacgggtgtacaattactggaatcaacagaagatcacaggaattgtagtcaatcaccacaccaacatttctaggcgcaagttagtggtgcaccgatcaatcctgatcaacctgattaaagccatagataccaaagatttcgataacatcaagggttacgagcagctgaagattaacataaataaggccctgtcgtga

SEQ ID NO: 8862 - RNA, 2514 nt, synthetic construct
  source 1..2514: mol_type = other RNA
atgaatctcttcaaaatcacaagttctgagtttctgaacttcatattcgctaatttagagtcctctaaaggcattgacaaggatttcatcaccctggtgaagaacatcattaactaccagtacaagttctaccagatctttttgattcgaaaagcaaatggaaagctccggcccatcgccgctccgtatcctgaactgaagagcatacagaaatctatcgtcaagtacctggacctgaattttattccccatcctaacagttttggattccagaaaaacaaggacattaaaggtaacgcgaagatgcaccttaataataagtttgtcttcaacgctgacatcaaggattttttcgtgtcaattaagttctctcacttccgaaaaaagatgctgccaaacgagaatatattcagcgacgattccaatcccctgtcaattcttcgtgtgttctgttttatctctgacgctgaaaataaacaactgagcaaggaggacactcactacttccttccccaaggggctcctacaagccccatcctatccaacatatacttctacgacctcgatgaaaaaattttcgacctgtgcaagcagctcaacattaattattctcggtatgtggatgacctgacattttccagcaacgaaaactacttcgaaaacaactccgattttaggaataagctggtgtcaatcctcaactctgatggtttgagcctgaatgagtccaagaacaagctctattacaaatacaacacacagatcgtcacaggactgattgtgaaccaaaagttaaacgttcatcagcgggtgatcaaagacctgcgaaaatggatctatatttacgaaaggtacggcatcgagaagcttaatctaattttcgagaacgactatcactctaaaaatagaaactccaggaacttcaagataaatacattttcagccctcgagagtaaggtggcctacgtcggctatattaaaggctatagagacagtacgtacctcatcttgaaagagaagatcgggaatatcctcaaacacaaagtaatcgagtcaaatgaggaaaagtcattaataatcctggacagcagtttcttcattcacgggaaaaaaagctacaggctgaaattctacgatggccttaatataccaattgacgagataacagtgaccaagaactattttaagaagaacaagtggaagttcaagaagatactgagtgactggggaatctcgaaccagagcgtctattttcggatcgtgatcaataacccaatcaacatagacttgaataccgccttagtcgttaagaagggtgacaccatctattatgaatatgaggataccgaattcaacaactctagcaagcggaccgacgacaactttgagatccaggttgtggcttataacattactgacgagaacggctacatcactattgtaagcatcgatactcccaacgcaattaagtcagtagtcgctacgatcccaactgtgaatgtgaatcaaacctcggaacaacagaaacacttgaaggatttaagagcgagattcctcaaggataaaacctttatcccagtcaaagtgagtaatacgtcctccattaccgattataggtatggccttttttccgaggaaaaatccacccatcgtcaagtaactgaagaggatctgttgaacccgaaggccattgtgggtattttgagcaccccatggaatagcgagaaaggcgagcaggccactgtctttatcaaaaaggaacaggttcagctcccataccctgcccccattgcacagacagggtcagttgtgctgctcattgataatcagatccatgtgctgcataccaagaagattaaagatgtacccgtgaagtacaaacaactgaccaaactgttgaagcagtttgcctcggaagcgaatgcagatgtgcgcaacgggatttggaagcaactaatcggaagagggagtaccgatggaatagtgatctatagaacagaaaacagcaatattgacgtagagcggcagggagaggtcgtgaataatcgcggcattggtcctcagttgttttacaatcctgacactaatacgatcatctacgaggggaaacgctacaatgtgaatgaggaaaacatcaacgacattatcgacgacctcgctgagcgccgcgttcacattgaagaagcccttgtcgaaacttcaaaagattacaagaaggatatcgtggagtacctaactactgacctggctgagctgaacacaaagactggaacatatcagatagcacctacaatttataccgaaataggcaatgtggaggttcaggataatacgaagacggaggtcaaacttacaccacaggaagagcaggccgccctgtttgattttcttccgtccgttgcaaaggaaaccaaagaagttgtcaaccccaaaaccgaggaggcctctgaaacaaccatcgcaaaaaggatactgcctaaagccgatggggaggatatgtctgacatcctgtga

SEQ ID NO: 8863 - RNA, 1269 nt, synthetic construct
  source 1..1269: mol_type = other RNA
atgaaaaatctcatgattaaggataaggagaacatactcatccagcctggcatctttttctacactcatggctactatagcgcaacccacgcccttgacttcattcattctgcggactcctataagaagattagtatccctaaacggaacggcaaaattcggactgtgtatcagccccacccgaagctgcacgccatgcagagcacaatcaagccgttcttacacaaggtgtactttaagatctgtcagaaacacgggatgatttcctacgagaagcggagtcatatgtcaaaacaggcttggaacaggcatatcgaattacggcgaaggttcccaaccatagaggactttgccgatcacatcgatgagttgttcgacgagtattctgatgaggccgataagcgctatggcaaagaaaaccccaatgataaactccatatgtcctctatgcttcttgatttcgactacgattttttttgctacaagggcatcgaccctgagctcagctacaagaaaaccttcaaatactacggtagtgtggtgcagcatgccagaaacgctgttcgcaaaccttacctgttcaagtgtgatatcaaggatttctacccctccatcacggataagaagctatatcgcatcctgtcaagcgaaccatataacacctacatcagccccgagattgccgcactgatcgtgtctgtatgtacacacagatcgagactagttcagggggcatgcacatccccaatcctggcgaacatgtttatgattcatgccgacaactttttctccaagaacttgaaaaagagctgcacatataatcgttatagtcgatacgtggacgatctcattttcgcgtcagaccagccaatagacgctgccgagatatctaagcagatttctggatacttgagttcaatgggactgcagttgcaccccaaaaaaactcgctacctgctgccacatcaaaaaaaaatcgtgaccggtgtcgtcgttaatcagaagataaatatcgacaggcgatatattcggtgtatcagagccatgctgcacgacgctgaagcccaagggatagagcacgcagcacttagacacgcttccggaaagcatggaaaaattgaagctattgacccccagtactttctgaagcgtctgcaagggatgattagctgggtccagtatgtaaggagccctcacgaaaataattgccaacagctgatcaataggtttaacaatctccagaagaaatgggaacaatcaaaatattga

SEQ ID NO: 8864 - RNA, 1635 nt, synthetic construct
  source 1..1635: mol_type = other RNA
atgaaaaaagaacgcatcaatacagtgaatgattggaacaagctcaacaaattgtctggcaacaaggagatacttagtcacctctataagatcttatctcggttcgccgacacattgaagaatgagattattgcagaaatcgagaagaagaataagcctaaggccgaacagattaaactctcgaaatggtctatttcaatcgatcgactgctttacctgtcaggccaggataacctcaagaagcagtatcataaagtggagatccccaaaaaacggggtggagtgcgcatcctgaacatcccatccaagaagctgcgttttgtgcaaagactccttctagactttctgtccgaaaatttcgaaacacacaaatgcgcctacggctttgtgaaagggaaaagcattgttgataatgccaagctgcatgtgaataaaaaacacgtcgtgtgctatgatatcaaggatttctttccatccattaccggccgtcggatttacggtatgttgcaacagtatccatttaatgcaaataaggacgtagctaggattatcgctaatattgcaacgtattacgatgatgagaaaagcgagaaaattctgccacagggctcccctacatctccctacctcgctaacatgatatgtaggaaaatggacagcagaattttcaacttcttcaaggagaagaacatacattatactagatacgcggacgatctcaccttttctactaatgactccaagaaaatagagctgattctgaagaacgtgcctcgcttcataaaggaggaagggttcgagctaaataattcaaagacccgggtgcagaattattataagcgacagatagtgacggggattatcgtaaataagaaaatatccctgcctcgcgagtacattagaggcctgagggccctcctacacaacgtcgagaagtacggatgggaaagtcaagtgaacagaaaaattatctccttcgagagtgacgattacctcaaattcatcaacttccagaaagagacaaataacgaagaggagaacaaaaagttacaaaagctgaccaagagcaagtttgacgaatataataaaacccagaacaacgagcacaaattgatccatggaaagaactacatagatctgaggttaaaatctcagaagtacccgagccagaggtacactcaggtcgacatgatgaaagagatcataaagggaaagatcgaattttggggtatggttcgcaatatcagggataaagaggggaaaattatcaaaaccgataacacctacaagaatctgaaagacgaatttgaacttctgaacctgatgcaaagaaaggaagacgtccagtacatcaaggttagtcggaagttcgagaacatcattaagagctatgagaacaataagtcaatcgacgagaagactaagaaggagatcattgacaacattaatagcttgaagaagcttaagaacgaaaatctgagcgaaatcgttaaaaacatggtatcacccatccttcacaatcccaaacgaaccagtgaaatcttgatcaaatttcacaaggacgataatgtcctgaagtatacaaaccatgactgggataaagaagacgacaacatgaaatttctgactaactga

SEQ ID NO: 8865 - RNA, 2151 nt, synthetic construct
  source 1..2151: mol_type = other RNA
atgcgcttgcccgactgggataaggcgaccgtgaaggcatacgaaactaggtggagtgccttgaaagccagcgggcccactgatgtgtattcagccgtcgccacacttctgagcacacaatccgataaccctgtgccagaagacttaatacgtcatctggtgggatccaagaacaggaaaagacactaccacaccgtggagattcctaaaagaagggggggtgttcgaactctgaccgtcccctctgacacaatgaagtgggttcagagaggcctcttgcaagtgcttacccatttattcccccggcaccggtgtgccgtaggtttcgagcggggagagtcccccctaacccatgctagacaccatgtgcgaaaaagattcgtgtatgtggtggacatcgaggacttctttccaagcatcacctgggctaggatctacggcatgttacaggcatatcccttcgaactgcctccacacgccgctcgcgttctggctaacttagccacttacgatggagccttgccccagggagctccctcaagtcccatactggctaatttgctctgtcggaaactggacagccgcctctttaagtgggccagaacgaatggttaccagtacagtaggtatgctgacgacctcgcattttctaccaacaagaatgagttcccggtgagtgataggaaattcatcgaacaggtaattcaagaggaaggattcagcattaacgccgaaaagtcaaggctgatgccttacagccgccgacagatggtcacaggcctgattgtgaacaagaagcctaacctcccacggtcctatgtcaggggccttagagcactgttgcacaatgtggagaggcacggctgggaaagtcaggtcgggcgtactccggtgtttaaaagggcgtatgagtggacgctgtaccgggataagaaaatgagccctgaaaaactccttggcatccagctcgaccagatcttctatgatcatctggttcatccaacagcagtcctgcacaaggcccgagatgtggcctcacttcagcgggtggtccagggaaggatcgcatacctgggcttggtacgcgggaaggattgtccaatctaccagagaatgcgggatcaatatttagccctcgtccgtcaagagtcagaaatggcccgagggagagcaatttatcaggaaaaggctcgcgaggtagaatccacccctgatgagcctaaaggccccaatagatatgccgagataaaaaaatacgagcagctgcccgaaccggagtaccgctccaagctccaggaactgggagtgcggacgcttgaatatctcttcctactgagaacaaaccagagttttgaggacctaaaaaaggtggctgctcgtattgcatactctacaactacatcccctgaggaaaccgcccgcttctttgccgaatttgacgacgataagaccttccgcgggttgctccacgaaccgatcgggctggagctctctccgggtgaactggtaggagcctgcgaagaggcactttccaggtataagctgccaaataagctgcgtaagcggactgaggagttactggaggagtgccgggtactgctgcacgctaaccccgacgtttatccatggaagaatgacaatcttcgggacaaagtcctgttgccatacaaaaaggacacgcggtttgatgtcgcgcatggccttacactgaaggagagactcgaggagcatatacagatcctggaaaagcgctacgacaagttttttgaggtggatgcagatctaatgctccgaacatttgtgccagacgtcctcaacgctatcaagatcctgttgatctcaatggcgcagcacacatcggccggaaagattcacattcaggttccagaggttctggggcaagggccaatagagatccacatttttgatgaggacagcgtgatgcaatgcgctcctgatctgctgaaaggtgttctaaaaggcgaatctgccggcgcactccgcagacttaggggctacgcatattggaccattaccgctccttttagcgacggctcgtcttacactttcaacgttatgaccaatgagaaattcaaagcgcccgaacccgcctctggtgtccgacataccctgactttccctcaggtgtga

SEQ ID NO: 8866 - RNA, 1083 nt, synthetic construct
  source 1..1083: mol_type = other RNA
atggtaactctcggaagacgtatcaccagccggcaccggaacattaaacccgtttttacgctaaaacatctgtctgccctgtccggtgtggactacgggttcctgaggcacacagttgggagaaatacagatgcctacaccgagtttaagataaaaaagcgctcttcatctgatgtcaagaaaaattaccgtacaatttgtgtccctagccccgccctcatgaaggttcagagatggatcgccggcaacatcctgtcccatgtttccgcccacccatgctcagtggcattctccgtcggagacaggcttttcgacgcggtcgcaccccactgcccttccaagtggttagttaagctggacgtaaggaacttctttgagtctattaaggaagtgtcagtgtaccatgtgtttctgcagctggggttcgaaccgcttatcgccttcgagatgacacgcctgtgtacctacgtcgcttcgaatgcaagcaataacaacgacagatggcatgatagctttttcctccctgaacatgtgattactctgtatcaatatccagagcaaggtcacttgccgcagggagcacctacgagtccaatgcttgccaacctcgcttcgcgaagcctggatgagcgattggccgcgcttgctgacgagaatttggtacgctatacccgatacgctgacgacatgacattttctagcgacgacgtggatttcggccggaaaagagctggcctactcataaaacgggtgtaccaacagctggatcggcagagcctgtcacccaataccgctaaaactaccgtcattccacctggtgcacgtaagttagtgctgggactcagtgtggaggaaaccgtccctaggctgactcgccagttcaagaacagtttcaggcagcacatccactatttattgcgcgatgatgtggggcccaccaaacacgccgcagctagaaagtttgcctccactacaggcctccgccatcacctggagggccttctagcgtttgccgctcagatcgaacccatgtgggcagccgctcagcggaataggttgcaagccgtgagttggccatattga

SEQ ID NO: 8867 - RNA, 1152 nt, synthetic construct
  source 1..1152: mol_type = other RNA
atggagcactggaatccacaactctttagaaaccaggctgcaggggttcctcccgagctggttgcacatatggtcacggtaggcaggaggattaccagctgccaccgggctgtgcagcctgtgtttaccttgaagcatctcgcagttctgtccggggtggattacggcttcctccgccatacagtcggcagacggacggatgtttacaccgaattcaggatccggaagaggcctagcgcaaacgggcaaaatagatacaggactatatgtgtgcccagtcctgccctgatgaaagtgcaacgatggatcgcccgcaacatactgagccatgtccccgcacacccatgttccgtggcattcagcgctggcgacagcctgtttaaggccgtcgctcctcattgtccctccaaatggctcgtaaagttggacatccgcaattttttcgaatctattgaggaaacctcagtatacaatgtgtttcatcagttggggttcgagccactcattgcgtttgagatgacacgcctatgcacctatgctaggtctgaccctagtttgggaccaaaccatcggaccgacggactgttcttacccgagcggatcatcacactgtatcagcacccagcccagggttacctcccgcaaggtgctcccacttcccctatgctggcaaacctagtttgccggactttagatgatagactctcaacccttgcggacgagcactcagtccgatatactcgctatgccgacgatatgaccttcagcactgacaaggtagacttcggacgtgagtctgccggcgtgctaatcaagctggtctaccagcagcttgcccgtcaggccctgagtccgaatacagccaaaacaaccgtggtgccgccaggagcgcgaaaactggtccttgggttaggcgtggaagaggctgctcccagactgacacgccagttcaaagatttgctgagacagcacattcactatctgctccatgatgacgtgggacctattaaacacgctgccgccaggaagtttgcctcgacaacgggtctgcgacaccaccttgaaggccttctggccttcgctgcccagatcgaaccatcttgggcagcgactcagagatcacgttttaacactgtgtcctggccctactga

SEQ ID NO: 8868 - RNA, 1152 nt, synthetic construct
  source 1..1152: mol_type = other RNA
atggaacggtggaatagccagatcttcaggaataatgcagtcggcgtccctccagaattggtggttcatatgaccgctgttggaaaaagaatcacctcatataatcgcgaagtccagcccgtattcactctgaagcatctcgccgtgttgtcaggcgtagactacggtttcctgcgccacacagtgtctagggatactaacgcgtacacagagtttcggatcagaaagaggtcctctgtgcacgggcagacccactatcggactatttgcgtgccaagcccttccttaatgaaggtgcaacgctggatcgctcgcaacatactgtctcacgtgcccgctcatccttgctccgttgccttctctacaggagatagtctgtttaaagcagtcgctccccactgcccgtctaaatggctcgttaagctcgatatacgatcattttttgagtcgattgacgagatctccgtctaccatgtgtttaagcaactgggctttgagtcccttatcgccttcgagatggcccgtttatgtacgcatgtaggggcggaacccagccacgaaccagatatgggccacgactcgcacgtgctgcccgaaagaatcataaagctttatcagcacagtagacaagggcacctgccccaaggggctccaacctcacctatgctagcaaacctggtgtgtagaagtctggatgagcgacttagcacgattgccgacaaacatagtgtacgttatactcggtacgccgacgacatgactttcagcagtaacgaggttgactttggaagagagagggctggacgtttaattcagctcgtgtaccagcagcttaaccgccaggccctgaggcctaatactgctaagaccacagtcgttagccctggtgcgcgcaaactggtgcttggtttgagcgtggaggaggatgtcccacggctcacccgacagttcaaggaatcactgaggcagcacatctactatctcctccacgacgatatagggcccgccaagcatgcagcaacaaggaaattcgcctccaccattggcctgagaaaccatattgagggcttgctggctttcgcctctcagattgaaccgacctgggccgcactacaaatctcccggtttcagacagtgagctggccacattga

SEQ ID NO: 8869 - RNA, 1149 nt, synthetic construct
  source 1..1149: mol_type = other RNA
atgcagcgttggaatccacagttattcaggaaacaggcgtccggcgtgaaacccgaacttcttgcccatctggtgaaggtgggacgcagaattactcaagcacatcgcgatgtgcagcctgtctttaccctgagacacctggccgctctgtctgaagttgattatggcttccttcgacagacggtggcccggagaactgaggcatacgctgaatttaagatcaaaaagcgggggagcgagcaccttagcccccagtaccgcacaatctgcgcgccttcaccttccctaatgaaggtgcagaggtggatcacacagaacatcttggctcacgttccagctcacaattgctccgtggccttctcaaaaggtgacagtctctacaaggcggtagagccccattgcctagccaaatggcttgtgaagatagacgtgcagtcattttttgagtctatttcagagagtacagtttaccggttgtttaacaatctgggttttgaaccactcgttgcattcgagatggcccggctctgtacgagggatcagcacgatgcccaacacaagaaggagcagtggaaagattattcccctgctagcctgtatgtcattgagcagtatatgcatagcgtacaaggccatctgccgcaaggggctccgacctctccaatgctcgccaacctcgtgtgtcgggcactggatgaacgcctggcggccattgccgaggaacagaacctgaattacacccgatatgcagacgacatcacatttagctctctggaccccaacttcgagagggaaatggcaaaggctctcatccagagagtctacagggaattggcccgtcagggactgaaacctaatactgccaaaaccactgtcgtgcccccctcggccagaaagatcgtcctcgggctatccgtagaggaggaaacacctaggttagcaagacacttcaaggacttgctgcgtcaacacattcactacctgacccacccagaggtgggcccaataaagcatgctactgctcgaaagttcgcaagtgtcgtggggctccgccatcatgttggcggattattgacctatgccgcccagatagagccggactgggctgctaaacaacggatgcgcttcctggaagtcaaatggccctga

SEQ ID NO: 8870 - RNA, 1155 nt, synthetic construct
  source 1..1155: mol_type = other RNA
atggagcgttggaacccgcagctgttccgaaagcaagctagtgttgtcgcgccagatgtgctcgcacaatgcatcgcagtggggaggagaatcactgccctccaccgcgatgtgcagcccgtgtttaccctcaaacacctggcagtgttgtcagaggtagactttgggttcattcgacagacagtcgctcgcaggaccgacgcgtatacagaattccgggtgaagaaacggtctactcaaaatggtgacccacgatacaggaccatatgcgtccccagccctggcctgatgaaggtccagagatggattgctcagaatatactggcccacgttccagcacatgcctgttcagtagccttctccaagggagatagcttgtataaggccgtggagcctcactgtagcgctaagtggcttgtcaagctggatattcggaacttttttgaaagcatctccgaggcctccatttacctgacactccagagtttaggctttgaacctttgattgcattcgagatcgcgaggctgtgcacccgagtggtggatgacggcatgcaccggaacgacaggtggctcaataacttcaagcatctgagtccctatgtcatcgcgcaatatacacagacacagcaagggcaccttccccagggcgctcctacttctcccatgcttgctaaccttgtttgccgcgcactggatgagcgtctacttgccgtagccgaaagagctgacgtccgttacacgagatacgcagatgacatgaccttttcctctgacgatgcctccttcggaagagacagagctcaaaaactgattcaggccgtgtacaaacagctcgcttgtcagagtctgtcgcctaatatggcaaaaactaccatcgtgccacctgccgctcggaaagttgttctgggcttgagcgtggaagaggcagagccgcgcctgacgagacagtttaaggccctgttgcggcagcacatatactacctgtcaaggcgggacgtaggagtgatcaagcatgcctcagcccgcggattcacttctgtgaccgggttaaggcatcacctcgagggtttactagcgttcgccgcccagattgaaccaaaatgggctgccatccagcgcagccattttcaggcaatcaaatggccctattga

SEQ ID NO: 8871 - RNA, 1152 nt, synthetic construct
  source 1..1152: mol_type = other RNA
atggagaggtggagccctaggcagtttcgcaaagaggcaaaagacgtcgaccccgacgtcctccaaagagccattgccgtgggaaacaggattgttgagctaaatcgtgaagtccagcccgtgtttactctgaagcatctctctgttctctcaggtgtaggctacggctttctacgccagactgtggcgagacgcaccgaatcctatacggcattccgtatccagaagcgacccacccctgacggagaaaggcggtaccgtactatttgcgtgccaactcccgcactgatgaaggtgcagcgctggatcgcgcaaaacatactgaagcacgtgccagcgcacgatgcctctgtagctttcagtaaggatgatacactgtataaggctgtggagcctcattgtagtgccaagtggctggtgaagctggatatcagaaaattcttcgagtcgatttctgaagcttcagtgtatcttgtgtttaggagcttgggctttgagccactcatctcattcgagctggcacgactgtgtaccagggtcgtggacgcaccgatgtaccgcagcgatgcctggctcaatgcccattggaatgatgaatatgtcatcgagcagtaccgccaagtatggcagggtcacttaccgcaaggggccccaacctcacctatgcttgctaacctggtgtgccgcaagcttgacgagagactggctagcattagcgaatcgttcagcgtgcagtacacacggtacgccgacgacatgacgttctctagtgtagatcgatcctttgatagagcccgggccatgaaacttatcggcaaagcttacgagcagctgagcttacagggtctggggcccaataaaaccaagacatccgttacaccaccagggggaaggaaggtggtcctcggattgttggtggaggaggaaaaaccccggctgacacgggaattcaaagccatgctgcggcaacatttctattacatgctccgagaagacgttggagtcgttagacacgcttcctccagaggcttcataagtatcaccgggctgaggaaccaccttcaggggttattgggctttgccgcacagatagagcctgagtatgcagctagacagcgggaaaaattttctcgggtttcctggcctttgtga

SEQ ID NO: 8872 - RNA, 1161 nt, synthetic construct
  source 1..1161: mol_type = other RNA
atggagcgttggagcagccatcaatacaagaaggtggctcatgagagaggcgtgccatctgccgttgttgagaacgcggtcgctattggaagagagatagtaagaaagaaccctaacgtgcagcccgtgttcacactgaggcacttggccgagctctgtgaagtggactacgccctgctgagacagtacgtttcacgagggtttgacccctacgagagtttcagagtcaggaagaggcccggccctaatggtgagcgccggtacaggatcatatgcgtacccaacccgcctctaatgaaggcacagcgctggatcacacagaatgtgctgcagtatggggtggttcacaacgcttccgtggccttcgctcctaagtctaaactcttacatgcaacagagccccactgcaatgcccggtggctgatcaaattggacatcaaacggttttttgagagtattcccgaaaggtttgtgtatcgggtctttagggacttcggttaccaggcgctcgtcgcgttcgagatggctaggctgtgtacaagactttatcctggccccctgtttgattcccgcaaatggactagcagcggactgcgggaaagcccgtataagattcacgcttacgatcaatcttggcaaggacacttacctcagggagccccaacctccccgatgctagctaacctggtctgctacaagctcgatgagctcctcgcagatttggcagattcagacggcctgcagtacaccagatatgccgacgatctgaccttcagcaccaattctaaggaatttagtcgcgaacaggcagcagcagtggtaggtaaagttttccagcatctcgctcagatgggcttctcccctaatagatctaaaacttcagtgatcccaccacggggacggaaagttgtgcttgggctacttgtggatggctcccgcccacgattgtcaagggaattcaaagccagtctgcgtcaacatttgtactatctgacgcttgacgggtggggaccagtcaagcacgccaaagtccgaggctttgcctcgctcgtaggtttacgtgaccacgtgctggggctgattggctatgccgggcagatcgagccagcctatgcccttgctcgccgacgcgaattcgaaactattaagtggcccatctga

SEQ ID NO: 8873 - RNA, 1188 nt, synthetic construct
  source 1..1188: mol_type = other RNA
atgtcagattggaggccccaacattaccgcaagaatgcaccggcagggagcccagcaagcactatcgatgccgcactggaagttgcaagtattacctccacggccaatagcaggttaccccccattttctctttgagacacctggcccattatacatccattaactacaacattctgcgcgctgctatctctcgtagtggacccgaaccttatcgatctttccgaatccggaaacgtacagagaaatcctctgagcggtaccggcacatatccgtaccttcccacgccttgatgtgtgttcaaagatggattaaccagcggatccttcaacagtgccaggtcgacgacgccagtactgcgtttgcgaaagactcaaagctcatcgaggccgccaccatccactgcaaaagcaggtggctggtcaaaattgacgtgaggaactttttcgactcgataaacgagataagcatctatcgggtgttcaatagtctggggtaccagcctttagtggcttttgaactggcaaggttatgcactcggaaaagcgcacgacattccaagaattggctgaattttagaccggaaaccagggatgtctgggccgccccagatgacgaggggaaagcttggtctagcgatatggtcatcaagtcatatgacgctctacaccagggttacctcccacagggagccccaacctccccaatgctgagtaacctagccatgcgttcgtttgatgagaaggtgcgcgacttggcactcaagcgcggcttcttttacacccgatatgctgacgatatttcactgagcacggagcgcacatcttcacgcgtgacctgtgtcgaactgattagagatgtgcaccagctgcttcacgaggagggactgagtccgaacttcgctaagactaaaatcgttcctccaggcgcgaagaagattgtgcttggccttttggtgaacggagaaaaaccccggctcacaagagaattccgcctcagactgagacaacatttgcactttcttgagaagcctaatggtcccgtagagcatgccgctaagcggaagttcgcgtccgtgtctggcctgagacaccatctgctaggcctcgccgcttatgctgcccagatagaacccgagtacgggcaggacatccagcagaggctcaggaatatcccttggcctagctga

SEQ ID NO: 8874 - RNA, 1191 nt, synthetic construct
  source 1..1191: mol_type = other RNA
atgagcgactggaggccgcagcattacaggaagcatgctccatgcggactggggagcggagtactggacgctgcaattaaggtagcagctggcacccgacaagcaaatgccaagctcccccccatcttctctttgcggcacttagcacattatagcggaatcaactattatgtcctgcgggccgctgtgagcagatctggggtcgagccatacagatcctttcgcatccacaagcgacctccgtcacatgtgagacgttaccggcacatttcaatccccagcccggcactcatgcaagtgcagaggtggatcaaccagcgcattcttcagcagtgcgaggtcgatgaggcctctgtggccttcgccgaaaattgtaaaatctttgacgcggcaaagctgcactcccagtcgaggtggctgattaaaatcgatgtgagggattttttcgactccattaacgaaatttccgtgttccacgtctttaataggcttggctaccagcctctggttgccttcgagctcgcccgattgtgcactcgggaaagtcaccatcgtaaggggaagaactggaagaactttcgactgaaggataacgagatacccagtctgtgggatgagtccgagcctagatggaaatccaacatggtgataaaatcatacgactctcagcaccagggctatcttcctcaaggcgcccccacgagtccaatgttgagcaatctagtgatgaaagactttgacgagaaagttggggcgctcgctagtgaaaatggctttttttacaccagatacgcggatgatataactctgtccacagctgatcagtctagtcggacagactgtgtccaactcatgagggcggtgtatcaactgttacacgaaaagggtctgagcccaaacgtcgccaaggctaagatcgtgcctcctggggccaaaaagattgtgctgggactgctagtaaatggtgacaaaccacgcttgacacgcgaattcagactgcggcttcgccagcatttattcttcttggagaaagagaatggtccagttgaacacgcaaaacgtcggaaattcgcctctgttagcggcctcagacatcacctcatgggactggccgcctatgctgctcagatcgaacccgcatacggccttaagatacagcagcgcctaatgaccatctcatggccctcatga

SEQ ID NO: 8875 - RNA, 1191 nt, synthetic construct
  source 1..1191: mol_type = other RNA
atgagcgattggcactcccagcggtaccgaaaagcagcgcctgctggacagagttccgcagtgattgacgcagctattcagactgctagtatcaccaagcaggtaaacgctaaattacctcctatttttagtcttcgccatttgagccactacactagcatcaattataatatcctccgggccgtggtttcgcgttccagaagagagagctaccgctctttccagattcaaaagcgatcaggacggggcgcctcccgatttcgcagtatttctgtgcccagcccagccctgatgcaggtgcaacgctggatcaatcaacgtattctgcagcagtgtaaggtcgacgaggcctcagtggccttcgccaaacacgccacactgacagaggccgccaaaatccactgccaatctcgttggctgataaagatagacgtccgaaatttcttccattctatcaacgagatctccgtgtaccgggttttcaaatcactcggctaccaacccctggtagcatttgagctagctaggctgtgcactagacagtcactcattggccccgggaaacaatgggaaaatttcaggagcacgaaggacgacatccaggctgccctggacgataagccagtgatgtggagttctgatatggtgataaagagctacgattctccgagacagggatatctcccccagggtgcaccgacctcccctatgctgagcaaccttgtcatgaggagctttgatcagaagctgcgcgacctggcttccgaaagtcagttttactatacgaggtatgcggatgacattactttatcaaccaccgaaccctcctctagggcaacctgtctcgccctcatgaggaaggtatatcagttattgcacgatgaaggcctgtcgccaaacgccgctaaagtccagatcgtgccacccggagcaaaaaaaatcgttctagggcttttggtgaacggtgatacacctagactgacacgcgaattccggttgagactccggcatcacctgtactatctggagaagcccaacggccctgttgagcatgccgccaagagggacttcgcttctgtctccggtcttagacatcacttgtttgggcttgcagcctatgcgtcacagatcgagccggcgtacggggctcaaatacagcagcggctgaggagcattccatggccagcatga

SEQ ID NO: 8876 - RNA, 1194 nt, synthetic construct
  source 1..1194: mol_type = other RNA
atgacaagatggaggccccagcgctatagggctggagcagtagcgaaaggcattagccctcagatagtggagcacgcactccgtaccgcagagatcacccacgccgtgaacggtaagctgccacccatactgacactccgccatctggctgagtatacgggcgtcgactacgggactctccggagtgtggcccgtcgaagcgatgaagtcagttatcgggtcttcaggatccgtaaacgccctgcacataagggggagagacggtttcgagtcattgctgtgccgtcagcacccctaatgcagatccaacgctggataaacaagagggtgcttatgcacgccgatgtacatcccgctagcgtggccttcgccgaagacgacaatattagggaggcggctgcggttcactgccagtgtaagtggcttattaagttggacgtgttaaacttctttgagtccatcagcgagatcagtatctataaagtctttagaagcctcggctatcaaccgctcatctctttcgaattatcccgcatctgcacgcgcatatctaaatccaccgccaatcggtcctctgaacggtggattaatttcagacctggatccgccgttgataccgatggcgtgtcatctattagtggtatgaccatccgggcctacgacgaataccgcatcgggcaccttcctcaaggagcccccactagcccaatgctggccaacctggctatgagggaactggaccagaatctcacagaagttgccaaggtgcacggacttttctatacccgatacgcagacgatctgactttctcgacaagggaggactcggatagacgtaaatgccaacacattattggccagatttatagagcactcgctaacgtgggtctgtccccaaatcgatgtaagacaagaatcatccccccaggtggccggaaaatcgtgttgggattgctggttactggacctgaaccaagactaatgcgagattttaaggctaggttgagacagcatttttactacctggagaggccgaatttcgggccttctcagcatgcgcggaagctgggctttagctcagtcatcgggtttagacaccatctggccggcttagtatcatacgccgctcagattgagccagagtacgggcagaggatgcggaaccgcctgaagaacataaaatggcccatttga

SEQ ID NO: 8877 - RNA, 1179 nt, synthetic construct
  source 1..1179: mol_type = other RNA
atgactacctggcgtcctcaacactttaggtctgccgcaacagccgccggacgagatcccagtaccatcagaaatgccctagccgtggctgagaatataagacgtcataaccccgccctccctcccatctttagcctgaaacacatggccgaattaacagggaacgactatggtgtgctccggtcgattgttaagcgggacgagcccgacccttacagaatcttcacaattcggaagcgacctagcttcgacggagagaggcggttccgcctgattacagtgccacggccagccctgcttcggactcaaaagtggatctgtcagcagatccttgctaaggcaaccccccacgggtcctcagtggccttctccaaagggaatacgctctttgacgctgctaggccacattgcgaatccagatggcttatcaagatggacgtgcgcaacttctttgagtcaatcaatgaaatagccgtctacagagtattccgcagcctgggatatcagcccctggtgtccttcgagctggctcgagtttgcacgcgattgggtggccctactccgttgcggagtactccgagatggcactacgatcccaagaattggccaagcatctctgcataccaggtctaccgatacgggtatggccctagaatgggccatcttccacagggagcaccaacctcacccatgttggctaatctggctatgcgtgaatttgatcatgctgtggatgaaattgcggcgcgccacggcctcagatatacacgctatgctgacgacctcaccttctctacagattctgacgatttcgatcgcggaaaagcggggcacttcatcggtctggtttacaaggagatgggcaaggtgggcctgtcaccaaacataaccaaaactcgcgtcgcaagtcccggcgccaggaaagtggtgttaggtctgttagttgatgggaagaggcctaaactgcctagggagtttaaacaaaacatgcgccggcacattttttgtcttacccatgagggactggggccagtacggcatgcccaggaacgtggatttagctccgtcaggggcttcaggaggcacattcagggcctcctggcctttgcaaaccagattgagccggaatatgcggcaggttgcaggcagcaactaagaggcgtagtctggcctttgtga

SEQ ID NO: 8878 - RNA, 1179 nt, synthetic construct
  source 1..1179: mol_type = other RNA
atgacctcttggcgcccccagcattttcgaagtgcagctgcggcagccggaagggacccatcaacaatccagaacgccctggcaatcgcgcaggggattaggcagcataatgccatcctgccacccatcttcacactcaaacatctggcagagcttaccggcaccgagtatgctgcactcaggtccatcgtcaaacgagatgagcccgacccttataggatctttactatccgaaaacggccgtcctacgatggggaaaggaggttcagactcattactgttccaagaccttctctcctgcgtacccagaagtggatttgccagcagatcttggccaacattgtgccacactctagctcagtagcattctcgaagggcgatacggtttacgatgctgctaatcctcactgtgaatcacgctggctgataaaaatggatgtccggaattttttcgagagtatcaacgagatatccgtgtatcggatcttccgcagcgtgggttatcaaccccttctgagctttgagttagcacgaatttgcacaagactagggggcgcaacaccactgagaatgaccccccggtggaattacaacagccggcaatggagtgccatcagctcttaccaagtgtacagatacggacacggtcctcgtgtggggcaccttcctcagggagcgccaacttccccgatgcttgctaatctcgccatgagagaatttgaccgcagagtagaccacctggccactcatcacgggttgagatataccagatatgctgacgacttgaccttctcgactgtgtctgacgatttcgaccgcggcctggccagccacttcattggcttagtctacgccgagatgggcaaggttggactgtcccccaatgttaccaaaacacgggtggctagtcccggtgcccgcaagattgtgctcggccttctcgtggacggcaaagctcctaagttaactcgagagtttaagcagaacatgcggaggcacattttttgcctgacacacgaggggctaggtccaacgcggcatgccgaagaacgtggattcagctccgtcaggggactgcgccgccatatacagggcctgctggcctacgctaagcaaatagaacccgattatgccgcgaactgtaggcggcagttgcagtcagtggtctggcctttgtga

SEQ ID NO: 8879 - RNA, 1173 nt, synthetic construct
  source 1..1173: mol_type = other RNA
atgactagctggtcacctcaacacttccagacagtagctgacagcgctgaaagagatcccaaggtgattcagaacgcccttaccgccgcaagagtcattcgtagcaccaatccagccctgcctcctgtgttcacgctgggccaccttgcacacctgaccggaagcgaattttttcagctccggagcgtggcccggagagatgaaccggacccataccggctgtttcggatccggaaacgaccgagctttgagggcgagcggcgatttcgaattatcaccgtgcctcaaccacacctacttagggtccagcgctggataacacaggcaatcctggcgaacgctttaccccatcaggcttccgttgcattctctaagggtaataggttgagggacgccgccgctgttcattgtaattcatcttggctcatcaaactggatgtcacgaacttcttcgagtctatttcagaaatttcagtgtacaggatctttcgtagtctgggatatcagccactgataagtttcgagatggccagaatatgtactcgcctcggcggccccacaaccaggaaacgaggggaaagatggagagtgcactttaaacctcgggagattaagtcctacgatgtatatagaccctttggaggcgcccgtgtggggcatctaccccaaggtgcccccacctctcctatgctcgctaatctggccatgagaagttttgacactgaggtggataagctcgccgttgagcatgggctgaggtatacacgctatgcggacgacttaactttctcgacaaagggggaattctcccgcgatcaggccgcacacgtaatcggcctcgcttacaaggccatggggagagtcggcctgtcgccaaacgccactaaatcccgagttgctccacctggatcccgcaaaatggtgttgggtctgctggtcgatggcgctgaaccgcgccttccacgggagttcaaggaatctatgcggaggcacttatattacttgtgccgcacagacatagggcctgtggcacatgcgagggctcgtggtttcgccagtaccatcggaatgaggcatcacattgagggattgctcagcttcgcgaagcagatcgagccctcctacgcagcagagtgcaagcgcaaatttgcaaacatcgactggcccatctga

SEQ ID NO: 8880 - RNA, 1119 nt, synthetic construct
  source 1..1119: mol_type = other RNA
atggcaaatgctttggccactgccagccagctcaagatcccttcacttcctccagtgtttacccttgcccaccttgctcagcaggcaggagtggactacggcgtgctgcgacgtgttgctcagaggagcccaaacgaaggttaccgcgtgttccggataaggaaacgcccagcttatactggcgagcggagataccggcagatagcggtgcccagtccacagctaatgaaggtccagcggtggatcacccaagcgattctcagcaaagctgccgcccactcagcatcagtagccttttccaagggagataagttagcagacgcggcagcccctcattgcggttgtaagtggttaataaagatggacgtgagaaatttcttcgagagcatcaacgaaattgcagcatatcgcgtttttagatctttaggctaccagcccctcgtgagtttggagatggcccgcatctccacgaggctagccggatggagtccaagacgagccaccaacaggtggcgcgtagaagactggcggcacatggagcgccgatggtccgaaatcgaggcctaccaagcatatcgagacgatagcggaccccttctcggccacttgccccaaggagccccaacctctcctatgctggccaatctggctatgcgggaatttgatgctcaggccgccgcaatcgctgagcagaatgggatgatctataccagatacgctgacgatctgtcattctctacggatcagcccatcactaaagctgattgcaggcgtcttattgggacaatttacaatctgatgggcactattgggctgtcgcccaacgtgacaaagacaagagtttcccccccgggagccagaaaaattgtcttggggctgctggtagacggtaagaaacctcggctctcccgagagtttcgtgcgctgatgaggcagcacctgcattatctcatgaaggatggggttggccctgtgaggcatgccagggctaggggtttcgtctctgtggctgggttccggaaccatctgagaggcctcgcgacatatgcacgccaaattgacgtcgtctacggcgatggactgctgagagagctggacaaagtgagctggccggtctga

SEQ ID NO: 8881 - RNA, 1152 nt, synthetic construct
  source 1..1152: mol_type = other RNA
atgtcccggtggagcccccagcaataccgaagtaatgcccagaatatcgacccagacatagtggcgcacgccatagaaacggcccgcctcattcacgaagtgaacgccgagattacacctgtcttcactctcaggcacctcgcctatgcgaccgacgtagattatggcttactgagggcaatcgcctccagagctcatggagagccataccgcctgttcgtgatcaaaaaacggcctagcaggtcaggggagaagagatttcgggtgattgcggttccttctccagggttaatgaaagttcagcgttggatcacccaccggatcctgggccatatacgcccccaccccgctagtgtggctttttctaagggcgataagattgtgtctgcagtccgccctcactgtggagcacgatgggtaatcaaaatggatgtccgaaacttctttgagagcataaacgagatctccatttaccgtgtgttccgcagtctgggattccaaagactaataagcctggagatggcaagaatttgcacgagactgggcacacctactatctcaagactgcatcagcgttggaagagcaattatcagagggagactatccacgtgtatggcgctgggagaatggggcatctaccccagggcgctccaacctctcccatgctcgccaacttggcggtccggaaactggacgagcttattgaagaaattgcaaccaagtgcggcatgatctataccagatacgctgacgatttgacactctctacaaaggatatgacctttaatcgggaccaggcagggatcgttatcggcaagatctacgccgctatgggactttacgggctgagcccgaatatcactaagacaaacattttgagtccgggaagccgaaaaatcgtcctgggtcttctggtggacggtgaaaagcctaggctttcccgggatttcaggaatctcatgaggcagcatctgcactacctcggatcattaaagcatgggccagccgagcatgcctccaagaggggattttcctcaatacgcggtatgaaacaccacatttatggtctggcaacttacgcccgccaaatcgaagaatcgtatggcattgaatgtattgccgctttgaacaaaattgagtggcccatctga

SEQ ID NO: 8882 - RNA, 1152 nt, synthetic construct
  source 1..1152: mol_type = other RNA
atgagtaggtggagccctcaacaatataggcgctccgcgaaggacacagaccctgggattgttgcaaacgccatagagacagcaaaactgatccatgccgtcaatgccgatgtggccccagtgttcacactgagacacctggctcacgccgcggatgtggactatggactgctgagagctattactagtcgggccgacggcgagccataccgattgttcctgatcagaaagcggcccagccacactggcgaaaagcggtttagagttattgctgtcccctcgccggcactgatgaaagtacagcggtggatcacgcaccgcatcctgggacatgtgaggccccactcagcaagtgtcgcctttagcaaaggggataccctagtggcagctgctgaaccacactgtggcgccagatggattgtgaaaatggacgtgcggaatttctttgagtccattaacgaaatttccgtgtatagggtgttccagtccctgggcttccagcgcctgatatctctcgagttagcacgtatctgtacccgcctgggctctcttacaacgtctcgaaaaaatcctagatggtggtctaatagagagcgtgaaacaattaaggtttatggtgctaggcgcatgggacatctcccgcagggtgctcctacttccccaatgctcgctaacctcgctgtaaggaaattggacgagttgatcgaagagatcgcggcaaaacacgggatgatctatacccgatacgccgatgatttgacagtctcaaccaaggacaagaccttcaaccgggataaatgccgagctgtgatcggagaaatatacgcagccatggccaagcacggcctttcaccaaacaccgccaagactatcattctgagccccggcagtcgcaagatcgttttaggactcctcgtagacggagaggaaccccgcctacagagggactttcgtattttaatgcgacagcatctctactacctgactagccctaagcacgggcctgccgatcatgccaggatcaggggcttttcctctatacggggtatgcggcatcacatacatgggctggcgacctttgccagacaggtcgagaagccatacggggaagagtgccttagcgcacttaataaagtgaactggcccgtctga

SEQ ID NO: 8883 - RNA, 1158 nt, synthetic construct
  source 1..1158: mol_type = other RNA
atgacgagatggaacccccagcaatttaagcgggacgctgaaagggccggacttgaccctgctgttacagctaatgccattagaacggcccgtctcgtgacttccgtagatccagatcttcccccagtcttgacactgcgccatctggccgcccttacccgaagtgactacctgatgatgcgcggcatcgccatgcgaagccagaacgagcattacaggctctttcgtattagaaagaaacctgcgcatgacggagagaagcgcttccgcgtgattgcagtccccgaaccggggttgatgagagcacagcggtggattgcccagaggatcttggcacgaattcggccacacggggcctctgtagcctttagtaagggagacaagctggtggaagcggctagaccacactgcggtgcccgatggctgataaagctggacgtgagcaacttttttgagtcgattaatgaaactgccgtgtatcgggtgtttcgcagcctgggctatcaacctttagtgtgcatggaaatggcgaggctatgtacccggctcggcacaaccactcattaccggagtcgccctcggtggctgttaacccgtgaaagatccactatagaggtgtattcacgcaggagaatgggccatctcccccaaggggctcccacatcaccaatgcttgccaatctcgcggttaggctgttcgatgaggccatacaggaattagcagatgcaaatgacctggccttcacaaggtacgctgacgacatcgcactgagctctcaggacgcaaaatttggtcgggacagatgtgccgctgtgatcggaaaggtctacgctaagatgggcgagttcggtctgtcacccaatgccaccaaaaccagggttgcatccccgggcgctcggaaagtggtcttgggactcctggtcgatggcgacgagcctcgactgcctagagatttccgtgcaaacatgcggagacacctacactatctctgtgtacccggggccgatatcgcagttcacgcggctgccagggggttcgattctatctctggcatgaaaaaccacgtgttcggacttgcaatgttcgctaggcagatcgagcgcgattacggggatgagtgcttgtccaaactgaacgctgtcgcctggccacgctga

SEQ ID NO: 8884 - RNA, 1155 nt, synthetic construct
  source 1..1155: mol_type = other RNA
atggaagattggcttcctcaattgtaccaaaaacagggcactgaagccgggattgcccccagggtcctggcaaatgctaacttgacagcgaagagtatccgagccgttaacagacacgtaccaattcttttttcacttaaccacttggccgtgcgttgtggcgtgccttacagctttctgagggccgtggtggagaggcatgattttcaattctaccggtccttcaggatccggaaacgcccactgaagggcagagtgagattccggctgattagcgcccctgtccccttcctgatgcgcgttcagaggtggatagcacaggagatcctatctaatggctacccgcacgaaacctcaaccgcctatgcgaagcggtcctctcctttgaaggctgccgctttacattgcgacgcacgatggctcatcaagatagacgtgatgaatttcttcgaatcaatcaccgaagtcagtgcctatcgagctttccggaggctcggatatcagccactattgtcatttgaaatggcgcgccttagcacaagggttcggagcgccttacgacagctgccgtctccctactggcacactcaggctcatcgctggccaaagatcgaaagttatcagtgttggagaaagggcgggctgccccaaggtgctcctacttccccgatgttagcaaacctggccagtattgctctcgacgaatgcctggcagaggtggcacgcaaatatcggctgacctattcccgctacgcagatgatctgtgcttttccacaagcggcgatttctccaggaaagattgtgctggtgttatttccgaggtgtacgccggactgcgcaaatttgggctcagaccccagaccatgaaaacaacggtgtctccacctggtgcccgaaaggtggtgctggggctcctggtcgacaggaatactccccacctaacgcgggagtttaaggcacgtctgaggcagcacctgcactacctcagaaaagccgacgtaggaccagctagacatgcagagcgccgtggattttcgtctgtcatcgggcttcggcatcacgttgagggactcgtcgagtatgctagctctgtagacgcggtgtacggcgagagcagaagacgtgagctcgccgaggtcagctggcccttctga

SEQ ID NO: 8885 - RNA, 1152 nt, synthetic construct
  source 1..1152: mol_type = other RNA
atggagaattggttgagtcaacggtatagaatggatgctaacaagcagggtgtggacccagaggttgtagagcacgcagtggcaacagcagagaatatcagaagtattaacccgaacgtgcctctcctgttttctctgaaacatctcgccttgcgggcgggcgtcccatatgagtttctgcgcgccgtggttgaacgccaggagagacatttctaccggacattccggattcgaaagaggccgctggagggcagaatccgcttcaggttgattgcggctcctgtaccccctttgatgtccgtccagaggtggatcgccactcagattctgagcgaggggcacccccatgaagctagcgttgcctacgctcgtcactcatctcccctgaaggctgcttcattccactgcaacgccaggtggcttatcaagatcgacgtgatgaatttctttgaatccattaccgaagtggctgcatatagggcttttcgcagattcggttaccaacctctgctctcctttgaaatggggcgtctatgcacaagggtgcgaagctggcgaagacaggcacccccttactggcaaagtaaatcttggcgctggggaaagatagattcatacaagttctctaccaagggcgcactcccacaaggtgcgccaacgagcccaatgctcgcgaacctgaccgcgctagagcttgacgctctggttacaaggcttgccaataagcacggattagtgtacactcgctatgcagatgacctgtgcttttccactccaggcgaattttctagagcccagtgttcgcagctggtcggcgaggtatataaagccctgcgtcgctttggcttacggccgcagaccatgaaaaccgtgatcgccccacccggagcccgaaaagtcgtgctagggttgcttgtggatggacagaaacctcggctgcccagggagttcaaggccagactgcggcagcatcttcacttcctcacgcaccctagcgtcggacctgcattacacgccgccaggagaggttttgctagtataatagggctccggcatcatgtcagcgggctgatcgaatacgctgcctccgttgaacccgcctatggcgcacgatgtcgctcacagttcgccaatgtgcagtggcccttctga

SEQ ID NO: 8886 - RNA, 1158 nt, synthetic construct
  source 1..1158: mol_type = other RNA
atgactcattggtccccacagcgatacagaagtttggggcaacgccggggaatcgacccatcggtactggagaatgcagttcgcactggtaatatcacctgcgcagcaaacccccatgtccccaccctcttctcactgaaacacctcgcatatcgatctggagtggattactccctcctcagagcgattgtagagcggagggaccctgagccataccgaacgtttaaggtcaggaaaagaagcagttcaccgcagcatgctcggtaccgggtgattgccgtgccgtctccagctcttatgcgggtgcagaagtggatcgcccagagaattctcgcagtggcccctgcccattctgcttctaccgcttacggcaagaactgtaacatcagcgacgccgtcttgccccactgttcttccagatggctcatcaagcttgacgtgaggagcttcttcgaaagcataagtgaatccgccgcatatggcgtcttcagaaagcttggatatcaacccctgatctcctttgagctagcaaggatttgcacacgtgtatatagcaaaacacgcctgcgctcgtataaatactgggatgtcgaacctgcccgctggtccgcaattcctagttatcagtactttcgaaaaggttccctgccacagggggcccctacaagccctatgttggccaacctggctgtgcgtcaattcgatgccaatatcaccgctatagctgagaagtacggcctgatctacactcggtacgcggatgaccttgcgcttagtacttcaggcgaattcagcaggcaaaaatgccactcagtgattcagaaggtttatggagaaatgagagctttcggtctgtctcccaacgcaacgaaaaccgctatatcaccaccgggcgccagaaagctcttactggggctgctggttgataccgaccggcccaaactgacaagggagttcagggcgaagctgcgtcagcacgtgttttttttacagagcccaaaagctggacccgttaagcatgcccgccacctggggttccagtccttgattgggtttaggcaccacatacacggcctagtgaattatgcctatgagatcgagcctgcctttggcgagcgctacaaggaagccttgaaggccgtggaatggcccttatga

SEQ ID NO: 8887 - RNA, 1152 nt, synthetic construct
  source 1..1152: mol_type = other RNA
atgactatgtggcggcctcagtcttaccaacggcgcggcaaggagctgggcatagaggaaactctcctagctcgagcatgcgctattgggtcagcagtaatcgccgttaaccctgctctgccacctgtctttacacttcgccatctcgcctatcaggtggatgccgattacggtcttctcagggctatcatttcccgctctttaagggatccttataaggtgttcagaatccgtaagcggcccagcaccgtgggagaaaagagattccgagtgatctgtgtgccagaccccgagctgatgcgcgtacaaagatggatttctcagcgaatcctcagccacgccaatccccatagcgcgtccgtcgcctacgccaaaggttccactatacttgccggggcagagcctcattgtgggtgcagatggctaatcaaacttgacgttcggaatttctttgaaactatctcagagatagctgtgtatcgcgtctttcgaagcctggggtatcaggccttagtggccttcgagctgacacggttgtgcacccggctcggcacgaaaaccccgctgagaattgggcagagatggcaggttcatttcggtaggcacatggtgatcggcgattattcggcctctcgtatgggccatctgccacagggagcacccaccagcccaatgctggcaaatttggctgtgctggcttttgacggcgaagtcaacgaaattgcgaacaagcacggtctgatctacacacgatatgcagacgatatcgctctaagtacaaccgacaagacgttctcccgcaccgtagccgccaaggtcattggggaggtgtacgccgcgatgggccgttacggactcagtcccaacgtcaccaagactagggtgagttccccagcatcaagaaaggttgtcctcggactgctggtggatggaaacgctccgaggttgacacgcgagttcaaagcaaatctccggagacacctgcactacttggggcggcctgacgtaggcccagccaaacacgcagctgctaggggctttgcagccattgcgggcttaaggcaccacgttgagggactggtggcgtttgccaggcaaatagaacccgaatacggagagaggtcagccaaattgcttgtggacagactgtga

SEQ ID NO: 8888 - RNA, 1167 nt, synthetic construct
  source 1..1167: mol_type = other RNA
atgaaggattggacaccccagcactataggagggcacccggtgcggccaatttgcctgcttccgtaatggaagctgcaatcgctgcctccggcaagaccgttgcggtccactcttctcttccgccgatcctgacccttaatcacctggcacacctgacacaagtgccttataagcaccttcgcgattacgtgactcgagagatagaaagctacaagatcttcagagtccgaaaacgagctcgtccaggcaaacctaccacgtttcgagtgatctgtgtacctcccccatcattggcaacggctcaacgatggatcgcccagcatgtactctctaaagccaggcctaacgccgctagcacagccttcgctccaggaagtaaactggtggacgctaccgctccgcattgcgcatcccggtggttaataaaagtggacgttcagagattcttcgagtctatcagcgaggttgattgctatcgggtgttccggtccctgggttatcagcctctcgtcgccttcgaattgtctaggctctgtactagaacggggaacttttccaggcttcatcgggcgattaaatggcggcgcaaaatttcactgagcaagtcgaagataccagggtacgcaagtcgcgacattggacacgtcccacagggcgctgctacttccccaatgctggccaatttggttatgcgggaggccgacacattgatgacaagcctcgcagatcgcctgggcctaacttacaccaggtatgccgacgatctgacattctcaacttcagatcccaaatttgatcggcagactgcaattaagaccgtgaatgaagcctacgcgatactgagacgctttggtttcacccccaacattgcaaagaccacaattgccagtcctagaagccgtaaaattgtgctgggccttcaggtggaccaggacaagccccgcctaacccgtgcctttaagatgaagatgagaatgcatatgtactatctggaaaggagagacatcggcccattagtgcatgccgaacgccggggatttagtgccgtcgccgggatgagaaaccacctgatgggactggcggcctatgcaatccaaatcgagcccgagtacgggaggaacttaagagagaggctcgaggctctcgactggcccgtgctctactga

SEQ ID NO: 8889 - RNA, 1167 nt, synthetic construct
  source 1..1167: mol_type = other RNA
atgaaagactggacccctcagcattaccgtcgagctcaaggcgcctcctctatagcaccgctggtgatggacgctgcaatcgtaacgagtcagaaaactgtcgccgtgcaccccagccttccaccaatactaaccttgaagcacctggcccacttaactcaagtgccatataagcacctgcgagattatgttacccgggaggtggagagttacaaagtgtttcgtgtgcgtaagagaggtcggctgggtcagccaacatcgtttagagtgatttgcgttccccctcccagcctcagtgtcgctcaacagtggatcgcccaacatgtcctcgccaaggccaaaccacacgctgctagcaccgcttttgccccaaactgccgcttgatcgacgcagcatccccgcactgtacctccaggtggctgattaaggtagatgtgaagcgctttttcgaatctattagcgaaatcgattgttacagagtatttcgatctctgggatatcagcctctcgtctccttcgaactctcaaggctttgcacgcggaccggcaacttcagccgaatcagacgcacagttaagtggcggaggaaagttagcctgtccaagtctaagatccctaattatgcttcaagagacattggacatctgccgcagggcgccgcaacaagtcccatgctggcgaatttggctatgcgcgaggcagatattttgctcactgagctggccgagcggctcggactcacgtacactaggtacgccgatgatctgacactatcaaccaccgacgtcaccttcgaccgcgagcaggcgagacggacagtgaatgaggtttaccgaatcctgcagcggttcgggttgaatcccaacttagctaaaactacaatcgcctcccctaggtctaggaaaattgtgctcggactgcatgtgcaccaggaaacaccccgcctgactcgggcattcagaatgaaaatacgcatgcatcttcattacctggaaagaaaggacgtaggcccccttaaacacgcggagaggaggggtttttcagccgtcgccgggatgagaaaccacctaatgggcttagcagcttacgccatccagattgagcctgactatgggcgcgaagtgaaggcgaggcttgaagccgtggagtggcctgtcctgtattga

SEQ ID NO: 8890 - RNA, 1167 nt, synthetic construct
  source 1..1167: mol_type = other RNA
atgaaggattggaccccacagcactaccggcggtctaaaggagctagtaatgttccaacagcagtgatgaacgcggcgatcgcaacatcccagaaaactgtggccatcaatcctagcctacctccgattcttactttgaatcacctggcacatatgactcaggtcccttataaacatctgagggactatgtcgccagggacgtggaatcctacaagacttttagagtacgcaaacgggccaggccgggtcgaccaacatcattccgcgtgatctgtgtgcccccacctagtttggccgtcgctcagagatggatagctcagcacgtgctcgccaaagctagaccccatgcagcctctacagcgtttgcacccaagtgcaagctgatcgaggccgcagcccctcactgtagctctaggtggttaatcaaggttgacgttcagcgattcttcgagagtatttcagagatagactgctatagggtcttccggtctttaggctatcaaccccttgtgtcacttgagctcagccgactgtgcaccagggttggccatttctccagaatgaggcgcgctattaagtggcgtcgtaaagccccactggctaagtcgaagatactcaagtacgcgtccagagccctaggacatctgcctcaaggcgccgctacctcacccatgcttgctaatctggtgatgcgggaagctgataccttgctgaccagcctcgccgatcggtttgggctgacatacaccaggtatgccgacgatctgaccttttctaccgcagatactgcatttgaccgcaaaagtgcacggaacgccgtgaacgaggtctatgggatcctgcggcgattcgggctcacgcctaacctgttcaaaacaaacattgtttccccccgaagcagaaagatcgtattgggtctgcaggtaggccaagatgtgccccgcctaacgagagcattcaagatgaagatgcgcatgcacctctactacctggagagagaagacgtgggaccattagcccacgccgagagaaggggatttagcgctgtcgccggcatgcgcaatcaccttatggggctcgccgcttatgctattcagattgaaccagagtacggcatgggtgtgaaagcgcgtctggaagcagtccagtggcccatcttgtactga

SEQ ID NO: 8891 - RNA, 1167 nt, synthetic construct
  source 1..1167: mol_type = other RNA
atgaaggattggaagccacaacattacagaagagctcccggagcatccaaagttagcgtacccgtgctagccgcggccatcgctacaagcgaaaaaacggtcgccgtacacccgtcattgcctccaatacttactctgaaacatttagcccacctgaccggcgtgccctataaacacttgcgggactatgtcagcagggacacagaggcctacaagatattccgagtgcgaaaaagggctaggcccgggaccctgaccagttttcgggttatttgtgttcccccacctagtctagcaattgcgcagaaatggatagcacagcatgtgctggccaaggcaaaaccgcactccgcatctaccgctttcgcccccaattgtcgcctggttgacgcagcaaagccacattgcgctagccgttggctgattaaggtggatgtgcagagattctttgagtccatctccgaaatcgattgctaccgggtgttccgctccttggggtatcaacctctcgtctcgctggagctctctaggctctgcactagggtcgggcggttcaatggcatgcgccatggcatcaaatggagacgcaaagctagtatcaagaagagcaagattgtacgatacgccctgctgcggcttggacacttgccacagggtgccgcgacttcaccaatgcttgctaatttggttatgagagatgctgacgaactgctcactagcatggctgaccagcttggcatgacctacaccaggtatgccgacgacctgacgttttcaaccgcgtctcccgtgttcgagcggcaaacagccaggcgcgtgattaacgagatctaccaggtgctcagaagatatggtctgacacctaacttagccaaaaccacaattgtccctccacgcagtagaaaaatcgtgctgggtctgcaggtggatcaggacgaacctcggctcactagggcctttaagatgaagatgaggatgcatttacactacctagagcgagaggatgtcggaccccttaagcacgccgaacgacgtgggttttcagcagtggcaggcatgcggaaccacctgatgggactggccgcttatgcctctcagatcgaacctacatacggccgtgatctgaaggaccgcttggagaagctcgattggccggtcctctattga

SEQ ID NO: 8892 - RNA, 1167 nt, synthetic construct
  source 1..1167: mol_type = other RNA
atgaaggactggaaacctcagcactatcgcagggctcctggtgcagccgacgttccagccagcgttatggctgccgcaatcgccaccggcgctaaaatcgtcgccgtgcaaagaagtcttccgcccatcttcacactgaagcacctggctctgttgacgcaggttccataccctcacttgcgcgactatattactcgcaagaccgatgcgtacaagatttttagagtgaggaagcgagctaggcccggccagcctacctcgttcagagtgatttgtgttcctccccactcacttgctgtggcgcagcattggatagccaaacacgtcctcgccaaaggggtgccacattccgccagcacagcctttgcacccgactgccggctcattgatgccgccgcaccgcactgcgcttctagatggttaataaaggtcgatgtgcagcgtttctttgagtcaattagcgaggtcgactgttatagggtgttccgatcattgggataccagcccctcgtatcccttgaactgagtcggatctgcaccagaatcggccccttgaatagccttcgtcgctctgccaaatggttcagaaaagcacctctcgctaaatccaagatccggagctatgcagtgccgaggatcgggcatctgccacaaggagcagctacttctcctatgctggccaacctggccatgaaggaagctgatgtactgctcactgccttagcaaatagatattctctgaattacacccgatacgcagacgatttgacgtttagtactgcagaccacagcttcaagcgcaacgatgcccgaatggctgtgcatgagatttacggtgtcctgaggcggtttggacttgcacccaacctcacaaagaccgctatcgtaagtccacggtccagaaagatcgtcctgggactgcaggtgaaccaggatgtgccacgcctaacacgggactttaagatgaaaatcagaatgcacctgcattatctcgagcgcgaagacgtcgggccattaaagcatgccgagaggcgtgggttctccgctgttgcgggcatgcggaatcacctaatgggtctggccgcctacgccgctcagatagaacctgcatatggccaagccattaaagcgaggttcgagcggatagcgtggcccgtgctgtactga

SEQ ID NO: 8893 - RNA, 1167 nt, synthetic construct
  source 1..1167: mol_type = other RNA
atgaaggactggaaacctcaacactaccgtagagccgctggcgcagtcggagttccagcaccagtgatggccgcagcaatagcaaccggccagaagacagttgctattcacccctccctgcctccaatcctcactctcaaacatctagctcatctcacacaggtcccgtatttacacttgcgggattacattgctagagagatcgacgcctacaaaattttcagagtacgcaagagggcccgacccggacagcctacaagtttcagggtgatatgcgtgccgcctcactcactcgctgttgcacaacagtggattagccagaatgtgctggccaagggcaaaccacatcatgccagcaccgcctttgcccccaattgtcggctggtggatgccactgcccctcattgcagcagcaggtggctgattaaggtcgacgtacaacggtttttcgaatccatctccgaagtcgactgctatagggtctttaggtccttaggctatcagcctctggtttccctggaactttctaggctctgtactagagtcggaccattcaacgggctacggcgatcaagaaagtggtttcggaaagcccctatcgagaaatctaagataagaccctatgcggtgagtcgactgggccacctgccacaaggggcctctactagtccgatgttggctaacctggccatgcgggaggtggatgggcttatgacggcgatggctgaccgttacggtctgacatatacccgctacgcagacgatttaacattgagcacctcggatcccgaattccagcggaaggacgcacgaaaagctatttacgagatctatggcatcttgcgcagatttgggctgaatcccaacctgaccaagaccgccatcgtgtcacccaggtctaggaagatcgttctcgggctgcaggtggatcgtgatgagccccgccttacgcgcgcgttcaagatgaaattgcgcatgcacctccactacctagagcacgaagacattggtcctctcaagcatgcggagcggcgcggattttctgctgtggtgggtatgaggaaccaccttatgggcctggccgcttacgcaatccagatagagcccgattatggaaaggacatcaaaatgagactggaacgagtgaaatggccagtactttactga

SEQ ID NO: 8894 - RNA, 1167 nt, synthetic construct
  source 1..1167: mol_type = other RNA
atgaaggactggaagcctcaacactatagaaggtcccctggtgctagcgctgtgagttcctccgtaatggccgctgccatcgccactgcgcaaaaaaccgtggccgtgcacagtagtctacctcccattctgacgctgaagcatctcgcacacctgacccaggtgccatacctgcatttaagggactacgtgtctcgggaagtggaagcctacaaaatctttagggtccgcaagcgggcaaggcctgatcagcccacctcttttcgtgtcatatgcgttccaccccagagtctcgcagtcgcccagcgatggattgcgcagcatgtgctggctaaagggaagacgcacccggcttccacagccttcgcacctaattgtcgactggtcgatgccgccgctccccattgtgcctccagatggctgataaaagtggatgtacagaggttctttgagagcatcagcgaggtggactgctatagggtcttccgctcactgggataccagcccctgatgtcacttgagttatctaggctatgcactcgggtcggacctttcaatggcatgcggaggtcccgtaagtggtttagaaaaccgccactgtcgcgatctaaaatcaagagctacgcggtgtggcgcttgggacacctcccacagggtgctgcaacatcacctatgctggctaacttggccatgagagacgtggatgtccttatgacaggcctcgcggatcggtacgggctcacttacactcggtatgctgatgaccttacattctcaaccgcagatccgggctttgagagagaggacgcccgcaaagccatttacgaggtttatggagtactgcgacgattcgggttgaccccaaacctggcaaaaactacagtggcgagcccccgttctcggaagatcgttttaggcctccaagtggatcaagacgctcccagactcccccgcgccttcaagcttaagatgcggatgcatctatattatttggagagagacgacgttggccctctgaagcacgcagaacgcagggggtttagcgccgtgaccggtatgcgcaaccacttgatggggctcgctgcatacgccattcagattgaaccagcctacggcaaggacatcaaagcaagactggaaagagttaagtggccagtactttattga

SEQ ID NO: 8895 - RNA, 1170 nt, synthetic construct
  source 1..1170: mol_type = other RNA
atgaccgactggaagcctcagccataccggcgggcagcagaggatctgggcatttctaaggccgtgctcgatgcttccatagcagcttctctcgccgtggtggacgtcaatccaagcttgcctccgatcctaacattgaaacatctttctcacctcagtggggtgccttatcaggacctgcgcttgatagtaagcagagagaacgccgacccatacaaaattttcagaatccggaaaagacccagacgagatggactgacacagtttcgcgtgatttgcatccctgaggtgaagctggctgaggttcagcagtggatcgcaaggaaggtgctagcccatggcagaccccactcagcctcgaccgcattcgctcctggctcacgcctcgtcgatgccgtccaaccccactgtgggtcacgctggataattaaggtcgacgtaaggcggttcttcgaatccgtaagcgaaattgctgcatatcgggtgtttagacgactgggttaccaaccattaatgagcctggaactggcgaggttgtgcacgagggtaggaccaattaccaaacttcgacggactcgacactggacacgggtggctccattggatgccgccactatccgatcctacgccgtcaggcacctaggtcacctgccccaaggagcgtccacttcacccatgttagctaatctggttatgtgtgacgccgacgccgagctcaccaaagcagctgaatcctttcatctgatttacacaagatacgctgacgatctgacctttagcacgcggaacgccgcctttgatagaagtgcggcagtgaccctcatcaagcaggtttatcgtgttcttggcaggtttggattggagcccaatcttgcgaaaacacaggtcgtgcctccgagggcgcggaaaatcgtgctgggcttactggctgaccaggatgttccccgccttactcgcgaattcaagaagaagatgagaatgcacctgtactatctggagcgtgctgacgtgggccctgtgaggcatgctcaacagcgcggattcagcgccgttgcagggcttcgcaaccatctcctcggtctggccgcctatgccagtcaggtcgaaccaatgtatggggccgagctgcgtaagaggctcatggcagtctcttggcccatcgtgtactga

SEQ ID NO: 8896 - RNA, 1170 nt, synthetic construct
  source 1..1170: mol_type = other RNA
atgacggattggaaaccccagccctacaggagagcagcccagagcctgggcatctctgaagcagtgcttgacgctagcgtagcagcctcccaagccgtggtggcaatcaatccttcactcccgcccatcctcacactaaagcacctgagttatttaactggaactccctaccagtacctccggcaggtggttagtcgcgatgagctcaatccatatagagtcttccgagtgagaaagcgcccgactccttgcggccgtgtgcagtttagggttatttgcgtgccagatatcaaactggcgattgttcaacgatggattgctcgaaaggttctggcgctgggtcggccccattctgctaacaccgcgtttgcccctggaagcagacttgtggacgctgtggagccccattgtggttcccgatggatcgttaaggtggacgtacgtagattttttgagagcatttctgagataagcgcctatcacgcattcaggcttctggggtaccaacctctgatgtcattggagctggccagactgtgtacaagggtcggcaactttagtaaactgcgacggcagagacgttggattcgcttggctccacgccatgtcgctaaaataagtagctatgccgtcccaaggctcggacacctcccacagggagcacctacatccccaatgctggctaaccttacgatgtgcgaagcagacgccgtgctgaccaaagccgccgaatcattcgggatggtatacacccggtacgccgatgatctgaccttctctacctcgaaggattccttcgacaggaaggacgccaaggtgctaataaagcagatttaccagatcctaggccggtttggcctcgtccccaatcttgccaaaactcaggtcgtgcctcctcgggcacggaaaattgttctcggacttctggtagatcagtcaacccctcgcctgacacgcgagttcaaaaacaagatgcggatgcatttgtattacttggagagggcggacatcggtcccatccaacacgcccaaaagagggggttctccgctgtcgtgggcttacgcaatcacctgatggggctggctgcctatgcttgtcaggtggaaccgaaatacggggacgaattgaagaagagattaaaggcagtcccctggccagtggtctattga

SEQ ID NO: 8897 - RNA, 1170 nt, synthetic construct
  source 1..1170: mol_type = other RNA
atggatgactggaagccccagccatatatccggcaagcccagcagttgggtgtggcccagtccattctggacgccgcagtcgccgcatcagaggctgttgtagccgcacaccctagcctccccccgatactgaccctgcgacacctcgcccacctgacggacaccagctaccttaaactgcgggattgggttagccgcgaaatagaagatccctacagagtcttccggatcaagaaacgtccggtcgcccctaattgcactgcctttcgaactatttgtgtgccagacgtggaactagcttttctccagaggtggctgtctcgcaatgtgttgagctggggaagacctcattctgcatccacagcgtttgccccaggcagcaccttgcttgcggctgtagagccacattgcggatcgaggtggctggtgaagttggacgtgcgtaggtttttcgagtcaattagcgaagtgtccgtctataaagcgtttcgccggttgggataccaacccttagttagtctcgagttagcacggctttgtacacgcgtcgggcctgcaagtcggctgtatgccaatgcccgctggactaggcgagccccaagatacgtagcagctattagaaagtacgctgttgtccggttcggccacttaccccaaggcgcaccaacatcacctatgcttgccaacctagtgatgagggatgtggatgaggagctgacgaaggttgctaagctgcacggcatgacctatactcgctacgccgacgatctgaccttctctaccccccggagggattttgggagagaaatcgccgtggagctgatccagaaggtgtatcgatccctgggcagattcggactgcagccgaatctggcgaagacacaggtcgttcctcccagaagtcgcaaagtcgtgttgggactgctcgtggacgggaaggagcccaggctgactagagaattcaaaaacaaaatgcggcagcacctctactacctcgaaagacctgacgtaggtgccgtgcgtcatgcccaagctcgagggttctctgcggttgcaggtcttaggaaccatcttctggggctagctgcttacgcttcccaggtggagcctcagtatggcgctgagctcgcaaggcgcctcaacgctgtgtcatggccagtggtctattga

SEQ ID NO: 8898 - RNA, 1173 nt, synthetic construct
  source 1..1173: mol_type = other RNA
atgaacgattggaagcctcagccctatcgtcgggaggcacaacggaggggggtatctcccgaggtgttagccgctgccatcgccgcttcagaagccgtcgtggccgtgaaccctagtctgccgcccatattgtccctacgacacctctcgcatcttaccggcgtcccttaccagttgattagagcttgggtaactcgtgaaggcgccggcgagtctccctacaagactttttccatccgcaaaagacctaaaaaggatggcaccaaacagttccggttcatctgtgtaccacagcatgacctgggactgacgcagaggtggattgcaagtaaggtcttagccctcggtagacctcattctgcatcaacagcctttgcacccaagtcaaagctgttcgaagcagtggaaccgcactgcgagtgtaaatggctcattaaggttgacgtccaacgcttcttcgaaagtatcaccgagattgctgtgtaccaagtgtttagaaagctcggataccaacccctggtgagcttagagctcgcccggatttgcactcgtctgggtccaccaggccggtataggcctccagcacgatggagaagacacgccccattggacgcgcacattataaattcttattccactcgagccctgggacatctacctcagggcgcttccaccagcccaatgctaagcaatctcgttatggtggatctggacgaaaaactgagcaagctcgcttctagtgtcaacatgacctatacacggtacgcggatgatttcacttttagctcacacgcaacggacttcaacagggaggctgcagaacgctttataaaggacatctatcacgcgttgggacagtttgggctcaaagctaatctggccaaaacacagatcatcccaccgagggcccgcaaagttgtgctgggtctgcttgtggatggaaagacacctcggctgacaaggaagttcaaggccaaaatgcgaatgcacctttactacttgaagcatgcagaggttgggccccttaggcatgctgagcgcaggggttttagctccatagcgggcctgagaaatcaccttttggggctggccgcctatgctatccagatcgaaatggagtacgggctggagctcaaaacccgcctggaggctattcagtggccccttctgtga

SEQ ID NO: 8899 - RNA, 1170 nt, synthetic construct
  source 1..1170: mol_type = other RNA
atgacggactggaaacctcagccctataggcgggccgctgaggaattgggcgtgtctgaagctgtgctggaggccgcaattgcagctagcgaggctgttgtagctgtccacacatccctcccgcctattctgaccctcgggcacctgagccatctatccggggtgagttatcaggacctgaggtcctttgtcagccgtgacgagccggacccatacaaggtgttccgagtgcgtaagcgaccccagcctgatggtcgccttaggtttcgggtgatctgcgtccctgacgctcggctgggagatgcacagcgatggattgcgcgacatgtcttagttcacgggcggcctcacagtgccagtactgccttcgcccctaaagctagattaatcgacgcagtgcgcccacactgtgggtcgagatggctgatcaagattgatgtgagacgtttcttcgagtctatcagcgagatctcagtatacaaggtgttcaggcgcctgggataccagccactggtttcactggaattagccaggctatgcacccgagtaggtcccaacacatggctcactagaacacagagatggtggagacgcgccccattgcacgtctctacgatcaggaactatgcactccctcgccttggccatcttccccaaggcgccccaacctcccccatgttggctaatctcgtcatgcgggaggctgacatagaactcagcaagatagctaagagctatggcctgaatttcactagatacgcagatgacctgactttttccaccacaaaacccaaatttgatagggccgcagccggtagtctcattcaacaagtttaccaggtcctgggccgctttgggctagagcccaacctggccaagacacaagtagtgccaccccgcgcccggaagattgtgcttggattgctcgcggaccgggatgcaccatgtctgaccagggaatttaagaataaaatgcgcatgcatctgcactacttggaacacgaggatatcggccctgtgaggcatgctcagcatagaggcttctctgcggttgcaggactgcggaaccacctcctgggacttgccgcctatgcgtcacagatagagccagtgtatggtgccgaaatcaaaaccagattgatggccgtgccctggccgattatctactga

SEQ ID NO: 8900 - RNA, 1173 nt, synthetic construct
  source 1..1173: mol_type = other RNA
atgaaggattggaagccccaaccttacaggagaatagcgcaggaactgggagtctctgatgctgtcctgcgctcagctctggcagcaagcgaagccgtcgtggccgtacaccccaagctacctcctgttctgacattgaagcacctgagccggctctctggggtgggatatatggacctccgcagatacgtttcccgagaagacccccacacatacaaagtgttctgcattcgtaagcgaccccagccggacggtaggattagattccgggaaatatgtgtgccagagcatagcttatgcgacgtgcagcagtggattgtgaggcacattctcgttcacggacgtccccactcagcatcaaccgcctttgcaccgggcgccaagctcatcgatgctgtgcagccccactgtggtagtcgttggatcatcaagcttgacgtccgaaggttctttgagtctatatccgagattagtgtgtataacgtattcagatccctgggataccaacccctagtgagttttgagctggcgaggatttgcaccagaatcggctcagacaaaacttggctctccaagactcgaagatggcggaggaaagctcctttgcatgtagcagccattcgaaattacagcgcgaaacagctgggttatctggcccagggggcccctacttctccgatgatcgctaatttggtcatgcgcgctgctgatgccgagatcagcgccctctcggagccatttggtatcacgtacacccggtatgcggacgatctgacttttagcaccaatagtgcccatttcgatcggaccaccgccagcgccctcatcaggaaagtctaccagacactgggccgcttcgggctgcaaccaaaccttgcaaaaacacaggtggtatctccacgggctcgcaaagtggttctcggccttctggctgatggagtctcccctcgcttgacgcgcgaattcaaaggaaagcttagaatgcatctgcattacttagagcatgtggacgttggccctatcaagcacgctcagagacggggcttttccgctgttgcagggctaaggaaccacttactggggttggccgcatatgccatacaaattgaaccagagtacggctatgcagtgaaggcccggcttatggccgtgcattggccaatcatctattga

SEQ ID NO: 8901 - RNA, 1170 nt, synthetic construct
  source 1..1170: mol_type = other RNA
atggagaattggaggagccaacactaccaatcagtgggacggtcacagggaatcgcacccgagatcctgaacgctgcaactcagaccgggactgccattgttaggacgaacgcaaggctgcagccagtccttaccctccgtcacctcgcctacttggctgactgtgattatggcttccttcgggctgtcgtgggtcgagccatcgagaatccgtaccgcgtgttcgcaattcacaaaagacctgcaccatctggcaatgccaggttccgcacaatctgcgcccctgatccccgcttactgggagtccagagatggctggtgaccaatgtgctgaaccacgcccccacagtacatccagcctctaaagcctttgccccggaatgcacattggtcaaggccgcagagcctcactgtggggctcgatggctcgtgaaggtggatgtgcggaacttcttcgaatcaatcagcgagatagctgcctaccgggcttttagagcgctgggctatcaggccctcgttgcctttgaactcgcccggttatgcactcgcttgggcaggttcacacctcgaaggagccatccacagtggctacggaagcgtaatagaatctataggatcgcctcgtacaaccatgctgagggaagaatagggcatttacctcagggcgcacccacttcccctatgctcgctaatattgcaatgcaagctgctgacgctgaatttgacatgcttgcgtcctccgcgggtatggtgtataccaggtatgccgatgacattgtgtttagcacgaaggataaagatttcacaagggacctggccgcagggctggttggatctgcctatagaattctgggaaagtacgggtttagtccaaacgtcgcaaagacagaaatcatacccccccgcgcccgtaaagtcgtacttggcctgctagttgatgacctgaccccccggctgccaagagagtttaaggagaaaatgagaatgcacctgtactaccttaagcgagatgacattggccctgtgagacatgcaaaaaagcgaggcttcatcgcggtggcgagtctccgcaacgtactgtatgggttggcagctttcgccacccagatagagcccacttacggttcccgtatccgccgggacttggacgctattgaatggccaacctga

SEQ ID NO: 8902 - RNA, 1176 nt, synthetic construct
  source 1..1176: mol_type = other RNA
atggagaactggcatccacaacactaccaggccgtcgggcattcccaaggcattagtccggacgtgctggccgcagccatgcagacagccaaagtgatcttgcgagtaaaccctcgattacagcccgtgcttactctgaggcacctcgcctatctgacggactgtgattatggctatcttagggccgtgattggacggggcatcgaaaatccgtaccgggttttcaccatccacaagcggccaggtccttctggaaatgcgcgtttccgcacaatttgcgctcccgacagccagctgctgaaagtccaacggtggttagtgaccaacattttgaatcatgccactgctgctgtgcactcaactagcaaggccttcgcccccggatgtactctcatgaaggctgcagaagcacactgtggcgcccgctggctaatcaaggtggatgtgcagaacttttttgagtccgtgagtgaaattgcggcctatcgagccttccgtaatttgggttaccaagctttagtttcatttgagctggctcgtctgtgcacccgcctgggtcacaacacacctcgaagaggacacgcacagtggctcaggaaaaaagcaggggtggcctataagatatctaaatacaaccactcgatggggaggatcggacatctgccacagggcgctcctaccagtcccatgcttgcaaatttggctatgagagccgcggacgcggagttcgataatctggcccggatcgacggcatgacgtacacacgctacgccgacgacctagtattttctacctgcgattctggatttacacgggataaggcgtccgcaatcgttggctccgtttatcgcatactcgggaagtacggcttcagcccaaatgtggctaagaccgaaatcgtccccccgagagctaggaagatagtactcgggcttcttgtcgacgagccctcccctagactgcctagagagttcaaagagaaaatgcgcatgcatctgtactatctcaagaaggatggcatcggcccagctaggcatgcatcaaaaagaggattcatttcagtcgctgggatgagaaacgtcctgtacggtctggcagcctttgcaactcaggtggaaccaacatacgggagcagcttgaggcaggatctcgacgccattccttggcccacctga

SEQ ID NO: 8903 - RNA, 1173 nt, synthetic construct
  source 1..1173: mol_type = other RNA
atggaaaactggagaagtcagcactatcggaactttggcacccgcaagggagttagccctgaaatcctggaggctgccgtgcagactggcgaagcaatcgtgcgtactaacgcaagactgcagcccgtgttcacccttcgtcatctcgcctatctgacagactgcgattacggactgctgagggccatagttggaagatctctgcagaacccctacagagtcttcaggattcataagcgcccacggtccgatgggctaaaccgttatcgaacaatttgcgtccccgatccacaactgctagccgtgcaacgctggctggcatccaatatccttaatcacgccgctagtagcattcacgccgcgtcaacagctttcgccccagggtgtactctgttgcgagctgccgaaccacactgcggtgctaaatggcttataaaggttgacgtgcaaaacttcttcgagtcagtgtcagaaatcgcagcctatcgcgcgttccgcaggttaggatatcaggccctcctggcttttgagtttgcccgcttgtgtaccagattgggaaatagaacgcttagacggtcgcaccagcagtggagaagggatccttggcgccgctacgagattgcggcttacaatcactctcagggcaggatcggtcatctccctcaaggggcgccgacctcacctatgctggctaatatcgcgatgcacactaccgacgttgacctggatgcactggcactttcttttaggctgacatacacaaggtacgcagacgacttggtgtttagtactactgacccagctttcacacggaagctcgcatccagcttcgtgggcagcgtgtatggcatcctcggcaaatacgggtttagcccgaatgtcgccaaaacccagattgtccctccccgggctcgaaaggtcgtgctaggcctgttagtagatgagccatcccccaggctgccccgggaatttcgagagaaaatgaggatgcatttgtactatctcaagaaggacggggtagggcctgctcgacatgccgtaaaacggggttttaccgcagtcgcctccctccggaatgtgttatacggtctggccgctttcgccacgcagatcgagccgcagtacggagcaggcattagagccgagctcgattctataaactggcccacctga

SEQ ID NO: 8904 - RNA, 1173 nt, synthetic construct
  source 1..1173: mol_type = other RNA
atgggaaactggcggcctcagcactaccgtactatagggtccgagaagggtgtgccacgcgacgtactggacgctgccgtgcaaacaggtaaggccatcgtgcgcacagacgctcagttagagccggtgttcacgttgaggcacctggcctatctgacggattgtgattatggcttactcagggctatcgtagggaggagtatccaaaatccttatagagtattccgggtgcataaaagacccgggcccgacggccagaaacggtacagaacaatttgtgctccggacccccagctccttaccgtccaacgatggttatccaccaacgtcctgaatcatgcctcatctagcattcacgctgcctccactgcatttgctcctggctgcacactgctgaacgcagccgagcctcattgcggagcacgctggctgataaaggtggatgtccagaacttcttcgagtcaatcagcgaaatagccgcataccgcgcctttcggggtcttggctatcagcccctggtggcgttcgagtttgcgcgcctgtgcactaggctaggtcggaagacttctaggcggtcacacgcccagtggagaagagctccatggagacgatataagattgcggcgtacaatcacgaccagtatcgaatcgggcatcttccacagggcgcccctacctcgccaatgcttgctaatattgccatgcacggcgcagacgaagctttgcacgcactagcccgtagtagcggactgacctacacaaggtacgccgatgatcttacatttagcaccaccgcactggactttaacagggaactcgctagcattgtcgttcgctccgtctacagaatcctgggcgaatatgggttctctccaaacgttgcaaaaacccagattatccctccccgagccaggaagattgtgctcggcctcctggttgacgaaccaaatcccagactgcccagagagtttagggaaaagatgcgcatgcatttgtactacatcaaaaaagatggagttgggcctgcccggcacgctgctaatcgtggattcactgcagtggccagtctgcgaaacgtgttgtacggactcgccgcattcgcgacccaaatcgagccacagtatggcttgtctatacggaaagagctcgatgccgtggcatggcccacttga

SEQ ID NO: 8905 - RNA, 1170 nt, synthetic construct
  source 1..1170: mol_type = other RNA
atggcggattggaaaccccagccatatagggccaaagctcagtctctcgaagtcgaccccacaatcctggacgctgctgtagctgccggaaacgaggtggttgccattcacccctccctgccccctatcttcaccctcaaacacctggcttatcttaccgacaccaaatactcggtgcttcgcatgatggtcggtagacacattgaggagccttacagggtgttcaagatccgcaaacggcccggtcctgatggagcagccagatttagggttatttgcgcaccatcacccaccctgctggccgttcagagctggcttgctcgcaaggtgctcgttcacgcgaggactaaggtacattcagcttccacggcctatgcacccggatgcagtattcttgaggccgcctccccacactgtggatgtcgctggctcatcaaggtcgatataaagaattttttcgagagcgtgtctgaaattagcgcctaccacgccttccgatccttaggctaccagcctttagtgtctttcgaattggcacgtctgtgcacccgagtcgggagccagacacggcacagagctcatcgtcaatggcagaggcatctcccctcaacgaaaagcaagatacacgactacgtgtattggaggttggggcatttgcctcagggagctccaactagtcctatgctggcaaacatcgccatgtataaggcagatggcgaactcacagcatggggcctcaaacatggcttggtgtatactcgctatgctgacgacatgacattttctatctcagatgagggctttaatagaaacaaagccgccgcggtaatacgagggatctaccggatcatcggcaaatacgggtttgctccaaacgtcacaaagactcaggttgtccctccacgggcaagaaaggtggtactgggcctgctggttgatcaaaatgaaccgcggctgcctcgggagttcaagatgggggtgcgcatgcatctgcactacttaaagagtccaaaatttggaccggcggtgcatgccgccaataggggtttcaccgcggtcgctgggctaagaaaccacctgttcggcctagtggcctacgcagcccaagtggagccggcatacggtactagaattaagtccgagctggaagccgtgaagtggcccatttga

SEQ ID NO: 8906 - RNA, 1161 nt, synthetic construct
  source 1..1161: mol_type = other RNA
atgttgaccaaacggcctcaacattatagatccctaggtagatgtgcagggatcgacgatgtcattatagagcgcgccctggccactgccgccattcaagacagggtgggaggtagaattcctactattctgactctgcgccatcttgctgagcttgccggggtgccttacggcttcttacgcggcgtagcggcccgtagatttcccgacccctatacaacatttcaggtgcgaaaaatcgctcgtcctggtgaagagggatatcgaacaatcaccgtgccaccaccgctgctcatgtcagtccagaggtggatctccgggaacatactggtacacggacgcccacatgccgcctctaccgcttatgctcccggcagttcagtagtcaaagctgctgaacggcactgcggttgtagatggctaatcaaactggatgctaggcgtttcttcgagtctatttccgagatcgcagcatacagggtttttaccactgatttcgcattccaaccactggtggcgctggagttggcaagaatctgcactcggctcccggaaaacgcacggaccaacagggcccgacgatggttagccaaagtgagcgggtacggagccatcctggactaccacgctgcgcagctcggccatttgcctcagggagctccatccagccccatgcttgccaacctggcggttcgcgagttcgatgacgagatggctaggaccgctcagcagcaccgaatgacgtacacaagatacgcagatgacattgcactgtcgaccagcgaccccgcattcacgcggtctagggccagcgacgtggttctggcggcctatgcagccatgggcaggcatggcctctcaccgaatacaaccaagactaatgtggtccctcccggcgcacggaagttggtgcttggactattggttgatggcgaccgccccagactcacacgggaatttaaggattctctccgcatgcactttcactactgccttatgcctgatgttgggcccgtcgcccatgccgaaaagcggaattttgtgtcagtgattgggctgaggcaccacctggggggattagtcgccttcgccagtcagatagaaccagagtatggcgctagcctcagtgaacagatgaagaagatcgtgtggccactgtga

SEQ ID NO: 8907 - RNA, 924 nt, synthetic construct
  source 1..924: mol_type = other RNA
atgcttgcaaaaggaggcaccccctctcgaggctatcgtatgatcagtgttccacggcctgatctcaaacacgtccagcgctggatttgtgataatattctggcgttggagaagcctcacagcgcaagtaaggcctataccccaaagagtacactggttgaagctgtggaaccgcatttaggatgccgctggcttataaagctggacctgcacgccttcttcgactcaattcccgagacttctgtgtacaaggttttcgagggcatcgggtaccaacccttggtggctatagaattagctcgcatctgcacaaggctatccccagattcacgatggcgcgcgcatagcagatggcaatccaggaggccagaaagatattctaatgtgaaaggctatgctgtgaagcgccttgggtacctcccacagggagctcccacatcccccatgctctcaaacctggtaatgagggtgtttgacgctgatctgacggccgccgcagtgaagcgaggcttccagtacactagatatgcagacgacttagccttcagcactaaggagatgtcttcgcggaacctgtgtggtgccctgatcaccgacgtatacaagctgattgccaaatatgggctggcccccaatctgtccaaaacagcggtcacccctcctgggggtaggaaactgttgctaggtctgttgatcgatggagagaagcctagactcacgaaagaatttcgggaggagctcaacaggcatctctactttatagataaatacggcgtccagagccacgcagaccacagaaagtttgagagcatctacggcctccgtcatcacctttttgggttggcctactacgcccggcagattgacccgacctatggacaggctgtgctggcacggcttaacgcagtcccttggccaatctga

SEQ ID NO: 8908 - RNA, 1161 nt, synthetic construct
  source 1..1161: mol_type = other RNA
atgtgtagttggtgcccccagcaattccggaaggaagccttaaaaaacaatatcgacctcaacatcatcgagcacgcgattaaaaacgccgagctggtatccgctgtgtctagcgagctccctcccctgttctctctccggcacctgtcacaccttaccggcgtggactatgtcgttctgcgcccagtggtggaacgcaactactcaaatccctacaagatctttcgactgaaaaagggcgttaaaggtcaccagaacagggggtttcggataatctgtgtaccagacgcatctattatgaaagcgcagcgctggattgcaaagaatatcctgagctgcggcgaagcatcatctgcatcctttgcttacgccaaaagttcaaaaattatcgacgcagccaaactgcactgcggctgcaggtggatgctgaaactagatgtgagaaatttcttcgagtctttctctgagattgcggcctatcgtgtgttcaggagttttgggtaccaacctctaatcagttttgaactgtcgcgcatctgtactcgattagggaaccagacaaagactcattcccaccctaaatggatggctaccaacaagaactacaccgtgatcaataaatatatcagccgtagaatagggcactttccgcagggcgctcctaccagcccaatgttaagcaatctcgctatgaagctgtttgataatgaggtgatcggtattgcaacaaagcatggtttggtctattccagatattccgatgatctgtgtctcagcacagctgacaagaagttcaaccgggagaaagccaagacgatcataaacgctatttacaaggaaatgatgaagattggactcgcgccaaatattaccaaaacacagataattccgcccggtgcacggaagatcgttttgggacttttggtcgatggggaagcccccaagctttccagggccttccgatccaagttgagaatgcatttctattacctcaagcatgttgatattggcccacccctgcacgccaaaaataggggatttgagagcgtcatgggcctgaagaaccatatccagggactgatagcctatgccagacaaattgaccctgcctacgctagttcatgcactgaccagatgaatggaatagactggcctctttga

SEQ ID NO: 8909 - RNA, 1164 nt, synthetic construct
  source 1..1164: mol_type = other RNA
atgcatatctggtgtcctcagcaattccgtaaggccggcgaggccaacaatgttgaccctaaggtgattgagaacgccatccaggttgccagtgcggtccaggcagtcgataagcggctgccacctatcttttccctgcgccatatttcccaccttaccggggtcgactattttgtgcttaggtcgctggtagaaagaaactacattgagccctacaaggtgtttaaactggataagaagaacaaacgctcaggaaacaggggataccggatcatcagtattccctccccacaattgatgatcgtgcaaaagtggattgctaagaatatcctgaaatttggcgaagtgcacaccgcctcttttgcctatgcagagaacagtaagatcattcaggccgctaccctacattgcaattgcacttggatgattaaactcgatgtgagcaacttcttcgaatccttctccgagattgctgcttatcgagtgttccgcaccctgggctaccagcctcttataagctttgaaatgagccggctgtgcaccaaactcggcacggagactcgcttgcgtcgacacccggcttggcaatcttctagcttcagtaaataccacaaaattagccgctataggaatagagccattggccacctgccacagggtgctcctacatctcctatgttgtccaacttagctatgaaaaactttgactcagccgtgtcaaaaatcgcactagacaacaatctcgtctattcacgatatgcagacgacctctgtctgagtacaaacgataagagcttcgatcgtacaatagctaggaaggtaataatctcgatctacgagaagatgaatgcgatagggcttaagccaaacctgactaagacgcagattgttcccccaggcgcacggaagatcgtgctgggtttactcgttgacggaaattcacccaaattgtctagagaatttagagccaaactgaggatgcacttccatttcctctgtcggtccgatatcgggccggcaaagcatgcggagagaagagggtttgaaagcgtcatgggtctgaaaaatcacatacagggattaatcgcatacgccaggcagatcgatcccacatacgcctctagctgcgacgagcacatggacaatattaattggcccttctga

SEQ ID NO: 8910 - RNA, 1161 nt, synthetic construct
  source 1..1161: mol_type = other RNA
atgcacagctggtgtcctcagcagttcaagaagaacggaattaaacagggagttaacccagaagtgattgaacatgcagtacagaacgcggccctcgtcaaggcagtgtccaataacctgcctcctatttttagcctacggcacctctctaatcttgtcggcgtggaatattccctgctgagggctgtcgtagagcgtcagcagttggacccttataaagtctttaaactgaaaaagcggtctaaaaggacctcatcacaccccttcaggataatatgtgtgcccgacgagttcatcatgaagacacaaaaatggatcgcacaacatattctaagtcagggcagcgttcatcacgcctccaaggcgtatgctaagaatagtaatatcgtggatgctgccaatttgcatgtggaatgccggtgggttatcaagctggacgtcaacaatttctttgagagcttcagcgagatctccgcctacaggattttccgatctttcgggtatcagccactgattagtttcgaattatccagactgtgcactaggttgggaccccacactaagctgcggagcaattcgtactggactgccacacgacacaagtacaagatcattaagcgttacaaaaaccataggatcggacatcttccccaaggcgcaccgacctctccgatgctcagtaatttagctatgaagggctttgacaaggaggtgagtgtgatagccgagaatgccggccttatctacacacgctatgcggatgacctgtgtctctctaccacctccgaagacttctctaagtccaaagcacagatcgtcattaacaacatatacgagaaaatgcgcaacatcgggcttagaccaaacataacgaaaacccagattctgcctcccggggctagaaaaatcgtgctcgggttgctcgttgacggtgataagccccggctctcaagagattttcgctcaaaaatgcgcatgcacctgtactatatgatgagagaggatatcggtccagtgctgcacgctaagaatcgcggttttgaaagcgtgatcggcctgcgaaaccacatccagggactgattgcctatgccaaacaagtagatgagtcatacgggttagtttgcgcctgcaagtttgagacaattaaatggccaatgtga

SEQ ID NO: 8911 - RNA, 1155 nt, synthetic construct
  source 1..1155: mol_type = other RNA
atgcaccggtggaaccctcagcaattccgaaaggccgcagaggaacagggagtggctccaaaggtcgtggaaaatgcaattagctgcgctgagattacacggtcagtggaccctaggctgccacccctgtttagtctgaggcaccttgcgcactacgtggaagctgactatagcctattgcgcaaagccgtggccagatccggcgacgagccctataccacttttaaactgaagaaaaacggcaagagagcctatagaatcatttgcgtccctgatatcttcctgctggaggtccagaggtggatcgcccagaatatcctggcctttggtaccccacaccattcatccgtggcctacgctaaaaattgtaacattgtcgacgccgctagcgtacattgcggctgcaggtggctgatcaaactggacgtcgccaactttttcgagtctttttcagagatcgccgtgtatcgcgtgttccgatctttgggctatcaggcactcataagcttcgagatggcccgcctctgtacacgtttaggagcccatacaaagaccagatcgggcaatcgatgggaggttcgagatgatcggatttacaaaatcgatggctacaagaactgtaggatcggccatgtgccgcaaggggcacctacttccccaatgttaaccaatctggctcttcgcgaattcgataaggatatcggtgatatcgctgcagagtatggcatgtactacacccggtacgctgacgacatgttctttagcactaaagacctcagtttcaatcgcgaaataggaaagaagctcatatctcgtctttacgggagaatgaaagcggagggcttccggcccaacatttccaagacacgcattcaccctccaggggcaaggaagctagttctcggactgttggtggatggagctgtgccgaagctcacgcgggaatttagaagtaaaattcggatgcacctttactacatgaacaagcagcacatagggcccgcgctgcatgcccaaaacaggggattcgactctgtaatgggtttaaaaaatcacgttgaagggttgatcaattatgcacatcaggttcagcccgacctcggtgcaaggctgagagccgaatttaaaaagattgcgtggggggcttccgtatga

SEQ ID NO: 8912 - RNA, 1104 nt, synthetic construct
  source 1..1104: mol_type = other RNA
atgtccagaaagcattcacagctgctgcccctgcaaggactccagcctgcaagtgcttcaacaggtgcatgtttcccggtcatcaattctctgaaacagctggcggacatgactgagacggactacgcaatcctgcgccagttcgtggcaaggcagcaacccgagccctataaaacttttcgaatcaggaaaaagagcggggggtttaggatcattgcgatcccagacgagaacctgttaaaggtgcaacagtggatttaccgtcagatactgactctcgtaaggcctagtccagtgtcttatgcattccagaagggtaagtcaattcaaaacgctgccagtgtgcactgtggctgccgctggttgatcaagctggacctgtacaactttttttcagcgatctctgagatcgatgtctaccgggtctttagaagcttaggctatcagccactgatcgccttcgaattggctaggctctgcacacggctaggctctctcacagctttccgacgccgaaaccggtggcagatagcagaccactatgccgtgatttcgcagtaccacggccaacgcatgggccatctgccacaaggagccccgacgagtccagcattgtccaatctagtgatggtcaactttgatagaaaggtcctctgccttgctgccgaggaacagctcacctattccaggtacgctgatgacctttgttttagcacacctttacgcgatttctccagagccagagcccgtgccttcattcaccagatctacaggctgatgcggtcccatggacagagccctaatatgtccaagaccgttatagtgccccccggtgcccggaaaatagtactagggctgcttgttgatggggaacagccacggctccagaagcaggtgcgcaataaaatccgacagcacattttccatcttaatcatgctgacattggccctgagaaacacgcccagaagcgtgggtttcacagcaccgccggcttcaaaaaatacctcgatggattgctgtcttatgttagcgacattgaccccgatctggaacagacctatagacaccaacttgctggagtgagatggcctttggaaacctga

SEQ ID NO: 8913 - RNA, 1095 nt, synthetic construct
  source 1..1095: mol_type = other RNA
atggggagaaagcactcgcaattgttctttacacacgactctcaagagattagtgccagctccaattgccttccaccgattaagagcttaaaacatctcgcagatttgactgaaaccagctatcgggatcttaggaaaataatcacccgtcagtcccccgaaccctataaggtctttaggatcaggaagaagagcggcggattccggattatcgctatcccagacgaatcattacttaaggtccagcagtggatatatcgtcacatcctgagtcaagcacaaccctcccctgtttcatacgcgtttcaaaaaggaaagtcaatccgagacgcagcttctgtgcactgcggctgtcgctggttgattaagttggatctgtacaatttcttcggcgccatcagcgagattgatgtgtacagagtcttttactcactgggatatcagccgctcatagccttcgaactggccagactatgtactcgcctgggctcactgactgcgttccgacataggcatcgatgggagatcgagggcaacagcaccatcatcagccagtatcagggccagcggatgggtcatctgcctcaaggggcccctacttccccagcactgtctaacctcgccatggtggctttcgatcggaagatcatgaacctggctgccgaggagcagctgacatacagtcgctacgccgacgacctgtcttttagtacacccttgacgagtttttctcgcgagctcgctaaggcctttattcacagagtgttccggttaatgcgcacctacgggcagagccccaacatgacgaaaaccaaaataataacaccaggagctaggaaaattgtacttggtctactagttgatggagaagagcctagactccagaaatctgtgaggaaccacattcgccagcacattttctatctgaatcattccgacgtcgggctgcagaaacatgcccagaagcggggttttctttccaccgacggcttcaaagctcatctggatggggtactctcctatgttcacgacatcgatccttcgctcgcgcagaattacagacaccagctggcagacgtgtaccgtctcgtgtga

SEQ ID NO: 8914 - RNA, 1203 nt, synthetic construct
  source 1..1203: mol_type = other RNA
atgaagacgtggtcaccacaaaatttccagagccgagccaaagagaagagcggtcaggctgttatcggcaacgcccagaagatagccaagcagattcagactattaacccgaagctgccagtgatcttcacattaaagcatctgagtgtgagagcccggatttcatacggctttgtgcgcagcgtcgtctctaggaatccttcagaaccctataggagtttttccatacgcaaacgtattagcgcgccccgtggcaaaacatccaaaaggaaagcgatgggggtgaaacacgaggtcggggagcactcttttagaaggatatgtgtacctacaccccgcttaatgcagttgcagcggtggatagataaaaatattctgagcgtcgctcctcctcacaccgcaagcgttgcttattctcagggcaagaagctgatcgacgctgcccaactgcattgtggttcgacatggctcgtcaagttggacgtgaagaacttcttcgagtctattaccgaaatcgatgtctaccgcgttttcctgagtctgggttatcccgccctgttgtccttcgagctcgcccgaatctgcaccaggctcggcatcgattccaagtacgcccggaaggatgtttttgcagtgcggcggctggcacggagaaaaggccacgtggcagcttactttgggtcgcgcatggggagactgcctcaaggagcgcctacctctccaaagctctcaaacctagtgatgcgctccttcgacgaagatatgaccaatcttgcccagaaagaaggaatgacatacactcgctatgccgacgacctctgctttagtacccggtccagaacttatacccgtgataaagcaacgaaattgatcaggagtgtgtatgacgctcttggagctactgggctaggcccaaatcggacaaagacggtggttgtgccacccggagcccgaaaggtggtacttgggcttacagtgaacgacgtaaggcccagactgccggccgagctgaagtccagaatgagggtccatctccactacctgaaattgttcggtcccaccgagcacgccaaacgatctggattcagctcaactttaggcatgtacagacatcttgcaggaatctgcgcatttgctcaacagattgaaccagatgtagctaaggactggctcactaagctgcagggcatcagctggatctga

SEQ ID NO: 8915 - RNA, 1158 nt, synthetic construct
  source 1..1158: mol_type = other RNA
atgactccttggcgatcccaagcttttcgagctgaggcgatagcaggtggcggcagtgcaggcgtgattactaatgcggtcgcaacagccgctgccctgcataaacacacccccgacgctcctcctgtgttcacattaggacacctggcccatttgaccgatgtgcactaccgtttcctgaggcaagtagtggagcgacaggatcctgaacgctaccgcaggtttagaattctcaaaagaactagtggtgccggcggagcgcctcgctatagaatcatttgtgtgcccgacccccgccttatgagggttcagagatggattaacgctaatgtactggcactcgggcacgtgcacaaggccagcaccgcatttaaagcaggcgataatattgtcgccgctgctggggtacactgcgacgctaagtggatgatcaagatcgatatcctgaacttcttcgagtccgtgtccgaacagtctgtctaccatgtttttcgaggcctcggatatcagccactcatcagctttgaactggcccggctttgcacacggagaggggaatccagtaacgctcgtcgcggcaaaaggtgggcccactctgtcggccatgcaaagcggataacaaattatcattcctcggtgctgggacatctaccccagggtgcccctacctcaccgatgctggctaaccttgcgatgaaaggctttgacgaggccgtgagccggcttgccgatacctacgacctgtcatatactaggtatgccgacgacttaacattgagcagcttgggcctattcgacaggagccgtgcccagaccatcgtctctgaggtttacgaccagctgcgctgttgggggttcagacccaatctcgccaagacgctgattgtgccaccaggggccagaaaggtggttctgggactgcttgttgacagacaggtgccacggttgacgaaggccttcagggcaaggatgcggcgccacctctacttcttgtcacacccacagcatgggcccgtcaaacacgcagctgccttaggttttgcctcagtatatgggctccggaaccatgtgtctggactgatcgcctacgcgcaacaagtggatgctaactttgctgcagatgcatggggaaagttcgatgccatagtctggccgtga

SEQ ID NO: 8916 - RNA, 1161 nt, synthetic construct
  source 1..1161: mol_type = other RNA
atgacaccatggcgatcacggtcttacgttgacagcggatctaccgctggctgcgatgaaacaattgtgaaaaacgccgcagaaacgggcaaaatgctcctggaacgaacacccggcgcacctccaatcttcacactcaagcacctgtcccagctcactggagttaattatagcttcctgaggcggtgtgtggaaagggtcgagagcgagccttaccggagatttcgaatccgcaaacgccagaaccctaatgagaagaaacagcgctatcgcattatctgcgtcccagatcctaggttgatggcagtccatcgctggatcaatactaacatcttgcaactagtacctccccacgctgcctctgtggcctttggcaaagggaataatatcgcagaggccgccgctaaccactgcgcttctaagtggctcattaagcttgacattgtgaacttcttcgaaagcatttcagagcagagcgtataccatgtgttttccagaatcggataccagccgctgatagcattcgaattagccagactgtgtaccaggttgggacaaccaagctatgctcgctggtcaaggagatggagtgctcggagttatcggtttgagaaaatttcctcctaccaaaaggaacagttgggtcacttaccccaaggggcccccaccagtcctatgctcgccaatctatccatgaccgctttcgatgcgtcgattagacaggtcgccaatgactttgacctggcgtatacacggtacgcagatgatctgactttttctaccacgtcagtggaattcaacagaaataagagtcagactgttattcccaaaatttacgcagagcttctgaagtacggcttcaaaccgaacctcactaagaccaagatctcctccccgggcagccgtaaagtcgtgctggggttactggtggacggagccgagccaaggcttaccaaaaagttcagggacaacatacgtcagcatctgtatttcatcaaccaccccaatatcggtcccgtgcaacatgcgaacaagaaggggtttaagtctatatatgggcttagaaaccacgtgcagggtctgatcgctcacgccagtcagatagataaggagtacgctaacgccgcctgggagcagtttaatcatgttctgtggccatga

SEQ ID NO: 8917 - RNA, 1176 nt, synthetic construct
  source 1..1176: mol_type = other RNA
atggaaccttggcgcagccagcacttcaaaaaattcgctatttccaaaggttccgacctcgcaaccgtcgatgccgccatagccatcgggaaggccctgcaggtgaagtcacccaattgccagccaattttctctctaaagcatttggcctacagcgctgacgtgaaatacaaatttttgcgtgaggtggttgaacgctccactgaggataagtatagggtcttcaagattcataaacggggaatacccggtcagacttccaagcgatttcggattatttgcgcccctgacccgcaacttatgaaaatgcagaaatggatcgcacgcaatatccttgcacatgggcgaacacacgacgcgtcagttgcataccaggcaggatccaatattgtggatgcagcttcgctgcattgtggctgtaggtggctgattaagctcgacatcatcaacttctttgagagcgttaccgaacagaacgtcttccgcgtgttcagtgacatgggttatcagcccctcgtcgcctttgagttagcccggatctgcacgagaaaagggtcggccacatggagaagaaacagagcttataagaagtggaggacgcggaaccacatttacaccagcatccatgcttatagcgccgtggatatccttgggcacctgcctcaaggcgcccctaccagtccaatgctggcaaatcttgctatggtggactttgataagagtgtggaggatgtagctaatagttttggcctaacctacacacggtacgccgacgatctgacatttagcactaagtcagacgcattctctagggaggtagctcagaaagtgatctctgaagtgtacaaagtcatcaggcggttctcttttgaacccaatctcaccaagacacaggttgtgcctccaggagctcgtagagttgtcttgggcctgctggtggatggaccaactccgcaactcagcaaaaagtttcgcaaccagctgagaaggcatctgcaccacgtttccgcggattggcccggcgtcgtggaacatgcagaaaaaaaccactttcaatctgtattcgggctgcgaaaccacatagagggcttaatagcgttcgctcactcagtggacccagagtatgccaagaaggcctgggagaagttcgccaagatcgactggccccaggcgtga

SEQ ID NO: 8918 - RNA, 1143 nt, synthetic construct
  source 1..1143: mol_type = other RNA
atgtggcacccacattccttcaaatatcagggaaagaaagaagctgttgacgacggtatcgtgcagaccgctatcgagattgccgataaaacaagttcagtccatcctgagctccccccaatcttttcattgcgacacctggcgcatctgaccaacgtgagctacgggttcctgcgtcacattgtgtgcaggaacatcgatgaaccctatgaagtgttccagatacggaaaagaatctatagcaagaagaaagcctaccggattgtttgcgtaccctctccagatctaatgtgtgtgcagcgctggatagcccacaagattctgcgcttaggggacacccaccctgctagcatggcctatgctccagatagtaagatttaccgggcagcgctgcagcattgtgagtgtaaatggttagtcaaaatcgacgtaaagcggttttttgaatctatcagcgaaatgaagatctatcacgtgttcctccaattcggctaccacccgctggtggcttttgagatggcaagaatttgcacgagagtaggtaagggctccactttttggaggaaacctcagtggatccctcagagacacgtgtactacaagattactgattatatgagcgatcgacttggccatctcccacaaggagccccatcatcccctatgctggcaaacctcgcaatgaagtccctggaccaaaaactccagcgcattgcagacaagtttcaggtttcttacacccggtacgccgacgacctcactttctctaccaaagataaggtcttcgggaagcacaatagcagaaaaatcgtgcgtaaagtctatgacgtgcttcgcgcccatggcctcttgcccaacacactgaagactacaatatcacaccctggagccaggaaggttgtcctaggtcttctggttgacgggcccaagcccagactgtcccgccaatttaggtctaggatcaggcagcacctgtactacctgcagaaagatcccatagctcatgcccgagcgcgtggatttatctcggtctggggcttgcggaatcacattcagggccttttggcccataccaaggagatagatacggatttctatgacaagacaagtagtgagttcaatctggtggactggccgttatga

SEQ ID NO: 8919 - RNA, 1278 nt, synthetic construct
  source 1..1278: mol_type = other RNA
atggcatggaacagtcagcggttcgtgagggcaggagaactggccggagtggacgctgacattctcaacaacgccgtgatcatcgctgaacaaacactccgagtccagtcatccggccctccaatactaaccctggggcacctcgcgcacttgtcaggtcagtccgtaaaatatctgagaagtctcgtctcccgcgagggcgaggatccgtacagacagttcaccattagaaagcgcccagtccccaaccaatctccacggctccgcttcatcgctgtacccgagcctcagctgatgtcccttcttcgttggattctgtccgaaatcttggaaaaggctccctgccatcccgccagctctgcctttgccccagaaagcaaactctttaatgccgctttcaaacaccggggggcccagtggctgattaaggtggacgtgagagactttttcgagtccatcacggaaattgatgtgtacagggtctttcttgagcgcggctatcagccattaacagcgcttgagttggcacggatctgtactagactgagggatgtgcatcgggaaaaagggagcattgctacaaggaatcgacgatcaagtatgaggaccccaaacgggataggcgagtataatagccgcatcatgggaacactcgcccagggagctcctacctcacccatgcttgccaatctggcagtgagggccttggacgagaagctccagggagtctctgagaagttcggtgtgcggtacacaagatacgccgatgacatcattctttctactaccgacaaaactttcggtagacaacgctcaattcagttagtcggagagatatatgcagccctagggctgtatgggctcgcccctaataccagcaagacgctgatcgttcctccaggtgcgaggaaggtggttctagggttgctggtagatggcagtaagcccaagctgactcgggaattcagggcaaaaatgcgcatgcatctgcactttttgctccacgagggagtgggaccgagggcacatgcagctaatcggggcttcagctcggttgagggcctccgacagcacttgctggggctgatcgcttttgctggccaggttgatctgccctacgcccttaggtacaagaacttatttcgctccatagacctggaacgtcgaagacatctaacctcttctcaaagcgagagccctctgcggctgggctggaaacacctgttagaacccgcgggcgccactctgggttcgatcagacgtagtcaccctacatga

SEQ ID NO: 8920 - RNA, 1164 nt, synthetic construct
  source 1..1164: mol_type = other RNA
atggcctggaactcgcagagatttgttagagctggtgagctggccgggatcgaggctgaaattttggagaacgctgtcgcggtggcagagcatacgcttggagtgcgaagccctggacccccgatcctgacactcggacacctagggcacctcacgggccttagcgtcaaatacttaagaagtctggtggcaagggacggcgacgatccttaccggcagttcaccataaggaagcgtcctgtaccgggccaaccaccaaggttccgattcattgcagttcctgagccccagctgatgggcctgcagcgatggattttgtctgaaattttggagcgcgcaccatgccatcctgccagcgttgcctatgtgcctggatcccggctgtttaaggctgccaaccaacatagacgagcgcagtggctgataaagatcgatgttagggattttttcgagagtattaccgagatcgatgtgtatagagtgttccttgggcggggttatcagcccctcacagcgctcgaatttgcccggatctgtactagactgcgggataatctcagagaaagtggtgcccccgcacctaggaagaggcgaacaaagatgcgcggcagcgaatcagtcgctgcttactactccgctgtgatgggaacactaccccagggggccccaacctctccaatgttggccaacttggccgtgcagggcctggatgaaaagctgcaggcgatcgcagataaagtcggcttacgctacactagatacgctgacgacctcatctttagcacctctgacaagtccttcggaagggagcgctctatccaattcattggggaagcttatagtgccctgggggagcacggtctgaccccaaatacctctaaaactctcatcgtgccacccggcgcccgtaaagtggtacttggtcttctggtcgacggagctaagccccgcctcactcgtgactttcgggccaaaatgcggatgcatctccacttcttactgcacaaaaacatcgggcccaaggcccatgcatccaatcggggcttttcctcaatagaaggacttcgccaacacctactgggcctgatttcattcgcagcacagatagacaggagcttcgccaatgagtgcaggcgccagtttagactggtagagtggtcatga

SEQ ID NO: 8921 - RNA, 1164 nt, synthetic construct
  source 1..1164: mol_type = other RNA
atggtgtggaatagccagagatttgtaaaggctggggtgctagccggcgtctctacagaaattctggacaatgccgttacgatagcagagcatactctctcctttagaagccccggacctcctatccttactctgggacatctggggcacctgaccggccttagcgtcaagtatttacgtggcctcgttgctcgggatggagaagatccgtacaggcagttcaccatccggaaaaggccaatacccgggcaacctccccgatttcgtttcatagcggtaccagagcctcagttgatggatctacagagatggatcctgagcgagattctgcagcacgctgattgtcacccggcctccgtggcattcgctcctggttctcgcctgagaacggcggcctatgaacatcgcagggcccaatggttggttaagattgatgtgagggatttcttcgagagcatcacagaaatcgatgtgtaccgtgtgttcctggcaagagggtaccaacctctgaccgcgttggagctcgccagaatttgcactcgactacgcgacgtgcacagagagaagggctcccccgcaccaaggaattggcgcacccgaatgcgcgctcccaacagtgttggcgcatactacagtgcagtcatgggcactctgccgcagggagcacccacatctccaatgttggcgaaccttgccgtgaaggacctcgacgacaaacttcaggccatcgccaacaaggtgggtttgcggtatacacggtacgccgacgacctcaccttctcaacaacggacaagacattcggacgagagaggagtgtgcagctggtcggcgaggtgtataccacattgggcctccatggtttagccccaaacacctccaaaactctgatcgtccctccaggcgcccggaaagtagtcctgggtcttctcgttgatggatcgaagccccggctgactagggactttagggcaaaaatgcggatgcacctgcactttctccttcacgaagatgtgggcccaaccgctcatgctattcatagagggttctcatccgtcgaagggctgcgccaacacctgttaggactcattgcctttgccgggcagatcgaccgctcttttgctgaagagtgcaaagtgaagctgcggtcagctaattggccctga

SEQ ID NO: 8922 - RNA, 1179 nt, synthetic construct
  source 1..1179: mol_type = other RNA
atgaggacttggaacagccagcggtactttgccgagggccttgctgcaggcgtggatgagtctatactcaacaacgccattgcaaccgcagaacacaccctgagacagccttccccaggaccgcctattctcaccctcggccacttgggtcatttagcgggggtggatgtggggatactgaaaacgtacgcatcacgccaggatgccgacccatatcgcgagttctccatcagaaaacggcctattcctggacagccgcctcgttaccgcactatcgctgtcccagaacctcccctgctgcgagtccagacctggattgcatcggaggtactcaggcacgcgccatgccatagtgccagcacggcttttgcacccggaagtcgcttagcacaggctgccgcgagacattgtcgagccgtgtggatggtgaagatcgaccttcgaaatttcttcgagtcactgaccgaaatcgatgtacaccgtgtgttcctggagcgaggctaccagccactggttgccttcgaacttgccagactatgtacaagactgcgcgacaagcaccgaaatgacactgccgtgctgccccaaagaaggacccccaaattccggcattcctccttgacaagcctttaccccagggacttattgggagttctcccccaaggcgcccccacatccccaatgctcgctaacctcgcagtgagggacttggacgagcgcctcactgctattgccaagacctttggtgttcgttatagcagatatgctgatgacctgacattctctaccacacggaagtcatttggaaggtctagggcccacgatctggttggccgcgtgtatgaaacactggctgcccggggcctagctcctaatcagtccaagactacaatcgtcagcccaggcgcccggaaagtggtattggggttgctggtcgacggggacacgcccaagctaactagagattttcggtctaggcttagaaagcacctgtaccacataagcgcccctgatcaaggtccggtgcaacatgcagctaggcgcggatttgcctcagtcgaggggctgcggcagcatctgcttgggctgatcgctttcgccggtcagattgatcccgtctatgcagcgaaatgccgggcgatcctcgactctagtgattggagtcagaccaggcgttga

SEQ ID NO: 8923 - RNA, 1173 nt, synthetic construct
  source 1..1173: mol_type = other RNA
atgaacgattggcacagccaacactatcttgacgctggtcgccaggcagggattgatgaagaattactgcagagggctgtggccgctgcggagtacacgcttacaagacccaaccacggtcctcctgtgcttaccattggacatctagcacaattgtgcggagtggaaactgggctgcttcacgcctacgtcgctcgggaaggggacgatccgtaccgcgagttcactatcagaaaaagacccataccaggggaggctcccaggtacagattcattgccgtgccagagcctcgtctgctgcaggttcagacctggatcgcaacggagatcctgcggcaggccccatgtcatggtgcatctaaggcctttgctcctggtaatcggttgataacagcagcaggagtccattgtcgggcccagtggatgattaaaatcgatgtaagggacttcttcgagtcgatcaccgagatcgatgttcaccgggtgttccgtgaaagggggtaccagccgctcgttgcatttgagctggcccggatttgcacccgtctgagagacgatcatcgacacccaacaagcttcctcccacagagacgcaagccaaagtattatggcgggtcaggctactctgtctaccctcgcaccctaattggcgtgttgcctcaaggagctcccacatcccccatgctagctaacctcgccgtgcgggacttggacgaagtcttaacttcattggcgtcacagttcggcctgagatattccagatatgccgacgacctcactttcagcacccgacgaaaaagttttggccgcgcacgtgccaaggatgccatcggacagatatatcaggccctgataaatcgcggcctgagcccgaatagagcgaagaccgctattgtgtcccctggggctaggaagatcgtcctgggactcttagtagatggcacacggcccaggctcagtcgcgagtttaggtcccgactgaggatgcacctgtactttgtggcccacccagatcatggccccgcgcaacacgctaaaatgcgcggctttgcgtctgttgagggccttaggcagcatctcctgggtctgatcgccttcgccggacaaatcgacgcactgtttgccgactggtgccgggcagaaatgaggcgagccaactggcccctcacttga

SEQ ID NO: 8924 - RNA, 1218 nt, synthetic construct
  source 1..1218: mol_type = other RNA
atggatcgagcagttccacggtgcgctgcatttcttcacggcgctattcgtactactctggctgagagcaaacagatgaccctgtggcggtcccagccttttctcacagccgcgaaaaaagatggcagagaagatcaggtggtcaagaacgctaccaagatcgctacccatctaattcggaagtctccaggggttgagcccatcctgtccctcaggcacttggggcacctgaccggcactccatataacatgctgaggtccgtggtgcgcagggacgaacccgaaccctacaggatctttagaattcggaagcgtcctctggccaatgagaagttgcgtttccgaacgatcgccgtaccagccccctggttaatggagctgcaaagatggctgaatgtgtgcattctagaacacatttcaccgcactctgccagcatggctttcagccggggtaattctatccgagatgcagcggcaccacattgtggcgcgaggtggcttatcaagatggacattatgaactttttcgagtcagtcacagaacgccaggtcttccgggtttttgaggatataggttacgaaccactggtggcctttgagcttgcacggctctgtactaggttgggcaccagatcgacacatgccggacaccccagatatagatccagtctgaaccggatggagatcaaggactattctgaccccttaatgggacagcttccccagggggcacctacgagtcctcgactggccaatctcgtgagcagggacctggacaaggctctgacaaaactcgctgatgagagaggattcgtgtacactcggtacgccgacgacctaaccttctccagtagggaagctcttaacagaacagcaattaaacctatcatcggcgccattagtggtataatcggcgataatggattctcaccgaacgtggcaaaaacaaccgtctcaagccctggagcccgcaagattgtgctgggcttactcatagacggggatgaacccaggctgagccgcgagtttaaacaaaaactgcgccagcatctctactatttgcgcgaacacgggcctgttatacatgccggacgaaacggtaatgccaccacttttgggcttagacgccacgtattcggcttgctgcagcatgcgcgccaaatcgagccagtctacgggaattcttgcctcgaggagttcgccaagatccagtggtga

SEQ ID NO: 8925 - RNA, 1143 nt, synthetic construct
  source 1..1143: mol_type = other RNA
atgactgcgtggaggcctcagcggtttaaagccgccgctggtaaggccggctgtgaacagaacgttgtgtcacatgccgtcacagtggcaagtcacgtacttatacgatcaccaggtgtcgagcccatcttaagccttcgccatctggggcatctcactgacaccccttactacagactgaggcgccttgtgagaagggaagatcccgagccgtactccgtatttcggatcagaaaacggccattgcccaacgaaaaattgcgattccgtacgattgttgtgccatctccgtggctcatggacctgcagaggtggctcaatgtcaacgtgttagagcatgtcccacctcacccagcctctgtggcttttagccgtggcaactctgtgctcgaagcagctgcacctcactgcggggccagatggctgattaagatggatattaagaacttcttcgagtccatcactgaacgacaggtgtaccgggtcttcgacgacatcggatatgagccccttgtcgccttcgaactagcacgcctatgtacaagagttggtaatcggacctcgcgcaagtaccatcagcggtatcactctccttggcaggcgagagagatctcagagtatacgaacgccttcatggggcacctgcctcaaggcgctcctaccagtccccgcgttgctaatctggctgctagagatttagataaggcattgtccaacctggcagatgcgcgaaggtttacctatacacggtacgccgacgacctgactttctccaccagcaagaaaatagatcgcgccgacgtgaggcccatcctgggagaaatttccaagattgtatcagaaaacggtttcagccctaatgtggcaaaaaccacagtgagcagccccggcgccagaaaggtcgtgcttggactcctggtagatggcgaggagccccgcctgactagggagtttaaacagcgtctgagacaacacctctatcatctccggaagcatggcccagccattcactgcctgcacaatggaaatgccacaccgtttggcataaggaatcacgttttggggctggtgatgcacgctaggcaaatcgagcgaccatacggggacgcttgcttgcaggagtttaatagtatcggatggtga

SEQ ID NO: 8926 - RNA, 1176 nt, synthetic construct
  source 1..1176: mol_type = other RNA
atgaggcgcgaccccccacatcagaggtggagcaaacaaatgactagttggcggccgcagcccttctctacaatggctcgggctcaaggccgagactctgcaaccattcaaaattctatcgatgcggcacagagattagctgaaataactcctaatgctgaacctattttcaccctgaagcacttggctcacttgacaggggcaccatacgtattgctccgcggaattgtttctcgacacgaaccagacccttatcgcgtgttcaaaatacacaagaggcccctccctggcgaggtgaccagattcaggaccatcgtgattcctaaccagtcccttatggatgtccagcgctggatcaacgtccacattctggaacacgtcaagccacaccgtgcatcagccgcttttaccagaggagatagcatcaagagagcggctgagaggcattgcggtgcacgctggctaattaagatggatcttcggaactttttcgaatcggtgactgagcggcaggtctacagggtgtacctctcaatcggctaccagcccttggttgcctttgagcttgcacggctgtgcacgcgagttgcctcctcccacgcgagactgagtagatatcacgccccgtggggatggaaaacaatcgagggatacagacatccgacgatgggccatctgcctcaaggtgcgccaaccagccccaagttagccaatctggttgcccgggagttagacgagaatctggaacagctcgcccggtctaacggatttgtgtatacacggtatgccgatgacttgacattcagtacactgggggcctcctccaggtgtgcagtgaggtcatttataggggatgtgtccgagagtattgcccaggctggcttcactccaaaccaagccaaaactcaggtgagcccccctgggagcagaaaggtcgtgctgggtctgctcgtagaccgtgacgagccccgacttagtcgcgagtttaagtctcagctgaggcagcatcttttttacctgaaacgacatggcgcctcagctcatgcctcccgtcaagggtcagcaaccatcttcggtctgagacgccatatactgggcctaatccagcacgcccgccagatcgaagaacagtatggaaatagccagctcaaaagcttcaaggagctccactggtga

SEQ ID NO: 8927 - RNA, 1017 nt, synthetic construct
  source 1..1017: mol_type = other RNA
atgaggcatttgtccgtgagggctggtgtgccatatgcctatctgcgggaaatcgtggagagaaatgctacaagggattatcggttgtttcgcatacgaaaacgtcctgtgcggaatcaacgccttcggtacagaatcattactgttccagaagctagattgaagaaggtgcaacagtggatagatcggcacgtgctctgcgctgccgagcctgatgaggcctcagtggcattcaccaaaagatcttctgtgtatgcagccgcctcaattcactgcggcgctcgctggatgatcaagatagacatccgcgcctttttcgaaagtatttctgagcgccaggtctaccacgtctttcacgaaattgggtaccagcctcttgtagctttcgaactggcacgcctgtgtacccggttaaggaggcgagccccgccattgaagagatggagcctcggcttcgatcgtagatatgagatttccgcttacatcaacggccaggttggacacgtcccccaaggtgccccaacgagtcctagactctccaacctggtagttcgggaactcgacgaggacatccgtaccatcgccgcttcggcagggctaacatatactcgctacgcggatgacctgacactcagcaaaaccactgatgacttcagcagggctgccgccgtcaaagtgattcggaaaatctacagggtactgggggcccatggctttgcgcccaatctagccaaaacccagatcgtgcccccgcgcgcacgtaagattgttctgggccttcttgtcgacggagacagaccccgactgcagagggagtttaaggcgaggattagacagcatctgcactacctgatgcatcctaagttcggacccgcgaagcatgcaaaggcccagggcaacgctacaatatatgggctgcgaaatcacatcaagggattactggccttcgcacacggtgtcgaccccgagtacgcacggaaacagacggagctctttaaccgagtgcattggccatga

SEQ ID NO: 8928 - RNA, 1122 nt, synthetic construct
  source 1..1122: mol_type = other RNA
atgatcagtagctctaagcgtaatccctggcacccgtcagagtttctagaggcctgccagcgaaagggagctatctccactgtcgccggtccagctctcgaaatagctcaacgcataaaagcacagggacctaacttgcccgttctgttgtccttggctcacctggctgctacggtggacgtgccgatcggcctactactgtcctacgtagagagagacaaggatccctaccgggtgttttcagtgagcaagctcggccctaatggcgagacaagtaataggagaaccatttgtgtacccgagcctcttttgagcaaaacacagtcttggatcgcagttcaactgctgaataactgcaccccacatgccgcttccacagcctacgcgcccggatcatctctttacaaagccgtcagacagcattgtggggcacgatggttgctgaaaatcgacctgaaaaacttcttcgagtccataaacgaaatgatggtgttcgatacttttatcagcctggggtatccccgcccaatctgtttccagctcgcacggctgtgcaccagggtctttggtgccgcccaggacgacttcgccagaatgaggttaggggtgcttccacaaggagcaccctcttctcctatgctggccaatctggctgtttataagctcgacgttagcctttctgaaatagccgctaaaaatgggtggatttacacaagatatgcagacgatttagccttttccacccgtagcgtgtctagtcgccacgagactaaggaactgatgtggtcgatcctcgaccagattcgatcctttggcctgacgcctaataagagaaagacttccattagtccaccaggcgcacggaagatcctcctcgggcttaacgtcgataccgatcggcctaggctgactcggagcttcaaaaacaacgtggagacacacgtgtacgcgatcaccaaccctgcaatcggattcaataagcacttagaagctcgcggcttcgaatcgggcccctcaatgattcggcatattgcgggtctgattgcctatgccaggagtattgagccagattatgccgatagcctctacaaaaggctgaccacagaagcggtccgctcatga

SEQ ID NO: 8929 - RNA, 1122 nt, synthetic construct
  source 1..1122: mol_type = other RNA
atgacctccagtagcaatcgcaacccctggcacccatccgaatttatagatgcctgccaaagggagggggccgtgtccaatgttgctggacccgctctggatatcgctcaacggattaaagctcagggccaggacttgccggtacttttctcactggagcatctcgctgcaaccgtcgacgtgcccatcggtttactgctgagctacgtgcagagagggaaagatccatatagggtgtttagcgtgtccaagcaaggctctaagggactcaggtctaaccggcgcaccatttgcgtcccagaacctctccttagtaaaacgcagagctggatcgcagcccagctgctaaacaattgtacgcctcaccctgcttcaacagcatacgcgccgggcagctctcttgcaaaagccgtaagaccacattgtgaggcccgatggctgttgaaagttgacctgaaaaacttctttgagagcattgacgaactgaaagtgtttgatacatttgtcagtatggggtaccctcgcccaatctgctttcagatggcacgcctgtgtactagagtgttcggagccgagcgtggagataacgcttcaacccgtttaggtgtattgccccagggcgctccgtcatcccctatgctggccaatctcagtgtttatagattagacgtctccttgtccgaaattgcgtcgcggtcgggatggaattatagtcgctacgccgacgacctggcattctctactaggctcgagtcaagccggcacgccaccaaggatctaatgtggtctattttcgacgaaatcaggtcattcggcctgactaccaataagcgcaagactatcatttctcccccaggcacaagaaaggtgctgctgggcctgaacgtggatacagataggcctcgattgacaaggtcttttaagaataacgtcgagacacacgtgtacgccatcactaatcccgagatcggtttcaacaagcatcttgaagcaagagggttccgaagtgggcctagcatgattagacacatagccggtcttatcgcgtatgcccgttccatagagcccgactacgctgagaagctctataagcggctcaccaccgaagccgttcggagctga

SEQ ID NO: 8930 - RNA, 1125 nt, synthetic construct
  source 1..1125: mol_type = other RNA
atgaccggctggtcccgacgcaatccttggtcccccaccgcatttatgcaggcctgccgcagggaaggcgaggttgaaaccatcgccgaaccggctctgggtattgctagacggataaaagcccaaggtccagatctgcctgtgctcttttccctcgagcatctcgcagctacggtggatgtgcctatcggactgttactcagttacgtggaccgggagaaagatccctaccgcgtattttccatctcgaagaagaggggccccaagtccgaagcaagtaacagaaggacgatctgcgttccagaacctcttctaagcaaaacacagtgctggatagcggcacagatactgaacaattgtaagccgcacagtagcagcacagcgtatgccccggggagctctctggtcaatgccgttaaagaacattgtggagcccggtggcttctgaaggttgatgtgaagaatttcttcgagagtatcaacgagcttatggtgttcgaaaccttttcctctttaggctacccaagacctctgtgcttccagatggcacgcatctgtactcgtgtcttcggaactgctcagtttgaggtgtctaaagctcgcttgggggtattaccccagggtgcccccagttcccctatgctcgcgaatctcgcggtgaacgagctggatgaggccataagcgagatcgctatccggcgtgggtggatttatactagatatgccgacgacctagctttttcaactaagcgcgagtcttcaaggcacgaggccaaggagctgattttctcaattgtcgacgaaattaggtcttttgggttgtcaccaaataacaggaagacaacaattagcccacctggcgcccggaaggtccttttgggcctgaacgtggacaccagcagaccacgactgacacgacgtttcaaaaataacttggagactcacgtctacgccatcaccaacccctccatcggaatcaaaaaacattcggaggcaagacagttccgaagcgaacaatctatgattaagcacattgcagggctgattgcctatgccaggtctatagaacccgagtacgcagacaaactgtacagacggctcacagctgatgctatctcaacctga

SEQ ID NO: 8931 - RNA, 1158 nt, synthetic construct
  source 1..1158: mol_type = other RNA
atgcggtcttggcgtcctcagaacttcgtacgagaggggcagctacggggggtcgacgatgacgtcattaataatgctgttttaactgccgcaagacttaggcagcgcagtccagtgttgcctcccatattttcactgggacatctcgcctggctcgttggcgcaagttacgaactgttgcgggacgtcgtgtccagatatactgtggacccctaccggtcctttcagatacgcaaaaggcctctaccaggacaaggcaagaggtttcggaggatctgcgtgcccgatacatttctgatgttaacccaaaagtggattgcctccaacctgctggtgagggtcccagctcactccgcgtcagtcgccttctctaagggagatcgcatcgttgacgccgtgcagccacactgtgagagtacctggctgatcaaaatggatgtggtgaacttcttcgagtcaattgacgaacgtgtggtgtaccgcgtattccgcaggatgggttaccagccgctggtgagcttcgagttggcgcgattgtgcacaagaatcggtgctccaaccgcagcaagacgcggtcggagatggaatcctattaggaattcagagtccaagattagctcgtatgaagctccgcgactcggacacctccctcaaggagcaccaacgtcgcctatgttagcaaacctcgcagttatcgagatggatgagcgactgagcgaagtggcaggcaaggctggatttgtgtactcccgttatgccgacgatcttgctttttctagcaggcggcagctggacaggaaatcttgtcgtgaagtcatcgcgagtgctagcgcgatcctggacgtcttcggctttagcgtaaactctgccaaaaccagcgtacggccacctgggagcagaaaagtgctgttgggcctcaatgccaactctgtgcagccccgcctgagtcgagaacttagagatcgcctgctccggcatagatatttcctgctgcacccccaaattggtcccgccaagcatgccaagagactggggtttgactcaacaataggctttaagaatcacctattcggccttgttgcttacgccgcccaggttgagcccgggttcgctatggtccttaaagaggatctcgcccagatctcctggcccctttga

SEQ ID NO: 8932 - RNA, 1155 nt, synthetic construct
  source 1..1155: mol_type = other RNA
atgtcttcttggcgcccccacctgtacaagagcaatgggatagcccaagggagagcgcgggtgacactgctgaatgctattgtacaagcccagaaagtgcaggcccgggggttgcctgccattctcaccctgggacaccttagcaagcatgttggcgtcccctatctgctcctgcgggaagtggtaagaaggaaacgcgatactgcttacagagagtttcccgtcgcgaagagatctggcggttggcgtcgaatctatgtgcccgagccactgctgttgaggacccagagatggataagccggtatgtactcgccaatttgacaccgcattccgccagtgtcgcatatgtgagagagtccagtgtattcaaagctgcagaaatgcattgtcgatgccagtggctgatcaaggtggatatccaggacttctttgagtccatttcggaaagacaggtttacctggtctatctgcaggcagggtaccagccgttggtcgctttcgagttggcccgcctatgtacttgggtttttgacgagcagtcactcaggtacaggcggaagcggtggcgaacctcccctgaaaggcgcagcgttccaggcgagatcggaggataccgagacagtaggatcggccaccttcctcagggtgccccgacatcacccatgctgtcaaacttagttatggccaagttcgatgcggcagctgaagccattgccctctcagaagggtgcgtgtatactcgctactccgacgatctttccatcagtagcgatgccagcgactttggacgttcaagagctgagaacgtggtgcgcgagctatttgcacttatgaggggatctggcttcgagccaaaccccgagaaaacggtgatcgctccacctggcgcacggaaaattgtgctcggtctattagtggattctgacaggcctcggttacggcgcgaattcaagtctaggctcgaagctcacgtccacggactggtcaagtttggcccagtgcagcatgcgcgtcaacgcgactttaaaagtatattcggcatgaagagacacctgtacgggctgctgacctatgcagaacaaattgattccgctttcgccgagcctcttcgaaagaaactcgacagcgtggtttggccaggtgtggagccctga

SEQ ID NO: 8933 - RNA, 1167 nt, synthetic construct
  source 1..1167: mol_type = other RNA
atgtcccggtggagcagccagccctacctcaaggctggaaggaaggcgggcgtacctggggatgttctcaagaatgcggtgaagacagcaaaacaagtgaagcagggctgccctcctatactgactttaaatcatctaagccaccttactggggtcccacactctttcctccacaggatggtgagccggacatacagaaccgaagcctataacgtctttaaactgcggaagcccaatgtcgggcactctgcggaccggttcaggtggatctgcgcaccttcagaagagctgctcagagtgcagcgttggattaacacacatattctcagtaaggttgagccccacgaagcctcctatgcttacgacaatcgccacggtgtacttgacgccgccgagttacattgcggagcccagtggctgattaagctggatctgacgaactttttcgagtccgtgctggagccccgggtgtatgagcttttcaggtcgttcggctaccagccacttgtggccttcgagctggccaggttgtgtaccagagtgcgcgcatctggcaaccctgaccgacgatttgggaatagagaactgcccgccggactcccatatccagctgaccctcgcatcggccatcttccgcaaggggctgccacctctccccgtatcgccaatttggtgatgcagagcctcgacgaaagcctgcacgactacgcctgtgacaacgagcttgtttactcaaggtacgcagatgatctggtctttagtagtaagaatgcgtttgatcgccaggaagcaattcagcacatcaaactgattggcaagtgtctaatcgaagagggcttctggctaaacgaggctaaaaccaagatcgtaccacccggagcaagaaaaatcgtgttgggtctgttggtggatggggatgagccccgcctgagtaagtcttacaaaaaatatgtctccgaccaactctactatttgtcccatccaaaaatcgcaccaatggcccacgctaagcgacatggctttcagtcactgcaaggcttaattaaccatgtctctggaaagatagcttatggtttctcaattgaaccggattgggctaaaaaacaggggaaacagctcaagggaatctccggtaaactggagctggaccacgttatatttccttga

SEQ ID NO: 8934 - RNA, 1167 nt, synthetic construct
  source 1..1167: mol_type = other RNA
atgaaccgctggtcaagccagctgtacctgaaaaccggtagagaggtgtctgtccccgatgatacgcttcagaacgccgtcaagaccgctaaacagatgaagcacggatgtcctcctatctttacactaaagcatctggcacacgtggctaacgtgccctaccctttcctgcataggaccataagcaggacataccgcactgaagcctacaatgtattcaagttgcgtaaaccgaatgtcggacatagccctgacagattccgatggatatgcgccccctccgaggacctcttacgcgttcagagatggatcaataccaatatactttcccgagtggagccacacgaagctagttacgcttatgacaagcgtcacggcgttctggaggcggccgaactccattgcggagctgagtggctgatcaagctggatctaacaaatttcttcgaaagcatactagagccccgcgtctacgatctgtttagatcctttggttatcagcccctcgtggcttttgaactggcacggctgtgtactcgggttaggtcatccggaaaccctgaccgacggttcggcaatggagagcttccagctgggcttccataccctgccgacccaaggattggccatgtaccccagggggcagcgacaagtcctaggattgccaatctggtgatgcaatctctcgacgagtctctccaagattacgctctcgaaaaagacttggtctatagcagatatgccgatgatctggtgttttctagtaagaaggcattcgaccggtcccacgcccaccagcacattaaatcaattaacgcccgcctgatcgagggggggttttggttgaacgaagccaagacgaagatcattgccccaggggccagaaagatcgtgttagggttgctggtggatggtgacaccccacggctgccgaaatcatataaaaagttcgtgtctgaccatctgtattacctctcgcatccggcaatcgatgcgaaaactcatgcaaagcaccggggctttcaaagccttcaaggcctgattaaccacgtaagtggcaaaatcgcgtatggctacagcattgaacaggactgggcaaaaaagcagggtgataggttgaaggagatctgctccaaaaacgagttagaccacgttctcttcccctga

SEQ ID NO: 8935 - RNA, 1167 nt, synthetic construct
  source 1..1167: mol_type = other RNA
atgtcccgatggagcagccagctctacctaacaacaggccgtaaagcaggcgtgccgggcgacatcttacagaatgccgtgcaaacagccaaacagatggaacacggctgtccaccgatcctgactctcaatcatctagcccatctggcaggcgtgccttatcctttcctgcatcgcacgatctcaaggacttaccgcaccgaggcgtataacgtgttcaagttgagaaaggcaaatgtgggccactctccagatcggtttaggtggatctgtgcgccatctgaggacctactgcgcgtgcagcgttggattaacgttcatattcttagtaaggttgacccccatgaggcttcatatgcatatgacaaacgacatggtgtactggaggccgccgttctgcactgcggagctgagtggctcatcaagctggacctgaccaattttttcgaaagcatactcgagccacgggtctacaaactgtttcggagctttgggtaccagcccctggtcgctttcgaattggcgcgtctttgtaccagagtacggaagtcggggaaccctgacaggaggttcggaaacactaccctgccagtcgggcttccctactccggtgaccccaggattgggcacctgcctcagggagctgctaccagccccagagtcgccaatcttgtcatgcagtcactggatgagaaccttcaggaatatgctcgggaaaacgagctcgtgtactcacgctacgctgatgacctcgtgttcagctccaaaaatgctttcgacagatctcaagtagccttgcacatcaaaatgatcaacgcatgcttgattaaggagggtttctggttaaacgaagccaagactaagatcatacctcccggggcaagaaaaattgtgctgggactcctcgttgatggcgatcggccgagactcacgaagtcctacaaaaagtacgtgacagaccatctgtattatcttgcccaccccaatattgatgccatgacccacgcccgacaccgcggttttcaatccttgcaaggattaataaaccacgtgagtggaaagatcgcgtacgggttttctgtggaaccagattgggcccgcgtcaatggcgcaaggctgaaagagatatgcagtaagattcaggttgattatgtcctgtttccttga

SEQ ID NO: 8936 - RNA, 1167 nt, synthetic construct
  source 1..1167: mol_type = other RNA
atgacccgatggtctagccagccttatttaaaagaggggagagggctcggcgtcccgcaagatattctgcaaaatgctgttaaaactgcgaagcgcatgaaacatggctatcccccaattctgacactgaatcaccttgcacacctcacaggtgtcccgtacccttttttgcaccggaccgtgtctaggacacatgagaaggaagcgtacaacctcttcgccctgaaaaagccaaacgttggtcattcacccgatagactacgctggatcagtgcaccatgcgaggacttgcttagggtgcaacgatggatcaatgctaatatcctcagccatgcagagtcacacgaagcatcttatgcttacgataaacgtcacggcgtcctggaggccgcagaactgcattgcggcgccgaatggttaataaagctcgacctgaccaattttttcgagagtatactcgagcccagagtctataaactgttccggagcttcggctaccagcgtctggtggcatttgagctggccagattatgcacgaggatacgcgtatcaggtaaccccgaccgaaggttcgaccaccggactctaccagctgggtttccatatcccgctgatcctagaatcggacacctgccacagggagcagccacgtcccctaagatcgccaacctggtgatgtacagcctggacgaacagctacaggcctacgcgacaaagaatgaacttgcctacagccgctatgctgatgacctcgttttttcctccagtaatccattcgatcgcccccaggccatcgaacatgtgaaagcgatcaacgagtgtttgatcaaggccggattttggctcaacaaggccaaaaccaagattatcccgcctggtgctaggaaggtagtgttgggactgctcatcgacggggagcagcctagactgactaaagcttacaggaagtacatatcagatcacctgtacttcttgtctcaccccgacatcgatgccattacccacgctgaacaccggggatttaagtcccttcagggccttattaaccatatttccgggaagattgcctatgggtattcgattgaccctgactgggccaaggagcatggcaaccggcttaaaatgatttgtcgggcactggaggtggatcacgtgatcttcccctga

SEQ ID NO: 8937 - RNA, 1167 nt, synthetic construct
  source 1..1167: mol_type = other RNA
atgaacagatggtcgtcacagccgtatctgaaagcagggaggaagagcggcgtgccggaagacattctgaaaaacgcagtcaagactgcaaatcagatgaaacacggctgccctccgctactgaccctgaatcatctgagtcatctcacaggtgttccttaccccttcctgcatagaacaatttctcgtacttataagaccgaggcatacaacgtgttcaaactgcgcaaacctaacgctggccactctctagatcggttcagatggatctgtgcgccttccgaggatctcttaaggatccagcgatggatcaatgtgcacatcctcagcaaggtggagcctcacgaagccagctacgcctacgacaatcggcatggcgtgcttgaggcagcggctttgcattgtcgcgccgagtggctgatcaagctggatctcacaaactttttcgagtctatccttgaaccacgagtttacgagttattcagaagcttcggataccagccactcgtcgcctttgaattgagtcggctctgcactagaattcgcgccagtggcaaccccgatcgcaggtttggaaataaaaccctaccagctgggctgccatatcatgcggacgccaggattggccacctgccccaaggagctgcaacctcaccacggatagccaacctggtcatgcaaagcctggacgaaaacctccaggcctatgccactgaaaacgaattagtgtacagcagatatgccgacgaccttgttttttcatcccgaaatgccttcgacaggagtgaggcgatacaacacatacaatccatcaatgagtgtttggtcgaagagggattttggctgaacaaggctaagacgcggatcaccccccctggtgctaggaaggtggtgcttgggctcttggttgacggtgaaaagccccgcctgcctaaaatttacaaaaagtacgtatccgaccacctgtactatcttgcacaccccgagatcgatgccatgacacacgccaagcatcgtgggtttcagtcattgcagggccttattaatcacgtctctggaaaaattgcttatggtttttccatcgagcccgattgggctaagaagcagggggcacagctgaaggctgtgtgcaaaacgatagaggtggatcatgtagtattcccatga

SEQ ID NO: 8938 - RNA, 1167 nt, synthetic construct
  source 1..1167: mol_type = other RNA
atgaacagatggagtccccaacgctatcttaaagccggccgacaagagggagttagtgaggccacgctccagaatgctatcgatactgctaaacagatgaagcatggctgccctccgatattcagcctgaatcatctgtctcacctcatagggactacgtacccttttctccacgaaaccgtctctcgggagaatgaggaggaagcctacaaggtgttccggctgaaaaagccaaacgtaggtcatagccccgatcgctttcggtacatatgtgcaccatgcgaagacttgttgagggtccaacggtggatcaacaaccatatactgagccgcattgaaccccatgaggcttcctatgcgtacgacaatcgacacggggttctggatgcagccgcccttcactgtggtgctcggtggctgatcaaactagacctgactaacttcttcgagtccatcctggagcctcaggtttacgagctcttcaagtcattgggataccagcccctggtggccttcgaattagcacgcctatgcacacggctaagagttagcggcaacccagaccgacgctataagaacaaaaccccaccagaagggctcccttacaccggagatacccgtatcggacacttgccccaaggagcagcctcatcccctcgtattgccaatctggtgatgaggtccctcgatgaatcccttcagtattttgctagtgagaatgacctcacctattcaaggtatgcggacgaccttgtgtttagttccagagccgaatttgatagatctcaggcaacacagcacattaaagccatcaacaatagactggtcgacgaaggtttctggttgaacaaagcaaagaccaagattgtgactccgggcacaaggaaaattgtccttggcctgctggtggatggaaagaagccacgcctgcccaagtcatataagaagtacgtgagcgaccacctgtactacctcagccatcccacaatcgacgccatggcgcacgctgagtctagggggtttcagtcggtgcagggtctgatcaatcacgtcagcggcaagattgcttatgggttttctatcgagcctgtgtgggggaaagaacagggcgatagattacgtggcgtgtgtagggagttagacctggatcatgtaattttcccgtga

SEQ ID NO: 8939 - RNA, 1167 nt, synthetic construct
  source 1..1167: mol_type = other RNA
atgactcgttggtcgtctcaaccttacctaaaggccgggcgtcaggctggagttagcgagtccatcctccagaacgccgttcagactgcaaaacagatgaaacacagctgccccccaattttcacgttaaaacatctggctcacctcaccgatgtcccctaccctttcctgcacagaacaatctctcgcaagtacagagccgaagcttataacgtgtttaagctgaaaaagcagaatgctggccacagtccagataggtttaggtggatctgtgcccctaccgaagacctgcttcgcgtgcaaagatggataaacacccacatcctgagtaaaattcagccccacgaggcgagcttcgcgtacgacaatcgcaacggagtgctagaaacagcacagctccactgtggtgcaacctggttgatcaagcttgatctgacgaactttttcgaaagcattctcgaacctcaagtatatgagctgttccggtcatttggttatcagccgctggtcgcctttgagcttagtcgcctctgcacaagggtgcgagcaagcggcaacccagatcagcgacatggcaataagccactacctcccgggctcccgtacagtggtgacaccaggatcggacacctgccccaaggcgcagctacctctcccagaattgctaatctggttatgcagtccctcgacgagacattgcagacctatgccactgagaatgatcttatgtattcaagatacgctgacgacctggtcttttcctctaagggcgtcttcgacaggccccaagccactcagcacattaaggccattaacaagtgcattgcagaggaggggttctggttgaatactgccaaaactaaaatcgtgacaccaggggcccgaaagatagtgctgggcctgttaatagacgggggcaccccgcggttgtcaaaagcctataagaagcacgtgtcagatcacctgtactacttagcccatcctaagatcgacgctatggcccatgctacacggcggggatttcatagcctccagggcctgattaaccacatctccggtaaaatcgcgtatggattctccatcgaacctgattgggccaatgagcatggaaaacggcttaaagggatatgtgcaaagttgcatgtagatcatgtgctgttcccatga

SEQ ID NO: 8940 - RNA, 1116 nt, synthetic construct
  source 1..1116: mol_type = other RNA
atgccagaggatgttttacagaacgccgtcaagaccgcaaaacagatgaaacacggctgtcctcccattttgactcttaaccatctcgcgcatctcacaggggtcccctacccgttcctgcataggacgatctctcgaacgtacaggaaagaggcctacaatgtttttacactgaggaagcccaactcaggccattctcccgatcgagtgagatggatatgtgctccatccgaagatcttctgcgattgcagagatggataaataccaacatcttatccaaagtggagccacacgaagcgtcatatgcctatgattcgcggcacggtgtgcgcgaagctgctgaactccactgcgaagctcagtggctgattaagctcgacctaactaactttttcgaaagcatactggagccgcgtgtgtacgagctatttcgctccttcggctaccagcctcttgttgccttcgagctggcacgtctgtgcacacgcattagagccagacggaatcctgaccagcgccacggaaataagagcctgcctcccggtctgccatattcacgggactctagaatcggacacttgccacagggggctgcgaccagtcctaagattagtaatcttgtcatgcagtcactcgacgaaactctgcaggcctacgcagaggataatgagctcgtgtactctaggtatgccgatgacctggtgtttagcagtaggaaacctttcgacaggtcccaagccctgcaacatgtgaagtccatcaaccaatgtctggtcgaggaaggtttttggctaaacaaggcaaagaccaaggtaatcacacctggcgcacggaaggtcgtactgggactccttattaatggcaagaaaccccggctgactaaagcatacaagaaatatgtgagcgatcacctgtatttcttggcccatccggacatcgatgccatcacccacgcagagcaccgggggttcaaatccttgcaggggttaatcaaccatatcagcggaaaaatcgcttatggctacagcattgaacccgactgggctcgcgagcaagggaatagactcaaggtgatatgcgccgctcatgaggtggaccacgttatttttccatga

SEQ ID NO: 8941 - RNA, 1164 nt, synthetic construct
  source 1..1164: mol_type = other RNA
atgaagcgttggagtcctcaggcgtatttaaaggccggacgggcagccgggatacctgaagacgtgctgcagtctgccgtaaaaatcgccgctcagatgcatgaaggctgtccccccattttttccctcaaacacctggccaacttaaccggagtgccctacccatttctccaccgcaccatctctcgaacttataagactgaggcttatactgtgttcatggtgcacaagacaaacgtcggacattcaccagatcgcttcagaacgatttgtgctccctcacctgagctcttgaaggctcagcgatggatcaataaatacatcctctcgaatatcccgtcacaccacgcatcttacgcctatgagggccgcaacggtgtactggaggccgctaatgtccattgccaggcaacttggctgatcaaacttgatctgactaacttttttgagagtattctggagcctaaagtgtttacccttttccgcagcctgggttaccaacccctggtggcattcgagctggccagattgtgcaccagaacaaggaagaccggcaaccccagagtcatgtctcgggctggtggtggctcccctgcactaccatataagaatagcctaattggacatctcccccaaggggcggcaaccagccctaagattgcgaatcttgttatgcggtcccttgatgaaaaactgtttaagttcgcccaagataacgacctgatctacacacggtacgctgacgatttaatcttctccagccgccagccgtttgataggaccgtcccttctgcttacatcttggctattaaccagctgctgcgggccgaaggctattggccaaatagagccaaaacgaaagtggtgacacctggcactaggaaggtggtgttggggctgctagtagacgggagtgagccccgactgacaaaaacatacaaaaagtacgttagggaccatctgtattacctctcacatccggaaatcagcccagagctgcacgccaaacgtaagggattcaggagtcttcagggattgataaatcacgtttccgggaaaattgcatatggcattagcatagaaccagaatgggggaccgcccaaggcgaaaagctcaaggagatatgccagaagtggcaggtcgaccacgttctcttcccatga

SEQ ID NO: 8942 - RNA, 1164 nt, synthetic construct
  source 1..1164: mol_type = other RNA
atgaagcgctggtccccacagtcgtaccttaaagcaggccacgcagccggcatacccgaggatgtgttacaaaacgccgtgaagatagccggacagatgctcgacggatgcccgccaatttttagcctgaaacacctcgctacactgaccggtgtcccgtatcctttcctgcaccgcacaatcgaccggacttatcagactgaggcatacacggtgtttcgtttgcagaaagcttcagtgggccactccccagaccgttttcgttacatctgtgcgccatgtccagaattattgagagcccaacggctgattaataagtacattctgagcaatctcaccccccaccacgcgagttatgcatacgatgggcgaaatggggtactggaagctgcttccgtacattgccaagccacatggctgatcaagctcgacctgacgaactttttcgaatctattctggagccccaggttttcaagcttttccggagtatcggctaccagcctttggttgccttcgagctgagtcgcttgtgtacccgggtcagagtgcgggggaaccctgacactaaattttggagcggggagttgtcatcttctttcccctataaagatagcaggatcggccaccttcctcagggagcagcgacaagcccgaaaatcgccaatctcgtgatgcgctcccttgatgagaagctatatgacctggcctcgaagaatgagctgatatacaccaggtatgctgatgatctgatattctcatctaggcagacctttgacagggccctggcatcccgccatattcgggctgtgaatcaggtcttgcgcgaagaggggtattggcttaaccgagctaaaactaagatcgtgcctccaggaacaagaaaggtcgttctgggtttactagtggatggtcccgttcctaggctgaccaaatcttacaagaaatacgtcagtgaccatctctactacctctctcaccctgaagtaagcgcagaggcgcatgccgctagaagaggatttaactccctccagggtctgatcaaccatattagcggcaagatcgcctatggaatctcaattgaacccctttggggcgccgaacaggggcaacgactcagacagatttgcggcaggctgctagtggaccatgtgatgttcccctga

SEQ ID NO: 8943 - RNA, 1164 nt, synthetic construct
  source 1..1164: mol_type = other RNA
atgaaccgctggagtccacagcactaccttaaagctggacgcgccgctgggattccagaggatgtactgcaaaatgccgtgagcatagctgcgcagatgcacgagggttgccctcctatttttagcctcaaacacctcgcaaacctgacctcagtgccctacccttttctgcatcgcaccatctcccggacttatcagacagaggcttatactgtcttcagactgcagaaagccaacattggccacagcccagaccggtaccgttacgtctgtgccccctcacccgaaatgctgaggacacaaaggtggatccacaagcatatcttggcctccctgaaaccacaccattcaagctacgcatatgaaaagagaaatggagtattcgaggccgcaagtctgcattgtcagtgcatctggctcatcaagctcgatctgaccaatttctttgaaaccatcctggaaccgcgggtgtataaactgtttcgatctctgggctaccaacccctggtggctttcgaactaacacgactttgcacccgtatcagacccagaggcaaccctgagaatcggttgtggaggggcgagctgacagaaaatcttccttacataggttctgcagttggacacttgccacagggggcagcgacttctccaaaaattgccaatctggtgatgaaatcccttgacgaaaagttatatgagttcgcgtcactcaacgagctcacatatacgcgctatgccgatgaccttattttcagttccaccaagagcttcgaccgagcactggcaagcaaacacattgagactatcaacaagttactgcgggatgaggggttttggattaatagggccaagaccaaagtggtcacgcctggagcgagaaaggttgttttgggcttattggtggacggcgccgaaccgcggctgactaaggactacaagaagtacgtctctgatcatctttatttcctctcccgcctagacatcgatgctgaggcccacgccaagaggaaacgttttgactctgtgcagggcctgctcaaccatctgtcgggaaagatcgcttacggtatcagtatagagcccaagtggggggctgaaagggggacaaaactccgccagatatgtgatagattgtccctagaccatattttatttccctga

SEQ ID NO: 8944 - RNA, 1149 nt, synthetic construct
  source 1..1149: mol_type = other RNA
atgaatcgttggagcccccagcgctacaagtcagaggggctcaaccagggcgtggatcaaaacaccctctccaatgcattgtcgacagccgaactgcttcgtgcaaactcccctaaactgccaccgatttttactctgagacacttagctcacgaagcaggtgtgccctatgccctgttgcgggctgtcgtggccaggtctgaaagggcagaagcttacaaggtattcaagttgaaaaaagcggtagcctcatttggcgcgaatagattccgatatatctgtgttccacatccatccctactgaaggtccagcgatggattcacaagcacattctcatgcaggtggacgctcatcctgccagttacgcgtataaggagaaaaccagcccctgtgacgccgctacaatgcatgcgggatgcacgtggatgatcaagctggacgccaccaattttttcgagtccatcctggagccagacgtgtatttcgtttttcgcgatatgggttaccaagccctcgtcgcattcgagctggccaggctctgcaccagggttaggcctaccggtaaccccgtcaaagctaacagagtgaaagagggacaaggcaacctgccataccgcaccatcaaaatcgggcaccttccacagggagctgcaacgtcacctcttttgagcaaccttgtggctcggaaactggactgcgccctcacaggtctggcaaacgataggggattgacttatacccggtacgctgacgatttaactttcagctctttcggggactttgatcgcgacattagtacaaatctggtcagagagatttacgagatcatgagaactcatggcctgtggccaaataagtctaagaccaagatcatacctcccggagcaagaaaagtggtgctgggccttctggtggatggccctgtaccccgtctcactaaggagtttaaagccgaagtccgaacgcatattcacttcatgttacggcccgatgttggggtgcggaagcacctccgcgccagaaaattcgatacaccctgggggatgcagaattatctgtttggcaagctggcttacgcccagccgatagaacctcgatggactgcccgcatgagggacctactacggaagatagactggacaagttga

SEQ ID NO: 8945 - RNA, 1149 nt, synthetic construct
  source 1..1149: mol_type = other RNA
atgaaccgatggtcaccgcaaaggtacaagtccgcaggattgaaccagaatgttgataagggcgtgctgaacaatgcactgcggaccgcgcagcttcttcacgccaacttccccttgttatcccccatcctcaccttgcggcatctggctcacgaggccggagtatcttatgggttcctgcgcggagtagctgcgagatctgagcgggtcgagccctacaaagtgttcaagctcaagaaaaacgtggtgtcttttggagctaacaggttccggtacatatgcgccccacatccctccctgctgaaaatgcagcgctggatccacaagaacattttgatgcacgttcacagtcatccagcaagctatgcctataaggaaaaaacatcccctcgtgatgctgcggcaatgcacgccggttgtaaatggatgataaagctagatgcgacgaattttttcgagtccattctggaaccagacgtatatcgcgtcttccgggagatgggctatcaggccctcgtggccttcgaactcgctagaatctgcactcgcgtgaggcctagtggtaatccagttaagacggaccgtttcaaggatgggatggggaatttaccttataaaaacgtcgccattggccatttgccacaaggagctgctacatcgcctcttctgtctaatctggtcgcacgcacactggatcatagcctggccgagtttgctaattcaaaggacctcgcctacacacgttacgccgacgatctgactttttcaagctttggtacctttaacagagatggggctgagaatatcgtgagggagatctacgaaataatgagagcccatgggctttggccgaacaagagcaaaactaagattattcctcccggggctcggaaagttgtcctaggcctcctcgtggacggtcacgtccccaagctgagcaaggaatttaaagcagaagtgaggacccacatccattttatgctgcgacctgacgtgggcgtgtcaaaccacagaaaagcacgaaaatttgacaattcctggggcttaaaaaatttcatcttcggcaagctggcatacgcccaggccattgagccaatctggaccagtagaatgagggaccttttcatgaagattgactgggatagctga

SEQ ID NO: 8946 - RNA, 1149 nt, synthetic construct
  source 1..1149: mol_type = other RNA
atgaatagatggtcttcacagcactatattcgcattggtaatgaccaaggagtcgctccggctatcttgaagaccgctgccgaaaccgccaagcacctgcataaatgcaatccaaactttccacccgtcttcaccctgaggcatctggctcattacactggcgtcccttacggcttcctccggatggtggtggcgcgcaataagcaggttgagccgtacagggtgtttaaactgaagaaacaagtgcgtagttttggacgcgaacggttccgatttgtctgtgccccccatccctacctgttaaaggcccagcgctggataaaccgagagattttggccaaaattcctggtcacgaggcctcgtacgcatattcacccgggagctccgtctacgacgcagcaagcatgcacgccgggtgtcggtggcttatcaagttggacgcgactaacttcttcgagagcatacttgagcccaaaatctatgagatttttaggacgatcggataccagcctttggtggcattcgagcttgctcgtgtttgcacaagaacccgacctagtgggaaccctgtatactccaacagggctgaccccaataagaaaggcctgccatataacactgtacagatcgggcatctgccacaaggggccgccacaagtccccatctctccaacctggctgcacgcgatctggatgaaagcctcaagaacttcgctctccttaaccagttaatatatacgcggtacgccgacgatctgaccttttcttcaaccgaagaatttgtcagagaagacgttgtgaagaagatccacgaaatatatgggtttatgagagcaaatggactctggccaaataagtcaaaaactcagatcgtgcctcctggtgccagaaagatcgtactgggcttgctggtggatggcgcccaaccaaggcttacaaaagaattcaaacaggagattaggacacacctccactttctacagcgttctgatatcggtgtgcggaaacacctaaaagcgcggggcttcgattccttctggggactgcgcaatttcttagtgggcaagctgtcctatgcaaaatctgttgagcccgagtgggagagcaagatgaatagactctttgtgaagattaactgggacacatga

SEQ ID NO: 8947 - RNA, 1128 nt, synthetic construct
  source 1..1128: mol_type = other RNA
atgacacggtggagttctcagttgtacattaaggaaggtagatcaaaggatgtcccaagagacatcttgcgggatgctgccagaaccgccgagcttttgatttcaccagacctgccccctgtttttaccttgcgacatatcgctcatctgacaggagtcccttacaatttcctgcgggaggtcgttagtaggagctccgatccctatcgagtattcaagctgaagaagaacagcccaaatctggtcggtaggtaccggtatatatgcgccccacacccaaaactgctcaaggtgcagcgctggatcaaccgtgagatactcgaaagtcttcagccccatgaagcctcatacgcttatacaaaaggcgccggcgtgctgaaggctgcagaagtccacagtgggtgcaggtggatgattaagctcgacgtaactaacttttttgagtctatcctcgagccccgcatttacaagattttccggggactcgggtaccagcccctcgtttccctggagctggcgagactgtgtacgcgagtccgcccgtacggaaacccagtgtacaggaataaacaggacgcaaaccttcccggcctcccttatatggtggccgagatcggacacctccctcaaggcgcagcaactagccctctgctgtccaatctggcggtgtacgagttagataaggaactttcctcttattccatcgaacacgaacttacctattctagatatgccgatgacatggtgtttagcagcgaagctaaatttagccgttcggctgttctggtgatggtacacgagctttacgacattgttaggaaacatgggttatggcccaatagggtgaagaccaagatagtgtcccctggggcgagaaaagtggtgttgggtctgttggtagacggcaaaaaaccgagattgacatctgagtacaagcaggaagtgcgcactcacctgcatttcctgctaagggaagacatcggggtcgagaaacacctagtgaagcgcggtttcgattcacgctttggcttacgtaatttcctgctgggcaagatcgcctatgcccaacacattgagcccaaatgggcaggagagatgcggaacatgctccatctagtgaaatggtga

SEQ ID NO: 8948 - RNA, 1167 nt, synthetic construct
  source 1..1167: mol_type = other RNA
atgaactcgtggaatagtcaattgtttaagactgagggccgggctcgggggattcctaatgagatcctcgacaatgctacgaagatcgctaaacagctgaaatatgccggcctgccccctatctttactcttaaccacctgagtcacctctgcggagtgaagtacagcactctgaggtatattgtcgaacggaaacataacgatgacgcctataaggtttttaagctgaagaaatccggggtcgggttttccgacgaaagagtccgttttgtatctgtgcctaatagtgaactgttcaaggtgcagcggtggatacataacaatatcctcaagctgatccccgcccacgaaaacagctttgcctttcatagcaatggcggcatactaaaggctgcatacccccactgcaataagaaatggatgattaagctggacgtgtcaaattacttcgagtctattctcgagcccacagtgtataatgccttcttaaaaatgggctatgagccattggtcagtttcgaactggcacgcatatgcaccagggtaaaaccacatcataacccagtgaaaaaaaacaggatcaactggctcttaaacaccgatcttccgtacaagactatcgagattggacacctacctcagggtgcgcccacctctccactactgagcaacgtctgttctatcaaattggatgagctgttgtctgacttcgccggcgttaataacctcacctacacacgctatgccgatgacattgtgttcagctccgcagacttttttaatcgtgacctttgtaatgggtacataaagtccgtgtactcaattatgagagagaataacctgtggcctaaccgaacgaagacaaaaattatccctccgggagctcgaaagatcgttctcggtctgttagtggacacagatagaccaaggctgaccaaggagtacaaaaaggaaattctgacccacctgtactatattttcaacgagtccataggactcgaaaagcactgcaaagccagagggttcgattcagtgtatggtttcttgaacttcatcaacggaaaacttacatacgcgaatttcatcgatcccgaatggagcaaaccactgatctacaagcttaagtgtgttgcacgcccctatatcgatcttgactcctcatgttga

SEQ ID NO: 8949 - RNA, 1158 nt, synthetic construct
  source 1..1158: mol_type = other RNA
atgaagatttggtcaccgcacttatatatttcccagggaatagccgacggggttagccctgacgtattgaatagtgcagtggcaacagccaaaaaattgagatatctcgacctgcctccggtgttcaccctgaagcacctgtccgttttatcaggcgtctcatatagctcgctaaggttcattgtacagcgccgggacccatcctctaattacaaaaccttcaagctcaagaaatccaacgccggctttcacccagatcgagtcagattcatctcggtgcccgaaccatctctgctgatcgtgcagaaatggatccacgagcacatcctcaagaagattccccactctaaatccaccatggcttttcatgccgatggcggcatcttgaaggcagccatcccacattgtggtaataactggatgatcaagattgacatcaaaaactacttcgagagcattagtgaggtcaaagtgtacgatgcgtttgtccaagccgggtaccagcctcttatctcatttgaaatggctcggctctgtactcgagtcaggaataaaagtaatcccatcaagatgtatcgtcatgacgataccttaggaactcaacttccctataccacggtggagataggacacctgccacagggtgctcctacgtctcccctgctgtctaacatttgcacaaagaagctcgatgcgagcttctttgaatttagcattgcccatggcattaactatacaaggtacgctgacgacataattttcagctccagatccttcttctcaagggacatttgcgtgtcccttataaaggagatcaagtatatcctgaacaaaaatggcttttggccaaacgaggctaaaactaaaatcgttacacccggcgcacgcaaaatcgtgctcggactgttggtagatggtcctgtgcctaaacttacaagcgaatacaaaaaggagatcctgatgcatctacattttgcatctcggaaggatattgggataatttctcactgcaatagacgcgggtttaagagcgttaccgggtttctgaattacctggagggaaagataagtttcgctagtagcatcgaacccctctgggcccggaaggtgaatgccactttcgtgtacatcaagaacaagtacaacaacactatctga

SEQ ID NO: 8950 - RNA, 1149 nt, synthetic construct
  source 1..1149: mol_type = other RNA
atgacgaattggtcacctcaacattatgtggagactggcgaacaacatcacgtgtccgccgcggtgctaaacgcagcacttaaaacagcctcggtcattcgcagcagaaacaaggatgttcccataatttttaccctcggacatcttgccgcgctgacaggagtccctcatagtttcctgcgggctgttatcaccagggatgacttcgccccctataaggtctttaaactccggaagaggtccgccggatttgccaaagataggttccgttttatttgcgctccccaccctaaactgctccgcgtgcagcggtggataaacgagagaatcctgaagcacatcccaatcgacatcgcgagctacgcgtaccgagaaaacacttctatccaggacgcagctatacagcactgtgagtgcaactggttgatcaagctggacatgtctaatttttttgagtctatcttggagcccaagatctacagagtctttagagagctgggttacaaccggctcctttctctggagctcgcccgcctgtgtactaggattcgtcatttcggtaatcccagcatgccaaaggagaagaagttactgaaaaagttcccataccgcaaaagtcgcttcattggacacgtcccccagggcgctgctacttcaccactgctagctaatattgtgtcaaggggcctagacgcctctattagagaattctcccggacaatgaatattacctacacccgttatgccgacgatttaatcttctcctccaaaagcaagtttgatcgacagggtgcacacagcctggtgaaggatctgtacgaacttataaaagctcacgggtattggccgaatctgaccaaaaccaaagtgagtccaccgggcgccagaaagatcgtattggggttactggttgatgggcgaacacctcggctcacgaaggaatttaagagtgagattaaaacacacatccacttcatcaccagaccagacgtgggcattgcaaagcatatgcttaatagggggtttgactccactgctgggttgaggaacttcctctatggcaaattgtcattcgccgcacatgtagaacctctgtgggccgcaaagatgcgaagcaaactcgaccaggtgaactggcctaagcgctga

SEQ ID NO: 8951 - RNA, 1149 nt, synthetic construct
  source 1..1149: mol_type = other RNA
atgactaactggagtccacagcgctttctggaaaccggcaaacaacgcctcgcatcgcctttggtgttggaagccgccctgcagtccgctaagctgatcaaaagcaggaataagaacgttcccgtgattttcacactcgggcacattagcgcgcataccaaagttccttaccatttcttaagggaagtgatcacccgcgaaaatctcaagtactacaaggttttcaaacttcagaaaaggaatgccggttttaccaagaagcaggtgaggttcatttgtgcaccccatccctatctgctgcgtgtgcagagatggattaatgaacggatcctgaagcacatccccatcgatgattccagctacgcttaccgggccaataccagcatagcggatgctgcctttcagcattgcgagtgccgatggctgattaaactggaccttagtaacttttttgagagtatcctggaaccaaaggtctataaggtgtttcgtgagcttggctataaccgcctactcagcttggagctggcccggctttgcacccgtacaaggaattacggcaatcctagcatcagtagagaaaagatctcacaaaaaaagctgccctatataaagaacaagtatattggccacgtcccgcagggagctgctacgtctcctctgttagcaaatattatctctagagacttggacgtctccctaaagcagttctccaagaacttgggactggtctatacgcgatacgcagacgaccttatattctctacaaaaactgacctgactcgggcacagctgaaccaacacattaacgagctctataagatcatcaaatcacacggttactggccaaacttcacaaaaactaaaatatcccccccaggcgcccggaagatcgtgttagggctgctcgtaaacggggtaacaccaaggctgcctaaagagtttaaagccgagataaagactcacattcacttcatttctagatcagacatcggagtcgctcaacatatggcgaatagaggattcgaatctgctgagggcttcagaaactttctttacggtaagctctcatttgccaatcacatcgagccggattgggccgcacggcgaaaatgtgagctcgatcgcgtggattgggccgggctatga

SEQ ID NO: 8952 - RNA, 1167 nt, synthetic construct
  source 1..1167: mol_type = other RNA
atggttaattggcggtcacagcatttcattaatgagggacgtcagcagggcatcgctgagcctctgctgcgcaacgcaactcttatcgcaaggcgcatccaggccgtgaatgccgatttaccacccctttttacccttagacacctctctcatgaggtgggcgtgccgtacctggcactgcgatcaatcgtgagccggaagtttacctgtgaaccctatcgtgtattctcgctgaggaaaaaaaatgtcggccacggctctaggcgattccgcgtgatttgcgtgcctgatcccgccctgctgaagacccaacgctggatacattcaaggatcctcaagttcggcagatgccacgaggctagcggggcttatagtaaaggaagtggcatttatgacgtggctagtacacactgtaatgcccggtggctggtgaagctggatgtcacaaatttcttcgatgctatcttggaaccgaaagtttaccaggtattcgctcggttaggataccaacctctaatggcatttgaattggcaagactctgcaccagactgagacacgacggcaacccaaaacggaagtccaaaacagggtatagaaaaatttggacatacggaagctccgtggtgggacatcttccccagggagctcctactagcccgctcctggcgaacttggtggcctacgacctagattcagaattgtttgccttagccgaaaacgcaaacgttcgctataccaggtacgccgacgacatcgtcttttcttcttccgagaaggccttcacgcggtccgatgcggaggggttgatccgtggggcttacgcctgtctcgaacgacacgggctttgggccaatcgggccaagactcacgtggtaagcccagcggcccgcaagatagttctgggtctgctcgtcgacggtccagtcccaaaactgcagagagagtttaaagacaagcttaggatgcatattcactatctgcatcacccccaaattggtcccgttgagcacgcaaggcgacgcggattcgacaacgtcctggggctgcaacggcatctcctcggcctagctgcctttgctatggggatcgagcctgcgtggggcagacagcagatggatgaaattaagagggcaaactggcccataggtataccaccttttaagtga

SEQ ID NO: 8953 - RNA, 1167 nt, synthetic construct
  source 1..1167: mol_type = other RNA
atggtaaactggcgggcccaacagtttataaacgagggaagacagagaggagtgagtgctccaatactgcagaatgctgtccagatcgctagacagatccagagcgtgtccaatgacctgcccccattgttcactctgaggcatctggcccacgaagttggagtgccttatctggcgcttagagggattgtgagtcgtcaatttattgatgaggcataccgcgttttcaccctgagaaagcggaatgtcggccatgactctaggagattccgagtgatctgtgtacccaacccagccctcttaaagacacagcggtggattcattcaaaaatactcaaacttgggcgctgccacgaagcatccggtgcctatagcaaagaatcccgcatttacgatgtggcatctattcattgcaacgcccggtggctggttaagctggatgtgaaagatttctttgacagcatcctcgaacccaaagtctatcaggtcttcatcaagctggggtatcaaccactggtggcctttgaattagcgaggctctgtactcgaacgcggtataccggaaatccgaagcgccgctccaagcgccaataccccaaaatccagggctaccggaaccctgtcgtagggcacttaccgcagggcgcacctacgtcgccactgcttgccaatctggtggcttatgatctagactcagagctgctagccctggctgggaagaccaatgttagatacacccgttacgctgacgacattgtcttctcaagcgcggacaaggcttttactagggccgatgccgagaagcttatagatgagacatacgcttgcctcaagcagcatgggttgtaccccaacagggccaagacaaatatcgtgagtccatctgcccgcaagattgtgctcggtttgttggtggatggccctacccctcgactgcagcgtgagtttaaagacagactgcggatgcacatccactatctgcatcaccctcagttcggccccgttgagcacgctaaacgaaggggatttgacaacgtgctaggacttcaaaggcacctcctcggcttggcagcattcgccatcggtattgagcccgtctggggccggcagcagatggaagagatcaaaagggcaacatggcccattggcatccctccattcaagtga

SEQ ID NO: 8954 - RNA, 1173 nt, synthetic construct
  source 1..1173: mol_type = other RNA
atgaatcattggaactcgcagaggtacctggcatctggccgcagtcagaagagggcagctaatgtgttggctaatgcggcatcaacagccgagctcatcagaaaagccgcccctggtgccgccatcctctttaccctcaatcatcttgccagggaaaccggcgtcccctatcattacttacggtcggtgacagagcgcggcggactgaatagcaacactttctacagagtcttttccttgaagaagcacaacggcgggttcaggggtaagcgtactcgaactatttgcgcacccgaaccattgttaatgaaaacacagcgttggattcacgaacacattctgaccaagggatgtccccactccgcgtcctccgcctacagaccagggagcaggataagagacgcagctgagcagcataggaatgcacgctggctcgtcaagatggatgtgactaacttttttgagagcatcctggagcccaaagtctatgaagtgttcaggagcttcggttaccagcctctcatggctttcgagctcacccggctgtgcacccgcattcgaaagggtgggccgaaacggcacaaagtgaacgatacggctcgcattggccgctattcaagtggaagcctcggtcacttgccccagggagcaccaacctctccgttgctagccaatctggccgcctttgacctggattgtgagctcaacagtttagcaacatctaacggaatggtgtacacaagatacgccgacgacatcgtgctatcctcaagcgcggaggactggagtaagtctaaggccgtgacccttctgaagcagggccatgacatcctgaaagcacacgggtttcaacctaaccttgccaaagctacgatagcgggccctggcgggcgaaaactagttctcggactgtcagtatctggagccgaacctcgactgactcgggattttaagaataagctgagagcccacatccattacctgcaaaagtatcagagccaaggaatccctccccatgagaagctgaaattcgattctcggcttgggctgcagcggcacgtattcggcctggcttattatgctatcgggatagaaagagcttggggcgctgcgcgtcttgccgagttgaaagctctgccatggccagttgaacacgggatttccttcgtttga

SEQ ID NO: 8955 - RNA, 1170 nt, synthetic construct
  source 1..1170: mol_type = other RNA
atgaatcattggcagtcccagcgttatcttaaagaggggctggcgactaataaaaacatcgggctgctgaatagagccatcgctaccgcagaagctatcagggctgttaacccgcacgcccctcctattcttactctcaatcacttggcccacgagacaggcgtcccttacgattttttgcggggcgttgtgacacgcgggggttcttctgatcactccttttatcacgtgttcactgtgaaaaagaataacgtgggtcatgcccacggacgcacccgaacaatctgtgtgccccaccccatgctcattaaggcgcagcgttggattcacgagaatattctacagtttggcaggtttcatgaggcggcatgcgcttacaggcccggtagcaaaattgtggacactgcttcccttcattgcgaagcccggtggatggtgaagatggatgtaactaacttctttgagagtattctggagacaaaggtttacaaggtgttccggagcttcggctatcagcccttggtcgcttttgagctgaccaggatctgtacccgaataagaaaagaatcacctcggcgcatccagccttctaaagccggtatcagcagctacgccaacaactacgtcggccatctcccccagggagcaccaacgtcacctctactggccaatctggctgtgtacgatctggataaggaattatctttgctggccagacaaaacggaatgatatatacccgctacgccgacgacatcacgttctcgtcagtgacctccacttggtcacgggcgaaagctgttcagttgctctgcgacggccacgccaagcttaaatctcatggattctggccaaatcacgccaaggcacatattgtcagtccaggaagtagaaagattgtacttgggttaaccgtagatgggaccgcaccacggctgacaaaacaattcaagaacacactgcgagcccatatccactacctggaaagattccaactgagcaaccgcccaccccaccaagtgctcggcttcgactccatcctcggcctgcagaggcatgtctttggactcgcctattatgcaatggggatagagagggggtggggagcagctagactggctgagttaaagagtatcagctggccggcagaacacggcatagcctttgactga

SEQ ID NO: 8956 - RNA, 1152 nt, synthetic construct
  source 1..1152: mol_type = other RNA
atgacttcatgggatagccagcactacctctcctctggccttgtggccggtattgatgcaggcctgctcgcgagggtagacgctacagcaagacggatgctggccgtgaacccaaccgctactgtgatcgtatccctcggacacctggccagcctgtgtgacgtcccttacggctacctccggcgagtgataagaagagacgcaacactggaaccatatcgcgtgttcgctctggctagaggaggtcacgggcctacccgaaggccacgaaccatctgcgcgcctgagcctttgctattgcgtgctcaaagatggatccacgctaacgtgctgcagcacgccaaggcacatgcggcctccacagcttatgcaaagggatgctcagttgtggaagccgcccgggttcattgcggggcttcatggctcataaaactggacgtcagtaacttctttgacagcattttagaacccaagatctaccaggtgttcctcgcccaggggtatcagccacttgttgcatttgagctagcgcggttgtgtacaagggtcagaagcaaggggaatgtagcacgctctacgggttctggcgttcccggaccctatgtctacccgtctatcggacatctgccccaaggggctcccaccagcccattgctggctaacctcgttagttttgccttcgacgaggaagtctcgcaattggcaaggagattctgtcttaggtacactagatacgccgatgatatgaccctgagttttcgcggcaccggttttgatcggactaaagcgcgggaggtcatcggcgcatgctatcgcatcatgcttgatcactccctttggccgaatcgcacgaaaacccaggtgattccccccggcgcccgtaaactggtgttagggctgctggtggacggaaataggcctgccctaactagggaattcagggagcaaatgcgcatgcatcttcacttcctcgagacacagggacctgtctcacatgcccagcaccgcgggtttggatccgtaattggcctgcagaatcacctctttggcctggcagcccatgccatgggcgtgaacaaggccattggtcgtgactggatgtatcggttacagcgactgccttggccggctgccttcgagatgccagtgtga

SEQ ID NO: 8957 - RNA, 1209 nt, synthetic construct
  source 1..1209: mol_type = other RNA
atgacacactggcagagccagctgtttgaggttgacgctccccccgatgcaccagtggatgctgccctggcaattgctaatgctatacgcagtatcaaccctcttcttccacccctgtttacactgtctcacttggcccatgagacaggagtgccttataagtacctcaggaataccgttgcccgcgggaaggtggacgaacagtattccgtatttcgaatccagaaaagagcccccagcgcaacaatacaatatagatggatcgccgctccgcacccgctgttgcttaaaacccagagatggatcaacactaacatcctcaagaatattgccgtgcataacgccgcattcgcatacatcaaggagggaagcgcttataaggcggcctgcttacacaatcaagcaaagtggctggtcaaagtggacattaggaacttcttcgagtccattctggagactaagatctgcaaggtcttcgagacagcagggtaccagccacttctggcctttgagctatctcgcatatgtaccaggatcgccaccccagagatggaaagagcgctggcccccaacggacgtgtgcctaattcactgaaaggcctaaaatatagcatctctgcctacaactcctttgctctcggccatctgccccaaggcgctcctacgtcccctatgctggctaacattgtagcgaaagaaatcgacgacgagatcagcagtctcgcagaaaaatataagttgcgatactcaaggtactcagatgatatagttctgagtactcccagcactcagttcggcaaagagatgtgcaaagaagtcgtcggtaagttataccgcattctgctttctgctgggtaccagccgaatgtcgaaaagactaagatttctggtcctggttccaagatgattgtgctggggttactcgtggacggcaaaacgccacggctgaccagtgaatttaaaagtaagctgaggatgcacctcttctactgtcggacccggtcacctcaacagcacgcagttaagcgtaaattcgcgagcctcctcggactaaagaatcatttgattggcttgatttcctacgccggaacaatcgacgccgcctttgcctccaaatgttatgccgagcttaatgcttgctcttggccaatattcgatagcgcagacttcgattcaatcatcgaatcgaccgtgaagattctccggtga

SEQ ID NO: 8958 - RNA, 1200 nt, synthetic construct
  source 1..1200: mol_type = other RNA
atgtccaactggcaatcccagctttttaagcaagatgcacctcctggggctcctgtgagtgctgccatagccatcgccagcgagatccgctccactaacccctttctaccaccccttttcaccctggcacacctcgcccatgaaaccggagttccatataaattcctcagatccgtggtcgcaaggacgggggccactgaacactacaccgttttcaaaattaagaagcgcagccagaatgccattaagcagtatcggtggatagccgcaccccacccatttctgcttagagtacagcgctggattaatgataacatcctgaagaagctgccagttaatgaagccgcctttgcttatctggaagatcgaagtgcctacaaggctgctatcgtgcacaaaaacgcaaaatggctgatgaaagtagacatcgaaaatttcttcgagacagtgctggaaacacgtatttacaaaattttcctggacgccggctaccagcctctattgagctttgaactgagcagaatctgtactcggatcgccaatccggaactcgagcgtgcatattccataaacggatttgcaaaagtgaagacaaaggggacaaaatacgtcatcgaggcttacgcttcttcggctttgggtcatcttcctcagggcgcaccaacctcgcccatgctggcaaatttaatagccaaagacattgacgagaaaatcgcggagctggcagatagatttgatctcaggtatacccgatatagcgacgacatcgtgctgagctcaaaatcaaatgactttggcaaggccaacgccgctaaggctatcggccaattatacgctatactgcgcagggccggcttccagcccaacatggagaaaacgaaagtcagcggtccagggtccaagatgatcgcgcttggtctgctggtcgacggaaacaaaccgaggctgactagtgagttcaaggataagttaaagatgcacttgtacttttgccggacaagatcacctcaggcgcatgcggtggctcggaagttcgactctgtgattggcctcaagaatcatctcttggggctgatttcttatgcaaggatggtcgactcttctttcgccgatgagtgcctagcccagatgaactcttgtcactggcccatcaccggacccattgatctctcattgattctcgagagtcttaaggcgtga

SEQ ID NO: 8959 - RNA, 918 nt, synthetic construct
  source 1..918: mol_type = other RNA
atggccgccccacacccgctcttactcagggtccagagatggatcaacaccgagattttatctaagctgcagcaacatccagctagctacgcctatcgtagcggacgctgcgcctttgatgctgcccgtaggcatcagagagctaggtggctcgtgaaagcagacgtgactaattttttcgaatcaatcttagagccagacgtctactcgattttcaggtctgccgggtaccagcctctcatcgccttcgagttggcccggatttgcaccagagttcgaaccgtggacgaaataaatcccaaggaccttcgcacatccagaacgaagagcgccgcatacaaaattcaggcctatcgctccgcatacataggacacctgccacagggcgccgcaacaagccctttgctggctaacctggtggctaatcccctggacgttacactgtctcaggtcgcaactcggactggcttcaggtatacccggtatacagatgacatcgcattttcaagtgcatcacttgataccacacgagcggatgcagtatctgtcgccggcgctatccattccgcgctatataaacatggattcagtcctaacctcgctaagtccgtaattcgcggtcccggccacagacgcattgtcctgggcctgctggttgatggagatcggccccgactgacgagtgagtttaaagacactctgaccctgcacctgagacacttggaaatgtcaggtcctattgaacacgctaaggccaggggcttccactccatcgtggggttgaaacaccatatagatggtctgatcgcctacgctaaaggggtggacgaggcgtttgcagcgaagtgtgcccaaaagctagggcgggtgagctggccgcttctcactcctcttgacctcgatgctatcgtgccctga

SEQ ID NO: 8960 - RNA, 1092 nt, synthetic construct
  source 1..1092: mol_type = other RNA
atggagtccaaaggcgttgctgtcgtcctgtccctgtcccatctcagcaagcttacaggagccagctattggtcactccgccaggtgataagtagacacggagacatgccatacagaccttttaggatccctaagcgttccggtggcgctaggctgattttcgagccgcaccctatgctgcgccatgttcagcgatggattcttgatagcattctctctaaagtccgccccaacgataacgcctatgcattcgtgcaggggagaaatgccatcgatgctgcccgaaaacattgcggggcaaaatggttggtgaaggccgacattgtaaatttcttcgagagtatccaggagtttaagatctttaaagtctttgccgacatcggctacggtccactggtggggtttgaactgtcgcggctttgcacttatccatatagggtgggccacccccggtatgaacagccagagtggacccaccgtttaggccaggagcacggagagaacggctacataggctcttatttcggatcttactttgacagcagaatcgggcacttaccacagggagcgcctacctcacccgcactctcaaatttcacatgcaagtggctcgaccaaaagttggcccggtatgcagaaatgcacgaatgggagtacacccggtacgccgatgacatcgtgctcagtaaggtggctgctaaccgcgcagaagcaattgaggccctaaattacgtgagatgggtagcggcacggtctggcttcatgcttaactccaagaaaactaagattgtaccccctggggctcgaaagattgtgctggggctgttggttgatggtgacaggccccgcctgacgaagaaattccaaaacgatctggatatgcattgtcactacggtctaaagctgggcgccaaaagacattctgaacgccgtcactttcggagtgtcttgtcatttctcgaccatgttcagggcaagataagcttcgccttccaagtggatccgctgagggcggagggatgggcttcgaaatttctgatcatcaggagcgaatacttagctagcgtggggtccgacgtctgtaatggatga

SEQ ID NO: 8961 - RNA, 1164 nt, synthetic construct
  source 1..1164: mol_type = other RNA
atgtccgctccctcgcctcagcggtatgcctctggtgccagcaggcagggaatcgatgctgtgactctggagaacgcactcgctactcttgcgcggatacgggctacagacccacgtatcaccccagtgctgaccttgcggcatttttctgtcttgacagagctgccttatcttttcctgcgtaggactgtggcaagaagagggcacgccgaataccgattcgtcctcttgaaaaaacgcatccctggtcgaagtgcaaaacgcatgatctccattccccccaaaagtctagccgtggcccagcggtggttagtggatcatgtactgagatacgccccggttcacccagtgtccttcgctttccatcccgagagcagccctgtccaagcagcggaacagcaccctaataccaagtggttgctgaaggtcgacatcgaagacttttttcactctgttagtgaggggaccgtgtctgccattttcacccgcctcggcttcccaaagctgctggcatttgaatttgccagactctgtacaattggactcgatagaggtccaggaaagaatcccgctccccacgctggaccaataagcttctatgctcttgggtatgagggcttcttgccgcagggagcgccgacatcccctatgctagcaaacctggcaatgttacgaattgacaccctgctcgcatcactggctgaggagcggggactgcggtatagcagatacgccgacgacctcactttttctacagatacggacaggacgctggtggaaatgaggcgcttacagcgcgacgtctgcgggattctgaacgatagtgggtttaggcataatcagcggaagactggcataaggggcccaggcacaaggaggatcgttcttggcatgttggtagatgggcctatgcctcgactccagcgagcctacaaggacatgattcgcctgcacctgcactacctttcatcacccgcctacggtccagctaagcatgccctagcacgcaaaaccggcgttagctccctttaccatcacgtgagaggcctgatttcctgggcgcagcaagtggagcctgcctttggccagcaagccctggagcagttcgcctcagccgattggccccccatccaaccccgtcagatcgaaggaagactcgggtga

SEQ ID NO: 8962 - RNA, 1167 nt, synthetic construct
  source 1..1167: mol_type = other RNA
atgagcacacctagtcctcaacgttacgcgtcaggcgcacggcagagaggagtggaccctgcaaccctcaaaaacgcgttggctactttcgcccgcatccgcacgacagacccacggatcactcctgtcctgacactgcgccacttttctgtgctcaccgagctgccctatcgctttctccggggaacagtagcaaggagtgggctagtggaatatcgaactgtctacctgaagaagaggattcccggacggtctgctaagcgaatgatttctatacccccgccatccttagcctccgcccagagatggatcgtggatcatattctcagatacgcccgggtgcaccccgcctcatttgctttccaccccgactcctcaccagtacatgccgctgagcagcatccaaacactaagtggctcctcaaagtggatattgaggatttctttcattcagtgagcgagggaaccgtgagcgcaatattcttcaggctcggcttccctaagctgctggccttcgagtttgcaagactgtgtacgatctccattgacagaggcagatcgcgcaatccggctccgcatgccggacctataactgcgtatgcgtacggttatgaagggtttcttcctcaaggcgcaccaaccagtccaatgttggccaacctggctatgttgcgtgtcgatgctcttctggccgatctggcagaggagcgcgggttacgctactctcgatacgccgatgacctggcctttagcgctgataacaatcgaagccttgcagaaatgcataggctacagagagacgtctgccagatcctgaatgacgcaggttttcagcataataggcgcaaaacagttatccgaggccctgggacacggaggattatcctagggatgctggttgacggacccaccccacgtcttcagagggcgtacaaggatattatcaggttacacctccactatttggcaagccctgcctacgggccagctaaacacgctcttgcccggaaaaccggtatctcttccctgtatcaccacgttcggggcctgatagcctgggcccaacacgtggaacccgccttcggcaggcaggctttggagaagttcacctccgtcaattggcccaccatccagcccagatgggttgaaagaggcagtaacgactga

SEQ ID NO: 8963 - RNA, 1170 nt, synthetic construct
  source 1..1170: mol_type = other RNA
atggccgccccttctccccaacgctacttgtcaggtggcaggcgtcaaggcgtggcaaccgtcacccttgacaatgcactggctgctttcgcacgcctgagggagacagatccgagaatcacccccgtcctcactttacggcacttcagtgtggtaactggcttgccgtacttcttcctgcgaagaagtgtcgcccggagggcgcacatcggctataggtttgtgtacttaaggaagagaatcccaggtagatcttctatgcgtatgatctctattccacctcccagcttggcagctgctcagcgatggctggttgacaacgtgcttaggtatgttgaaccacaccctgccagttttgccttccatcctgacagctcacccgtcttggccgccgagcaacaccctgatactcagtggctgctgaaagtggacattgaagatttcttccattccgtcagcgagagacacgtctccgcgatttttgcaagtctcggattccctaagctgctggcttttgaatttgcaaggctctgcactattggcctggatcgcgggcccggaagaaatcctgcccctcaccccagccccatcgctctttatcagtccaacttcgaaggatttctgccacagggagctcccaccagcccgatggtagccaacctggccatggttcgcacagacgagtttctatctatgcttgcggaagctcgcgggttccgctattctcgctacgcagacgatttagctttctcgtccgacaagtcgcggacaatcgctgagatgcgagggctgcagcgagaagtgtgtcggatactgaacgaggccgggttccggcccaatcatcgcaaaacagttataagagggccaggtacccgaagagtagtgcttgggctcctcgtgaatggccccacgccaaggctatcccgggcatttaaagacaacatccggctgcacctccactacttgacgagcccagatcatggaccggccaagcatgctctggcaaggaagaccggcacctcaagcctgtaccatcacgtgcgtggcctcattgcctgggccacacaggtggagccagcctttggagctgccgcgctacggacttttagatcagcctcctggccactcatacagcctcaggaggtgggtgaggaagatgactggctgtga

SEQ ID NO: 8964 - RNA, 1185 nt, synthetic construct
  source 1..1185: mol_type = other RNA
atgcccgtgccatctccccagaggtatgcctccggtggaaggcgccagggaatcgactcacagaccctagacaatgccattgcggcaatcacacggataagggcaactgatccacgcatcacgccagtccttacactcagacaccttagtgtgttaaccgagctgccttttttgtttttacgacgaaaagtcgctcggcaggaacgtgtgggctatcggacaatattcctgaagaagcgaattccaggtagatcatccatgcgccgcatcagtatcccgcccaagagcctggcacatgtccagaactggctggttcagaacgtactgcaatacacaagtgctcaccccgcaagtttcgcttttcaccctgactcttcgcccatcttggctgcggagcagcacccaaataccaagtggcttctgaaagtagatattcaggatttcttccactcaataagcgaggggactgttgcctccatcttttctaggttgggttttccgaagctccttgcattcgagctggggaggttgtgcactattccctgtaaccggggcccctctagaaatcctaaaccacatccatcccccatcgagttttaccgttccgacttcgaggggtatctgcctcaaggcgccgccacaagtcccatgctggccaatctcgctatgtccatgaccgatcaaagactgtcggccctggcagaaaaattcggattccgctacagccgttacgctgacgatctcgctttctcaagcccaaacgatcacgccttagccgacctccagaagcttaaacgcaacgtgtttcacattctcaacagctccggattcaggcctaatttgagaaaaaccgtcattcgcggccctggggcacgaaggattgtgctcggcatgctggtggatggtaaggaacccaggctgagcaaggagtttaaggacaacatccggctgcatctgtattaccttaccagccctcagcatgggcctcagaagcacgccctatctagaaagacgggcgtgtcatccatgtaccatcatgttagaggcctgattgcctgggcccggcaagtcgaaaaaacttatggagaggaagcgctggctaagtttaaaagcgtgaattggccacctatccagccgcggatggtgcactgctctctcgacgatctaagagataaagacgactga

SEQ ID NO: 8965 - RNA, 1035 nt, synthetic construct
  source 1..1035: mol_type = other RNA
atgcgacacctgtccgcactcactggccttccatttctgtttttgaggcgcaccgtggcccgaaaggagcacgtgaactaccggaaggtgtacctgaaaaagagaattcctggacggtctaccaaacggctgatcctgatccctccgaaatcactagcggtagcacaaggttggctggtccaaaacgtcctcagatatacagtcgctcatccagcaagctttgcgttccatccagaaagcagtcccgtgcaagccgcagaacagcacccttctacgaagtggctgctcaaggttgacatacaggatttctttcatagtgtctcagagggacgtgtctctgctatctttgccggtctaggcttccctaaattgttggccttcgagttagccaggctttgcacagttgctgccgaccgtggcgcgggaaggaatcctcaaccgttcgcgggacccattaactattatgacaatcccttcgaagggtttctgcctcagggtgctgccacaagtcccatgttagctaacctcgccatgctgtccgtggacgaagccctttccgggatcgccaaacgcaccgggttccgctactcccgctacgctgacgatctggctttcagcaccaagaaagactccagcgtagctcagatgaatcgactcaaaagggaggtgattgcagtgctgaacgataatggctttcgccctaatctgaggaagaccgtgataagagggcccggcagcaggagaatcattcttggaatgcttgttgatgggcccgaccccagactcagcaaggagtacaaggataacatacggctgcacttatacttcctgacttcacagaagcacggcccacagaagcatgctctatcaagaaaaacaggtgtgtcgtctttgtatcaccatgttcggggcctgatcagttgggccaaacaggtggagccagcatatgggcagttggcactcgagaagtttcagactgccgattggccaccaattcagccccgtcggatttttaagatcgaggccgaattctga

SEQ ID NO: 8966 - RNA, 1167 nt, synthetic construct
  source 1..1167: mol_type = other RNA
atgcccgccccaaacccgcaacgctacaggagccaaggcagactagaaggagtagatgacactgtgctggatcacgcggtcgaaaccttcgagagaattcgcgcagtggacccacgcattacgcctgtgttaacgcttaggcacctgagccacctgaccgacatcccgtttctgcatttgcgagatctcgtcggacgtagggcccatcgcccctacaaattcttttatctcaagaaacggatcccaggccggaatagagtccggatgatctccgttcccaatggcactctgatgtccctgcagaggtggatcgtggataacatactgcagttcacacggcctcacgccgccagttttgctttccatcccgattgtcggccgtatgaagccgccgccgaacattgcggctgtgcatggctgctaaaaattgacttggaggagttctttcacaccgtctctgaggggagagtcgccgcggtgtttgagaacctgggtttccctcggctgttgtcctttgagttcgcaaggttgactacagtggcatgtgaacgaccaggatcaagacctgatcccggtgagcgatggccagctattccctactatcagtgcgagcatgagggcatgcttcctcagggtgcccccacatcacctatgctggccaacctggctatgctcaaggtcgacgaaatcctctcggctctggctgaggaatacgggatgacctttactaggtacgctgacgacttggcttttagttgcggggaggaatacgacttcgctcacgtacagagattcaagagactcgtgctcgagaagcttaataagtctggcttcaggcccaaccacaggaagactgtaatacgtggccctggcacaaggcggattgtgctaggtatgctggtggatagtgagcggccacgcctccccagagaatacaaagataatatacgaatgcaccttcactatctcaccagcgaatcccatgggcctagcgttcatgcagcatcacgacagacctctgtgtctggaatcttccaccacgttcgcgggttaatcgcatgggcggagacagttgaacctgactatggagcccgtgccttagagaactttgaaagcgtggactggcccccacttgagccaaatcgcctgctggggcatagaggatga

SEQ ID NO: 8967 - RNA, 1173 nt, synthetic construct
  source 1..1173: mol_type = other RNA
atgtctctcccaagctcacagaggtatcgatcccagggaaggagggagggcgtggatgacgcagtactcaacaacgcattagcagctatgagacgcattcgagctgtggatcctcggattacacccgttctaaccctgcgacacctgtcccacctgatcgatgttccctttttacatctgagagagatagtcgcgaggcgggcccgaagaccttataaattcttctacctgaagaaacggatccccggacgcagtagaatgagaatgatttctgcccctaacgccacgttgcttaagattcagcgctggattgtggaaaatatcttgcaatacaccacggcgcatgaagcgtcctatgcgtttcaccctggttcacgtccctttgacgccgcccaggagcattgtggctgcgagtggctgcttaaaattgacctcgaggatttcttccattccatcagcgagggtcgcatcgctgctgtgttcgcccacctcggcttctctaagcttctgagctttgaactcgctcgcctcgttaccgtggggtgcgaacggcctggaacaagaactgaccccgcaatccggtggccggccattccttactaccagagcaagcacgaaggaatggtaccacagggcgccccgacctcacctatgctgagcaacttagtgatgttcaagacagatgagattttggctcgcttggctgacgcccacggaatgaaatataccaggtatgccgacgatttggccttcagttgtggccccgggaaaaacgaaatccatgttcgtaggttcatgaggctggtgcttgaccaactaaatcacgccggttttcgtccaaatcacaggaagactgcaatacgggggccaggaagccggagaatagtgctcggcatgctggtcgactcagataggccaagactgactcgcgaatacaaggacatgatccgactgcaccttcattatctcacaagtccatcttacgggcctgcactgcatgcactagcccggaaaacttccgtcagtggcatatttcatcacgtgagaggtctgatcgcctggtcgcagatcgtggagcccgattttggggctggggctctgacccgctttgaaggcgtcgattggccccccgtccaaccagacccgtacgatgaggaggcaaatgacacatga

SEQ ID NO: 8968 - RNA, 1170 nt, synthetic construct
  source 1..1170: mol_type = other RNA
atgccgcccggccctcagagatacagagctcagggtcgtagggagggcgtggatgaaaccgtccttgctaacgcattgtccgttatcgaccgaattcgcgccgccgacccacggataactcctgtgttgactttgcggcacctcagcgagctggtaggggtaccctatccccacctcagggaccttgtagctcggcgcgttccacgatcttataagttcttctatctgaagaaacgcattcccggacgtacttcaactaggatgataagtgtccctaataaaaccttgctcagtatccagcaatggattgtctctgacatcctgaggtttacaagtgcgcatgaagcatcctatgcattccaccccggtggacggcctctagaagctgcagaggagcattgcggctgcgcctggctgcttaaggtggacctgcaggacttttttcacaccatttctgaggggcgagtggccgggatattcgccgaactcggattcaataggctcctggcctttgagctggcccgccttgtgacagttgcgtgtgagcgcgccaaaccatcagatcctgcagctcgatggcctacaatcccttactaccagtgtgcgcacgaagggatgttacctcagggagcacctacatcacccatgctaagcaacctggttatgcataggacagatggagtccttgcacgtctcgctcgggctcacggcatgaggtacagcagatacgcagatgacctagcgttcagctgcggcgccgatcgggatgcagctcatgtgcggagatttaaaaggctggtgctgaagagcttaaatgaggctggctttagaccaaacctgcgcaaaactaccatcagggggcccggtagccggagaattgtccttgggatgttagtggacggtgatagaccacgactgccaaaaggctacaaggacatgattcgcttgcatctccactacctcacgtcgccggattatggaccggccgctcatgcccaggccagaaagacgtccgtgtctggcatcttccaccacgtgagaggcctgatctcctgggccgaaaccgttgagcccgcctacggaaagcaactgctggctcgcttctggagtgccgattggccacccctggagccaacctatctcgatgacctgtccgaagacggggactga

SEQ ID NO: 8969 - RNA, 1176 nt, synthetic construct
  source 1..1176: mol_type = other RNA
atgccggcacccgccccacagcgatatagaagcgagggacggagaaaaggtgtgcctcccgatgtactcgctaacgccctcgccagcatctcacggataagagacacagacccacggatcgaaccagtcctgaccctgcggcacctggccttcttaacggatgtaccttacaggtacctgcggcaagttgtggctcgcagtgccgccactgggtaccgtacctttagactcaagaaacgagtgccgggccgcagcagaatgaggaccatatcagtgccgcccccatcccttaaggaggtgcagcggtggatcgtggagaatgtcattcagcatgtggccccacacgaggcaagttacgcgtttcaccctggctcctccccttacctagcagccgaggagcattgcgaatgctcttttctgttgaaggtcgatgttcaagacttttttcactcgattggggagggatccgtggctgccgtattcgaagcgatcggatttcagaagttaatttccttcgagatggcgaggcttgtgacaaggcctatccccagttctaaacctgcaccagatcccgccgctaggtgggtcgctataccatattataattatccccatgaaggggtcctgccacagggtgcacctacgagccccatgcttgcgaacctagttatgcgtcacgcggatcagcgactggcaaacctggctactcggatgggcatgagatatactaggtatgccgacgaccttgccttcagcgcacctcatggatctgctattgccttggccgacatgcgccgctgtaggacccaggtgctgcgaattctcaacgagtacggattctcacctaacctcaggaagacagtgatccgcggtcccggctctagacgtatcgtcttagggatgctggttgacggcgatcgccccaggttggcacgggaattcaaggataatctgcgcctgcacctgcactacctcacagccccatctcatggcccggctgcccatgcaatggctagaaaaaccggcgtgagtagcatgtatcaccacgtgcgaggtctgatttcatgggcccagtgtgtcgatcctgaatacgctgcagacgccttggctttgttccgcactgcaaattggcccctcgttcaacccagatggtccggggctagcgacgatgactga

SEQ ID NO: 8970 - RNA, 1164 nt, synthetic construct
  source 1..1164: mol_type = other RNA
atgaatctacccaatccacagcggtatcgctctgaagggcgaagtctcggagtggatgagattacattggataatgccatagccacaatcaagcgcctgcaggcttcttcgccctcactgcctgcggtcttcacactgagacaccttgcccacctgacccaagtgaaatatgggtacctccgatacattgtgcgccgcaaggtgaattatagacacttccgcatctcaaaaaagctccctggccggaatcggtaccggctcatatcaatcccacctgctaatctgagtaagctgcagagatggatttccaacaacatcctgcgacatctgagcccctcttccgctagctatgcctatcatcccggatctaacccccggtttgcagctgagcagcattgtggctgcgaatggctgatcaaaattgacgttcaagacttcttccatgccatctccgagggacgtattgccgagatcttttataaggcgggctaccccagacttctgagctttgagctggccagaatagtcacgtgtgtgcttccaggcactattaaaagggctgcttcttacagcgccagatggccagttattagtcagtaccagcacgatagggagggtgttctgcctcagggcgctcccacctccccaatgctgagtaacttagccatgcgtgcattagacgaacgacttattgcgctcgccgcaaagaacggtatgatctatacccggtacgcagacgatttagtgttctcttgcaagaacagaaccaaacctactatcgacaaagtgaaacggagcattttgagggagctaagccgcgagggctttcaacctaatctgcgaaaaaccgccgtcaggggacccggttcaaggcgtatcgtattgggtgtgttggtcaatggcaaggaaccgaggctcacgcgcgattttaaggagaatctgagaatgcactttcatttcctaactagtgaaaaacatggaccacacaaccacgccaacaaccgggggacatccatttcagggatataccatcacgtgagggggcttatcgcatgggcaaaggtcatcgaaccggcatacggagctaacttgatggtaaggttccacagcataaactggccatccctccagcctcactccatcttcgaagacatggagaagtga

SEQ ID NO: 8971 - RNA, 1161 nt, synthetic construct
  source 1..1161: mol_type = other RNA
atgagcctgctatcatcacagagatatcgctctaggggaagaagactaggcatagaccccaccactctggagcgagccgttgccacaattgagaggatccagaggtccgacccacggctgaccccgatcctgactctgcgccatctctccgaattgacaggagcacagtacggctatctgagacgtgtggtagggcgcatactcggcgggtaccggcacgtacattttaagaagagaattcctggcaggtcaaggaggcgggtgatttctatccctcctaggagactgctcgaggttcagcagtggatcgctcaaaacgttttgcggttcgccgagcctagcagggcgagtttcgcttaccacccttcttccagcccagtgctcgccgcagaggaacactgcggctgcgagtggttgcttaaagtggacatcgtcgacttctttcattctatcactgagggccgcgtcagtgccgtcttctaccgactcggatatcccaggctagtggcttttgaactggctcgcctgactacgatgcaactgattcgaggcgctttgcagcgtgacgccgagcgttggtcagctataccttactatcagagcgagtatgaaggtgtgttgccccagggggcgccaacaagtccgatgctgtctaatcttgtgatgaaggatctcgacgaacggcttatcgaattatccaagcagcacgggatgcgctacacccgttatgccgatgatcttgctttttcctgtgggaaaggcagggaccggagccatgtggagcgattcaaaaggttagtcctggcagaactgtcccgggaggggttcaatcccaacctgagaaaaaccgtcattagaggtccaggtacccggcgcattgtgctcggaatgcttgtggatggtccctcgcccaggctcccgagagaattcaaggatatgctgagactgcaccttcattttctgaaatctgagggacatggcccaagcgcacacgcgcaaaagcgacggaagagcatctccggactctaccaccacgtacgcgggttaatcggctgggccatgagtgtggaaccagattacggagcccggattttggccgagtttgagagagttgcatggccccccgttcaacctcgctggtcggaacgaccagacagatga

SEQ ID NO: 8972 - RNA, 1251 nt, synthetic construct
  source 1..1251: mol_type = other RNA
atgctcgtcagccggtccgacattttcatgcttagaaacggaacctctttgagcaggcgtcgtcttggcggggcatcatgccactatcctcccaatggggtgaaggtgatgcaatcttggagccctcaacagtacaggtatgacggcgctcagcatggtgtaagtgatgaaacaattgagtccgtcattgctagagtggagctgatagcagccgtgaaccccagtatcacccccgtgcttactctgcgccacctgagcgagctctgcggagtggaatacggctttttaagacggattgtgagccggagcactgtaccgtatagagtcttttccttgcgcaagaggatccccgggaggactcgacatagattgatctgtgttcctagaaacgaactgaaggcagcacaggactggatcgtcaggaacattctgaggcacaccaaagcccacggcgcctcattcgcttaccacccaaaatctcggcctgagctgggtgcccatcgccattgcgggtgtgactacctactgaagatcgatataacagacttcttccacagtgtaagtgaaggtaggatttttcgcatcttcgccgaactcggcttttcagagctcgttgccttcgagctggcccgcctgaccacgataatcgcacagggaacggaacggcccgattggatcgccgcagctaggtggccggctataccagcgtatcagacatcatatgagggatttctccctcagggggcgtcaacatccccaatgctatccaacttggccatgttagccttagatgccagaatcgcgggcatggctagcgacgcaggtctggtctacacaaggtacgccgacgatctgaccttttctggacgtaaaccccacgacctcaagtcgatgaagcggttcaaacgaaaggtgtttgatgcactgaatgaagccggcttccggccaaatctgcgcaaaagttctatccgcggacccggggcacgacggattgtcttaggcatgctggttgacggcccacgacctagactcgctaaggagtttaaggacgatctgcgaaagcatcttcattacctgcgcagcaaagattatggaccagctaaacacgcggccgccaataagacctccatttccgctatgttccacatggtgcgtggtcttatcgggtgggctactagggttgagccgcagtacggcagatcttgtctcgtggagttccggaaagtggtgtggccacccttgattccttga

SEQ ID NO: 8973 - RNA, 1287 nt, synthetic construct
  source 1..1287: mol_type = other RNA
atgggcattcttgacgtgcagtccattggattttccatgctggttagcagatcggatatcttcatgctccgcaacggcacatctctgtcaaggagacggcttgggggtgcatcctgccactacccaccttacggcgtgaaggttatgcaaagttggaacccgcagcaatacagatccgatggtgcacagaagggggtggcctcagagacgattgagtccgccatcgcccggatcaagcttataggagctgccaacgcaaatgtaaccccggttctaactcttcgccatttgagcgagctaactggcgtcgactatggatttttgaggagggtggtgtctcgctcgattgtgccatatagggcattcagcctgcaaaagcgagtgcccggtcgcactcgacacagactgatctgtatccctcgggatgaactgaaaagcgtccaggactggatcctccgtaatatactgacacacaccaaggctcatgaggcctcattcgcatatcatcctcgatcacgcccagagttagccgcccagagccattgcggatgccattaccttctcaagattgatgtgcaggacttcttccatagtgtctcagaggggcgtatttaccagatatttgtggacctgggctttagcgaactcgtaagtctggagctggcaaggctcacgaccattatcgccccaggaactggcaggcctgattgggtggccgctgtcagatggcccaatatccccgcgtatcagacaccatacgaaggctttctccctcagggagcccctaccagtcccatgctgagtaacctagcaatggtagcgctggatgctcggattagcgcaatggcttctaaggctgggatcgtatacacccggtacgctgacgacttgacattttccgcacgcgctccccacgacgctatatctctgaaacggtttaagagggagatttttgccgtgctcaacgaagcgggtttccgacctaatttgaggaaaacctctatccgagggccgggagcccggagaatcgtgttagggatgctggttgacggccccagaccacggttagccaaggaattcaaagatgacctgagaaaacacctgcactatttgaagtctcccgatttcggcccagccaaacacgctgctgccaataaaacctccgtttccgcgatgttccacatggtccgcggcctcatcggttgggccacaagggtcgagcccgaatatgggagaagctgtctggtggaattccgtaaagtcgtgtggccacctctgactccctga

SEQ ID NO: 8974 - RNA, 1152 nt, synthetic construct
  source 1..1152: mol_type = other RNA
atgcaatcatggtcaccccagcactataggttccacggaacgacagaaaacgtgcccgaaagcatccttgaatccgcgatcagcagaatcgagctgattcgggctcgcaaccccaatatcacgccagtgctcactctgaggcacctgagcttattggccgacgttgactacgtgtttctccggcgggtggcaagtcgtagtacacatccctatagagcttttatgttgaagaagaacgtgcccggccgaacccgactgaggctcatttgcgtaccgaacaaaaatcttaagaagatccaggactggatcgtgcgaaacatactgcgccatacccgcgctcatcgcaagtcctttgcctatcatccctattccagaccggaatttgccgcccaagcccactgcgactgcgattatctgctgaaagtcgatattgaggatttttttcaccgggtgagtgaggggagagtatacaaaatcttctgtgatcttggctactcagaactagtctccctggagttggcgaggataactacaacagtcgccgagggtactgaacgacccatcgagagcattcatttccggtggcctgccattcctgcatacgtttctccttacgagggtttcctcccacagggcgcaccaacatctccaatgctgtctaatctggccatgctcggcttggacgagcagctagattcgatggctagagaagaaggaatagtttatacccggtatgcagacgacctgaccttctccgccagaagacctcacaatgctgcaaccatcaaacgattcaagcgcagggttttagctctgttgaacgacactggcttcaggcctaatcatcgcaagaccatgattcgggggcctggtgccaggcgcattgtgttagggatgctcgtcgatgggccgaaacctcgtcttccaaatgagttcaaggatgaaatccgtaagcatctgtactacctgcagagcgagaaatttgggcccgcccaccactcagcagctaacaaggtcagtatttctactctctaccacatcgtgagaggactgattggctgggctgcgagggtggagccagagtacggaagacggtgtcttcagcagttcaaattaatcgagtggccacctatagacaggggaagctcttga

SEQ ID NO: 8975 - RNA, 1341 nt, synthetic construct
  source 1..1341: mol_type = other RNA
atgggcacgaccggtgtacagagcattggctttagcatgctggcttctcgatcactgttcttcatgctgcgcacaggtacctccctatacagaaggaggctacggtatgcctcccgtcagtaccctccaaatggagtcaaggtgatgcaggcatggagcccccagcactacaggtatgaagccgaacgccatggagtacaagatgagacaattgacaatgccatcgccaggatcgaactgattgtggccaacaatgctaacgtgacccctgtcttgactttgcgtcacctttctgctatgtccggcgtcgagtacgggttcctccgttcagtgatcagtcgcagcatgatgcgaaaaaagtatcgggtgttctctttgcgcaagaatgttcccggaaggacaaggtacagactgatctgcgtcccaaatgaggagctgaagactgttcaagactggattgtgaggaatatcctgaggcacacgcgaagccatcctgcgtcttacgcctatcaccccaaatccagacccgaattcgccgccaaggcccactgtggctgtgattacttactgaaggtggatatccaggatttttttaacagggtcaccgaaggcaagattactagaatttttagggacttagggtttagtgacctggtgagttttgagctcgcacggctcacaaccgtgacagcgcaaggtatggagctccctgagggactgagcgaaagacggtggccggccatccctgcttaccagagccggtatgagggcttcctgccacagggggctccgacatcccccatgttgtccaaccttgcaatgctcgccctcgatgaaaagctgcaggagttagcaagtagtgagggtatctcatacactcggtatgcggacgacctgaccttttctgcccgaaaaccacacgactttgagtcaataaaacggttcaaacgcaaggttcttactgagctgaacgcggcagggttccgccccaaccttcggaagacccatatacgtggcccaggaatgagacgcattgtacttggcatgctggttgatggacaaagacctcgcctcactaaggagttcaaggacgatttgcgacagcacctccattacctgacctccgacgaccatgggcccgctacccatgctcaggcaaacaagacgtcgataggcgggatgtttcacattgtgagaggtaaaatcgggtgggcaacaagagtggaacccgaatatggaagaaaatgcctaattcagttccggaccatcaaatggccacctatcgagcgcgctaaatcaggcactatctctctggacttcgatatgatagatgaaccatga

SEQ ID NO: 8976 - RNA, 1182 nt, synthetic construct
  source 1..1182: mol_type = other RNA
atgtcaagttggaacccgcagcactataggttcgatggagaacgccagggcgtgcctggagctgtcattgactctgccctcgcgattatggagcgaatccgaagagtcgatccccggatgacccccgtgttcacccttcgccatctaagcgaaatgactggaacacggtacgggcttctccggtccgtagttgctcgccgcacacatccgtacaaggtttttaccctgaagaaggctattccgggaaggactcgcgtcagactcatctgtactccaaatagagagctcaaaaccacccaggactggattgtgagaaacatcttgcaacacacacgtgcacaccccgcctcctacgcttatcatcctgggagccgaccagagtttgccgctcgcatgcattgtggctgcgattttctgctgaaggtggacattgaggacttcttcactagggtcacagaaggtaagatctgcgaagtgttcgagggcttagggtatcccgaccttatagctttcgaactggctcggttgacgaccgtggtggcaagtggtggcaagagccctagcgttgaccctgccgttcggtggcccacgataaaagcctaccaacacgcagccgagggttttctaccacagggcgcccccacctccccaatgctttcaaatctcgtgatgcggcacctggatgatcgctttgcggctatggccgctgcggcgaacatgaaatataccagatacgctgacgatttggccttttctgcaaggaagccccacactagggcaacagtggccgccttcaagcggaaagtcctgagggagctgagcgaggctgggtacagacctaatctgcggaaaactgcaatcaggggcccaggagccaggaggattgtgctcggaatgctggtcgacggccccgaacctcgactgagtcgtgaattcaaggatgatctgcgacagcatcttcactatctggcatcagaggatttcggcccatcgagacacgccgagcgtcagaagctgtctgtgtccacactctaccatcgggtaagagggttaatcgggtgggccatgcgcgtggagcccaaatttggtgctaaatgcttagcccagtttgaagccgtagcctggccacctatcgacatcagatctcctattaacgcaatagactgggacgagttggcatga

SEQ ID NO: 8977 - RNA, 1155 nt, synthetic construct
  source 1..1155: mol_type = other RNA
atgagtttttggagccctcagcgttaccaattcgaaggggagaaacacgggatcgatgacgacgcaattgcggctagcgtggaggttataaaacggattcagaacatcaacgcacgcctacctattgtgctgactctcagacatttgagttggctgaccgatactaactacggttaccttagaaaagtagtgtctcgggagtctggcaaatataagcgggttttgttcaagaagaaggtacctggccgctcccgctatcgggaaatccacattcccgaggcctccctgcttgcggtgcagaagtggatcacggccaaaattctgtccaatacgtcagcccacccaagttcttttgcatatcacccagacagccagccgatctttgctgcctctaggcattgtggatgcaaatggctgctaaagatcgacattgagaacttctttcatagcatctcagaacgcatggtctataaggtctttcgagatctcgggtatactaagctcttgagcttcgaattggctcgtatcactaccacaaccggcctgtccaataaaaagtctgaggatatctttaggtcagacagctcccgttggccctctatacccaattattactgttcggatgaggggttcctgccgcaaggtgctccctcaagccccatgctcagtaacctcgtgatgaaggctatcgacaaggacttagaatacctcgccaactgcaatggtttcacatacacccgatatgcagacgaccttgccttctcaacagaaaagaacgccacaatagctgatataaataggttcaagaaggaggttaatcggctgttaatcgaggctggctttaatccaaataggcggaaaaccgccattcgcggacctggagcaaggagaattattctgggcatcctggtcgatagcaaaaaccctagactgtctaaggagtacaaggaccagcttaggcagcacctgtactacttgagatcgcaggagcatggcccttccaaacacgccgaagcgagaaagctgagcgtcagtaccctttttcaccatgtgcgaggaaaaattgcctgggcagaaaaagtggagccagagttcggagccctctgcttagaaaaattcgaatccatctcctggcccccactggataactggtga

SEQ ID NO: 8978 - RNA, 1143 nt, synthetic construct
  source 1..1143: mol_type = other RNA
atgtcctcttggtcctcgcagagatataagtttgagggtgaaacacagggcattgatgactctgtcctggattcctccatctctgctattggacgaatccagaaagttgatgagcggctgccaattattttaacactgaggcacttcagcctcctgaccgactgtcactttgggtatctacggagggtggtatcacgcgagagcagagagtataagcggatcttgttcaagaagaaggttcctgggcgctcacgttaccgcgagatacacgtccccgaacaggagctcctcgaggtgcagcaatgggtgaccgccaaaatcttatccaatactaaagcccatcattctagcttcgcataccaccctaactcccaacctatttttgccgccagccagcactgtggttgtaagtggctgctgaagattgacattgaagacttcttccatagcatcagtgaaagaatggtgtataaggttttcaaagacctgggctataacaaactcttgtcttttgagcttgctaggattacaaccattgtaaaagcgcgcgataagtcacaggctagcagtgatctgacaaagtggccggccatacccacgtactgcaagaactccgagggatttctcccccaaggcgcaccaagtagtcccatgctgtctaatctcgtgatgaagagcgtggacgagaaactcgctactcttgctaagacgaacggattcatctactctagatatgccgacgacctggccttttccactaaactcaacgtgggaatggtcagtatgagacagctgtctaagttggtgtcatgcctgctaagcgcagaaggctttaatctgaataagcggaagactgtcatacgtgggcccggcacccggaccatcatcttgggtatactagtggattccaaaaagccaaggttaagcaaagaatacaaagatgatctgcgacagcacctttattacctgtgcagtcaggaccatgggccatcgaaacacgccgagatacgaaaaatctcagtctcaacccttttccatcacatcagggggaagatcgcatgggcggagaaagttgaacctgaattcggagcatactgcttggaacaatttaatggcatcaagtggccgcctcttggctactga

SEQ ID NO: 8979 - RNA, 1167 nt, synthetic construct
  source 1..1167: mol_type = other RNA
atgcctgcctggaacccacagcgctaccagcatgaaggaaaaattagggacatcgaccaggggattctcgatagcgtggtccggataataaatcgtattagagccgtggacgcacgacttccagtgatcctgacactgcggcatctgtccgtgcttactgacgtgccgtataagtacctccgtgatgttgtctctagacaggcaggcgattataaacgcgtgctgctaaagaaaagggttcccggtagaacacgacacagagaaatcagcattccaaatcccgtcctggccggcgtacagaaatggatcaacgagaatatactgcagttcacaagtgcacatcccctttcttacgcgtaccaccccgaatcgcaggccgtgtttgcggccactcctcactgtggttgcaggtggctacttaaggtagacctgacggacttcttccactcaatttccgagtccgatgtgtacgctgtgttcaagtctctgggatatagtcctctgttggcttttgagttagctaggctcactaccatgctgtcagcatcttctcggcccgctcccgccgactttactgaaaggtggagcagcatccctgcctacgcctgtgaaaaacagggcgtgttaccccaaggtgcccccaccagcccaatgctgtcgaacctcgtcatgcgggacctcgatgagggattggcccaattggccgaggcagccggttatacctacaccaggtacgctgacgatcttgcttttagcacggccaaggacgtcggactcgagcatgtgcagcggttgagaaagagtgtcctcctgaaattggccaaatccggattttctgggaatctgagaaaaaccgttattcgaggcccaggcgcgcgcaggatggttttagggatcctcgtagatgggcacgaaccacgacttgctcgggaatacaaggatgccctgcggcaacatctgtattatctgttgtcacctgcacacggcccagctaagcacgcaggagctcgtaacctctccgtgagcacactgttctatcacgtgaggggcaagatcgcttgggcagagcgcgttgagccttcattcgggtccgcctgcctagaagagtttgagaaggtcgattggcctccggtagatgtggcaagacaacgcagtcgcgacgcgtga

SEQ ID NO: 8980 - RNA, 1188 nt, synthetic construct
  source 1..1188: mol_type = other RNA
atgcggatcaccagccctcagcactatgtggcagccggccaaggactagcaattgacccacttgtgctggaaaacgcctcaagagcgataagccaaatctggagtcgcaacatcaacttgtttccgcttcttacactcaatcacctttctgtagcaacaggtctgaactacggttttctcagaagggttgtggcacgcaaaggaggtccgtacttatactcacacttctacatgcggaaacgcgtacctgggagacggaaggtcaggatgatatccattcccgctcctaaattggctcagtgccaaagttggattgtccgccacattttaaagcatgtcccccctcacagcggcagctatgcctaccatccacactccaatccggtgttcgcggcacgacgccacacggaagccgtttggctgattaaagtagacatccaggacttttttcacgccattaatgagcacgctgtttatcgggttttccgtagcctgggctatgcttctattctgtccctggaactcgccaggctgtgcacaatgaccgccgagcgtcccaggcaggcaaaggatccttccgcccgctacgtctcacccgcagtggagtattatcagaccccatacgtgggagtcctaccacaaggggcacccacatccccaatgctatctaacctggtgatgagagatgtagatcagggcctgtccgatctcgcgaaggagtctgccatgcggtttactcgatacgctgatgacatcgtcttctcttgtgccgacaaaaggctcggaagctcagtgagattggtgaggaataagatcctcgagatactgaaccaggccggcttccggccaaatcttagaaaaaccgtcatcagaggacctggggaccgcaaagttgtgttggggatgctggtggattcggctcatccccgattaatgaaggaatttaaggatgagctgcgtctgcatatacactatctgagacatccaaaattcggccctgcccaccatgctttggctcgaaagaccagtgtgactagtatttaccatcatgtgctcggcctcatcttctgggcccggactgtggaacccacctatggggcccggctgctgaaggagttcaagctgatccagtggcctcccatcacgaggcgagactactacgctactgttaggcaggcgggtgactga

SEQ ID NO: 8981 - RNA, 1188 nt, synthetic construct
  source 1..1188: mol_type = other RNA
atgagaatcacatccccccagcactatgtggcagctgggcacgaacttgcggtggaccccctcgttcttgagaatgcatccaaggtaatttcccgaatctggagtgtcaatcctaacctgtttcccctcttaactcttaatcatctgtccgtcgcctctggagtcgattatgggttcctgcgcaacgtcgtggcgcgcaagacaggtaactaccggcagtttctgatgaggaaacgcgtccctggtcgaaggcgggtaagagttataagcatgcctgtgcccaaactgatgcattgtcagcattggattgtggagaatatcttaaagcacgccaagccgagcccagacagctacgcttatcatccgaactctaatcccgtgttcgcagcccgacgccacacaaattcagtttggctgatcaaggtggatattgaggatttttttgactctgtccacgaacacgatgtgtatagggtatttagatcactggggtacgccggaatactgagcctcgagcttgctcgtatctgtacgatggctgccaaatggaggcccgacactgatgagaggtgggcacgctacaagggccacggtgtcgcttattaccggaaccagtggatcggagtgttgcctcagggcgccccaacctctccaatgctgagcaacctcgtaatgcgcgatgtggatcagaaactggcacggctggcttcgtcaagctgcatgcgattcacacggtacgccgatgacattgtgttcagttgcagcgacaggagaacagccgagactgtgcggtctgtgcgcagtcaaatcctcaccattttgaacgaagccgggttcaggccgaatagaagaaagaccgtgataagaggaccaggcgataggaaactggtcttgggcttgttagttgacggcaagaagccacggctggccaaagaatttaacgacgagataaggatgcacctccattatcttgggcaccctgactttggccctgcccgtcacgccactgcaagaaaaacctcaattgcagctatttaccatcatgttctgggcctaatcttctgggcgcgtgctgtggacaagaccttcggaagtgaactcctacgacagttcaattccatcgcttggcccccagtttccgaaagacattacttcgccaccatggagcaacaagagaaccaccggtga

SEQ ID NO: 8982 - RNA, 1158 nt, synthetic construct
  source 1..1158: mol_type = other RNA
atgcggcagacttctcctcaacagtataaagctgctggccacgagttagagatagcaccagcagtacttaataacgccgctgcagccatgcagcgtattgctagcataaattcacaattattcccactgctcacactcaaacacctgtccattgagagtgacgttagctatgggttcctgagaaagacagtggctcgggaagcgggtcgctacagacatatatatctacggaagaaggtgccgggacgaaaaaacgtgaggatgatctctatccccgaaggaagattactgcgatgccagaaatggattagtgagaacatcctgcgcttcggcgctccccaccaagctagttacgcctaccaccctggcagcaatccggtgttcgcggcaagagcacacactgaagccaagtggctgatcaaagtggacatacaggacttctttcatgccattagcgagcatcaagtctacagggtgttcaggtcccttggttacgcacgcctcatgtcctttgagcttgcacgactttgcacgatgccatgtgaaagattggaaccagacacagcggatgtcaaatatctggaggctactatcacccattactacagcccttacgttgggatcctccctcagggcgccccaacctcacctatgctgtcaaacctggtgatgaaagagctcgatgccaagttggccaagctggctgacgacaacgccatgaatttctctcgatatgcagatgatattgtgttctcttgcaaagatgcccgtccctcccagagcgtcaaccgcgttaaaaggctgatcctgaaggcgctgaatgatgaggggtttcgcccaaatcttagaaagaccaaggttaggggccccggaacccgcaaggtggtattgggaatcctagtagacgggaagcagccccggttgccccgtgaatacaaagacaagattaggcagcacctccattacctgacccaccctgattttggtcccgccggacatgcttcggccagaaagacaagcgtctcacggatttatcaccacgtctttgggttgatttgttgggccaaggcagtggaaccttcctttggcgaggaagccctccggtcctttaatgccatcaactggcccccaatcagtaggccgaaattctattcttga

SEQ ID NO: 8983 - RNA, 972 nt, synthetic construct
  source 1..972: mol_type = other RNA
atggctaggtggaacccccagaggtatcaggacgagggcgagaagcaggggatcgatccaggggttcttgacgctgccagcaaagccatcgcaaatatacaagcagtcaacccatctctcccccctatcctgacgcttatgcatctctccaaggtgacagaagtgaattacccttatctccgggagatagtcgggaggaagattgacccctacaagtccttcgccctgcgaaaacgaaccccaggcttgcaccggacccgtactatccatgtgcccgaggactaccttttaacagtgcagcggtggatttcgcgcgccattttgagacaggctgcccctcattccgccagcttcggctatcaccccgggtcaagccctgtaactgcagcacggcggcacagaaatgcgaaatggctgataaagattgacctgaaagacttctttgataatatccgcgaaccagctgtgttcgacgtctttagaagcctggggtacggctccctcatcagttttgagatggctcgcattgtgaccagagccccagatgcaaagcgggcccaaattgccatcgatgaacacagaatccccttctactctgtggacagtaatggttttctgcctcagggtgcaccgacaagccctatgctgtctaacctggtaatgaggggcctggatgctaaattgcaggagctcgccaacgaacacgatttccgctactcacgctatgccgacgatctagtcttttcttgccgtgaccagaagtcacgaagtgctgcgcagaccctgcgtgatgccgcacttcaagcgttgagggctggaggctttacgccaaacatgaggaagacaactattgtggctccgggcggtagaaaaatcgttctgggactcttaggggccgtcgaagttcaaggatttttctggggactattcgtgatccaggcagccgacggtaccatatgtgcggatggatga

SEQ ID NO: 8984 - RNA, 1128 nt, synthetic construct
  source 1..1128: mol_type = other RNA
atgaggttccctagtctccagcagtataaagcgaagttggtaagctttgccgtggcccagcctctattcagcagacttgtcagggttttactcagaatccgttcaacctccgatagtatataccctatatttaccctccgccacttctgtcaaatcgtgggggcagacttcaagtttctgcgcctggtcattggtcggaaatttccctatacttacactacgttctacctgaaaaagaactccccatctaggggttttcgggaaattaacgtgccctgtaacgagctgagactggtgcagaggtggctggtggaaaacatcatctctcacgtgcacccatcagaacactcctttgcttttcaccctggtagctctccatatgccgccgccgcagagcatcggaacaccaagtggttgctgaaagtagatatcaaggacttcttccattcggtgtctgagcatgaggtttatgatattttctatggcatcggcttccaaaaattactcgcctttgagcttgctcgcatttgtacaattcccagtacagactcagctagtttggtgagtaaggagcgaaaaatcgaggattaccaaagcaatcgaataggcagacttccacagggagccccttccagccccatgttggcaaatctggccatgagaaaagtcgaccatgagattgcctcgtgctgcgctgaatacgacctgaggtttacaaggtacgccgacgatattgcaatctccagcgacgatgactgcgggctcgacaccttaatccagatacgacgacaggtctttcggattctacgggctcacgggttcgatccaaatcctaggaagtcagttatccggaaacccggcgacagaaagatcgtgctcggactgctggtagatactgaacgtccccgccttacgtcagaattcaagaacaatctgcgcatgcatctctattacctgatgaagccgtccggaccatctgctcacgcaaaagcacgcaattcctctatcaccacagtccacgctcacgtgttggggctgattcattgggcccgttacgtggatagcacctatggaaatgcgagacttgcggagttcaagagcgttaactggccgaagggcacttggtga

SEQ ID NO: 8985 - RNA, 1155 nt, synthetic construct
  source 1..1155: mol_type = other RNA
atggcccacccctgggatcctcagacgtttattgcaggcgccagactagctggcaggtcagaggtcaccatacaagcatgccaagctgctgccatcgctattaagagaacacatccagacctgccagtaatcctgacactgaaccatctcgctcacctggccgacgtaaacgctgacttcctgcaggaagtggcacaccggaagatcgatccatacagagtgttccgagttaagaaaaggggcgtcgcaaatcttgtgcctgcccagccacgccgctataggacgatctgcgttccggagccacgactcatgagggtccagcgttggatcgcccagaacatactgcaggttacaccctctcacacagccagcttcgcatttataaagaacagggacttgaaaggggccgccgagatgcacgtgaatgccaagtgggtggtcaagatggatgtgcggcaattctttgagagcattcctgaagccgcggtctacagagtttttcgaacattcgggtacggggctttactgtcattccagatggctcggatttgtactcggaggccggatcatcaccgacgggacactagagcactccttggacgcgggggtcagaggccttatagattgcaccccatgggccatcttcctcaaggagcccccagctcgcccatgcttgccaatcgcgcggtagaagcactcgaccgtcggttggagaggctcgccatttcagctggctggacatacacgcgctatgcggacgatctggctttttccagaaccaccgacgctacccggtccgaggctatgaagctggtgaagttggcagaactctccttgcagatccatggactggtggtccatagacagaagacctctatcctaagtcccggtagccggaagatcttactgggaatgctagtggacactggaaaacctaaactgaccaaggcctttcgaaacaatatcgagactcacctgtacgccttaacccataaaaaaatcggggccgaaaaacaccgcactaaacgcggcttctcttccctgataggcatgcgtagacatattcttggtctgattgcatatgcacaccaggtggatgaggcgtatgcggccactctctacgcaaaagccaatagtgtggattggaccaggtga

SEQ ID NO: 8986 - RNA, 1155 nt, synthetic construct
  source 1..1155: mol_type = other RNA
atggcccatcggtgggacccccaaacctttatagggggggccagggtcgctggtagagacgaatacactatcgaagcctgtaaggctgccgctaccgctgtcaaacgtattcacccagatctgcctgtgatattcacactgaatcactttgcgcacttagtagacgtggatgccgactttttggccgaggttgcacataggaagatcgacgcctatcgcgtctttcgagtgaaaaagcggggcgtggctaacctggttagcgcaccatccagacggtaccggaccatttgcgtgcctgaaccacgtctcatgcgcgcccaacgatggattgcgcagaatatcctccaggtcacgccgagtcacagggccagcttcgcattcacaaagggccgcgatctaagaggcgccgctaccagccatgccaacgctaagtggctcgtgaaaatggatgtgcgccagttctttgaatctatctcagaggccgctgtctaccgagtgtttcgggcattcggctacggagccttgctctcattccagatggcgaggatctgcacaagattgcctgaccatcatcactctgataatcgcgatcgattaggtcgcggcggccgtggaccatatagagcacaggctgtgggccaccttccgcaaggtgctccctcaagccctatgcttgcaaacagagctgtggaggccctggaccgaaaggtggagcgcatcgcaaacaaatcaggctggacgtatactaggtatgctgatgacctggccttctcgaggtccgatgacgcccggagaggggatagcatgaaactcgtaaaacttattgagatgagtctgatgtccaatgggctggttgtccaccggcagaaaacttctattaccgcgtccggaggacggaagatcttgcttggcatgctgattgataggggggagcccaagctacccaagtccttcaggaacaacatcgaaacccatttatacgcactcagtcacgctaatatcggggcagagaagcatagggccactagaggatttgcatctctgataggaatgcggcgccatattatgggtctgatcgcacacgcccaccaggtagacaagacatatgccgcgaaactgtacgcccaggttaatctggtggactggaacagatga

SEQ ID NO: 8987 - RNA, 1155 nt, synthetic construct
  source 1..1155: mol_type = other RNA
atgccatacagatgggattcccaagcatttattgtgggagcaaggtcagagggtaggtccgagagtactatccaagcctgcttagccgcggccacagctgtgaagcgaaaacacccagaccttcctataattttcacgctgaatcacttggcccacctggcagacgtgaacgcggacttccttcaggaggttgctcatcggaaaattgatccctatcgcgtgttcagggttaagaagaggggagtcgctaatgcagtacccgcccccccaagacgctatcggaccatttgcgttcctgaccccaagctcatgcgtgtgcagcgctggattgcccaaaacatcctgcaggcaactccatcccaccatgcctcgttcgccttcaccagagatagggatttggtcgatgccgccaaaaagcatgctggagcaaagtgggtggttaagatggacgtgcgacacttctttgaaagcatattcgaagacagcgtgtaccaggtgtttagaagcttcggctacggcgcactgatcagttttcagatggctcggatctgtactcggctggccgaccataaccgaaacgatgcacgcgctctcttagggagaggcgggagacgcccatatcggcagcatagcaaaggacacttgcctcagggggcacctacttccccgatgcttgctaatcgagtggtagagactctcgatcagaagctggacctgatcgccataaccgcggattgggcgtattctcgatatgctgatgacttagcctttagtcgtattacaacaaccacaagacggcaagccatgtctctcgtcaagaaggtcgaagctgagctcgccaagtttggcctggagactcacagacagaagacaacaatcgtgtctcctgggggtcggaaagtgctgctgggtgtcctgatagatacagacaaaccccgtctgaccaagaacttcaggaataacatcgaaacgcatctatacgcactgacctcacagaaaattggcccggagcagcaccgcctcaaacgcaattttgtttcactaatcgggatgaggaggcatatcctgggccttatcgccttcgctcaccaggtagacgaaacctacgctgccaaactctacacgttgtttaataccgtcaattggaaccggtga

SEQ ID NO: 8988 - RNA, 1158 nt, synthetic construct
  source 1..1158: mol_type = other RNA
atgagacatccgtggagtagccagcagttccgactgggagccttagcagccgggagatcggaagccattatcgctgcagccgaatctattgctcgggacataaaaagacgaaatgagaatctgcctgtagtgctcacattgcatcacttagctcatctagtggacgtgcccatagaacctcttcagaagatcattttccggcaaatcgacccttaccgggtttatagagtgaagaagcgaggcactcctaatggcgctgctgcgcctccacggaaatacaggacaatttgcgtacctcacccgcagcttatgcggctccagcgctggatcgcccagaatatactcaacgaggtggctccacacgacgcatcctttgcctttacccccaagcgtaacctggttggcgctgcatggagacacaccgaggcgcgatggctgctgaaaatggacgtgaggcacttttttgagtcaatctccgaaaggcaggcctactgggtcttcagaacactggggtatacggctttgctttccttccagatggcccggctgtgtacccgcctgacacagcatggagtcgctgatccacgtagagcagcaggccgcggtcacactggtctgccatactggcaacacccccaagggcatcttccgcaaggtgcgcccaccagtcccatgctggcgaatctcgtgatgaggtctttcgatcgcagggtggaggcacttgcccagtccactggatggggatattcccggtatgctgacgatctggcgttcagccggcgcgatgggagctctagaggagctgcaatgcatttggccaaagcagtggagcacgagctggccttgctgggtctagtgtcacaccgagccaagacatctgttgtccccccaggggccaggaaggttctgttgggcgtcctggtagacagcactaggcccgccctcactagagccttccgtaacaacgtggaaacgcacctatacgctctcaccagcccaaagattggagccgcagcacaccgggctaaaaggggctttgccagttcaatcggcatgaggcgccatatcgaggggttaattgcattcgcccatcaggtcgaccgcgcttatggcgccaaactctacgcccagtttaacgatatcgattggacccgctga

SEQ ID NO: 8989 - RNA, 1170 nt, synthetic construct
  source 1..1170: mol_type = other RNA
atgaccttcacttgggatcctcagcaatttgaagcaggggctctgggtgctggcttggaccgaagatcagtggaggcagccttggctgcaggagcagccattaaagcttctcatcctgatttaccagtggttctctccctagggcacctggcccacctcactgatgtgtccgcaggcgtgctggacaaaatcgtgcgaagaagacttgacccatacaaggtgtttcgcgtccagaaacggggtacgcccaaagctggtaatgcccccgcgaggcgttacagaaccatctgcgtgcctacaccaggattaatgagggtgcagcggtggattgctcagaatatactcaatgtgataaccccccacgcggcctcctatgctttcactcccaacgtgaagatgtcggatgccatcaagcggcatgccaacgccacctggcttgtcaaagtggacgtccgccatttttttgagagtattagcgagactcaggtgtattggtttttccggcgactgggttacccagccctgctgtgctttgagttagggcgcctctgtacaaggctggctcccgatcaccgcgtatacgccaccgatccacctgttactcctggctctaggccatcagctggccacgacctcccttatccgcccagacttcagggatggctgccgcaaggagcccctacatccccgatgctcgcaaaccatatagttgagcccctggacgtcaagctgtctgctatggccagaagtggggggtggcgctatacacgatacgcagacgacctgcacttcagccggacatctaagttcacgcggaaggcggccgtagattggagtcacgaagtcgagagggaactggtccgcttgggccttagggcgaacagacagaagaccactatcacgcctcccggagcccgtaagctggtattgggcgccctagttgacagctcaacaccacggcttaataggggcttccgcaataacgtagaaacccacctcttcgctctaacccacccagatatcggcgtggacaaacatcaggcaaagcggggattcgctagcacaatcggaatgcgtcgacatgtccaagggctgattgccttcgcaagacaaattgacaggccctacggcgataaattgctggttcagtttgaaagcatcaagtggtga

SEQ ID NO: 8990 - RNA, 1137 nt, synthetic construct
  source 1..1137: mol_type = other RNA
atgctgcacccttgggatagccaggcttttgcagagggtgcgaaaaagattggccgtagtgacgctacaattgccaatgccttagcagtggccgacgccattaaaaagagtaatgtgaacctacccgtgatcctctccctgggccaccttgcccatttgacagacgtgggcctgccagttctgcggaactataccgagcggagcgatgacccctaccgagtcttccaggttaagaagaaccacgtagggaaagcccccaggcgtcacaggaccatctgcgtcccggagccctccctgatgagagtgcagcggtggattgctcaaaatatcttgaacgcccagaagccacatccaaggtcctatgcgttcgcgccttgtagatctctagtgcaagccgcagagcgccatgcaggatgcagatggctcatcaagatggactttaaagacttcttcgagagcatagacgaacggagggtgtatctggtgttcaggtcaatggggtacggcgccctcttgtctttcgagatggcaagactgtgcacacgtcttcccggtgcctattcagcaaaaccacaggaggcggctgcactctcgactggatacaaatttcagcaaccaggatttctgccacagggggctcccacgtctccgatgttagccaatctcgtcgtacgcgctcttgatcgacggttggaacgcatcgggctgaaatacggttgggtgtacagcagatatgcagatgatttagcgttctccaccaaagacatatcagggagaggcgccgccattgctctcgtgaagcaggttgaacgggaggttcgcgattttgggctgagggaaaacccggctaagactagtatcaccccccctggacaccgcaaagtgcttctgggtctactcgtcgaccgagatcagcctcgcctcaccaagagctttaggaacaatgtagaaacacatctgtttgcccttggccatcctaaggttggcgccatggctcactgtgcagccagaggattcagatctgtcactggcctgcgaaggcacctggctggactgatcgcattcgctcacgccgtggacaagccttacgctgcacgcttgtacgccgattttgacaaggtcgattggtcccggtga

SEQ ID NO: 8991 - RNA, 1137 nt, synthetic construct
  source 1..1137: mol_type = other RNA
atgaagcatccttgggattcgcagaactttgttcggggggccagagctagtgggagggatctcgacaccatatctgcagccgtgagcattgctaaggcgattaagcaggtcagtccaaacctgcctgttatcttttcgttgagccatctcgcccacttagtggacgtcagtccaaaagacctgcggcccatagttgacaggatgagtgatccttaccgtcacttccggctccggaaaaagtctggtggaaacggaagcaaagcacctaaaagaagattccgcgatatctatgctccacagccccatattcttagaacacaacgttggatcgcacagaacatactgaatctcatccaaccacatccgtcttcctttggcttcgcaccaggctccgatatgctggctgccgcaacccttcactgtgggtgcgcctggctcctgaagatggatgtttcaaattttttcgagtccataacggaacgtcaggcatatcaggtcttcagggaatgcgggtacactgctttattgagcttccaattggcgaggctgtgtacacgatccattgataagaaacactactcccacctcagggagactgagttccctcaccccagcgctacagaaggctttctaccccaaggcgcccccacctctcccatgttggccaacttggctgtgtatagcctggatgtgaagctcaaacagatcgccgacgaactgggctggaaatatagcaggtacgccgacgatattgccttcagcaccgaacagtcagtgtccagaaccgacgcgctgaaactgcgggggattgtcgagggtactctgaagtctttcggactgtcagaaaatagtaataagacccgaatctccccacctggtgcccgcaagatccttcttggcgtactggtggacagagagcgcccgcgactgacgagacggtataaagacaacatcgagacacatctatacgcacttaatcacgagaaaatcggtgtgctcgcccatcaggctaatcgcaagttttcatcagtgactggcatgaggcatcacgtgctaggactgatttcttttgcgtatcacgtagaccgcaagtacggaaacaagttatactccgagtacaatcgcgtcaagtggtga

SEQ ID NO: 8992 - RNA, 1137 nt, synthetic construct
  source 1..1137: mol_type = other RNA
atgaagcatccttgggatagccagacattccgacggggtgcaagggaaaacggacttgacgcagtttccatagaggcagccctgagcattgccaaggccatcaagtctactgcccccgacctgccagtcatcttttccctgtcccatttggctcatctagtcgatgttagccccaagcacctgcgcccaatcgtggatagaatgtctgatccatatcggcacttccggctccgaaagaaaagtgggagaaaggggagtaaagctcctcgcagaagatatcgtgatatttatgctcctcagccccacttgctgcgcactcaacgttggatcgctcagaatattctcaacgtccttaaaccccattcctcttcgtttgctttcgctcccgatagcgatatgttggacgccgctacccagcactgcggatgcacttggctgctcaaaatggacgtgtcaaacttctttgaaagtattacagagaggcaggcatatcaggtgtacaggggttgtggctacaccgccctgctctcttttgaactcgcccgcctgagtacgcggagcgttgaccagaagcattatttccaccttcaagagtcagaatttccgcatcctgaagcagtggagggatacttacctcaaggggcccccacctcaccaatgctggccaatcttgcagtgcgtcccctagatatgaaattgaagaggatcgctgccgagctgggctggaagtacacgaggtatgcagatgacatggccttcagcaccgaccgcgtaagaacccggaaggaagcgctgcagctgaaggccatagtggagacagccttaaccaggttcggcttaagcgtcaatcaatccaagactcgcatctcacctccaggagctcgcaaagtgctgctcggcctgctaattgatcgggagcggccgaggctcacacgacagttcaaagacaacatcgagacacatctgtacgcgttgaatcacgcaaagatcggtgcgcaggctcacagggacaaaagagggttttcttccatcactggcatgagacatcacattagaggccttatagcgttcgcccaccacgtagacccagactacgcccagaaactctacaaggactttaaccgaattaaatggtga

SEQ ID NO: 8993 - RNA, 1143 nt, synthetic construct
  source 1..1143: mol_type = other RNA
atgagtcacccttgggactcacagaccttcacagccgcagcacgtgctgcaggtcgcagtgatgcagtgattgatgcctccttaagggcggcgacgtatatcaaagacaggcaccctgacttgcccgttattttaaccctagcccacctcgcacacctgactgatgtctcaggggagtttttacgcggagtagtggatcgcgagacagatccctatcgtgtctttcagctgaataaaagatccagacccaacgcgccccaacgcgctcatcgaaccatttgtgtgcctcacccactgctgatgagaactcagagatggatagcacagaacatcctgaatgtcatcgatccgcacagagcctcattcgccttcgcaccgaaacgcgacattgtgcaggctgctaagagacacgccggctgccgatggctggtgaagctggacgtcactgatttcttcacctccatcagggaagatgctgtgtacagggtgtttcgcgcattgggatacggggccctcattagctttgagctcgcccgtctttgcacaagggccccaggaagcagccggaggaagcatagagctagccatgaccaacgactcccataccatcggaagcactgcggatttctcccccagggagcccctactagccccatgctggcaaacctggcttcttaccagctcgacgaggactttgaagcactcgctacatcccgcaactggatctattcgcgctacgccgatgacctagccttttccacaaagcacccgagtaacaggtcagaagccctgcacgtctctcggaaagccgaggcattgctggaacggcatgggttcgccgcgaatcgatctaaaacctgtattgcgcctccaggtgctcggcgtctggttctggggcttttggttgaccgaggcgctcctagacttccacgggcattccgggataatatcgaaacgcatctctacgccctggctcatgccgacataggccctcttagacacctaaataaaaggggcttcgcttctttgataggcatgcggaggcacatcgagggcctgatcgcttttgctcatcaggtggagcccacctatgccgccaggctttatgctcggttcaagaaggtagcctggccagcccaatga

SEQ ID NO: 8994 - RNA, 1143 nt, synthetic construct
  source 1..1143: mol_type = other RNA
atgcaggcgtggaattcacagagatttagagctggtgcaaaagcctcaggcagctctgaggagacaatccaagcggcaattgagattgccgcttgtatcaggaaagagaatcccaggctccctgtggtgttcaccttccatcatctgtcccatcttactgatgtgagctctgaatttctgcaagatgtagccttcaggaaggttgatgcatatcgcacatttcagctaaaaaagagaggcaagcctaactccgtccccgcacctgctcgtcggtttagaaccattagtgtgccagaacccggactcatgcgagtgcagcggtggattagccagaacatactgaacgtgacaacgacccacgcagccagcttcgcgtttactcccaaacgcgatttgaagcaagctgcaatgcgacacagggaggccaaatggctcgtaaagatggacatcacaagctttttcgaatcaatcaaggagaacaagatctatttcgtctttcgtaagcttggctacccacctctgctgtgctttcagatggcaaggatttgcactagactgccaatagagcacggttcaaagattccaaagcaggataaaatgttgccgtacaaaaggcgcactgaagggtttctgcctcagggggctccaacgtcccctatgctggcaaatctggtcgctcacgctcttgacaatgacctgtctatgttagccgcccaggagggctggatatatacacgctacgccgacgacttatccttcagtcacaccgagtgtagatctaggcaagaagccgttgccctggtgcggagggtcgaaagccttttaaaacgtcacgggttcctgcacaaccccaccaagaccaccatctctccaccgggtgcccgcaaaatcgtgttgggcctgcttgtggacagagaggacccccggctccccaagtccttcaagaataatctggaagctcatctctatgcactccgcagtccgaaaataggggcccgagcccatgtcaaacgacggggattcacttcccacatcggactccggcggcatgtttacggactattggcctttgcgcatcacattgagccttcgtacgctaagaaaaagtacgccgaattcaacatgatcgattggagtgcttga

SEQ ID NO: 8995 - RNA, 1143 nt, synthetic construct
  source 1..1143: mol_type = other RNA
atgttgcatccatgggattcacagcagtttcgaaggggagctaaagatgctgggcgcccggatcaggtgatcgatcgtgccattgctacagcccggagaattaagaggaaaaaccgcgacttgccagtgattttcagtatcttccatctggcccatctcacagacatagacgtggactccctactctccgtggtagatagaacagaggaccactaccggatatttcgagttaagaagagatccgttcctggccgcgtggctccaagcagacgataccggacaatatgcgttccttcacctgccctgaagcggattcagaggtggatcgcacagaatatactgaatgtgactgagacgcaccccgccagccatgcttttgcaccggagtcagatctggtcgaagctgcaaacgaacatctgagatcctcttggattgtgaagttggacatcatcaatttctttgaaaccgtcaccgagcgacaagtgtactacgttttccgctccctgggctatgcggccctgttatctttccagctcgccaggatttgtaccaggacccttaagctcactcccaagggacgggctggaagtgagggcagggtaccccacgaaagatacatcgcgggtcaccttcctcaaggtgcccccactagtcctatgttggcgaacttagcagtgcgccagctggacgacgagctcgacaatctggctaaacgtctgggctggaaatacacccggtatgcggatgacctcacattttctctggagggcaagtcatctcgcggaaaagctgccgaattaatgagccttgcaagccaaactctgagccgtgccgggttcacgagcaacaaactcaaagcaaaaatcatccccccaggagcccggaaagtcgtcttgggggtgctggtcgataccgaccgagcaaggctaagtaagaagttccggaataatctcgagactcacctgtatgcccttaccagccacaagatcggcgtgagatctcacatgcaaaaccgcggctttgattccgtaatcggtatgaggcagcatattgaggggcttctggccttcgcccaccacgtcgatgaaaagtatgcagccgggctatatagacagtttaactcgattgactggctggcttga

SEQ ID NO: 8996 - RNA, 963 nt, synthetic construct
  source 1..963: mol_type = other RNA
atgctttcctttgttgagcggacccatgaccactatcggattttccgagtgaaaaaacgcgccaccccaggaacaactgccccaacgaggcgctaccgaactatctgcgtcccaagccccgcactgaaaagggtgcagcgctggatcgcccaaaatattctgaatatcatagacccgcatgaggcgtcccacgcttttgctcctgaaagcgatctcgttgaggccgccaataagcatttagggtgttcgtggctggttaagctggatatcgtcaatttcttcgaaactatcggtgagagacacgtgtactacgtgttccgtagcttgggctacacggccctgctgtcttttcagctcgctagaatatgcaccagaacattacgcttgacccctaacggccgcgctggcaacgatggtagactgccacacgagaagtatatccctggccatctgccccagggtgcacctagctctccgatgctggccaatttggtggcaagacatctcgacgaggaattgactgctctggccagttcccgtgggtggacttatacacggtatgctgacgatctaaccttttctgtgcacggcaaaagctcaagggggaaggccgcagaaatcatggcagtcgcaacccaagcgcttgcacggcagggatttgcttcaaacaagctcaagagtaaagtagtaccccccggagccaggaagctcgtgctaggaatagtcgttgacacagagcatacaaagctcagtaggaagtttcgaaacaatctggagactcatctttatgctctgacatcagacaaaattggagtgaagctccacatggcgaacagggggttcgattctattgtgggcatgcggaaacacgtggctgggctgcttgccttcgcccaccacgtcgatgaaaaatacaccgccagattataccagcagttcaactccattaactggcttacctga

SEQ ID NO: 8997 - RNA, 1128 nt, synthetic construct
  source 1..1128: mol_type = other RNA
atgctgtcttggaatccacagcagtttacccgcgaggcaaagaaagaagggtgttcgcagcctctgatcaacgctgctattcagactgccagcttaattaagaaagtggacatcggactccccgtgatatttacgctgagtcacctggcccagatcaccgacactccattggtcaagctgggagcctactccaggcgcacctccaagaattcttaccgagtattcaggctcaagaaagccgacagacgtaaatttcgcgttatctgtgtcccagagcctactctcatgcatgtgcaaagatggttggcacaaaatgtcttccaaacaagggctgcagctccgcatcaggcgagttacgcttattatagcgatactcggcgggggctacttaacgccgcaaaacaacacgccggttgcttgtggctgattaagatggatattcagaacttcttcggatccatcatggagcctcaagtgtataaagtgtttcgagacttaggttactcagctctcctgtcctttcagctggcccggatttgcacttatgttggcgacaagccgagtcccagacgaaagaaaagttatgggatccccaactcatactgcgagaatctggggtatcttccacagggagccccaacctcccccgcacttgctaatctaactacaagactcctggactcagaactcgagaagctagctcaggaaaatgggtggaggtactctcgttatgcagatgacattgccttcagcaccacacagacgattaacagagaggtggccaaaagcctcgtgttgctggtgcgcgaaaaactgatcaacttcggctttacccctaacgatacaaagacagtgatcagcccccccggcgcacgttgcatagtactgggactgctggttgacggcccttaccctcggctgaccaatgacttccggaataacttagatacacacctctacgcgcttctttctaagaaaatcggcgtcaagaaacaccaggaaaagcggggttttgattctgtcaccggcatgcgcaggcacattatgggcctgttggcgtacgcccatagcatagatagggagtattcaagaaagtgttacgagaaattcaacaagatcatatggtga

SEQ ID NO: 8998 - RNA, 1227 nt, synthetic construct
  source 1..1227: mol_type = other RNA
atgaattacctgaccagccagcactttcggtctgtgggaatctcactcaacatagaaagcaaggttttggataacgccgtgttggtacaccagcgaatcagaaagcagtccccgaatcggggcgtggtcttcacactggcacatctggctcacctgaccggagttcactataacttcttgcgaatgtgtgtgtctgatcccggcaccgggagttacagggagttctttatcaaaaagtcaactagcggccagaaaaaaaacaaaagggctgcttctagacccatgcggcggatttctattccggcacctatgctgatgttagtacagagatggatcctgcacaggattcttcatactgcagaggggcatgaggcgtccgtggccttccataaggacgcagatatcaagcgggctgccaaactgcactgcggttgccgctggctcattaagttggatgtgcagaacttttttgagtccatcactgaggaacaggtcttcaaagtgtttgtcaggctcggatacccccgtctcctttccttcgagctagcgcgtctgtgcaccaaagtgataggtcctgaagacagatccctgtctccaactacccgctttgccaacttcggacggggcccttatgaagatgctgctttcatcgaccctagtacaccccgcagactaagacgagatgccccactgatcgtctcgagacgggtactccctcaaggtgccccaaccagcccactcctcgccaatctggccgtgacggaactggatacagagatcctagccatagccgaagagcacgggcttatttatacgcggtacgccgacgacatcgctctgagtaccaagcgcaaggacttcagcagagatgaggcaagtcaagtcatcgggaaagtttatgcagcatttgcgagggccaggttgctgcctcacacaggaaaggcctgtgtcaggccacccggcgctctcaaaattgtgctgggcttagtggttaatgggcccgagccccgcttaacaagagagtacaggaataagttgaggcttcatgcccatattcttgggcgcctgggaatcgaaccagccgaccacgctaaagcgctcggcttccgctccgtcctgtcaatgcgacgccacatatacggcaaggttgagcatgcacgacgtattgaacctgactttgcttcaaagattgcagacactttaagcaaggtgaattggctgctttga

SEQ ID NO: 8999 - RNA, 945 nt, synthetic construct
  source 1..945: mol_type = other RNA
atgaggcgcatcagtgtgcccgctcctcttctgatgcacgtccagaggtggatactccaccgaatcctccacaccgctgccggacatgaggcatctgttgcattccacaaggatgccgatatcaagggggctgccaaactgcattgcggatgcaaatggttaatcaagcttgacgtgcagaattttttcgagtcagttagcgaggaacaagtgttcaaagtgttcgtgcgcctcggctatcctcggctcctgtctctggagcttacccgtttgtgtactaaagtgattgacccagagaaaagggtgagaactcggtttacaagactggcgagctacgggcgtggaccgtacgaggatgacgcatttctggaccaatcactgaaacgccgcgagaggctgggatccccaatcttggcccagagaagggtgttacctcagggtgctcccacgtccccgttacttgccaacctggcagtcttcgaaatggacagagaaattatggaaatcgccattgagcacgatctggtctacacccgctatgccgatgacatagccttgtctaccaacagggataacttcactcgggatgaggccagcaagattattggcaaggtgtacgcttgttttgcgcgagctagactcgtacctcaccccggcaaagcctgcgtcagaacaccaggtgcgctgaagatcgtgctagggctagtcgttaacggcaccgaaccccggcttacacgggagtataagaataagctccgattgcatgctcacatcctgggcacaaagggaatagaccccagtgaacatgccaaagcactaggctttaggtccgtactgtcgatgagacggcatatctttgggaagctggaacacgctaagcgcattgaaccagacttcgcagtaaagattggtaatagcctgaaagcagttaattggctcttgtga

SEQ ID NO: 9000 - RNA, 1227 nt, synthetic construct
  source 1..1227: mol_type = other RNA
atgaattacctgacctcacagcaccttcgcaatatcgggacctcactgcaaattgaacccgaagtgttagaccgcgccgttttgattcatcggcgggtgacctcccaaaacacaaagcgtgctgttgtgtttacaatgtcacatctcgctcacctgactggcgtgcactataattacttgcggatgtgcattggggaccctggcttactcagttacagggagttttttatcaaaaagtctacctctgggcggacaaagggcaaaaaaagcccaagcagaacaatgcgccgcatatccgtgcctgctccaatgctcatgctggtccagaggtggatcctgcatcgcattcttcacacagcagccggacacgaggccagtgtcgcatttcataaagaagccgatatcaaaaaggctgccaagctacattgtggatgcaaatggctgatcaagctggatgtcagggatttctttgagtcgatttccgaggagaaagtcttcaaggtcttttcaggcctgggctaccccagattactgtcctttgagctcacacgactctgtactaaagtccttgaccccggtaaaagaatcgcgtctcagaacaccagactagccaatgttcagcgcggcccttatgaggatgaccttttcacggaccagcggattccgaggcgtcagaggctcgacgcagacgtgctgacccacagaagagtgctacctcagggtgctcccacctctccactgctcgctaacttggccgtgttcgacatggatgaagaaataatggaaatcgcagctcggcatggcatggtattcactagatacgccgatgacattgcactctccaccaagcggacggacttcacgcgtgatgaagccagcaaggttatcggaaaggtatatgccgctttcgagaaggccggactgattccacaccccggaaaggcttgcgtgcgcactcctggcgcgctgaaaattgtgctgggcttggtggtaaacggaagcgagccgaggctgactcgggagtatcgaaacaaattgaggctccacgcatacatgttgggtactcgagggatacttccaagtgagcacgcaaaggcgcttgggttcaaaagcatcctgagcatgaggcgacatatcttcgggaagctggaacacgccaagagaatagaacccgagtttgccaacaagatcgatatcacactgaagggtgtgaattggttactgtga

SEQ ID NO: 9001 - RNA, 1278 nt, synthetic construct
  source 1..1278: mol_type = other RNA
atgagctccttctctccccagcattacaaacaaatcggacggagactgggtgtggatcccgcagtactggagacagctgcaaagattggcacacgcatcacggcttcagcgccagatagagccgtggtttttagcctccgacatctgagcgctctctccggggtcccctatcagtttctccgtgactgggtgggacgatggggcccagacccatatagagagttcttcctcgctaagaagcctgacggcagaaccgccaacaaaccttctcggcgacctaaacggcggatagccgctcccacccccatcttaatgcgacagcagcggtggttggtggaaagagtcctccaccatgctccacgtcaccccagctcaatggccttccacagaaaggcagatatcgtagaaaccgcgaggcttcattgtcaatgcaattggctgatcaaaatggacattcggaactttttcgagtcgatctacgagccttccgtcttcaatgtgttcgtcgaactggggtacccacgcttgctggcatttgagctgacccgcctttgcaccagaattgtgcccgaaaataggttaaagtgggcctctggcctcaagcacggtctgttcgacgcaagacgaggcccgaagttttactcccgcgtgcgcaagcagcctgacgcgaaaggacagcatgcaataggaaagcgcgatcgcttccacgagtgggtgactggggcaatcggctcagaccggctaccattgcctttagggagtctgccccagggcgctccaacatctccgcttctggccaacctcgccgtgaggggactggacgagcgtatcaacattatcgccgccgagcacgatatgacttatacaagatacgctgatgacgtagccctgtcaacggaaaggaaagatttttcccggaaagaggccggccaggttatcggaaagattaaacgggaattcgaacgcgaagggctgttgccacaccatagtaaaacccgtttggtcagccccggtgctcggaagatagttctaggcctagttgtggatgggaaggctcctaggctgactagggagtatagaaataaactgagactgcacgcgcatatgctgggtactagggggataagtccgtctgcccatgccagtgcacttaggtttcgaagcgtcatctccatgcgcaggcacattgagggaaagattgcccacgccaggagggtggaagagccttttgcagacaaaattgctgcgcaacttgccaaggtggattggacactctga

SEQ ID NO: 9002 - RNA, 1278 nt, synthetic construct
  source 1..1278: mol_type = other RNA
atgcccagctttagtccgcaacactacattcagattgggcggcggctcggcatctcgccaactgtattggctcgcgcaggtgctgtcggtacaagaatcacggccaatgcgccagatcgggcagtcgttttctccctgagacatctgagtgctctgtcaggggtcccataccgtcttttaagggactgggtgggtagatggggacccgacccataccgcgaattcttcattgcaaaaaagtccgacaataggcggactaacaagccctctgtccgcccaaagagacggatagccgcccccacaccagacctgatgcgacagcagaggtggctcgtggagagagttttgcaccatgctcccaggcaccctgccagcatggcctttcaccgtgatgcagatattgtggaaaccgctagactacactgcaaatgtaactggcttatcaagatggatattaggaacttctttgagtcaatctacgagcccgccattttcaaggtattcatcgatctggggtatccccggcttttggcctttgagttgacccggctatgcacacggatagtgcccgagaacagactggaatggaaaactggcctccgccatggcctattcgaccctcgccgaggcccaaaattttataacagggtgcgtgggacacctgatgtgacgggcaggcgtaccattcataccagagacagattccacgagtgggcaatgggagctgttggtagcgatcgcatgccactgcctctcggctctttaccgcagggagctcctacgtcaccgctgctggccaatctggccgtacgagcgctggatgaaagaattactcttatcgccgctgaacacgacttggtctataccaggtatgcagacgacgtggccctttccacacagagaaaggactttactcgaaaagaagctgtgcaggtgatcgggaaagttctgagggagttcgagcgcgagggattaagacctcaccacgccaagacacgtctcatcagccccggagcccggaaaatcgtcctgggactggcagtcgacggcaacacccctcggctcacccgagagtaccggaataagctgcgcctccacgcacatatgcttggagcgcgcggcatcaatccttctgcccacgcgaccgcactgcgatttcgcagtgtggtgtccatgaggaggcatatcgaagggaaaatagcccatgctcatagggtggaacctgcctttgctgatgatataaaggctaagctgcaaggcgttgactggactctctga

SEQ ID NO: 9003 - RNA, 1176 nt, synthetic construct
  source 1..1176: mol_type = other RNA
atgtctgtgtggagggcccagccgtacattaacgcaggacgtcgagccggtgcagatccagtggccttagcgcacgccgtgagatatggccagtctattgtgcgccattccgccagcctcgtccctatattcactttgaaacatctggcagttctgagtggaacgccttacggtgtcctaagggaaatcgtgggaagagatgctactagcatgaaggatcagccctatcgcattttccgcatccggaaaagaattgctaagaaaggggaggcccagcgcctgagaaccatctgtgttcctagtcccatgctgctccgggtgcagaggtatatacacgaaagaattctggttcggctacccgtgcaccctgcgtctattgcttacaacccggggcgggtcatggttgaggacgttgccgtgcactgcggctgccagtggctcatcaaagtggatatcaagaatttcttcgaagctatcccagagcaggtagtgtacagagtatttaggaatgcaggctaccctgcactgattagttttgaaatggctcggctatgcacccgcgttcctatgccattcgcgcttgaacgccccttcaattttcccccaaatcgatcggagagatatagcatctcagcctacagtaagaggttacaggggtcattaccccaaggctccccatcctccccccttttggcgaacctgtgtagccgggcactggatgagcggatcgaggagcttgctctccgtcatggactcgtgtatacacgatatgccgacgatatcgcactttcttcagaggacaaaagctttgggcgcgggcatgcccgctatatagtccggaagttgcacgccattatgagggattgcggatttgcccccaacttggcaaaaaccatcgtggtaccacccggcggcaggaaggtgctgttgggtctgtacgtggacacagagcgtcctcgactcagcagagaattccgggctaagctggaacaacatcttcacttttgtctgaggcctgacgtgggtgctatcgcccactccaaacaccgtggctttgacgctgtcctgggattccgaaatcatgtcagggggctggtcgcctttgctatacaagtcgacccagactacggcgccaagagactgtcagagttcaacaaggtagaatggccgctctga

SEQ ID NO: 9004 - RNA, 1176 nt, synthetic construct
  source 1..1176: mol_type = other RNA
atgagtgtgtggagggcacagccgtacgttaatgctgggagaagagccggagctgatcccgtagcgctggcacatgcagtgcggtacggtcagtcaatcgtgagacattctgcatctctgatccccatcttcactctcaagcacctggcagttttaagcggaactccttacggggtattgagagaaatcgtgggccgcgatgccacatcgatgaagggacagccttatcgaatcttcagaattcggaaaaggattgccaaaaccggcgaggctcaaaggctccggactatctgtgttccctctccaatgttactgcgggtgcagaggtacattcacgaaagaatactagtccaccttccagtccatgctgcttccatcgcctataatcctggcagggtgatggtggaggacgtagcagtgcactgcggctgccagtggctcattaaggtggacattaagaacttctttgaagcgatacccgagcaagtcgtttatagagtgttcaggagtgccggctaccctgccctgatatcctttgagatggcgagactctgtacccgagtccccatgccattcgccttggaacgcccatttaactttcctctcaacaggagcgagcgctacagtattaccgcgtattcaaagcgtttgcaggggagcctaccacaaggctcccccagctcaccactgctcgccaatctgtgtagccgcgtgctcgacgagcggatcgaagagctggctctgaggcacggtctagtttacacgcggtatgcagatgatattgctctgtcatccgaagacaagagcttcgggcgaggacacgcccgccatatcattcgcaagctttacgccatcatgcgcgactgcgggtttgccccgaatctggccaaaacaatcgtcgtgccacctgggggtcgtaaagtccttttgggcctttatgtggacaccgatcgacccaggctttccagagagtttcggtctaaactcgaccagcatctgcacttctgcctgaggcccgatgttggagccatggcccatagtaaacgccggggttttgacgctgtgttaggcttccggaaccacgtccgaggcttgattgcttttgcaatacaggtagaccctgattatggagagaagcgtctgacagatttcaacaaggtggtctggccgctgtga

SEQ ID NO: 9005 - RNA, 1176 nt, synthetic construct
  source 1..1176: mol_type = other RNA
atgtctgtgtggaggccccaaccctataagaaagctggggagctcgcaggagccgatcccacagcacttgctcacgcagttcgctacggacagaccattatcagacataatgccgaggtgactccagtatttactttgagacatctctcagttctgagcgggacgccctacggcgtcctacgagaaatcgttgggcggcatgctacctcaaagaaagatctgccgtatcgtatattcagaatccggaagaggatggcccgtccagatggtatcgaaaggtttaggacgatttgtataccgtctcccgtcctcctgagagtgcaacgctacatccacgagcatatcctggtgcacttacctgtgcatccagcaagtattgcgtataaccccggtaaaaagctgatcgacggcgtggctgtccactgcggttgcaactggcttattaaggtggacattaagaatttcttcgaggccattcctgaacaggtggtgtatagagtgttccgacaggcggggtaccctgcactcatttcctttgagatggcgcgcttgtgcacccgaaccgttatgcctttcagtcccgacggaccattcaactttactcagaataggcctgacaaatacaaaatcacatcctacagcaaccgcttacagggctccttgcctcagggcgctccctcttcaccgttgcttgcgaatctatgtagtcggttacttgatgagaggattgaggaactcgccctgctgcatggactggtttatacaagatacgccgacgatatagccctgtcttccgaggacaaacggttcggaagagggaacgcaaaagacgtcatcaggaagctctacgccatcatgcgcgattgcggctttgcacccaacctagccaaaaccatagtagtacctccaggaggtcgtaaggtggtcctgggcctgtatgtagatacttcgcggcctcgactgagccgcgaattcaggagcaatctggaacaacaccttcacttctgtttgcacccagacattggggccgtggctcacgccaagcataagggctttgacgccgtcctcgggttccggaatcacgtgcggggcctggtcgcttatgccacacagatcgatccagcttacggcgctaagcagctggcagactttaacaaggtgaaatggccattttga

SEQ ID NO: 9006 - RNA, 1176 nt, synthetic construct
  source 1..1176: mol_type = other RNA
atgacggtgtggcgcccccagcacttccggaagaacggcttaaaagcaggtgctgataaagcagtgattgccaacgcaatagaatacggcaaggccatcgtgaggtgcgatcctgctctgactcctgtctttaccctgcgccacctggccgctttatcaggtacaacctacgaagtgctccgggagatcgttggccgtcaggctgtggtaggaaaagaacaaccatacaggatttttcggatccgaaagagaaaacccaggccagacggcgcagaaagattcaggaccatatgtattccctctcccatgctcatgcgagtacagagatacatccatgaccacatactcacgcacctagctgcccatcccgcctctatcgcgtataacgagggaaagaaaatcgttgacgaggtggctatccactgcggatgcaagtggctgattaaggtcgacatcaagaacttcttcgaggcaatcccagagcagtctgtgtaccgggttttcaggggtgcggggtatcctgccctggtgtcctttgagatggcccgattatgtacccgcgtcgtcccacttaattggaccgaggggccaaggggtaacagtcagaatctcgatagcaagtattccatcgcacgatatagtaatcggtaccaggggtcactgccccaagggagtccctccagccctttgcttgcaaatctgtgcagccgccgtctggacgacagaatagaacagttggcgattgagcacgatctggtgtatactcggtatgccgatgacctgagcctctcaacagacgatccggagtttaaccgcacaaaggcttctcaggtcattggcagactctatgccatcctagcggagtgtggcttcgcccctaatactatgaagacagccgtggtcccacctagcggacgcaagattctgttgggcctgtacgtggattccgaccgccctcgtctctcgcgggagtttagatacaaactggaacaacatctgcatttctgtcttcatgccggagtggggccggtagaacacgccaaaagaaggggatttgacgccgtcttcgggtttaaaaatcacgttagaggccttgtagcttacgccgttcagattgatcccgaatacggcgcaaaaaggttggctgagttccataaggtggcttggccattttga

SEQ ID NO: 9007 - RNA, 1206 nt, synthetic construct
  source 1..1206: mol_type = other RNA
atggctatttggaggccccaaccttataaagcaactgggcagaaattgggggtgaaccaggttgccttagtcaatgccatcaaatacggcaagagcatcacaggccatcacccatccctgacacccgtattcacactgagacatctcgccgcactgtcgggaactccatatgccgtcctgcgcggtatcgtgggtcgccaaacggagacaggtactgacagggcttaccgcatcttccgaatacggaagcggttgtctaagaagggtgagccacagcgctaccgtaccatttgcattccttctcctgttgtcctgcgggtacagcgatacattcacgaacacatactaactcacctggccgtgcattctgcttccatcgcgtacagtgaaggcaataagattgccgaggaaatcgccgtgcattgcggctgtaagtggctcatcaagatggacgtgaagaactttttcgaggcgatcccggagcaggcagtttacaaggtgtttcgcggtgcgggctatcccgcccttattagcttcgaaatggcaagactttgcaccagggtagtcccgctgaattggtcagaaggacccacagcataccccactaataggatttcccgttattccatcaccacgtattctaacccatctaaaggggtgcaaccagccggcacccaagtgcagggaagcctacctcagggaagcccctcaagccccttgctggctaacctgtgtgcccggggattggatgagatgctctcagagctcgctgatgagtacggattagtttacacaaggtacgctgatgacctcgcgttcagtaccagtgataaaagctttgatagaagacgtgccagtcaggtgatcggccgggtttatgcaattatggccaagtgcgggtttgttcctaacaccgctaaaaccgtcgtggtgcctccaagaggccgcaagatactgcttggattatatgtcgactccgacagaccgcggctctcaagggagttcagatacaagctggaacagcatctgcatttttgtatgcaccccaaaatagggcctgtactgcacgctaaacgacgagggttcgatgcagtgctcggctttaaaaatcacgtgcggggcctgatcgcatatgccgtgcaggtggacccagagtatggggctaagaggcttgccgaatttcacaaagtcatgtggcctttctga

SEQ ID NO: 9008 - RNA, 1206 nt, synthetic construct
  source 1..1206: mol_type = other RNA
atggccatctggcgaccccagccatatcagaagactgggcagcagcttggaatagaccctgcggtactggcctctgcaatcaagcacggcaagagcattattggccaccacccgagtctcacccccgtgttcaccctgagacatctcgccgccctgtctggaacatcttacgctgtcctgagaggcgtggtgggcaggaagacggagctcggttccgaccgcagctatcggatcttcaggatccggaagaaaatctctaaggtcgggggagctcagcgataccgcactatatgtattccaagccctgttctactccgggtgcagcgctatattcatgaacatatcttaatgcacctcccagttcactccgcatcgatagcctatagcgctggaaataagattgcagaagagatcgccgtccattgtggctgtaaatggcttattaaggtggatgtcaagaacttttttgaggcgatcccggagcagggtgtatataaagtgttcagaggcgccggctacccagcccttatatccttcgaaatggcaaggctatgtactagagtggtgccgttaaactggacggaaggtccacatgggtatctgaacaatcgttgctcccgctttagcatcgctgcatactcaaatccctcacaagatgctcggcctgctgggacacagatccaggggagccttcctcaggggtccccttcaagtcccctcctcgcaaacttgtgcgcgcgtaagctggacgagaaaattgaagagttggctgatgattgtggcctggtgtacactcggtacgcagacgacctggccctcagtaccgatgatcagtgctttaccagacgcaaagccaaacaggtgatcgggaggatttactctctgatggctagctgcgggctgacacccaacaccgctaaaacagtagtggtccccccaggaggccggaagttgctgttgggcttgtacgtggacagtgatcgtcccaagctatcccgagactttagatatcgccttgagcaacacctgcacttttgcctgcaccccggagttggtcctgtctcacacgccaaacaaaaaggcttcgacgcagtcttaggattcaaaaatcatgtgaggggtctgattgcctacgcggttcaagttgatcctctgtacggagagatgaggctggtagacttcaataaggtggcctggccattctga

SEQ ID NO: 9009 - RNA, 1176 nt, synthetic construct
  source 1..1176: mol_type = other RNA
atggtggtatggcggtcccaattgtacaggaaaaccgggagacagctgggggttgacaattcgatactggacgcagctgtgctctatggcaaggcgatcagcaatcaccagccttgcctcgtcccagtgttcaccctacgtcacctggcagccctctcctccactccctataacgccttacgcgaaatcgtgagaaggcatcagctgggtggggggatgcacccataccgcctgttccgaatccggaaacgcatcagcaagaaaggtggcgaggagcgcttccgaacaatatgtattccatcaccagtactgttgagggtccagcggtacatccatgaacacatcctgattcatctccccgtccaccctgctagcatcgcctataacgagggtaaaaggatcgtagatgaggttgccattcactgcggatgtaggtggctgatcaaagtagacgtgaagaacttctttgaagctattccagagcaggccgtgtaccgagtctttcggggagcgggataccccgctctggtgtcatttgaaatggctcgactctgtacacgggtcatatcccgcagtagggacgaaggcgcatttggctacagagacaatcgctctctgaggtactccattaaggcctattctcaggcccttcagggatctctacctcagggtgcgcctagctcacctctgctagccaacctctgctctattcccctggatcacgaaattgagaaacttgctgaggaatatgggcttgcatatactcggtacgcggatgatttagccctgagtaccccggacacaaccttcgaccgtgatcaagcccggcaggtcattgtgagactgtatgccgctatggcccggtgtggcttcgttcccaacacggcaaagactgcagtgatcagccctgggggaagaaaggttatattgggactttatgtggatacagagcgaccgagactgagtagagacttccgttacaaattggaacaacacttgcacttttgcctccatgatggcgtgggcccagtggagcatgcaaagcatagaggattcgaggctgtgcttgggtttaagaatcatgttaggggcctcatcgcccacgcagtgcaagtcgatcccgagtacggcgcccgcaggttagctgactttcataagattgcttggcccttctga

SEQ ID NO: 9010 - RNA, 1170 nt, synthetic construct
  source 1..1170: mol_type = other RNA
atggccatttggagagcacagcattaccggcagaatgggttactccaggggattgaccctcagcttctgtccagggctatcgaatacggcgatgcaattacccgcagtaaccgaaacctaactccggtgttcaccttacgccatctggctctgctgtgcggcgcctcatatgcagctctccgtgcctacgctggacgcaagaacgacgaagctaatcatccctatagattctttcggatacggaagaggaccggtcccggagagaggccaagacgaaggacaatctgtgtgcctgcacccgagttgcgaaaggcccagcgcttcatacacgatagtatcctgagctatctccctgtacacccaggatccatagcttatagcagacacacgaggccagtggaagagattggcattcactgcggctgtcgttggttgattaaacttgatgtccagaactttttcgaggcgatctccgaacgggccgtgtaccgcgtattcagaaacgccggctaccctgctttgatttctttcgaaatggcacggctctgcacccgaattgtccctggaaatagggatgaggggcccagcggtcaaacatctgggcgggtcgggagatattcgatagaggcatactggaattggagacaaggatccctgccgcagggagcaccctctagtccactcttggcgaacctatgctcttttggcctggacacactggttgccaacatcgcctcagaatatggcatggtctatacacggtacgcggacgacatcgcccttagcactaccaatcatcactttagcaggtccgacgcactccgggtgatccaacaggtgtacgccgccatgcgccaatgtgatctgcagccaaatacagcgaaaactatgatcgccccacccggcgcccgaaaaatcgttctgggcctgtacgttgaccagagcactcccaggttgactagagagtttagatcacgcctcgagcagcacctgcacttctgtttacatcctgacgttggtcctgtcgcccacgctcggcgtaagggtttttcagccgtgcttgggttcaagaatcatctgaggggacttatcgcctatgctacccaagtggagcccgggtacggcgctacgaaactggtggatttccagcgcgtggcatggccattttga

SEQ ID NO: 9011 - RNA, 1167 nt, synthetic construct
  source 1..1167: mol_type = other RNA
atgaatcattggcgcccacagcattataggaagcagggcactaagagcggaaaagatcccgtgatcataaaacgggccatcgaaatcggtacatctataacccgaaaatatcccaccattaccccaatcttcacgctgaaccatctagccctgatctcgggaacatccctgcacaaattacgcaaggtggttagtcggaacgaaagcgatggctatcactatagattcttccagatcagcaagagatgtcgaaaaaaatccaagccgacaaagcgttttatctgtattccgtctagtgacctgatgcgagtccaaagggtgatcaattccgtgatattatccaaagtaccagcacactctgcctcagtggcatatacgaagggtagcagcatatacaatgcagcgagcatccactgtggatgcaagtggttgattaagctcgacatcaagaactactttgagagtatttctgagcggtccgtatattctattttccggagcattgggttccccgcgctcctctcattcgaaatggcaaggatttgcacccgcgtgattccccgcagaggcctgacttacgactcaaggtggatcaatcccagatttgaaaaggggaagattaaggcctacaggaatcgcgacgtcggctccctccctcaagggtcaccctcatctcctatgctggccaatctcgcttcggttcatctcgatgaagagatcgctgaccttgcctataaaaatggcctagagtacaccagatacgccgatgacattactttgtcaactgataacgagtactttagtaggttgaaagctagcaagttgattcaggaagtgtactttgtcatgaggaaatacggattcgagcctaacacaacaaaggccagcgtcactcctcctggggggcgtaaagtggtccttggactgctggttgatggtgccagtcctcggctgaccagagactttagatccaaactgcggcagcatctttacttctgccgcaaagatgggtatggcccaataaaacacgcaaagcacaagaatttcgcttctatcctgggctttaagaaccaccttgctggactgatttcctacgctaagcagatcgacccagactttggcaagaagatgaacgatgagttcaacaaaatcgagtggccattttga

SEQ ID NO: 9012 - RNA, 1146 nt, synthetic construct
  source 1..1146: mol_type = other RNA
atgaaacagtggtccccccagcgataccgagcagaagctctcattcagggagtgaaaccggaaatcatagacagcgccatcctgcacaccaagaagatcattaatctgaatcctaaggtgattccgattctcactttacggcacctggctttcatggcaggtgtcgagtatagctttctgcggaaagtgatcaacagggaacattttcatccctatcgctttttcctcatacggaaacggcggtctatcagtaagaggaagatttttgtcccagaaccccagcttctaaaggtgcaaaagttcatacacgacaatgtgctgaagcacatcctgcctcacgatgcctcctttgcgtatactccttatagctctatttacgatgcggcccatgtgcatatcaattccaggtggcttattaagatcgacatcaccaatttcttcgagagtatttcagagattgatgcctaccatgtgtttaaatacaacggctactcaaacttgatttcctttgagctcgcccgtatctgcacctggcctatccccagatccaggaacgaacgcctgcacagactgcagaacaagtacctgaaagagtacaagttctatgatagaaaacagaaactcggatcaacacctcaaggcgcacctacgtccccatgtctttctaacctcgtgtgcaaaaatttagacgctgagattagcttcctgtgtgaaaagttgcaggttaggtatagtcgttactcggacgatattacaatctctagcaccaacaagtcattttctagacataacgcccagcacattatagactccatctacagaatcttaaacaagtacgggttcaaccccaacaagtataaaacaaagatcattccaccaggcgctaaaaagattgtactagggctgaatgtcgacaaagatagcgtgggcctggacaaggagttcaaatacaagataaaacagcacatccacttttgccttcacgaaaaggtcgggcccgtccaacatgcacgctttaaaggtttcagcagtgttatagggtttcgcaatcatttgtacggattgatagtttatgcccgatctatcgatgtaatcttcggcgagaagatgctgagcaaatataatgagatcaattggccattctga

SEQ ID NO: 9013 - RNA, 1146 nt, synthetic construct
  source 1..1146: mol_type = other RNA
atgaagcagtggtccccccagcgttacaggtccgaggctctgatccgcggtgtcgaaccagagatcgttaacaacgcgatcctgcacatcaaaaagatagtgaatctcaacgacaagctccttcccatattaacgctacgacacttcgcctttatggctggagtggaatactcctttcttcgcaaagtgattaatcgcgagcatttccacccatatcggttcttccttatcaagaagaagaagtctattagcaaacggaaaatctttgtgcctgaacctcaattgctaaaggcccagaaattcattcacgataacgtgctgaaaaacattagcccacatgaagccagcttcgcttacacacctcagtcgagtatatactacgccgctaatatgcacatcaattccagatggttgataaagatcgacattacctcattcttcgagagcatatctgagatcgacgtctaccatgtctttaaaagcaatggttacagcaacctggtgtcatttgagctgagtagagtttgtacctgggtgatccccagaagtcccaaggaacggctcccgaggttaaagaataagtatctcaaggagtacgatttctataaccgatcatccgagctgggctcaactccacaaggcgcccctacttcaccgtgcctttctaacctggtatgcaaacacttggattcggaaatttctctgctgtgcgagaaactgaaagtgcggtatagcagatactccgatgacatcacaattagtgcggtgaatattaacttttccaggacaaatgcactggatatcgttgactccatctacaggatcctgaggaagtatggcttcaacccaaacaaggttaagaccaagattatcccccctggggcaaaaaaaattgtactgggcctcaatgtggataaaaaccgtgtgaatttagacaaggcctttaagtataagctcaagcagcatgtccacttttgtctgcacgaaaaaatcgggcccgtcaagcatagtaaattcaaaggatttagcagcgtaataggctttagaaatcatctctacggattgatcatttatgctcggtctattgacgcaatgtttggggaggaaatgcagaagaaatatgagcgcatttcttggcctttctga

SEQ ID NO: 9014 - RNA, 927 nt, synthetic construct
  source 1..927: mol_type = other RNA
atgagaaagaaaaattccttggagaaaagacgaattttcatcccacacccacaactggtcaaggtccagaagtacattcatcagaacatcctgaaatttgttgaatgccatgagaatagcttcgcctatactcctggtattagcatcgtggatgccgcttccttgcacaccaactcaaagtggctaataaaactcgatatcacagcattctttgagagtatttccgaggtgtcggtttataaagtattcaggagtctggagttccccgctttgctttcctttgaactggcacggatttgtacctggaattcaccccgcaaccgtaacacaatccctcctaggttcaagatttccaaaaagacaaactacaccgtttactctagcactgaggggatagaactgggccacctgccacagggagcaccaactagcccctctcttagcaaccttgtgtgtcgggaactcgataaacaactcaccgccttctctgtgaaaaatgagctggaatactcaagatactcagatgacattaccttcagcagcaaaaacattaatttcagtcgcaaagatgcgatcgagataattaagatggtctacaagatcctcattaactatgggtttacacccaatattcagaagacgaaaataatcagtccgaaagctaagaaaatcgtgttaggcctaaatgtcgaccgggagaaggtaaagctggacaaaaagttcaagaacaagatcaaccagaacatctatttttgcctgcatcccgacattggcccggtgaggcaggccaaatataagaagttttcctctgtgttagggtttaagaatcaccttcacggtctgataatctatgccctgtctatcgacaaggaatttggagaaaaggctctcaacaattacaataagatcgtgtggcctatccattga

SEQ ID NO: 9015 - RNA, 1161 nt, synthetic construct
  source 1..1161: mol_type = other RNA
atgcgccagagatggagcccccagaggtttcaggcctctgccaaaaaccaagacatagaccagaacacaattgaacatgctatcaaacatgccaagaacattatacagcatgggaagtatatcctccccatcttcaccttaaggaatttaagcttcctggccggggtggaatacagcttcctcagagagatagtttcacgcgaatatattcacccctaccgatttttctacatcagaaaaaaaggccggaatcgtaggagaaaaatctgtatccccaatccacaactgtgtaaggtccagaggttcctccataaggaagtattgcaggaatttcaggttcacccagcttgctttgcctatatacgggatagctcaatcgttgacgctgcgtccgtgcacgtggaatcccggtggctactgaaacttgacatcgtcaacttttttgactctatcagcgaaattagtgtgtacagggcattccgagagaacgggtttcccgcgctgatatcctttgagatggctagaatttgcacttggctgagtctgcgcaacccacatgagatagatagccgctggaaaattgatcatcgacacaattacaagatctaccacagaagctccattagtgaaatgggctccctgcctcaaggtgccccttcatcacctatgctttctaacattgtgtgctttaagctggatgagacattggaggagctggcagtcgagaatggactccgctatacccgttattccgacgacctgacattctcgactaactcaattaacttcaatcggaagaacgcaacgttgttcatcagcaaggtgttcagcattctaaagtcttttggattcgagccgaacaaaaccaaaaccgagatcattcctccatcttcaaagaaagttgtgttggggctgaatgtcgataagaaatctgtgtctctggataagaacgtgaagtacaagatcaaacagcacatccacttttgtcttcacagtgacgtcggcccaatcaatcacgcaaagcggaagggcttctcgtccgtaattggtttcaggaatcatcttaaaggcctcatcaattatgccaagagtatcgagccggagtttggagaaaaaatgctgtccctctacaagaagattaaatggcctttagatatctga

SEQ ID NO: 9016 - RNA, 1185 nt, synthetic construct
  source 1..1185: mol_type = other RNA
atgaacaatatctggaggccccagttatatatatccgaggctagatcccaaggcatcccaacagatataataaacaatgcagttgcgattggcgacaggattactaacaagggcctaaatattcccatcattttcaatctggaacaccttgccaaactgtcaggggtcgattacgaccaggtttataaacttaccaagagagcgggcgaaaacagtagcggtaaagactactatcgcatttttgcaatacgcaagaaagacaccaagtcaaaacgttacatatgtgtgcctagcaaaaacctgttgcgggtccagaagtacattaatcaattcatccttcacaacctgaagtcacatccttcttccatggcctataataaggggtgtaagattgtcgacgtggccaatgtgcaccggcaggccaagtggcttctcaagatcgacatcgaagatttttttgagaatatctccgaagtagacatctacaagatcttcttcagttccggatacagtaaactgctgtcatttcagctcgcccgattgtgtacaaggattgttccttaccagaaggagcacgctgagaaatatagccactcccgctggagagcccacaagaactacaacaacaagaactacaatttccatgtgataggatctctcccccagggtgctccaacctctccgttgctcgcaaacctggtgctccgcgagttggacgagaaaatcactaaaattgctttatcgtacggggtgcggtatacccgttattctgatgatctgacattcagcagctgcgatatcaagtttggaaggaaaaactgctacagactgattcgagagatctatgatagcctgtattctaatggcttctcaccgaagaagaataaaactaaaatcatctccccaggaagcaggaaggtagtgctcggcctgattgtggatggaaataagcccaagttgacgaaagaatttaaagccaatatcctgcggcatctgcatttttgcaatctggaatctgtcgggcctgttcagcacgcaaaacaccaaaaattcgactcggtgatcggcttcaacaaccatctaaaggggcttgtctcttatagcctcagtattgaccccaagtttggtagcaaagtgaagtcattatacgagagtattaactggccttccctgccattcaactga

SEQ ID NO: 9017 - RNA, 1182 nt, synthetic construct
  source 1..1182: mol_type = other RNA
atgaataactggcggcctcaacaatacagaatagaagcccagaggaagggggtgccagagaatgtgattaacagtgccatcgccattggagacaagatcagttcgacaggactgaacatcccaatcattttcaatctcgagcacctgtcctatctgagcggcgtggactacaatcagctctacaagctcacaaaacgtgtcggagagcgcttttacgaaaaggaaaattaccggatcttcaccattaagaagaagaactcaaagtctaaacgctatatatgtgtgccaaatcacaaactgctgcgcgtacagaagtacattaacaagtttattctgcagcagatcaaaacacatcacgcaagtatggcttataatagtggctgccaaattgtcgatgttgctaagttacattgtaactcccgctggctgattaagatcgacatcaaggacttcttcgaggaaataagcgaggttaacgtctattccgtgttcaatgagtgcggttattctaacctcctttcctttcagctggcacgactgtgtacgcgtatcgtaccgtatcagaaggaggatgttcttaacaatatcaagagtcggtggaaatcaagcaaacagtacaggaacatcaactataaccatgacgttaccggatccttaccccaaggtgcgcccaccagccctatgcttgccaatctctttttccgagctctggatgagaaaattatgactatcgccaacaagtacaacctgatatatagcaggtacagcgatgatatcgccttatcatctagagacgacctattcggcaggagcaaatgccatcaggtcgtgaaagacgtgtataaggtgttgtactcctctggcctttcgccccagaaagggaaaaccaaaatcttgtcaccaggatctagaaaaattatattgggtttggtggtcaacggctcctcacccaaattgactaaggaatttaagaagaacctgctgcagcaccttcacttctgcaatctcaaaagcattgggcccgtgagacacgctaagtacaagaagtttgactccataatcgggtttcggaatcatctgcacggcctcatttcttatgcactgaatgtcgatccgaatttcgggaaaaaagtaaaacaacagtacgatcacatcgattggcctcctctaccctttgtgtga

SEQ ID NO: 9018 - RNA, 1173 nt, synthetic construct
  source 1..1173: mol_type = other RNA
atgtacaaaaattggaatccccaaagatacaggaagaacgctaatcgagataatatctcacatgacgtgatccggaacgccattgaaattggaaaccggattaacagtgtcaaccgcgatatccccatcgtgtttactttgaatcacctctctgtgctgagcaaaagcaaacttagcttcctcgaatctatcgcatccaggaattacgaggacaagccatatcgcttcttcaagataagaaaaaaagggaagaactcaaacgacaaacgacgtgttatttgtataccggagccaaggctactgtcagtacaacagtacatcaacgaggaaatactgtctaagatcccttcacacgaatgtgccatggcttattccaagggcaaaggtgtctatgatgcagccgagttgcactgcggatgtcggtggcttatcagaatcgacctgaaggacttttttgatagcatcagtgagcggcaggtgtactacgtttttaataagctcggttatcctaagctgttgagcctcgagctggccagaatttgcacccgcgtttacccaaggttcatttaccccagtgagaaaagcaagtggatatccaaccggtccaaagactctggcattgcctcctatacctgcagcggaaatatgcttggctcgctacctcagggcgcacctacaagtccggctctctccaatctggtgtgtaagtcgttagatggggacttgcttctcttttctgaacagcatggctttctgtataatcgatactccgacgacctgtatcttagtacgacctctgacctgtcaagaaaggacattcggtgcttcttactgtccgtttatggtttactcaacaagagggagttccaggtgaacaagaataagactgtaattagcggacctaagacaaaaaagctggtcctggggctgaatgtggataaggaatatcccaaagtcaggcgcgaggtgaaaaaccagattaagcagcatctccacttttgcctgagaaaggatatagggccagtcatccactcacagaaaaaaaagttcagcagtgtggtgggcttccgcaaccatctgttggggatgatcaattacgtaaaccaaattgaacccatgtacgcgatcaaattgcgtaaatctttcgatcgtatcgattggccatttatctga

SEQ ID NO: 9019 - RNA, 1146 nt, synthetic construct
  source 1..1146: mol_type = other RNA
atgaatcgttggtcgtccagagcctttaagaagcacaatagcgacaaacccgcggcagtagtcgaaacagcagctctgtatggaagaaaaatacaaacatcttgcccagaactccctgtcatcttcactctgaatcacctggccctgaagagcggggtaccatataacaacctgcgcagcttcgtcgacagaaccatcgagcgaccttacagaagtttcacgcttcgtaagaacggactgggctccaaccccaggaagtttcgagtgatcaaggtgccgcagcaagatttaaagaaggctcaacagtttatcaaccagaacatcctctctaaaatggagccgcatgagtgttctgtggcgttctccccaggaagcaagatctatgatgctgcaagcgaacattgcaacgctcggtggctccttaaattcgacatcgtgtctttcttcgaatccattaccgagaagagtgtgtatcgggtgtttaggagatataattaccctgctttactgtcctttgaaatggcaaggatttgtacagcgttgaaagcacggcctcccataaactgggggggtgcccctcccaacatacggtaccgcacgattcccgggtattcaaataaaaatttgggtaccttaccgcagggagcccccacttcccctatgctggccaaccttgtctcatacaacctggaccgtcggttgaagctgattgccgacgcttataactgtcattacagtagatacgcagatgacatcacattttctaccgatagttctctcagccgcggcgaggtgagcaggattatagccatgatcaattccacactacgagagtacggacatactatgaataaggccaagaccactattgccccaccaggcgccaggaaattctacctgggcatgaatattcacggcgactcgcctcagctacggaaaagttttaaaaggaagcttaaacagcacctcttcttctgcgaaaagaattcagttggcccagagaaacactcaaagcacctgggctttgtcagcgttattggtttcaagaatcatctgcgcgggctcatcaactacgctaaccaggtggataccgtttttggggagaattgcatgaaacgctttcagtcaatcgattggcccttgtga

SEQ ID NO: 9020 - RNA, 1158 nt, synthetic construct
  source 1..1158: mol_type = other RNA
atgaatagatggtccagccaactgtttcagaaagaagctcgccgtctgggtcggtcagaggatgtgattgacaactgcttaaatgctgccgccctcatccagcttaagaactcacaaatcacccccatctttagcctgagacacctttcatacatggccaaagctgattatgggttcttacgggccatagtgagcagggacgacagaattgatagttaccgaacgttccagatccgtaaaaggaagcgcaggaagaatgacaaagaaaggtaccgcaacatcaatgtgccatctcacgacctaaagaagactcagcaatggattaataagcatatcctctcacacgtatcgcctcatcagtgcagtatggccttctataaggatagttcaatcatagaggccgtaaatgcccacgtcggggccaagtgggttataaaagtggatgtcaagaacttcttcgagtctatcaacgagatatccgtgtacagagtgttccgggaattgggatttaatgctctgctctcctttgaactggcaaggatttgtaccaagaaacggacaatgctgccctcccggtcgaggaagtggattagcaccggcagacgagagacaatatccacatatgctcagccgatccaaggttttctgccccagggtgcgcctacctctccaatgttgtccaacttggcaagtcttcgcctcgatcaggagatctttaagttttgcgcccatgaaggattcatatatactagatacgctgatgacattgtgatttccgtgcacagggacgtgaagaaaagcgagtgtagcaacatcatcaacaaactgtaccgagttatggcatctaatggcttatctcctaataagaccaagacaattgtcctgcatcccggcgcgagaaaggtcatcctaggactcatgttgactgacaagggagtcatgctcacgaaagagttcaaaagccgcctgcgccagcacctgttttttcttaactccgagaacgtggggccagttgaacacgcccagcacaagggcttcgttagcattatcggcctccggaaccatattattgggctgctgtctttcgcaaaagcggtggacaaaaatttcgctagtaaatgtcaggcagactttgatcgtatcgtatggcctatttga

SEQ ID NO: 9021 - RNA, 1152 nt, synthetic construct
  source 1..1152: mol_type = other RNA
atgacactttgggattcacaggcttacattgttgaagcccgcgccactggtatcaacccaaatattgttaccgcggcgctcgggcatgctaatgccattagatccgtgtcgcgtgatctgccaatcatcttcactctgagtcacctcgcacaggcctgtggagtggcacactcttacctgatggacgtagctgatcgcaggatagacccgtaccgcgattacatcacaaagaagagagagaaaccccaccgcacagccttcagccggcgttacagaatcatatgcatgcctgaccctgagctgaagaaggttcagaggtgggtgcatcaaaacatcctttcaaaagttacgcctcatcgcgcctccaccgcctattccaactccaacactttgttagatgcagctgcgcggcacaccaatgctaggtggctcatcaagatcgacatcgaaagatttttcgagagcattaaggagccctatgtggccggcatatttgagcggctgggctatcccgaccttctgagcttccagcttgcgcgactctgtacacggctcccctctttaaaaagtcggaaggatattttctgccgccggtctaagccagtcaaaggcgtgatgcagaatgactggatcggcttccttccgcagggagcccctaccagccctcaactggccaacttggtgatgaggcggttcgacagaagaatgaccagcttgagcagaaccgaaggtctgagatattctcggtactctgacgatatgattttttccacactggggtcattcagtaggccacaggccactagttttgtgcatcaagtctatgatgtcttgggagcttatggcttcgaagcaaacaggacaaaaacctcaatcgctgcacctggcgccaggaaagtggtcttagggctcctggtcgatagggacgagccaaggctgactcgagagtttcgaagcaatatagagacgcacctacactacctggagcgcccaaacgtgggtcccgtagcccatgcaaaagctcgggaatttgactccattattgggctccagaatcacttgctggggctaattgcctttgcacgacagatcgacagaaagtacggagatgaactgcgcgctcgactgcaccgtataaattggcccgcatga

SEQ ID NO: 9022 - RNA, 1152 nt, synthetic construct
  source 1..1152: mol_type = other RNA
atgactctctgggactcccagattttcacagctggagctagagctgccaatgttgatccggcagtaatcagcgccgccgttggccatgcgaacgctatacgcagtgtgagtattgacctgcctatcgtgtttacacttgcgcaccttgcccacttgtccggcgtgtctcataggtacctcatcgaagtggctgggagagggtcagacccctatcgagactatattgcaaagaagcggcaggcacccggatcaactgctgcctcgagaagataccgcactatttgcatgcccgatccagagctaaaaaaggtgcagcggtggttgcaacagaatatgctctctaagatcgcacctcacgctgccagcaccgcgtactccgaggacgacactgttttcgcagcagcagccaggcatgtgaacgcgagatggctgattaaaatcgatatagagaggttcttcgagtccattaaagagccttacgtcgcatccgtctttgaacggttagggtatcccgatctgctctctttccagctgggtcgcctttgtaccaggcttcctacattaaaaagccgcaaggacatttttaaaagacggagtaagccggcccgtggcgtcatgcaacacgaatggatcggcttcttgccccaaggcgctccttcaagcccacagctggctaatctcgtcatgcgtaggtttgaccgtagggcaaccgccgctgctaagaaagccggtttgcgatactcacgctacagcgatgatatgatctttagtaccgcaggttctttctcccgggagagggcagagcacttcgtgcatgatatatacgacgtcctgggagcctatggctttgaggccaaccgaacgaaaacgagcatcgcggcccctggagccagaaagattgtgctcggcctgctggtggacagagataagccccggctgacaagagagtttcgggccgggatagaaacccacctgcattatctagagcgaccagacgtgggaccagttgggcacgccgaagttagggaatttgattctgtgatcggcctgcgcaaccacctggaaggtttagtagccttcgctcgccagatcgaccagccatatggagataggctcaaggctcgactgcgggccatcgtatggccagcctga

SEQ ID NO: 9023 - RNA, 1155 nt, synthetic construct
  source 1..1155: mol_type = other RNA
atgcagaattggaacagtcaacttttcagcaaaggggccgctgccgcaggagtaagccctagtataatcgcaagcgctaatgcctacgctagaagaattatttcctgtaatagcgacctgcctatcgtctttaccctgaaacatttcgcccacctgaccgaattaccatttgacaacctggtgaagatcgtagaacgaaaagaggatccttatcgatcttttctgatcaagaagagatcaaggcctggtgatagggccgtggctagaagatataggaccatctgtattccggatactactctgatgtttgcccagcgttggatcgaccagaagatcctgagcaaggttgacccgcataattgcagcactgccttccatggcaattcttccatcgttagggcagcacagcgccattgcggatgccggtggctgattaagattgatatccagcggttcttcgaatccataacggaatcgtctgtatgccgggtcttccagagtctgggctatccagacctcctgtcttttgaactcggccggctctgtacccgggagcctagtgtgctgtcccgccgatggaagtttagacgcacacgctcttaccccagcggggtccaccaacacccatcaattgggttcttgcctcagggttcccccacttctccccgactcgcgaacctaacaatgagggagttcgacgaaggcgtgaactcaatttcacgtagctatggcctggtgtattccaggtacgcagacgatctcatattttcaacggacgcggccaccttttccagagtggaggccgaggcgctgatctctcgtatctaccaggtgttacttgagtacggcttcgagcccaacagaacaaaaacaatgatcagtccaccccgggctaggaagatagtgttgggactacttgttgatcgcgacacacccaaactcactaggcaattcaagcaggatttggagaaccacgtgttttacttatcgcacccacggcatgggccaagccaacacgctaacaaacggaattttacctcagtcattggactccaaaattacgtgcagggattgcttgcccacgccgctcaggttgattccgctttcgccgaccgcatgcgcgcaatgctggctcaggtcaaatggcccatttga

SEQ ID NO: 9024 - RNA, 1134 nt, synthetic construct
  source 1..1134: mol_type = other RNA
atgaatcgctgggtgccgcatatatatcgacaaacaggacagcaaaaagatgtccccgacgcgatcatcaatgaggccctaagccaggctcaccgcgtgcagaataaagagctgcccgcaatcctcaccttacgccatttagcgttccagactgatgttagctacacgaatctgcacaaaattatctcacgagatgtcgatccttatagatcttttagcatcaagaaacggagcggcggttggagacggatcagtgtaccacagtttgaactccttaaggtgcagaagtatatagaccacttcgtattgtcaaggatagccgactccagttacagctatgcatttaaatctaagacctctatcgctgattgtgccaatcagcatttatcatgcagatggcttgtgaaaattgacctccgtcacttcttcgagtccttgagcgagatgcaggcttatagggtgtttaacgaggcaggctataataacctggtgtccttcgaactggctagactgtgcaccaaagtcctgccactgaccgccaagaagtactcgaaaccaaactggcggagcgtcgggcacatctccatgtacagcttttacgaggataaatataaccgcattggccatctaccgcagggggtgcctacatcccctcgattgtctaaccttattgttcgtggactggatagggaaatcgtggaagccaccgacgagtatgacctgacgtatactcggtatgccgacgatatgacattttcgactggctcctcatgtttctctaagaagaaggggagggacttcattaataagatttactcactgttgcccaagtacggcctcagacctcacccccaaaaggctcaaatcgttcctccaggcgctcggaagattgtcctggggcttctggtggacggagataaggtgaggctcacaaaacactttcgctctaaccttgaatgccatctgtactactgtgttaagaatcccattagtcacgcaactaaccgggggttcgcaagtgtcctcggactcaagaactacgttaatggtttgctggcctacgccaaccaggtggaccccgactacgtgaacaaaatctccagtgacgtaggtaaacctgattggccaatatga

SEQ ID NO: 9025 - RNA, 1119 nt, synthetic construct
  source 1..1119: mol_type = other RNA
atgaagcggtggtccccacacctgtacaagatctacggcaagaagaacaaaaaggatgacaaacttatcgagaatgctcttaatcaagcggacatattgcagaatcgcaacttaccagtggttctcaccctaggccacctggctaggcacacagatattccctaccagactctgcggaaactggtagcgaggcaagtcaatgcatataggatatttcgaattcggaagagatcctccggatatcgggtcatttgtgtgcctaacaaagacctgctaaaggtccagcggtggatcgacaaattcattctatctaacctggagtcatccccttattcttacgcatttgaagagggccagtcaattgttgattgcgcttctcagcatttgtcatgccgctggttgatcaaaatcgacctcaggaacttttttgaaagtcttagcgagatccaggtgtatcgagtgtttaaggttgcagggtataataatctggtcagttttgagatggctcgtctgtgcacgaaacagtcaaaaagcgggtggaagctctataacccctattggaagtcctacccgcgcgagaaaatccctttgtataatgccgatgtaatcggccatctgccacagggtgcccctacctcgccaaagctcagtaacctgatcatgaaaaacctcgacttcgaagtgaataacattgcacaaaaattctccttggtgtacactagatacgccgacgatatgatttttagtaccatagactctagcttcgactataagaaggccaagtgtttcatcaaggacatattcaacatccttcccaaacatggcttattaccgaatagacagaaaaccaagataatccctcccgggggaagaaagattgtgctgggtctgctcgtcgatagcgaaaaggtgcgtctgcccaaggatttccgcaacaaactcgaatgccactggtactactgtacaaaggacattacacagcacgccgaaaagagaggcttcaaaagctatctgagcatgcagtactacattaaagggctcatctcttttgccaggcaagtggatagcgatttcgttgagaaacttaagaagaagtacggagagatcaaatggctgtga

SEQ ID NO: 9026 - RNA, 1152 nt, synthetic construct
  source 1..1152: mol_type = other RNA
atgtcaatcggtccaccacacacttatgtgacagaaggcaggaagcggggagtgtcgaaccagattctgcgagattccctagagcaggcccggaaagtgcaggagaagggcctccccccggttctcacactgagacatctgtcctctctgacaaatgtcgagtacaaattattgcgcaaaatcgtagcacgccggcaggacgatgcatatagatcattccttatcaccaaacacagcggcggtaagcgcgtcatctgtgtgccccaccctagcctcaaaagagtgcagcgatggatcaatcagaagattctgatgaacgtgtccacgcattggaggtcatacgcttattccagaaattctagcatcgtcgactgcgcccagcaacactgcggatgcaactggctgattaagttggacattcgtcagttcttcgaatccattaccgaaatacaagtctaccaagtgtttcagaacttggggtaccagcctttagttagtttcgaactggcccgcatctgtactagaacttactctagttataacgagctggaattgaacaagaaatggctcagccagcccgaggcctatagcgtaattcccttttatcagtacaaataccttggtcatctccctcagggcgcacctacgagtcctatgttagcgaacctcgtctgcaagctgatggatgaggcgctgttcaatatcgctcacgatgagggtctggtgtacacacgctacgctgatgatatagtgctgagctctagtgacatacactttacccggaagaaggcccaatccgtaattagaaaggtgtcttcagtgttgactaagtatgagtttgaaccgcagcacaataaaacatccgtcgttccaccaggggccaggaaactggtcctgggcctcctagtgaacaattctactcccaggcttacccgaaccttcaagtgtaagctagaaaggcacatctgggccgttgggaagttcggacttgccaatcatgctcatcacatcggatttgacagcatatggggcttcgttcggcatctggaaggccttatttcatacgctatgatggtggagaggcgttttggggagagtatgcagatcgcatttcaaaaaaccctcgacgggaacggatggaataataactga

SEQ ID NO: 9027 - RNA, 1146 nt, synthetic construct
  source 1..1146: mol_type = other RNA
atgatgtggagttctcaacattacttggcccaggggcggcagctacaaataagtgaggccatactgcagacggcgatgaaacagtcacgtcggctcgttcagagaaggcctcagagtctgcccgtactgctgacactgggccacctggcaaagcgaaccggaattccgtactcttcccttagggcttatgtgggccggcaggcaattgagccttaccgccggttcagaatacgcaagcgcagtggggggatccgacgcatttgcgtgccagagcctgcgttatcggccatccagggctggatcgccgagaacatcttacagagggtggacgttcattccgctagccacgctttcaaaaaaggtgactctatcgctcggtgcgcagaggtgcatgcaggagccagatggctggtcaagatggatatcgccgatttctttggcagcatttcagagattgatgtctttcgagttttcaaatccctcgggtataactcattggtgtccttcgaactagccaggatctgtactgagttgcccctgaattccgccaaatatgccttttcaagctggcgcagaagccacgctcgaagaggaatccccgcttacaatcagcaatatgtcggacgccttccccaaggagccgctagctctccaatgctggcaaacctggcgatgattaacaccgatcagcgcctgacagaaatcgccaattcttttgggctcgaatacactcggtactccgacgacctgacctttagcactacaggcgactttgatcgcgcctccgcttacgccctcatagaacaagtggctaatgtgctcaagaggcggaatcttttccctaacaaggcaaagacaaaggtagtgcacccgggagcgcggagagttgttctgggcctcctagtagacggtgtcgcacctaggctgaccagagcgtttagggaccgactcagacagcacctttatttcctggagaaacgggggattgaagcccacgtgcaggctcgtgccttcgaatctgctggtggcctttacagacatttgaggggcctggtggattatgctaacagcattgactcggcatatgccgccccagtcctcgcacgtttggaagcattaccctggaggccagaggtgaagatctga

SEQ ID NO: 9028 - RNA, 1131 nt, synthetic construct
  source 1..1131: mol_type = other RNA
atgtggtcatcccaacactatttagctcaggggaaacaactgcaacataacaacgaagtgcttcaggaggccctgaagcagtcacgccgcctcgtacaacacaggccacagcccctgccggttatcttgactctgttccatttagccaagcggaccggagttccctactctgccctccacgcatacgtcggacgacaggcaatcgagccttaccggcgttttaggatcagaaagcggtccgggggaatccggcgcatttgcgtagcagagccccgattgggctctatacaagcctggattgccgagaatatactgcagagggcagaagttcacccagccagccacgctttcagaaagggcgactccatctccaggtgcgcggaagtacatgctggggccaggtggctagtcaaaatggacattgctgatttcttcggtagcatcagcgaaattgacgtgttccgagtgtttaaatcgctcgggtataatccactggtcagtttcgagcttgctcgaatttgtactgagttgcctgcaaagagcgcaaagtacctgctccctagctggcagctgcatcatacgcgtcggcagatacctggctatagtcagaagcacgtcggcagactcccgcagggtgcttctagttcgcccatgctggcgaacctatcaatgatcagaacagatcagacactctctgagattgctaactccttcggcctgaagtacacccggtactccgacgaccttaccttttctactgcaggtgatttcgataaagcctcagcctacgcccttatcgaacaggtcgccaatgtgctgaagagaaggaatctgtttcccaaccgcgcaaaaacaagtgtggtgcacccaggcgccaggagagttgtgctgggcttactcgtggatggagacgtcccccgcctgaccagaacatttcgcgatcgactccgccagcacctgtattatttggagaaacatgggattgtggcccatgtgcaggctcgggcttttgaatctgcaggaggtctgtatcgtcaccttcggggattgatcgactacgccaatagcgtggaccctgcttatgcggccccacttctcgccagactagaggcgctgccttggaggagctga

SEQ ID NO: 9029 - RNA, 1131 nt, synthetic construct
  source 1..1131: mol_type = other RNA
atgtggagttctcagccatatctggtgcgcgggcgcaaactgggtctgtctccggaactgttacaggaagcagtgaaacagagcaggagactggctcagaggcaccctcaacctctgccagttttgctgacactgtgccacttagcaaagaggaccggagtgccttatagctccctccgcgcctatgtaagccgtcaggccgttgagccctaccgccgttttagaatacggaaaagatccgggggcgtgaggagaatttgtgttccagaacccaccctgggcgcgatccaaacttggattgccgagcatattctgcagagagctcaggtgcacagagcctcccacgcctttaagaaaggcgactcaatagtgaggtgtgcagagcaacactcgggagcgcgctggcttgtgaagatggatatcgctgacttctttgggagcgtttccgaaatcgacgtgcatcgcgtcttcgtagggctggggtacaatcccctggtttcttttgagttggcccgaatctgcacagaactgccctcacggtctgataagtacgccctgagttcctggcaatgtcggtatgcccggcgcggcatccctgcatatggacagcaatacattggccgcctccctcagggtgctccctcaagtccgatgcttgccaatctgacaatggtcgccactgaccagaaactcgaggaaattgccctcaaggctggcctactctacacccggtattctgacgacttaacattcagtaccgccggggacttcgataaggggagggcatacggcctgatagaagaggtcgcggccgtgttgaaaagcagaggtctattcccaaaccgggccaagactgtgatcgtccacccaggcgctaggcgacttgtacttggactcctggtcgatggagacgcacccaggctgacccgagtgtttcgtgataggctcagacagcatctatactatcttgagaagctcggcatcgcagcgcatgtccaggctagagcattcgagagcgcaggcggattataccgacatctgcggggattgattgattacgctaactcagtggatcctacgtacgccggtcccttgcttgctcggttggaggccctcccatgggctcgatga

SEQ ID NO: 9030 - RNA, 1131 nt, synthetic construct
  source 1..1131: mol_type = other RNA
atgtggtcttctcagcactatctcgctcgcggtagagagatagggcggtcacctgagttgcttcaggaagctgttaagcaagcccgcagactcgtgcataggcacccacaagggatacccgtacttttaacactctgccacctcgcaaaaaggaccggcgtgccatactcaagtttgagatcctacgttggccgacaggctattgaaccttaccgcagatttcggataaggaagaggtccggaggggtcagaaggatctgtgtgccggaacccaacctgggcgctgttcaggcctggattgctgaacacatcttacagcgcgtcgatgtccaccaggcgagccatgcctttaagaagggcaattccatcgtacgatgcgctgagcaacatgtcggtgccaggtggctgctgaagatggacattgcggatttcttcggtagtgttagcgaaattgacgtgtatcgggtgtttgtggccctcggctacaattccctggtgtccttcgagcttgcccggatctgtaccgagcttccagccgcctctgccaaatatgccctgcgctcttggaattgccatcgatttagaagtgggattacgcattatcagcagaaatacgtcggcagactgccccaaggcgcaccaagctcgcccatgctggctaacctggccatgttgaaaacagaccagttgatagcagaactggcgtctaaagaggggctgatctatacccgctattcagacgacctcaccttcagcactagtggtgactttgatcgccggcgagcaaataagtttatcgaggaggtggctgctattctaaaggcacgtggactcttccccaaccgcgcaaaaacagtggtagtgcacccaggagccagaaaagtcgtgttagggcttctagtggatggagacgcgcctcggctcactaggcagttccgtgataagatccggcagcacctgtactacctggagaagaacggaatcaaggctcacgttgaagcccgtgcattcgagtcaatcggcggcatgtacaggtatctgcgaggactgattgattacgccaaaagcatcgacagcgcatacgcagccccgttgctgaggagactagaagccctgccttggcctcggtga

SEQ ID NO: 9031 - RNA, 1137 nt, synthetic construct
  source 1..1137: mol_type = other RNA
atgtggtcacccaggcattacttagaacaaggcagacttcaaaaacagccctcagccgtgctggcagtagcagttgagcagataaaacgcctgcaggctcacaatcctcccctcccgccaatactgaccttaaagcatttggctaaagttacgaaggtgaggaaagccaaacttgagtgcttcgttgagcggatcgcccccgaagtgagctacaaacgattcaacatcaagaagcggacgtcagggtacagaaaaatttcaatccctgagcctgacttaatgaaggtgcaggcatggatctctcaaaatatcctgcagctgccctccgtgcactctgctagcaaggcatttcggaagcacgattccatcttgaaatgtgctgaggtgcattgtggggccaagtggatgattaagattgatattgccgacttctttggcagtataactgaaatccaggcctatcgtgtctttaaggatctgggctacaacccattgattagctttcacatggcccgaatttgcacagacctgatcccaaagtctcagaagtataaaatgcaagcctggcaaatctttgagaacaaatactccataaccgaataccacaataagaacaactttggacgacttccgcagggcgctcccaccagtccacttctctccaacctcgtgatgttgcgcctagacaaaaccattgctgaactcgccgaaaaacaggggctgaggtacaccaggtatagtgatgacattactttcagtacaaagggcgattatagccgcaagcaggcggtcgagttcgtagcgtctgtgagcgcactgctcaaggcagacggactgtatctcaatcggaagaaaacagtcatcgtgccacctggaagccgcaagatagtcttgggtctgctcactgacagagaataccctaacctgaccaaggaattcaaagagaagctacgtcagcatctgtactacattaaaacactgggggttgaggcgcatatgcggaggagagagttcgattccgtcggtggactttatagacacatcctgggtctgatcaattacgctaatctagtggaccccacttatgcctataagatgaagcagcagttcaaatcgctcccatggcctggccagtga

SEQ ID NO: 9032 - RNA, 1152 nt, synthetic construct
  source 1..1152: mol_type = other RNA
atgccttggtccccccaacgctttctcgcagagggacttcgaagaggtagagatcacaaagccctgatggaggccattcgccagatttctcggatgcagcggcaaaggcccgtgcttccgacgctgctgaccttggggcatctcgcgtgcagaacgcagatcagttacgaatacctgcgcgacatcattgcccgtaatacaggtcatcctccctataggtccttcagaatcactaagcgcagcggaggtctgagggttatttccgtccctagccctcaactgatgaaagtgcagtcatggctaaccacgcacgtactgaacaaggtccagccgcatccaacctcctacgctttctctccaggcagctcaattgcagattgtgcccggcagcacgctggcgctacttggttggtgaaaattgacatagccgatttctttggcagcatcacagaaatccaggtgtttcgtgtattccagatgctggggtataacaagctagtcagctttgaactagccaggttatgcactatcctccccatagtttcagccaagcacaaattaaagccatggaagactaaattccccagaaaacccatcgattattactcggaacagctcatcgggaggttgccacagggggcacctaccagtcccatgctcgctaacttggcgatgagagacatcgacgaagagctgcagcatttggctgactctctcaagttagtgtacacacgatattccgatgacatcaccttcagcaccaagggcaaattcagtcggacagcggcatccgccgtgattaagcagactaccgctattctgaagcgcagaggactgtttccaaaccgtgcgaaaaccgctgttatacaccctggggcccgcaaaattgtgctggggcttctggtggaccaagagcaaccacgactgtcacgcaagtttcgggataggctgcggcagcacctctactaccttgagacaaggggtataactgcacacctggaggccagaggcttcgattctgctggcggcctctataggcatctgcggggattgatcgactatgccaatatggtcgaccagccgtacgcacagaagcaactgctccgattacaggcccttccttggggatctacacttaatgcaagtagctga

SEQ ID NO: 9033 - RNA, 1146 nt, synthetic construct
  source 1..1146: mol_type = other RNA
atgctctggtcgcctcaacgttttctcgaagaaggcttgttaagagatcgggactactacgcgctccaggaagcgatcaagcagataactcgtatgagaagacgcgggcctggattgccagtggtactcaccctaggccacctggcgaataggacacgagtgccacatgagcacctccgtgatctagtggctcggaataccggccagcctgcctatagaacatttaggatttccaagcggtctggaggatctcgggtgatctctgtgccaggcccgcagttgaagaaagtgcaaacatggcttacccaacacgtcctgagaaaagtaaagccccatatcgcaagtcacgccttcagccccggtagcagtatcgctgattgtgcaagacaacacgccggcgctcgctggctcgttaaggtcgatatcgcggactttttcggtagcgtcaccgagattcaggtattccacgtgttcaggaggttaggatatagcgacctggtttccttcgagctggcccgactatgcaccacggtgccatttgccagcgctaaacacagcatgaaggcttggcaggtccgcttccctcgaagacgaatccacttctatagtgagaagctgatggggcggcttcctcagggagctcctacgtcacccatgcttgcaaacctggttatgagggaggccgacgaagagttgcagaacctcgccgactcttacggcctggtatacactcgatattctgacgacattaccttttccactcgcggcgaattttcaagggatcaggcagtcacagtggttaggcagtcagcaactatactgaaacggcggggtctgttccccaaccgcgccaaaactgccattgtgcatcccggagcccgccgtattgtcctggggttgcttgttgactccgatcaacccagactgagcagggcattccgcgataggcttcgccaacatctgtactatctggagacacggggcataatggcccatgtggaggctagggaatttgatagtgctggggggttatacagacatctccgggggcttatcgactatgccaatatggtggaccagccatacgcacagcagcagctgtccagactgctggccctgccgtggtcctcagtcgctcaggtgtga

SEQ ID NO: 9034 - RNA, 1185 nt, synthetic construct
  source 1..1185: mol_type = other RNA
atgtggagctctcagcgatttatcaggcaaggcctggccagagggattagccagcagattctggatgctgcagtagagcaggttgaggctctcgccaagggacccatccgcctaccagcaattctcaccctgggtcacctggcccagagaacggatgtctcatatatcagtttgcggaggctggttgccgacgagtaccgacacccttacaggacctttaccattctgaagagaaaagctaacaagagtggctatcgcgggaggcgcgagatttctgtcccaactccagagttgctgaccgtccaacgctggctgtcagctcacgttctccggcaagtacggcctcaccctgcctcccatgcgttttctcctggaggtagcatagtgaaatgcgcctcagagcattgcaatgccaaatggctgatcaagctggacatcgctgatttcttcggcagcatatctgagatccagatttatcacgctttccgaaaattgggctaccagcccctgatttcgttcgagctcgcacgtttgtgtacagataggcctcgcaaaaatgttcccccagcctttgtaagaggaagaaatcggatgccgtccgggaaggtcaggtttaaggctcgtgtgatcgaccaatatgaccacaggtatataggctacctaccccagggtgcacccacatcccctatgctcgccaacttggtcatgcgagacatcgacgtgcagcttgctgccatcgcgagcagatacgaactgcggtacacacggtatagtgacgatattaatttcagcaccactgaaaacttctcacgcgacaaagcccatgaactcatccagcgagtggctaaatgcctgattaagaaggggcttggtctgaacaagtccaagacaacgatcgcaccacccggggccaagaagctagtgttaggactgcttgtggatactgcaaagccaagactctgtcatcagttcaaagacaggttaaggcagcatatctactacattgaacggtttggcatagaagcgcacgcacaacggcgtgccttcgatactaccgccggatttatccgccacataaaaggccttctcgattttgcctacatggtggaaccggcttatgcgctggacttaacagagagacttcaggtggcagtgttcagttgggacgattccttcgtgatctga

SEQ ID NO: 9035 - RNA, 1134 nt, synthetic construct
  source 1..1134: mol_type = other RNA
atggacgaacctaccatccgagctgttattgcccaggtgaaagccaccgtggcacctccgttgcgactgccagctattctgacactgggccacttggcccaaagaagcggcgtctcctacgatgcactccggagactggtggcgggaactcagcatcactcttacaggcagttcaagattaggaagaagtctgaacaggcccggaaaaggcgatcctttcgcattatccacataccatgccccccactctttgaagtccagcgatggatatccacctacgtactgagagagttacccgtacatccttctagtcacgcctttagcccaggaagctccatcgtgaaatgtgcagagatccactgtaaggcacgctggctggtgaaactggacgtgcacgacttcttctcgagcgtgagcgagattcaggtttacagggtttttaggagccttaattatggggctcttatctctttcgagatggcccgtttgtgtacctatcggcctaaccgcgagacattcaagctggcactccctggaagattcagagtcccgtcaggtattgtcaggcacccaggccggggcatcaagtcctactcacacaaatacgtgggctatctgccccaaggtgcccccacgtccccaatgctcgctaatttagcaatgaaggacatagatgtggctatttctaagatcgccagcgatcacggattgcgctacactcgctactcagatgatctgactttttcaaccgagggggatttttctagagggaaggccctgaacgtaatccaagaagtggcgaagaaacttatcgttcatggcttaatgcttaataatcccaagacaacagtcgcgcctcctagtgctcggaagatagtactgggtctacttgtggacggagccgatccccgtctcatgaagagtttcaaagacaaagtccgccagcatctgtatttctgcgggaaatatggggttgaggagcatgctgcccgtaggaaatttgacagtgtcggcggcttcgtgagacatctgcggggactcatcgactttggtaacatggtggaaccctgctgggcagctgatatgtatgaccagatgtcgaaggtgctcgggtccaacaaattcgacctatga

SEQ ID NO: 9036 - RNA, 1191 nt, synthetic construct
  source 1..1191: mol_type = other RNA
atgtggtcctcccagcactacaggatgaatgccaaagagcatggcctctctaaggagacaatcgacgccgcaattgcccagaccatcgccgtcgtcgaaggccctcataagctcccagccatactgaccctgggacatctggctctccgtactggtgtagactatgtggcattgcgtggcctgctgacaggaagctgttgccatcaataccggcatttcaagattagaaaacgcgtaaatggccccgagaagacgattagatatcgcaaaatcagcgtgccaaccccagatttatacagagtgcaacggtggatcgctgtccacgtgttacggtccgtgcctgtgcatggggcaagtcacgccttctctcccgggaatagtatcgtcaaatgtgcggagaagcactgtggagccaaatggatggtgaagctggacatcttggacttcttcggcagcatcagcgaaatgcaggcctacagggtgttccacagtctgggatatcaacccctggtatcttttgagatggctagattatgcacttacaggcccaagcacgacgtgcctccgaattttgtgctgccacggtatcagattccttccggccgcgtgaaaaagcgcaacagagttatcgaatcgtacaaccacccatacatggggattctaccgcagggtgcaccaacatctcccatgcttgctaatctcgccatgcgagatatcgatgaaaaaatcctgtccattgccaacaggttcggtctgcagtataccagatatagtgacgaccttaccttttcaacacgaaacgatttcgacagacagcaggcttctctcttgattcaggagattgctaacctactgataaagcgtggccttatgctgaataggcagaaaactgccattataccccctggagcgaggaagatcgtgctcgggctgctggttgatggggatcttccccggttgtcacgaccctttaaggatcgcatacggcaacacctttactatttggagaaattcggacctgaccagcacgttagcaagcgatgctttgatagcgttgggggtttctttcgccatctaaagggcctcatcgactttgctaacatgattgaaccacagtacgcgcgggagtcatacgtcaggctctgcgcagttgtctcagatgcacaaatcgaatcccctcagaaccagtga

SEQ ID NO: 9037 - RNA, 1146 nt, synthetic construct
  source 1..1146: mol_type = other RNA
atgtggtcccctcagcattacagagagcgcggtaggcagctgggagcagatgatgacgtgattgaaagagccgctgccgccattgaatctttcattgacaagcacccaaaccgcccccctctgctcaccatcggacatttggcccgcaggtcaggcgtgagctggttccatctgcgtcaattcgtggaaggcagtaggagtgggatttacaggtacttccggattcgcaaacggagtgggggccaccgtcagatcagcgtcccagatcccaaacttatgatagtgcagcgatggatagcccggcatatactggcagcaatccccgttcaccgcgctagcttcgctttcgctcctcagtcatctatcgtaggttgcgcgagacagcattgccgggctaggtggctgatcaaactggacatttctggattttttggctccatctcagagatccaagtctacagggtgtttctgggggctggttatgcacccctggtagccttcgagcttgctaggctgtgtacccacgcgccatccggaagcaagcgatatgcaaaaaggacatggacagccgcactgaccgaacgtgcgattagaccctacacacagccccacattgggtatctgccgcaaggcgcccctactagtccaatgctctccaacttggtgatgcgcgagacagacaaacttgtcgcggctgtggctaccaaggccggagtgacatatacccgatacagcgatgatatgactttctcgaccatcggaagctttgatcgggaacgggccttggccgtcatacgggaagtcaccgccattctgagacgagctggcctctctgtgaatgagaagaagacgaagatcgtcccccctggcgcacgaaagcttgttttgggcctcttagttgacggggccgagccgagattaactcgcacgtttcgggacagactcaggcaacatctccactatttacagaaactaggacctgaggcccacagggcagctagagggttcgacactgtatcagggactcaccgccacgtgagaggcctgatcgactttgcgcagtctgtggacccagccctagccgagaagatgcgtgagaagtttgatgccgttgcatggtccctcgatcggccaggtgcagaatga

SEQ ID NO: 9038 - RNA, 1146 nt, synthetic construct
  source 1..1146: mol_type = other RNA
atgtggtccccacaacattttcgggaaactggtcgacagcttggggccgatcatgacctcaccgagcgggcagccaccgctatcgagacatttaccgatcgtcacccaaccctaccccccatcctgacacttggccacctggcccatcgtactggcgtgtcctggttccagctccggttgattgtggagtcggggaggtggacaaactataccttcttccgaatcaggaagcgtagcggcggacataggcaaatcagcgttcccgacacaaagctgatgattgtgcagagatggatcgccggtcacatcctggcagccttacccgtgcacagagcctctttcgcatttgctcctaaatcctccattgtgggatgtgctgcacagcacactggtgctcggtggctgataaaattggacatcgctgggtttttcggcgcagtatctgagatccaggtttacagggtttttcttgatgctggctatgctccactggttgcctttgagctcgcgaggctatgcacacatgccccgagcggctcaaaacgctatggccgccaggagtggttagcccatgccacccaccgccctatatatgcataccgccacccccatattggatatttgcctcaaggggcccctacaagtcccatgttaagtaatctcgtgatgaggggtcctgaccgcaagatcgcaactctggctaccaaagccggactgacctacacccggtacagtgatgacataactttcagcactacaggggtgtttgatagagcgaaagcaatggccgtggtgagagagactactgccattctgagagctacgggactcgaagtgaacggacgcaagacccgcattgtcccacctggagccaggaaggtggttctggggcttctggtcgacggcaaggtcccacagctgacgcgagagttccgggatagagtccgacagcatctccactacctggaaaccagaggtccagaagctcacagggctgcgcggaacttcgacacggtagcagggctttacaggcacgtacggggcctgattgatttcgcgaattctgtcgacgcagtctttgccgatcgaatgttgacaaagttcgacgccgtgagatggtcactcgactcaccggaagatacatga

SEQ ID NO: 9039 - RNA, 1155 nt, synthetic construct
  source 1..1155: mol_type = other RNA
atgtggtccccgcaacattaccacgaagcagggcagcagctcggccttgacgacgctatggtgcagagagccgctactgctatcgaggactttctagaccggcatcctaagttaccccccatcctcaccctgaaacatctcgcatctagaaccggtatctcttggtaccatctccggaagatggtgcttggcagccgggcaagtgattacaccttcttcaagatccgcaagcgatcgggtggacaccgtcagatttccgtgcccgatgcgaaactgatggccgttcaacggtggattgccgcgcacattctgagtgaactcccagtccaccgggcaagctttgcttttgcaccaaagtcttccataaggagatgtgccttacagcattgcggagctcgatggttgatcaaaatggacatttctgggttctttgggtctatctccgagcttaaggtgtatcgggtattcctggaggcaggctatagcccgctggttgccctggagctgactaggctctgcacacacgcccctagcggatcaaaacggtatgaccgccccgaatggttggcccacgcgacaaggcgaaagattcctgcctatcgccagtttcacatcggttatttgcctcaaggcgctccaacttccccaatgttgagcaacctggttatgagagagctggataaagaaattgcagctttagctgctagggccggcgtcacttacaccagatacagcgatgatatcacgtttagtacaaacggggattttgaccgcgccagagccatgctgctcgttcgacaggtgacagccaggctccgccgagtaggcctttccgtcaatggaaggaagacgtgtatcgtgccccccggagcccgtaaagtagtgctgggacttctggtggatggcgccgaacctaggctgacccgggagttccgcgaccacctacgtcagcatttgtactacttagagaaagtcggtccggaggcacaccgcgatgctagaaagttcgacaccgtctcaggcatgcacaggcatattagggggctgatagactatgcgaagtcaatagatgaggggttcgccgctaaaatgagactgaagttcgacagcgtgccatggagtcctgatgtggcaccaccctcagaagacgcctga

SEQ ID NO: 9040 - RNA, 1146 nt, synthetic construct
  source 1..1146: mol_type = other RNA
atgtggtcgccccagcactacagggagataggcgagaaaagcggagccgaccccgtggtgactgacagagcagtcgcggccatcgacgcgtttatggagaagcagcctaagctgcccgctctgctgacattaggccacttggcccaacgtacaggcgtgagttggttccacctgcgccagtatgttgaaggacagagatccaccgaatacacctacttccacatacgaaaaaggagtggtggacacagacttatttccgtcccaggtcagcaactgatgatggtgcagcgctggatcgcagcacatattctcgccgagctgccagtgcatcgagcaagcttcgctttcgctcctaagtcttcaatcgtcaggtgtgccaagcagcattgcggggctagatggctgatcaagatggatatatccgggtttttcggctcaatcagcgagattcaggtctatcgggtgtttctccaggctgggtatgctcccctggtggccttcgaactcgcaaggctgtgcacccatgcccccaatggatcaaagaggtacgctcgggcagagtggttggcgcctactacctggcacccgattgttgcctataggcagccaatcctaggctatctccctcaaggagcgcctacctctccaatgcttagtaacctcgtaatgcgagatattgataagcagatcgctgcactcgccaacgctattgggttgacgtacacacggtactctgacgacattacatttagcactatgggtgaattcaacagagagagagccattcgggtggtaaggaagactacagccattttgcgacggataggactgaaagtaaacgacaataagaccagaatcatccccccgggtgcccgcaaacttgttctaggcctgttagtggatggcatcaaacccaaactgacgcggggctttcgtgatgggctgcgccaacacttatattaccttgaaaagcttggcccagaggctcacaggaaagcccgtaattttgacactgttaccgggctgtaccgccatgtccgggggatgatcgactatgccaaatctgtggacgagccattctttgatgaaatgcgcacaaagttcgaagccgtggcatggagcctcgattcccctgcagacgattga

SEQ ID NO: 9041 - RNA, 1149 nt, synthetic construct
  source 1..1149: mol_type = other RNA
atgtggagcccccagcattaccgcgacaagggcattgagcaaggtcacgaagcagaactggtcagcagggccgcagccgctatagactccttcgtcgacgctcacccacagctgcccccgatcttgaccttgggccatctggcgagacggagcgatattagttattttcagttgcggcgactggccgaaggccctcgatggaatcactacacttttttccggatcagaaagcgctccgggggaagaaggctgatatctgttccagagcaccggctgatgattgtccaaaggtggatcgccgagcatgtgttgaagaaactgccagtgcatagggccagctcagccttcgcggatggtgcctctattgtgaaatgcgctaaacagcattgccgcgctagatggttaatcaagctagatatctctggctttttcggaagtatctccgagattcagatatatcgggtattcctcgccgccggatatgctccccttgtcgcgtttgagctggctcgtctgtgtacgcacgccccttccggttcagctcgatatgacagggcccagtggcgctctagagataactggcagctccccattatgcggtacagacagccacacattgggttcctcccgcaaggggcacctaccagcccaatgctaagtaacctcgttatggtgggaatggacaagctgcttgcagcactcgcaactgccgaaggattgacctacacaaggtactcagacgacatcactttttctaccacaggagcctacgaccgccagagagcgacagaagtgatcagaagtaccagcaggctcttacggaccatcggcctcaaagtcaatgatcaaaagacaagagttgtgccccctggcgctcggaaaattgtgcttgggctgctggtagataatcccgagcctcgactgtccagagactttcgcgaccgactgcgccagcacttacactatatagagaaattcggcccagaagcacatcgtgccgctcgtgggtttgatacggtgtcagggctttataggcacgtgcggggcctggttgatttcgcaaagtccgtggaccgcaactacgcctcggcaatgagggatcgtcttgatgctatcgcctggagccccgacttccctgtagagacttga

SEQ ID NO: 9042 - RNA, 1140 nt, synthetic construct
  source 1..1140: mol_type = other RNA
atgtggagccctcagcgataccgggagttggggctggaaaaaggcgtagatcccgaagttgtggatcgatccgctgaggctataagtgactttctggactcctatgctacgctgccacctatcttgactcttggacacctcgctgcaagaaccggaattccttactacaagctccgcaaaatagtggtaggacagcggacattagaataccagtacttctggattagaaagaggagtggtgggaggagacttatctccgtgcccgagcctgacttgatgcacattcaacgctggatcgccggccaccttttagcccggcaacccgtgcatcgtgcatccgcagccttccgcccaaaggcgagtattagcaaatgtgcccggcagcactgtgaggccaggtggttgatcaagctcgatatctctggctttttcggctcaatttccgagatccaggtctacagagtcttccgaaggatggggtacgcgcccctagtcgcgttcgagctggctagactctgcactcatgcacccgcaaactcaaaacgttatcagcaagacagcaagtggctggttcggaagtgcgagtctaggaaattctacacccagtggggaataggctatctgccccagggtgccccgagttctccaatgctgtcaaaccttatcatggtggaggctgataagaagatcgcaaagctcgccacaaaccagggactgacatatacaaggtatagcgacgacattacttttagcaccaccagggggtatgatagggaacgcgccaaaaaaatcgtccgggacacaaccgcgattctgcggcgaatgggcctggcagtcaatgataaaaagacgagaattataccaccgggtggccgcaagattgtgctgggactacttgtggatgggtcgcatcctaaattaactcgtgatttcagagacaggctgcgccagcacctgtattacctgcaaaagtttggcccagaagctcaccagctcgaaagaggcttcgacaccgtttctgggctctatcgacatgtgcggggtctgatcgattttgctaagagcatcgacgccaattacgccgcccgcgtgcagaagaaatttgaggccatcaaatggtctttggatttttcagactga

SEQ ID NO: 9043 - RNA, 1131 nt, synthetic construct
  source 1..1131: mol_type = other RNA
atgtggtcccctcagcgctacatcgaacacggcctgaccgagggctatgacgcagaactggttagaagcgcggccggtcagatagacgattttttggaaaagcaccccgatctaccaccgatcttaactctcggccacttaggaaaacggacctccctcccatatgcccggttgcgtaagctggtgtcaggactgcgatctaatgattacagctactttagaatcaggaagcggagtgggggtcaccgccagatttctgtccctgaagccgacttgatgtggctgcaaaggtgggtgtcagctcatatactttccaagctgaaacctcatagagcaagctatgcattcgctcccaaggccagtatcgtctcatgtgcgaaagcccactgcgaggccaggtggttaattaagcttgatatttctgggttcttcggctctgtgtcagagattcaagtgtacagagtctttctggccgctggatacgcccctatggtggcttttcagttggctcggctgactacccacgcaccttatttcagtatgaggtacaaacgtcccgagtggcgcgcagttccggatagggctcggttaccctacttgtttagaacacgtctgttgggatttctaccacaaggagccccttcctctccaatgctctccaacctcgtgatgaggcagatcgatgccaaactgcacgccatcgcgctgagtgctggactgacatatactaggtattccgacgatattaccttcagcacaagagggggtttcgacagagaacgcgcacgagcagttgtgagcaagacgcggcgcattctagccaaggaggggttcaccctgaacagcaaaaagacgaggatagtgcccccaggcgggcggaaactcgtacttggcctgctcgtcgatggcagtgagccaaaccttacccgcgccttcaaggactccctgagacagcatctccattacgtctgcacttttggccccgacgcgcatgccaaacgacgaggtttcgacacagtttcgagcctttaccgccacctgcttgggctcatcaattatgcaaaaagcgtggacgaggactacgctctgcgggctaggacaaagctcaattctgtacagtggtcactgtga

SEQ ID NO: 9044 - RNA, 1032 nt, synthetic construct
  source 1..1032: mol_type = other RNA
atgaggctcgccagcgccctgccgctttttacctacggagaggtgaaggtgactatgagctggtcctcacagcattatatcacaaagggcctggcctctggcagagatagggagttgctggagactgcagcgaaagaaatagagcgggcagtctactcgaacccgactccactcccagccgtcataacacttaatcacttggctaggcgctgcggtgtgtcatataactctcttagagccatcgtcgcacgcaatggcaaacagtacagctacttccgaatacgcaaaaggtctggaggacatagactgataagcgtgcccgaggctgaattgttgcgggtgcagaaatggatccacacatacatcctgagccaggcaaaagcccacgaggcgtgtttttccttcctgcgtaagaagagtatccgggattgcgccgctgttcacagaggggctacgtgggtcatcaagattgacatttctgccttcttcggcagtatcagtgaacgagatgcctttgatattttcaagggttttgggtacaatccccttgtggcttttgagatggcacgcattgtaaccgacgccccactatatagtaagagataccaagccgtgccctggaaacgcgatcctggggagtatgaaattgcacaatatcggtccgctaaggtcgggtatctgccccagggagcacctactagccccctgctctcaaatctgttcatgatcaacatcgaccagcaactgcaggccctcgcagagcacaggaaactcagatactccagatattctgacgatatgacgttttccacccggggtgacttctcccgggaacgagctaaagaactaattcatgctgtggcggccatcattagggttaagggcttacgtattaacaccgctaagacaagaatcattccacctgacgggcgcaaggttgtgctgggattactcgtagacggcaccgcgcctcgtctgtcacgaaagctgcgggacaacttaaggatgcatatcttccacatgaggaaatga

SEQ ID NO: 9045 - RNA, 1140 nt, synthetic construct
  source 1..1140: mol_type = other RNA
atggcctggagctcccagagatacatatcagccgggctaaagttggggttttcccctgacgtactcaacatcgcttctgagcaacttgaacaacacatcactggactgcctcccttcccagcgttgctcactctcaaccatctggctaagcggaccaacgtgccttacttggagctacggcctctggtcaggggccaaaagccagacgcctaccaccacttctatatccggaagaaatccggaggacaccgccgcatttccgtcccagaacccacactgatgcggatacagcagtggatcgcgacacacattcttaatattgcccctgttcatcaggccagttatgcttttagccccggaagcagcatctacaagtgcgcatatcagcatcggaaagcaagatggctcatcaaaatggatgtcactgggttctttggtagtatctctgaaatccaggtgtatcgagtgttccgcagtttcgggtaccagcctctcatcgcatttgagcttgctcgactcacaacatatgctcccatctcctcaccaaggtaccttctgaaggaatggcaggccaggactcactctagcccaatagatgactatcatcgggccaatattggctatctgccgcaaggtgctccgacctcgcccatgttatcaaatttagttatgcgctcagtggacgagcgtattgccaagattgccgagaagtacgggttgcgatacaccaggtacagtgatgatataaccttcagcacgactgcagagttcgacagaaagagggctagagatgtgattcgcagcgtgacgaaaatgctgacccgagtaggcctgcacgtcaacgcgggcaaaacagtggttgtgcccccaggaggcagaaaggtcgttcttggattactggtggacggtcccgaaccaaaactgtctcgtgatttccggtccaatctgcgccagcacatctttttcctcgagtcgttggggccgatggagcatgcaaaagcccgtggctttgaaaccatctctggcatgtataggcatattagaggcctgattgactttgccaatatggtggatgcagactacgccgcagagctgctgtctaggttccagagagtaaactggccttttgctataccctga

SEQ ID NO: 9046 - RNA, 1152 nt, synthetic construct
  source 1..1152: mol_type = other RNA
atgtggtcatctcatatttataaaaagcaggggctaaccaaaggaatctctccatacctgttgacggaggctattacccagattgagttactggtttacagccagaataacctcccttctatcctttctctctcccatctggctaagagaacaggcgttgaatataagctgctccggtgctacgtgatgcggacaggggccacttccgtggagccttttgaaatctacaagaagttcagcatccgtaaaaggagcggcaataggcgctttattcacatccctacaccaaagctaatgcggactcagcgatggatttctgagcatatactggctaagctccctgtacacgccgccagccaagcctttaacaaaggtaactccatcaaaaaatgcgcatcgcgccactgcggagcgaaatggctaatcaagatcgacatagaggatttcttcagtagcatttccgagattcaggtgtatcgattcttcagatcactgaattatcaacctcttgtggcatttgaattggctcgcctctgtacagttggcacccacaacaagtccccccgcggagtctttagcaattggaaaatcattaaccccaacaatgccatcccttcctacaaccaaaaactgctcgggtatttgccacagggagcgcccacatcgccacttctggctaatctgataatgaatgactgtgacaaagctctgcaaacaatcgcgagaaagaacgatttgatctacacgaggtattcagatgacctgaccttcagcactaccgacaaaaaatttgataggagtaaggctaagaccttcatcttcgacgcatacaagattctgagtaagcacggtttcagaccccagtttcggaagaccactatagtcccacccgggtctaagaaaatcgtgttaggcctgaacgtcgacagtgaacagccgcggctggccaaacacactcgtgattccataagacagcacctttactacttagaaaaaatggatccagtgcagcatgcatttaatcgacagtttgattcagtatggggtcttaagatgcatctcaggggcctgattgactatgccaatatggtcgagcccgacttcgccaaggcatgtttggccaagttcaacgccattgagtggccggtgtga

SEQ ID NO: 9047 - RNA, 1152 nt, synthetic construct
  source 1..1152: mol_type = other RNA
atgtggagttcgcagtcatataagaagcagggcttggccaacggtctgtccgtgccactgcttaatgaggccatagcacagtcagagcttctgctctactctgaatacactttgccctctatccttagcctgaagcatctggctaaacgcacgagtgttgagtacgagtggctacgatcctttgtcatccgtacagctataaatggtgtcgagaacttcgagatctacaaaaagttctccatcaggaaacgcagtggcgggcggaggttcattcacgtgcccagccccaagctgatgcacacgcaaagatggatctctgaacacatcctgaaggcactacccgtgcatccagcttcccacgctttccggaaagggaattcaattaaaaaatgtgctctcaggcattgtggagccaaatggttaatcaagattgacatcgcagacttcttctcgtcagtgtccgaaattcaggtgtatcggatctttcgttcactgaattatcaacctctcgtcgcctttgaactcacacgactgtgcacagtcggcacccctggtttgtccccacgagctaatttcccgcactggaagaccaaggaatttaacgaagcaataccactctaccaccagacaatgctcgggtacctgccccaaggagcacctacctctccatttttagccaatctggttatgaagaactgcgataagtctctcaacgcactggcccagaaaaacgggctcgtgtatactcggtatagtgacgatctgagctttagtaccagagacaaagatttcggcaggagcagagcgaaacactttgttttcgaggcctacaaaattatctctcaaagcggcttccgcccccagttcagaaagactaccattgtgcctcccgggggaaagaagataatccttggactaaatgttgaatccgagtttcctcgcttagctaagagcaccagagatactattcggcagcacctgtacttcttggagaaagtcggacctgtgcagcatgcctttaaccgcaagtttgacagcgtatggggccttaagtcccatgtgaggggcttgatcgattatgcgaacatgattgaaccggacttcgccgaggtgagcctggagaaatttcaggccattgagtggccagtatga

SEQ ID NO: 9048 - RNA, 1152 nt, synthetic construct
  source 1..1152: mol_type = other RNA
atgtggtcttcacagacctataaacagcagggattggccaaggggttgtctgaatcgctactgactcaggccatctcccagagcgagctgttaatctacagcgagtacaatactccgagtatcctctctctgaaccacctggcaaagcggacaggtatagagtatgagtggctgcgctcttttgtcatgcgtaaggcaattaagggagtggaaaacttcgagttctacaacaagttctccatcagaaaaagatcaggcgggcggcggtttattcacgtgcctacaccaaagcttatgcgaacacagaggtggattaatgaacatatccttgcgaaactgcctgttcaccctgcctcccaggccttcaggaaggggaactcaataaaaaagtgcgccctgaggcattgtggcgctaagtggattatcaagattgacatcgcggatttctttagcagcgtctccgagatccaggtgtatcgaatttttcgcactctcggataccagcccttggtggcattcgaactggccagactctgcacgatcgatacgtattgcgaatctcccaggagaatctttccccagtggagaagcaagaaatccaacaaggctatacctagttacgatcaggagctccttggttatcttccacaaggggcgcctacatcccctaccttggccaatctgataatgaaggattgtgacaccgccctgcagacacttgctcgcaataatggattaatttatacccggtacagtgacgatctcgtgttttctaccaaggacaagaactttggccggtaccgcgctaaacaattcattttcgagtcctacaagattatcagcaaggcaggcttccgcccccaattaaggaaaactactattgtgccccccggcagcaaaaagatagtcctgggattgaatgttgagtcggaagtgccgagactaatgaaatgtaccagggataaaattcggcaacatctgtttttcctggaaaaagtaggtccagtacaacacgcttttaatcgacagtttgacagtgtgtgggggctcaaaatgtacgtccgtggcctgatcgactatgccaacatgatcgagccagaattctcaaaagcttgcctcgagaaattcaacgcaatcgagtggccagtttga

SEQ ID NO: 9049 - RNA, 1362 nt, synthetic construct
  source 1..1362: mol_type = other RNA
atgacttccgcgagtgaaaggttcaagtttgcaccaagcggcgctaaagaggaccgctacactaccgtcagatggatgctgggctatggttttaggggtctgacagaaaagcctacccatggatggcggaggcgtacactaccgcacccagcatacgcaagcggccaccaaagtgctccctctcccgctgctacccaccggtcatccttcatgtggtcttctcagtcatataagaaccaggggctcgctaaaggggttagtgagactctgctggataatgccattgtacaatccgagttactcatctacagtgaactttcactgccttcaattctttcccttaatcatctggccaagaggacctgcgtagagtacgagtggctgcgggggtttgtgatgcgcagggctatgaacggtgtggaggacttcgaatcctacaaaaagttttctatccgtaaacgcagcggaggaagacgcttcatccacgtgcctacaccgaagcttatgcatacgcagcgatggataaatgagcatattctgaagggggtgcctgtgcatcctgcatctcaggccttcggaaagggcagttctataaagaaatgtgccagtcgacattgcggtgcgaagtggttgattaagatcgacatagccgacttctttagcagcgtttcggagatccaggtctttcggatcttcaggtcgttcggctaccagccgctcgtagccttcgagctggctcgtttgtgcaccgtcggaacctattgggaaagcccccgaggatctctccctcagtggaaaacacggcaccccaataaatccatcccactgtatgatcaaaagattttagggtacctacctcagggcgccccaacgagccctttactcgccaatctggccatgaaggactgtgaccgagctcttcaagcactcgctcacaaaaacgggctggcctacacacgctattcagacgatctgtcctttagcactaaggataagggcttttccagatcccagagcagggagtttgtctgtgatgcatatgcgatcctaagccgctcaggcttcagaccaaacctgagaaaaaccaccgtggtccccccaggatcccggaaaatagtgctcggcttgaatgtggaaactgagcaccccagattgacaaagtctatcagagatcggatccgccagcacctgcactttctcaaaaaagttggtcccgtggaacacgcattcaacagagaattcgattcagtgtgggggcttaaggcgcatctgaggggcttgattgactttgccaacatgattgagccagattttgccgaggccagtctgaaagaattcgacagcgtggaatggcccgtttga

SEQ ID NO: 9050 - RNA, 933 nt, synthetic construct
  source 1..933: mol_type = other RNA
atgcacacccaaaggtggataaacgagcatatcctgaaagatgtgcccgtgcaccctgcctctcaggcctttggcaaaggaaacagtatcaagaagtgcgccagcagacactgcggtgccaaatggctaataaagattgatatcgcagacttcttctctagcgtatccgagattcaggtgtttcgggtttttaggtcactggggtaccaacctctggttgcatttgagctggctaggctctgtaccgtagaaacctactggaaaagtcccaggggatccttaccacaatggcgggcacggagatttaatgggagcatccctagctatcatcaggagatccttggatatcttccgcagggcgctcctacatccccactgctcgccaatctggcaatgaaggactgtgacaaaagcttgcagacactggcccagaagaacgggttggcttataccagatattcggacgatctcagtttctcaacgaaagataaaaacttcgaccgcacacagagccggaagttcgtttgcgacgtgtacagtgtcctgtctcgctcaggattccggccgaacctgcgcaagacgactatcgtccctcccggctctcgaaaaattgtgctgggccttaatgtcgaaactgaacatccacgtttaaccaagaatgcccgagatcgcattaggcaacatttgcactttctaaagaaggtgggtcccgtcgaacatgccttcaacagagagttcgattcagtctggggcctgaaggctcacctcagggggctcatagactttgccaatatgattgagccagacttcgctgcagcgccctcccgaaattttactcttttgtccggtcgttgtcgccacgcggctgtgctctgcgaaagacacttccaggcgatgaaatctaccactgtgcacacaatccagtactggtga

SEQ ID NO: 9051 - RNA, 1155 nt, synthetic construct
  source 1..1155: mol_type = other RNA
atgtggagcagccacacatacgagctggaggccattgagctcggacgacccagggaaacaatcgacgcctcaattgagcagatcgagaacttaaatgagacaaaccctcccgcccctgccatcctgaccctgaatcatctagccaaacgcactggcgttggctatgaatggttacgtgcttttgtaatgcggcagctcatgcccggaatggatggcgacgccaggccgtatcggaaattctctatccgcaaacggtccggggggtacagaacaatccacatacctgagccaaagctaatgcatacccagaggtggataaattaccacatccttagagaagtttcccctcatagcgcatctcaagcctttacgaacggctgcagcattaagaaatgtgcgattaagcactgcggggctcagtggatgattaaaattgacctggaagacttcttcggatctgtcactgagatccaagtctatcgcgtgtttaggagtctgggctatcaggcgctcgtcagtttcgagttggcgcgcctgtgtactattacaccaggagacaggtcactgagaagccgtcacccacactggagagtgtggaagcctaacaaggaaatcccaacctactcgaagaaatacttggggtttctgccccagggtgccccaacgtcaccacgactcgctaaccttgttatgcgccggtgtgatcaggagatacagaagttagccaaatcctatggtctgaccttcacccggtactcagatgacttgtgcttctctaccagaactaaaaagtttaatcgacatgcagcttccaaattcatcggcgaagcatacatggtcctggccaaatatgggtaccaacccaacctgcgcaagacctccgtagtgcctccgggtgctaagaaggttgtgctcggcttgactgtggatgggcaggaacccaagatcagcaaggaagtgagagacaagattcggcaacatctctactaccttgcaaaagtcggcgctgctgaacatgcacacagaaggggttttgatagtgtgtggggactcaagtgccacctgaggggactgatcgactttgcacacatgatagatgaggatcttgcccagagttatattaaaaagttcaatgaggtggactggcccgtgtga

SEQ ID NO: 9052 - RNA, 1134 nt, synthetic construct
  source 1..1134: mol_type = other RNA
atgtggctgccccagacctacattaaagaagcgaaaagcaagggacttgacagccagacgatagacgctgccgttgaccaagtggatacagtccttcgcaaggccgaaaacatcccgtctctgctcactctgaatcacctggccactcgggtgggggtgaacgttaaggaactcagacagtttgtcgatcgcaccgacctggacgcataccaacgtttctcaatcagaaagagaaggggaggcagacgatttattagtatcccggcacctcagctgatgaggacgcagcggtggatcaacgagttcattttaaagcctctccctgtgcatgggtcttcacacgcatttgagcgtcattcctctatcgtgaaagctgcctcagtgcactgtggagcccgatggctgataaaaatagatgtggaggacttcttcggatccattagcgaaatccaggtcttccggcttttccgctctctggagtaccaacccttggtgtccttcgagctcgctaggctctgcacaataggcaccagccctcatagtccaaggaaagaatatccaaactggagagtacacaagcgaaacaaaattatccaggggtattctcagcagctgttaggctacttgcctcaaggggccccttccagtcccaggctctcaaacctaattatgaaaccactggatgaggctctctatctagaggcaaagcagaagggcttgtactatacccgctatagtgatgatttgtgctttagctatcacaataccgacttcaatcgaagaaatgctacagagcttgtctccgcagtatacaggatcctgagttcagccggatacagacccaatatgcggaagactacagttgtcccgccaggttctaaaaagatcgtactgggtctgaacatcgagaatgatcagccccgcttaagcaagcccttttgtgacaaagtggatcagcacttgtactatattaagaaatacggccccgtggaacacagccatcgcaggaaattcgactccgtgtggggtatgaagagccatatccggggctccattgactttgcgaagatggttgagccagagcgttcggccgtttggctggaagattttaatcgggtggaatggccagtctga

SEQ ID NO: 9053 - RNA, 1152 nt, synthetic construct
  source 1..1152: mol_type = other RNA
atgtggagcagccacaggtacagactcgaagctcggcagaagaatctgccggaatccgttgtgcaggccgcaattgcccaaagcgagaaactcctaacagccgaccctagcctcccatctattctcagcttaaaacatctagcagtgcgctgcgacgttccctactccgatcttcgcgagtttgctagcagaaggcccatcgacggaaatcagccaagtcttccctaccaaaacttttctatacgcaagcgctcaggggggcgccgtttcatccacgtgccgaatcccaagttaatggtggtacagaggtggataaacaaccatatactccaagaagtgaagccacaccgtgcttctcacgcgtttacgcgtaatagttcgatcaagaaatgtgctcagattcactgcggctccgcctggctggtgaagctcgacattgcggacttctttgaatccgtgtctgagattcaggtgtttagagtgttttccggtatgggctattccccgttggtagccttcgagctcgcacggatctgcacaatcaggacacctacacattctcctcgacagtatttcaagcagtgggtcgtgaggaacatcaaccatactatttacgcctacaatgatcggtacttaggctatttgccccagggtgcccctacctctccccttctggcgaatctggttatgcgacaatgtgacaaagaactgagtgaaattgcagctacttttgggatgcgatacaccagatatagcgacgatgtcactttctcaagtctggatcctgctctgggccgggatgcctgtcgaaagctgatcttcgaggcctatgctgtcctgagttcagccggctacagacctaacgctaggaaatccaccattgtacctccatcagcccggaaattggtcttgggccttaccatagacggtgccgagccagggctgaccaaggagttcaaggatagattgagacagcacctgtattttctggagaaactgggagcaatcgatcacgctttcaaccgcaagttcgattcagtgtggggaatgaaagcacatatcaagggactgattgacttcgcaaaaatgatcgagcccaactatgcggccgtctgccgggaaaggtttaatcttatcgactggccagtttga

SEQ ID NO: 9054 - RNA, 1152 nt, synthetic construct
  source 1..1152: mol_type = other RNA
atgtggagtagccataggtatcggctcgaagcacgagaaaaacagctgtcagagactgtgatccaagccgctattctacaatccgaaaaattaatcacagctgaccccgctctgcctagcatcctatctttgaaccatctgtctgtcaggtgtggcatcccctactgggagctgcgggagttcgtgagtcgtagatcaatcgataagaacgaaccatcaatgccatacgagaacttttcaataaggaagcggtccggcggacgccggtttatacatgttcccaacaggcagctcatggctgtgcagcgatggatcaacaatcatatactgcaggacgtgaaaccccacattgccagccacgcatttagtcgaaagtccagcatcaaaaagtgcgcacaagtgcactgcggatccgcatggttgatcaaactggacatcagtgacttcttcgagagcgtgtctgagatccaggtgttcagagcttttcaggggatgggatacaccccactggtcgcctttgagcttgccaggatttgtaccattagaactcccgctcatagcccgaggcagcacttcaagcaatggttggtcaaaaaggcgaaccacacgatttacgcctataatgaccgttatctgggttacttgccacagggggcacccacatcccctctgcttgccaatctcgtcatgcgccagtgcgacaaggaattatctgaggttgcggcaagatttgggatgaaatatacacgctactccgatgatctcacattttcttcgcacgatccgaccctgggccgtgatccttgtagagaactcatcttcgaggcctatagcgtgctgagtagaccagggtaccgccctaatgcccgcaagtcaaccattgttcctccctccgctcgcaaactggtacctggcttgaccgtagacggcgccgagccaggactgactaaagaattcaaggaccgacttagacagcacctctacttcctggagaaactcggcccagtggatcatgccttcaatcggaagtttgactctgtctggggtatgaaggcgcacattaagggtcttattgatttcgccaaaatgatagagcctaagtatgcagctttatgcagggaacggtttcagaagattgattggcccgtttga

SEQ ID NO: 9055 - RNA, 1152 nt, synthetic construct
  source 1..1152: mol_type = other RNA
atgtggagttcccatctgtacagagtcgatgctcggaagaagggactgtctgaggcgactatcgaggccgcaatctcccagtctgaaaaagttatcaacgccgatccatcactgccctcgatcctctccctgaagcatctggctagcaggtgcggagtgccgtacagcgaacttcgtgagttcgtctctagaagggccatgttcacaatagcaccctcgatgccatacaataaattctccattcagaagcggtctggaggccgccgattcatttacgtacccaaccgcagtttgatgaccgtgcagaggtggattaacacccatatacttgcccagatttcaccacacggtgcatcccacgcttttacgaagcggagtagcatcaagagatgtgctctcgtccactgtgggtctgcctggttggtaaaactcgacatcagcgacttctttgaaagcgtgagcgagattcaagtgtatcgttccttcaagtcaatgggctatacacccctagtggcctttgagcttgctcgcatttgcacaatccgcactcctcgtcattcacctcgggagcgatacgggcaatggcgcattcgggagctgaacgaggaaatatatgcctataacgagcatcttttggggtacttacctcagggcgccccgtcatctccattgctgtctaatattgttatgcgggattgcgatatgctgctaagccagatcgctgcaaaattcggcatgaaatacaccaggtatagtgacgatctcacatttagctccctcgaccctcaattcggccgagaggcgtgtagaaatctgatatttgaagcctatgctatcctgtccaaggccgggtacagacctaatgcaaggaagtgcactgtcgtgccacccagtggcaagaaaatagtcctgggcttacagattgatgggaccgagcctcgactgaccaaggactttaaagacaggatcaggcagcacctgtatttcttagaaaaatttggtcccctgaatcacgccttcgaaagaaaattcgacagcgtttggggaatgaaagcacacattaagggactcatcgattttgctaagatggtggaacccggttacgcggagatctgtcgccggagatttaacctcatcgactggccagtgtga

SEQ ID NO: 9056 - RNA, 1272 nt, synthetic construct
  source 1..1272: mol_type = other RNA
atgtggtgggaagccggggtacccgtgctgtttgggaaggccctagccgagcgagaacacagccattctggtaatgtgccttccttggccagggtggctcgagcaactgttaggtccgggctcattggcgtcattgtgatgtggagtcccttgtcttataaaagaaaaggattggagatcggcatcgcagaggagctactcgactcagcaatcgaacagaccgagaatgtcatcgaggaaaaccccgatctgccatcaattctcacactgaaccatctgtcaacccgtacaaagacaagtctggagacattaaaggcctacatatctcgtgatgaaccggatgcataccggaaatttagcatagccaagcgctccggtggccgaaggtttatcagagttcctgcacctcaattagctcacgtccagaaatggatacatcaccacattctctcccatatttccccccacagagcgagctatggtttccggaagcggacttcgattaaggactgcgctcgtaaacactgcggagccagatggcttatcaagttggacatcgttaacttcttcgaaacgatttctgaaatccaggtgttcagcgtctttcaaaaactgggttaccagcctctcgtggccttcgaactggcgagactgtgtaccgtgagctcagatgagtactccccacgccgcaattacggaaactggtgggccttcaagtcttacaaggtgatcaggaattacgagcagaagctgttggggtatctgccccagggcgcctcgagttccccaatgcttagtaacctggttatgtggaagtgcgacgaacagattagtaagattgcgaaaaaaaacgggatgaaatacagcagatattccgacgacatagctttaagcacttctagcaaggactttaatagagctctcgctaaacaggtgatccaggaggtcaatcgggtgctttcacagtatggctacctgcctcacttcaaaaaatgtaaggtagtgccccctggcgcaaggaaggtcatcttgggccttaacgtggatggagccgttccagtcctgcaaagggaaaccaaagatcgcatacgccaacatctgtactttctgaagaagcacggacccgtggaacacgctctcgctcgagggttcgatagcgtatggggactacagtctcatctccgcggccttatcgactatgccaaggccattgagccggagtatgctgcaaaaaggctgcgggagttccgggagatcgactggccattttga

SEQ ID NO: 9057 - RNA, 1134 nt, synthetic construct
  source 1..1134: mol_type = other RNA
atgtggtcaccgcagctctatctaaagttgggaattcaggagggtcatagcacagagttactggaaagagcaatttctcagtccgatgctgttatcaactctgaatactccttaccaagtatactgagcctgaaacacttggccgtccgaaccggggtgagctacgagtctctcaggtcgattgttagtcggtccgctccaaaaacctacaataagttcagtattcgcaagcgatccgggggacgacgctacatacacgtgccaagccttgagctcatgcacgcccaacgctggataaacgaacacatcctgaagaagatcaaagtgcaccccagttcacatgcgttcatcgaagggagctccatccaaaaatgtgcctccaaacattgcggcgcaaagtggctgatcaagcttgatatcaccgatttcttcgagagtatctccgagatacagatctttaggtcgttcaaggagctgggatatcagccccttgtttcttttgagctggctaggttatgcacggtgcccacacaccacaagtcacaacgcagacattatattcagtggaggtcttggtaccggaatgagtcaattacagactacaataagtctctgatcgggtatctacctcagggtgcccctacttctccactcctgtcaaacatcgtgatgagaaaaaacgacgaagagcttaagaaactcgctcacaaattcaaattgacgtatactcgttactccgacgacctttcattttctactaggagcaaaaatttcgacagatataaggccaaagagctggtgtttgaagtatacaggattctctcaaaaagcggatacctgccccaatacagaaagaccaaggtcattagtcctagcagcaagaaggtaatcttgggcctcaacgtcgacggcgatacaccccgtctgcagaaggaatttaaagaccgcctgcggcagcatttctattacatcaagaagctaggcctggacgaacatatcatcaatcgggagtttgattccgtgtggggcttcaagagccacctgcggggtatgattgattatgcaaacatgattgagccggaatatgccaaaaagcagttggaaacctttaaatccatagattggcctatttga

SEQ ID NO: 9058 - RNA, 1125 nt, synthetic construct
  source 1..1125: mol_type = other RNA
atgtggagcccccagtcgtacaagaaaatcgggtctgagaaaggattatcagacgaactgttagaaaccgcaatcacacagtccaaggcagtcttctgtaatattccttcaattctcagtctgaggcaccttgcttgccgtaccggaatcagctacagaaagctgaggtgtttcgtagaacggtccagctatgtgccatataagaagttcagtatcaaaaagcggtctggcgggagaagatttatccacgttcccgatcccgaccttatgcatgtgcaacgatggtttaacgaatacgtttttaagctggttcctgtgcacccctcttcctacgccttcactaccggctcatccattaagaagtgtgctgcagaacattgcggcgcccagtggctgatcaaactggacatcacagactttttcgagtccgtaagcgagatacaagtgttccgcctattcaagggcctgggatatcaacccctcgtcagcttcgagatggcacgcctttgcacagtcttgatcctggataagagccctagaactcactacagtcagtggcacgttcggaaagagaataaaatcattccgcagtacaaccagaagatgctcggttacttgcctcaaggggccgcctccagtccattgataagtaatctggtgatgaaagagtgcgacgagaagttgactaacattgccaataggtacaagctaagctatacgcgatattctgacgatctcagcttctctacacgctcgaagaacttttgtcggtcaaaggctaaagacgtgattttcgaggtgtatgaggtcctctctaaagccggatatagacctcagctgcgtaaaaccaagatcatctcaccaagctcaaagaaaattatcctcggcctgaatgtggatggcgcggaaccgctgctccagaaggagtataaagataagattaggcagcacttatactacatagaaaaacttggtgtggcgaagcatgtggaaaaaaggggttttgactccatctgggggtttaaatctcatctgcgcgggatgattgattacgccaacatgattgaggaggactatgctaagaaatgcctggatcggttttccaacatagattggccagtctga

SEQ ID NO: 9059 - RNA, 1131 nt, synthetic construct
  source 1..1131: mol_type = other RNA
atgtggagccctcacaactacaaagagcaagggttagagaaagggctctccgacgaacttctggaaagagccataagccagagcgaagatgtgatcgagcgaaaccacgatctcccatccattctcagtttaaaacatctgagcgtgcggacctgcacttctcaccagaaactcactcgcttcgtcgcccgcgaagaattttcatatgagaagttctccatcaagaagagatctgggggcaggcgttttatttacatacctgaacccacactactacatgtccagcggtggataaacgagtttatccttaagcccattcccgttcaccaggcctcttttgctttcaatccgggttctagtatacggaaatgtgcagcgaaacattgcggagccaagtggctgattaagctggatataactgacttcttcgagtcgattagcgaaattcaagtataccggctgtttagagaattcggataccagcctctggttgccttccagcttgcccgcatctgtacaatcgcgacaccagagatgtcacctaggcggaagttcaacaattggaaggtgaggcgaaagaataaaaatattccccgatacaaccaacgtattttgggctatcttccccaggggggcgctacctcccctatcatctcaaatttggtgatgcgcgaactggattcggagttttccaagatcgcacgcaagtaccgattggtgtacaccaggtacagcgacgacatcaccttctctacgcgggcaaatacctttgagagagacagcggcagaaggctgattacggaggtgtataacctcctgaacctgagtggctacaagccccagtatagaaagactaaaatcgtcccgccatcagcaaagaagattgtgttgggactgaacgtggatggtagggctccaagactgcagaaagagttcaaagacaatatccgtcaacacttttattacgttgagacactgggtctgagtgagcacattgtgaatcggggatttgactccgtttggggctttaaatgccatctcaaagggttaatcgattatgctaactctatcgaaccagagtatgcccgcaagctcgtcgtaaggttcaacaatatcgactggcctgtctga

SEQ ID NO: 9060 - RNA, 1134 nt, synthetic construct
  source 1..1134: mol_type = other RNA
atgtggagtccgcatcagtacagagccgccgcgaaggaaaaaggactgtctgatgctacaattgaggctgccattgatcaaatcgaaaccgtagaacagggaacacctgaactgcccgctattcttagtctcaaccacttggccactcgagcacgtgtaccctaccagtaccttaggtcagtcgttagcagaagtgagccctcaacctatcgcaagttctccatcaataagcgctcaggcggaaggcgatttattcacgttcctgagcccccactcgcgcacgtccaaaagtggatcaatcgcttcatcttacgtcaggtgcccgtgcataaggcttctttcgcctttgctcccgggagctccataagcggttgcgctgcacgacactgtggggcacactggttgataaagatggacatcacagggtttttcgagagcgtgtccgagattcaggcctatcgctgctttgaagaactgggttaccagccgctggtggccttcgaactcgcaaggattgtcacagttgggccactagaccagagcccaaggcaccgcgatccagtgtggaaagtcagagagcctaacgcggccattccctcttatagttcaggcgcattgggctacctgcctcagggtgctccaacttcgcccatgttgtctaatatcgtgatgaaaccggttgacgaggagattgccgccgctgcgagaaaagccggcctcatatacacgaggtattccgacgacctcactttttccacgcctgccaaggagttcggacggtctgctgcgaccgattttgtgcatactgtggggcagatccttgcagccgccggctttcggccacaacatcggaaaaccaagatcatcccacccggtagcagaaagatagtactaggacttaacgtggaaggaaccgcccctaagctgagaaaggagtttaaagacaatctgcggctgcacctgcattacctggataaattcggcccagctgagcatgcaaaagcccggcagttcgaaaccatctgggggatgaaagcacacatcaggggcttaattgatttcgctaacatggtggaacctgtctatgcaaagggcatgctggaccagtatgagcaaatcgagtggcctttctga

SEQ ID NO: 9061 - RNA, 1143 nt, synthetic construct
  source 1..1143: mol_type = other RNA
atgtggagctcccagcgctacctttccgagggcaaaaagaacggagcagcccaattggtgattgacaatgctatcagccaaattgaattagtcctggatcagaataacaatatccccgccatcttgagtctgaagcatttttcactgaggtcccacgtcgggtataaattcctgcggtctgtggtagagagggaggaggaagatgacaagcagggcgtgcaggtatatagatacttcaacatccggaagaaaagcgggggaacaagaaccatttctatcccacacccacaactcctcatcgcgcagaaatggctggctaccaatgttctgtccaaactctcagcctcaaactatagctttgccttttccccaggcagcaacattgtggcctgcgcaaagaagcacgtagaggcaaattggcttgttaagatggacgtgaaggacttcttcggttcgatcagtgaaatcgacgtctaccggcaattcaggaagctgaaatatcagccattggtggcgttcgaactctcccgaatcgtgacatggcccaagtccccccgagtcgattcgccaagatgggaattagatagcgtgcgcagcagtataggatcttacattcacaccgaaataggctgcttgcctcagggggctcctacttcacctatgctgagtaacctggttgctaacgcgctagatgaggagctgagtcgcgtggccaacaaatttggtgttaggtacacccggtattgtgacgatctgacttttagcactcgccggaaatcttttgaccgtaatcaggcaaaggcccttatagaagcagccacaatgacaatgctgcctctcggcttcagcccaaacgagaagaagacggtcgtgattcctcccggcgctaggaaacaggttctcgggcttaatgtcgacggcccggtgccgactctctctaaggagttcaagtccaaaattcgtcagcatttgttttttctgaccaaaaacggacccgccgctcatgctgctgatagagagttcgacacgatatggggtctaaagagacacttatatggacttgccgattacgcattcatggtcgaacctgagtacgggaagcatgtgaaatcagccctgtcttctatcaattggcccgtgtga

SEQ ID NO: 9062 - RNA, 1128 nt, synthetic construct
  source 1..1128: mol_type = other RNA
atgtgggcatctcagcactactttcaggaagggaagtctctcggtgtggatgaggacatcctcgtgtccgctgtggatcaaatcgagagagtcttagacgttaacggcgacctcccaagtattctgacactcaaccacctagctacacgcgcgaaagtaggccacgcttttctgagacgcgtgatatcaagaacacagaatggggcctaccggcacttcgcggtcaaaaagcgaactgggggccagcgctggatctccgtaccacatcctcagctattgaatgtccagaggtggctggcaaaacatgtgctgaaccagattgatgcttccagacattcctacgcgtttgaaccggagtcttctataaagaaatgcgccgaacagcacatccacgccaagtggatggtcaagatggacgtcgaggacttcttctggagcattagtgaaatcgacgtgtatagacaatttgtgagcctgggctatcagcctctggtggctttcgagctcagccggttggctacctggcccttattcgcacatggtcccgctaaggccgccgtttggagggctaggccacgtgaaggtattcccacctattcctggggaaacatgggatgcctgccgcaaggagccccaacctcgcctatgctttcaaatcttgttatgcgagaactggacgacaggatccaccgcgcagcgcgaaagcacaggatggtgttcacgcggtatgccgatgaccttacctttagtagccgcgatgaaactcttgggcgggctgcctgtcgtgagctcattggcgaggtgggagacttgctgaggcagcgggggttcaacccaaagcataaaaaaactgttgtggtgcctcccggtgcacgcaaggttgtgctcggcctgaatgtcgatggagatgcccccaggctgccaaaggagttcaaaagcaaaatgcgacagcacctgtactacctgagaacagcaggacctgcagctcatgccgccaagagatcatttgataccgtgtggggccttcaacggcacttgcgtggcctggcagattttgcccatatggtagaacccgagtacgggagcgagttactgcgggccttgcaggccgtatcatggcctgtctga

SEQ ID NO: 9063 - RNA, 1188 nt, synthetic construct
  source 1..1188: mol_type = other RNA
atggagttccccctgcacaactatttaaagtcccttagagacattggtgcgcgggacgggtacattaaagccatacagcgaaatgcaaaacccctggctgactgcggactgccagtgatccttacgttgggtcatctagcacacataactgatgttagccatggtattctcactgatatcatcaagaggcagatcgacccttacagggtattcgcgatcaggaagaggaatgggggtaagcgcttcatttgcgtcccagaaacgggattgctgaacgcccagcgttggattcatgatgaaattctctgcagccttgcggccacaaagaacctttcctgtcacgccaccgcctatgctccgggctgcagtcatgtgatcaacgctaagagacacgtgggggccgcctggatcttgaaattcgatattacccgtttcttcgagagtatctccgagcggcaggtgtaccgcgttttccgcggactgggctacaggtcacaggtggctttttgcttgacccgactgtgtaccagggtgctgcctacaaatgtcgaccatcggctgctccggcacaccaagagatggcaaactggggatcaaagaaatcagagaaacttttcaggagcccgggtcatcgggcacttaccccagggtgcaccaacttcccccatgctagccaatctcgtgtgtatccctctcgatactgacatgcagaatatcgctgcacgggagggcctgactttcacccgctacgcagatgatatgacattctctggggaaatgctcgaccgtgccgccgcagtaaagataagtagagaggtttctatagtggtgggccggtatggctttggcatcaacctccagaaaacatcgatagcgaaaaatggaggccgcaagattgttacaggccttagcgtcgacggcgacgtagtccgactgccgagagcatataaagacgctatccgccaggagctattttacttggacaagcacggcattcaggagcattgtgcccgcattggacacaaaaaccatctcagctatctgttaaggctggctggacggattcgatacgctacctctatcgagcctgtgatagggcagaggatgatgcacctgttcctgcgaatttttccaacatttcaagaaaccgaaagactgatctttcaagactttgtgtcagatgattga

SEQ ID NO: 9064 - RNA, 1188 nt, synthetic construct
  source 1..1188: mol_type = other RNA
atggagttccccctgcacaattacctgaatagcctgcgggactctggggcgagagtagaatacatttccgcgattcgaagaaacgctcagcccctggtcgattgtggcttaccggtaatcttgacactggggcatctagcccacgtcacggacgtctcacatggcattctcgctgatattatcaaaagacaaatcgacccatatcgcgtgttcgccatcaggaagagatctggagggaaaaggtttatttgcgtgccagagaaggggctgcttacggttcagcggtggatccataaggaaatcctgtgcgccccggtcgccttgcgtaagctgtcttgccatgcaacagcctacgcgcccctcagttcacatattgtgaatgccaaaaggcacattggtgctgcctggatcttgaagctcgacataaccagatttttcgagtcggtgagcgaacgtcaggtctaccgcgtgttccggggcctgggatatagggctttggtggcattctgtctcacacggctgtgtactcgcgttttaccaagcaccgtggaccaccggcttaggctgagaaccaaaagatggcaaactggcgaccagagaaaccagaggaattttcccggcgcccgggttattggacacctgcctcaaggggctcctactagccctatgctcgccaacctcgtttgtgtgaagcttgacgcagatctacaaaagatcgccgcaagagaagggctaacctacactcgctacgcggatgacatgaccttttctggagaggtcgtagaccgagcagccgctatacggatctcccgcgagatatccatcgcagtgggtcactatggattcggtatcaaccttcagaagacctccatcgcaaaaaatgggggccgaaagatagtgacaggattgagtgtggatggcgaagtcgtacgacttcctcgggcttataaggatgccatccgtcaggaactcttttacttggataaacatggaattcagggccactgcgcaaggattggccacaaaaaccacctgagttatctgttacgcctcgccggccgcatccgatatgctatctcaatagagcccgttattggtcagaggatgatggagaagtttctgaggattttcccaacttttctggagacagagcagatggtggctcaggtgttcgtgaaagatgactga

SEQ ID NO: 9065 - RNA, 1167 nt, synthetic construct
  source 1..1167: mol_type = other RNA
atggaattcccacttcacgcatatctgaatcatctccaaaccgagggtgcaagcggggaattcattgccgctgtgcgacgtaatgcaaagccactggcggacagggatcttcctgttattctcacccttggtcacctggcctacgccacagatgtgcggtatggaaccttgaacggtatcgtgcggcggcagatagatccctatagggtgttcgcgatacgtaagcgaaacggcgggaagaggagcatctgtgttcccgagcctgggctgctctcagtacaaaggtggatccacgagcatatcctgtgctcacactacgccctgagcaggctatctaaccagagtactgcttatgcccccggatgctcgcatctggccaatgcccgccggcatatttccgcagcctggctcctaaaactggacatcacgcggttcttcgagtccatcagtgagcggcaggtgtatagagtatttcgcggctttggataccgagcactcgtggctttttttctgaccaggttatgtacaagagtcctcccattcgcggttgacaggcgcctgaagcggcagattagaagatggcgcactggcgaacctcgacgttacttgaacgctgctgttgtgggtcatcttccgcaaggagccccaacatcaccaatgctcgcaaactttgtgtgcacagtgttggatgccgaattacagaccatcgctgtacgcgagggcctgacatacacaaggtacgctgacgatatgactttctccggcggcatcggagtcgcatgttctcctgccgagataatacgagaaatttctaccatcgtcgggaaatttgggtttggcatcaattcccagaagacgagcatcgctaaaaatgggagtcggaagattgtgaccgggctaagtgtcgagggcgatatgctgagactgccgcgctcttacaaagacgagctgagacaggaactgttcttcttgaaaaagtacggcattgcggaacactgcagcagaactaaccacaaaaaccacatgtcatatctcctgcgcttagccggaagaattaggtatgctgtctccgccgagcctattataggaaccagaatgatgcttcagttccagcacttgtttcccaattttactgagatcgaacaaagcctgttcgaccgcccctga

SEQ ID NO: 9066 - RNA, 1209 nt, synthetic construct
  source 1..1209: mol_type = other RNA
atggagttctctctgcatacctatctgaacaggcttagaaccaggggagcctcggacgagtttgtcgagatcatccggaggcatgcgaaaccactgagcgacagagggttgccggtcatactatcactgggccatctggccttcgccacaagtaatagccatgaagtgctgcatggaattgtgaagcgggaagtggacccataccgggggttctggatacgaaaacgtagcggaggaaaacgatatatatgtgtacctgaaggggggttaatcaggacccagcgatggattcatgatcatattctttgttctacgtgggggaagaagtccctctccatggccgccacagcctatgtacccggctccagccacatcgacaacgcaaagcgccactccggcgctgattgcgtcctgaaattggacattaccaatttcttcgagacaatatctgaacgtcaggtgtaccacgtgtttcacggttttggatacagacctcttgtcgcgttctatttctcacgcctgtgcacacgcgtgctcgaccctaagcacgacgttcggagtcccactgtacgctgggcaggcaaaaagaagcgctggcaaactgaagccaaccgaaagaacaataattaccacacagtgggccaccttccacaaggagcccctactagcccaatgttagcaaatctcgtgtgctttggcctggacctagagctgcagcagatcgccgactcaatcaacctcgtgtataccagatacgctgatgatatgacctttagcggttcttttacgacaaaggagcagatatcccagttcatctgtcaggtgagtgctgtcgtcggtaagtttgggttctctatcaatcaacagaaaacctcactgagccggactggtggcaggaagattgtgaccggcttaagtgttgaaggagatgctttgcggctgccacgggcgtacaaagatgcaatccgccaggagctgtactacattgaaagatatgggctctctggtcaccttgagcgtgttggctatgccaaccacttgacgtatctgatgagactcaaaggaagaattcaatactggttttccattgagcccgctacagcaactcctagtatcgagcagtttagggctatcttccccaacttcaatgaaattaacgagctcgttaccggcgattcatccaggggcatcccggggactccctactga

SEQ ID NO: 9067 - RNA, 1368 nt, synthetic construct
  source 1..1368: mol_type = other RNA
atggccagtcagtatccttgtagattgttcgagacacacgagcgaggatctgaaagcgctgtgttggataccgcttttctctccgcacggtgggtcgacgaccagttggagctccgcggactggcaattagacctagcagccatcacgcagagagggtgaaagcccgcaatatgaagttctcactacacgcctatctgaaaccgctgagggaaaacggcgctagccaggagtatattgaagctctggcaagaagcgcgaaaccgctggtggataatggcctccctgttcttttaactttaggacatctggctcacgtgtgtgacgttccatacggcatgctagtgggcattatctcccgtcatacaaacccttatagagtgttctcaataagaaagcgttctggcggaaagcgctttatctgcgtacccgagcctctgctaatgcaggtccaaaggtggatccacgaccaaattctgtgcagccccttcgcattggcaaggctgtctagacatgccactgcctacgctcctcagaatgggccagtgcccgccaatcagcgacggatagcagatcacgtgaagaacgcggaacgccatctgggcgccacatggattgtgaagctggatatctctaactttttcgaaagcataagtgaacggcagatctaccacgtattccgtgaatttggttaccgagcccttgtcgccttctgcttggctcgtctctgtaccagggtgttgcccctcacagctgataaaaggctgaggtcacgggcaaaaaggtggcacccaggtaaagagtataagatccttgccactaaggtagttgggcatctcccacagggagcacccacatctccaatgcttgccaacctggtttgcgtagaactcgatcgcaacctgcagtccattgctgtccgggaggctctgacgtatagtcgctacgccgacgatatgacgtttagtggtgagtttcatgaccggagcgacgcagttatcgtgttacgagaactttcccgagtcgtggcggcccagggcttctcaatcaatgccctgaaaaccaacattgccaagaacggtgggcggaagatcgtcaccgggctgtccgtggacggagactccataagggtgccccgggcctacaaggacaaaataaggcaagaactctattttatcggcaaacacgggctcaccgatcactgtaatagaatcgaccaacgcaatcagctgtcttacctgctccggctggctgggagaattcgctacgtcagttcagttgaggccgaggcgggcaatctcatgatgaagaagttactttcccttttcccaactctgttggataccgagagaatcctatcggagatttga

SEQ ID NO: 9068 - RNA, 1167 nt, synthetic construct
  source 1..1167: mol_type = other RNA
atgaacttcagccttcattcgtatatcaaacacctccgtgatactgatgccagtgaggactatatcaagaccgtgcagagacatgcaagaactctcgtaaataacaacttgccagtgatattgacattaggccacctggcccactccacgaacagctttcacaacaccctcctcaatatcgttaagcgtgaggtcgacccttatcgggtgttttcaatcggcaagaaatccggaggcaagaggctgatctgcgctcccgagctcaacttgcttaacgttcagcgctggatcaatcagtacattctgaaatctgagctggccctgaagaaaatttcatccaacaccacggcttacgtgccaggggggagccatataaagaacgccgagcgacacgtcggtgcctcttggattatcaagatcgatatcgtgaacttctttgaatccatatcggaaaggcaagtgtactatgtatttcgggagcttgggtaccgcgcactggtggcattcaatctggctaggctgtgtacaaggattctgccccataaactggataaccggaagtacaataagaagcgatggcgatctaaaaagcagtacgcctattgtaattctaaggtcgcggggcacttaccgcaaggtgcacctactagcccaatgttggcgaatttggtgtgcgtgatgctggacgctaaactacagtgcattgccagtgaatacggcctttcttatacaagatacgctgacgacatgacattctctggccacttcgacgacaagaagactgcgctcatttttatgcgggagatcagtaataccgttatcaattacggtttctcaattaactcccagaaaagcagcatcgctaaggacggaggccgcaaaattgttacaggattaagcgtcgatggcgaacacattaggcttcctcgggcatataaagataagattaggcaggagatcttctacattaagaaatattccctcgaatcacattgtagtagaaccagaaaagggaatcgcttttcctacatcatgcatctggccggaaaaatacggtatgccatcctggtggaacccaccttcggaaataaaatgatgagcgagtttgtcaacatatttcccgatttcctagacatggaacaaatactgaagagttcaattcgctga

SEQ ID NO: 9069 - RNA, 1167 nt, synthetic construct
  source 1..1167: mol_type = other RNA
atgaacttccctttgcacgcgtacgtacgcgctctgaaacgaagcggcgcctccgagcagtttatccagcaagtacgggacaaagctaagccactagtcgccactgggcttcccgtcatacttactttgggacagctcagtttcgccacagagattccatatcgcatactgctgagtatcatcggccgagcagtggatccgtataggctgttttccattaggaagcgggcgggcgggagacggtttatttgtgttcccgagcccaggatgatgttcgcccaaaggtggatccaccagaatatcttgagcgcgccttcagtgacggcaggaatgtcttgcgcagccatggcctacaagaattccgcctctcatgtggccaacgctcgtgctcacctcgctagcgactggattctaaagttggatgtgacacgtttcttcgagagtgttagcgagcggcaggtttatcatgtgtttcactcactggggtaccctgctcttgtggcattcggtctggctcggctgtgtacacgcgtgtctttcggctcacgtggtggtaggcatcccggagcaagtgcccgatggtcctctagagacaggtatgactttcttggctaccccgatctgggccacttaccgcagggagccccatcaagccctatgttagcgaacctcgtctgcattcccttggattcgcaaattgaaaagatcgccgaagagcacaacctcgtgtataccagatatgcagatgacctgaccctctctggatcacttatcggggccgacgaaacgctcgaggtgattcggaaggtgtccaatagcctaggccagttcgggttcggcgtcaatgtgcgaaaaacccgcgttgttcgcagagggaccagaatgatcgtaactggactctccgtggaaggagaaacactccgcgtcccacgggattacaaggaccgactgagacaagagctgtactacatagagaagtttggcctgagagagcattgtcagaggatcggtcagaggaattacgcagcttatctgcgcagattatctagtcggatcggatacgtctcctgcatagaacctgctactggcaagaaactggaagccaaatttaccaacctgtttccaggttttggggaactgaaagagcttattctgagcttcccttga

SEQ ID NO: 9070 - RNA, 1131 nt, synthetic construct
  source 1..1131: mol_type = other RNA
atggaattcccaagaccagccaccgctgttccgctgccttttgatgccacgctcgcccagttagcccatgctactggaatgaccacggctcgactgcagggcattgtttcacgcaggattgatccctggcacacgttttccataaggaagcgtggcggcggtaggagaactatctgtgtccccgatgcagacttattggctctccaacgctgggtgcaccgacacctcctctgccatccccagtcgctggccaggctgatgccacaggcaactgcgtacagacccgggggcagccaccttgctaacgcagaagcacaccttggagcagggtggctgttgaaactggacctcgtgcggtttttcgagtcaatcagtgagcggcaggtgtggcacgtcttccgggcactgggctttgcccctagaaccgctctgctgctgacacgcgcatgcacacgggtccttcccctcgctgtcgaccgcagatattttgatcgtaccccgcggtggcggactggagcagaacgatccccgaatgagaaatttcaccctaggccacgtgtggttgggcatttaccacagggtgcgccctccagtcctatgctagccaaccttgtgtgtcacgctttggacgctcaactccagcagttggctcagagctgctctgagcacgctgttagatatactaggtacgccgacgatatcacattctctgggcctccaatgacagcggctgcgttgaatgccctttgcggccgcttgctaagggaggccaccagagccataacccgctatggattcggggtgcagtggcggaaggtacaactagtacgcagaggagcccgccgaatcgtgacaggtctgctggtcgacggagacgccttacatgtgccccgtccttctcgcgacgccctgagacaggccctctatcatctggagcaacaggggatcgaagggcattgtgcctggctccggattgatgacacccaggcctacctggctcggctgagaggtcagctggcctacctgaggagcattgaacctgtgaggggcgcacggatgcttgcgcaattcgataggctgatggccgcacgaggcacagtgggaactaccggccagatgaggaacgcatga

SEQ ID NO: 9071 - RNA, 1194 nt, synthetic construct
  source 1..1194: mol_type = other RNA
atgactgctttcagtttgcacgattacctctctgtactaagggccgaagggagcccgagtgactatatcgaggccctgagaagaaatgcacagccacttgtgtcccgaggcctgccggtgttactgacccttggacatctggcctttgtcaccgacgtggattacagatatctgaatgcggtcgtgaggcgaacagtggacccctatcggatcttttccatcgcaaaacggtcaggggggaaacggtacatcgttgtcgcagaccgcaagttagccctggtgcagagctggatacatcgtaacattctgacgagcgcagcggccatgcgctctatttcctctgccgtcaccgcctacgtgccaggctcttctcatatagcgaacgccagtcgacatcgcaatgcatcctggctcatcaaagttgatgttgcccgcttttttgagtcaatttcagagagacaggtgtactacgtttttcgacaattgggctatcgcgctctgatggctttcgccctaactcggctatgtactagagtgctcgaaactaaggatttccgcgccagaaagaaaggaagatggcagaagagaacagttagccccgaccgacctctgggtattggacacctccctcagggtgctgcaacctcgcccatgctggctaacctcgtgtgcaggaagttggacagcagcctttcagagattgccgacgacaggggactcatatacacgcgctatgcggatgacatcaccatgagtggggaattccaggataggatggacgctgagtccactatcgggctgatcagtggattgctgggaggggtgggcttcggtattaaccaccaaaagacatccattgctaaagacggagggcggaaaattgtaacaggcctttcagtagatggcgataagctgcgtgtacctaggtcctataaggataatctcaggcagcacttatactacatcgagaagttcggtctgaatgaacactgcgtgaggatcggtcaggcccaccatcttgcattccttctccggctggctgggcagatccggtatgtcaggagcgtcgagccacctctcggagccgagatgctgaaccggctgcgtagagctgtgccagaatttgatgctatagacggcttggtcagcgcagcctacgatacagacaccgatccctctcaaggcggcggctga

SEQ ID NO: 9072 - RNA, 1176 nt, synthetic construct
  source 1..1176: mol_type = other RNA
atgtctactcacaattacattacagagctgaacactccaggagtgaatccgacctataaacgggtcgtaaggcagctggttaccccccttctgcagaaaaatctgcctgtcatcctgagcctgaagcacctaagtgttctgctggacattccatatattgttgtgcataagatcgtgtatcgagacggagacttctataaggtgtttgctataaagaagcggtctggtggaaaaagatggatcacaattccagattacttcctcatgaaagcccaaaaatggatcaacaataacatcctcaatgctcaggaggcccaagccatgctatcgattaactcaaccgcatataagaagaagagcagccatatcgtgaacgcctcaatgcacttaggggagaagcagctgattaagctggatattctaaggttctttgaatccatctcagagcgacaagtgtttaatgtgttcaaaaagctcggctacaaaaactctgtcagtcttattcttgcacgcatctgcactcgtgtgatcccaatccatttagacaaacggttcatcaagaacgaacagaggtggaccacaaaatacaattacaagtacgatcagcagaagaacaaaatcaagcgcatcgggcacttgcctcaaggggcacccacttcccctgctcttgcgaactttgtatgttgtaatttggacgccgatatagaagacctgatagatcagttcaatctgaatagctatacgaggtatgctgacgacattattatatccggcaattttcaggacaaaaatacagccattagctgcatcttccgcgtctccagaatactgcggaactatggctttaagacaaactacctcaagaccaaatactgcggctctggcgacagaaaaatcgttacgggtatttgcataaacgatgagaatcagttacgggtccccatcgagtacaaaaacaaaattcgccaggagatttactacatcgataagtttggacttttgaaccactgtgagagactgaatataagtaaccccctcaactatctcatgaggttggagggcaagatcaactatatcaagaccgtggaattggataaggggatctacttcatgaacaagctcgaaaaagcgattcccaatatgaatgaaattcgtctgctgaacgatctcccttga

SEQ ID NO: 9073 - RNA, 1098 nt, synthetic construct
  source 1..1098: mol_type = other RNA
atgagcacacacaactatctgaccgagttaaacaaacatgatgtcaacccttcttataagcgcgtagttagacagctggctactccccttcttcaaaaaaaacttcctgtgatcctaagtctgaaacacttatccgttctgcttgacataccttacattgtgctccataaaatcgtgtatcgggatggcgacttttataaggttttcgcaatcaaaaagcggagcgggggaaagcgctggatcacagtgcccaatcatttcctgatgaaggcgcaaaaatggattaacgagaacatcctgaatattcagtcaactcaggactttctgtcgatttcctctactgcctataagaaatcttcctcacacattatcaacgcttcaatgcacctgggtgagaagcagttaatcaagctggacatcctgaatttttttgagagcatatccgagaggcaggtcttcaaggtgtttaagaacttgggatacaagaacagtataagtctgatcttgactcggatttgtacaaggctgatccccctcaacaaggacaagagattcttcaagaaagaaaaaaggtggacaaccaaatacacctacaagtacgacaatcagaataataagctcaagagaattggtcacctcccccaaggcgctccaacatcccctattcttgccaatctggtctgtcaggatctggatagcgaaatccagaatctaacggaccaattgaacctcaattattacacccgttacgcagacgacattatcattagcgggaacttcataaacaaagaactggccattagctgcattcacaaggtaagtaaaatcctacgagagtacggattcaagaccaattttctcaaaacgaagtattgcggctctggggataggaagatcataactggcatctgtatcaacgatgagaatcagctgcgggtcccaatcgaatataaacgaaaagtgcgccaggaaatatactacattaagaaattcggcctcctcaatcattgcgagaagttgaaaatctataacccgcttaattacgtgttgagactggatggaaagattaactacatcaagaccatagaaccagattga

SEQ ID NO: 9074 - RNA, 1173 nt, synthetic construct
  source 1..1173: mol_type = other RNA
atgagcaatcataattatcttacatcactccgtaactccgagaacatcaatagcgagtacaagaaaagcatttccaagtatgcgcggccactgatccgggaagagctgcctatcatcttatctctcaagcatctgtccgtcctaactgacgttccctacaatactttgtacaatatcgtgttccggaagattgagtcttaccgtattttcgccatcaaaaagagatcaggaggaaaacgctggattacagtgcctaccccttacctcatgcgcgtacagaaatggatcaataaaaacatcctcagcaattctcacgtgctaagttacatttcgaacaattcaatggcttacaagaaaaaatccagccacataaagaatgcccttgtgcaccatggcgaaactaaattgataaagctggacattaccaacttttttgagtccatatctgagaggcaagtgttccacgttttcaagaagatcgggtataaaaactcggtggctttcattctgaccaggctctgtaccagaattttgtctctgaataacgacattagactgttgaacaaggagaagcgctggttttctctttatcagtataagcacctcgataatgagaaaactatcaagcggcttgggcatctgccacaaggcgcacccacatcacccatgctggccaatttagtctgtcttgagttggacaaacagatcgaagatatgtgcctcctggaggactttaattatacccgatatgccgatgatattgtaatcagtggtgactttagcgacaaagaaaacgctattaaccacatctatgagatctccaagatattgagaacgcacggcttcaaaacaaactatctgaagaccaagtactgcggagcaggtgataggaaaattataacgggcctatgtattaacgaccctagtagcctgagagttccaagtcactataaaaaaaagatcaggcaggagatttactacataaagaagtacggcctgatcgaacattgcaggaaactcaacatcaagaacccgcttaattatttaaaccgcctggaaggaaaaatctactacctgatctgcgtcgaaaacgagaatgggaagaaggctctcgaaaacctggaggatgcaattcccaatatacatgaactgcgacagctggccgaaatctga

SEQ ID NO: 9075 - RNA, 1119 nt, synthetic construct
  source 1..1119: mol_type = other RNA
atgcggaaggttcctgccgtgtttactctgatgcacctggctcaccttaccggcacttcttggcagagcttacggaataccattacacgccagcaagacgattacagagtattcgaaatcagaaaacgctccgggggaaataggaggatctgcgctccagcccccatgctgaaaagcgttcagttctggattcacaaaaacatactctgtagtctcggagcccgcgctctcttgcaagaagcgtcaaccgcgtatgcgcccggctcctcaatcaagaaaaatgctgctattcatgctggagcagcctggctgattaagctcgacatcaaggacttttttgagagcatctctgaacggcaggtgtatcacgtgttcaggagactgggttacccggccctgctgagcttcgagatggccagattatgtacaagggtggtgccgcctagagatgacaaagtcccccgccggagagaaaagatgtggcgctggacgaaccagacatgtaaacattttactccttatccatgcgagactgccgtcggacatttgccccaaggcgctccaaccagtgccatgcttgcaaatcttgtggcagtggagctggataaaaaaattcaggtcatcgctgatgccaacggagcatcgtacacaagatacgctgatgacattgttttgactctcgccgtggctaccagggtacagtgcgacacaatctttcgggccgttgcagatgtagtgagtcacagcggctttcgtgtgaacagaatcaagtctcacgtccgcgggcctggtgcacgtaaggtcgttaccgggctagtgattaacgatgtgaggccccggttggcacgatccatgcgagaggacataaagctagccttataccacataaagaagcatggcctgctggggcatgcagagcgcaggcattcaaagaacccacttggctatctgaatcacctcgtcgggctgatctatttcgcccggagcatagagcaggacttcggtgtatgggccctgtccgaactgcgaatcgcgatggacgaccacaaagatttgctctctatccttcgtacgttcgactcaagtcaagatcagaggtactcctaccgaaatatttga

SEQ ID NO: 9076 - RNA, 1059 nt, synthetic construct
  source 1..1059: mol_type = other RNA
atgagggccacagtggctcgcagtaaagacaactacactacttttgagatacgcaagagaagcggaggcaatcgcaggatctgcgtccctgcacctgcgcttaagctggcacagggttggatacacaagcacatcctgtgttcgccaggggccttagcgctgctccaacaggcctctaccgcttatgctccagggagctccatcaaaatgaacgctagtgcccatgccggggctgcttggctcataaaactggacattaaggactttttcgaatcaatcagtgaacgacaggtttatcatgtcttcaagagccttttcgggtaccccgcacttttatcatttgagatggccagactgtgtacccgagtggtacccccaagaaatgacggagtggctaggcggcgcgagcgaatgtggagatggaccaaccgggcttctaaacatttttctccctactcttgcgtcacggcagtaggccacctaccgcagggagctcctacgtccgccatgctggccaacttagtggcagtggagatcgataagcagattcaggcgatcgcagatgcgaatgacgccacctacacccgctatgcagatgacattgtgctcactctgagcgatgggacacgctcccactgcgacgcgattctgcagaaggtggcccatgtggtgaacaccgcaggctttagggtgaatcggaaaaagtcctacgttcggggacctggcgcacgaaaggttgttacaggtctggtaatcaatgatgaccgtccaagattgacaaaagcctcccgggaggagataaaattggccctctaccatattaaaaagcacggtttgctgagtcattctgagcgtaggcactccaagaaccccctcggatatctaaatcacctcgtcggcctgatctacttcgccagatcaatcgaagaagatttcggcgccagggcccttattgaattgagaactatcatggctgaccacagggatctgctctcagtcctgcaaacattcgaggctatgccggccgaacgtgagagctatagctatcggagcatttga

SEQ ID NO: 9077 - RNA, 1146 nt, synthetic construct
  source 1..1146: mol_type = other RNA
atgtctatcgctgaccaactgaccgagaataaggtgccattaatctttagccttatccacttggcccacgtatctggcgtcaagtggtctttactccggtctttcgtaagacgagactccgatttttatggctgttacgagatccggaaacgatcaggcggtaacaggcgcatctgcgtgccggaaccagctctcaaactgatccagaaatggattcatgcaaacattctgagatccacaggcgcactagctcggctccattctgcttcaaccgcttacgcgccaggtgccagtatcaagaaaaacgccgacagtcacgtaggggctgcctggctcataaagctggatataaaggacttcttcgagagcatctccgagcggcaggtgtactgggtttttagagatttaggctaccctgccctcctctcatttgaactagcgcgactgaccacaagagtggcaccccccaggagagatggtaccatgcgtcaccgcgacaaaatgtggaggtggagcaacaacgcgtcccaggcatatcccgcctataagcccggccgcgtcacaggaaaccttcctcagggggcccccacaagtgccatgctctcaaatcttgccgtgcgcgaattggacgtgcagatacagctgatcgctgcacggcaccatgctacgtatacacgctatgctgacgatattactttgactctggttcaaggcagtaggccggcctgtgcagagatatttaggagcgttgcagatgccattactcatgccggattcagagtgaataaatgcaagtcacggatctcggggccagggagcaggaagattattaccggactggtgattaccagtaaggcagctcgtgtggccaaaaatgtgcgttctgagattgaaatcgcccttcattacatcaagaagcatgggctgctggaccacattgaaagatgcggacacaagaatcctgtcggttacctgaactacctttatggacgcatctatttcgttaggtccatagagttcgacttcggcactcgggccctggaagagttgaatgcgctgattaaaacgtacgaggggttgggatggtccagcaagccttttaaaatcgtccgaagcgatctggtcttccactccgcaaaaaagtga

SEQ ID NO: 9078 - RNA, 1059 nt, synthetic construct
  source 1..1059: mol_type = other RNA
atggtcgagagaaagatcgacgactatagagtcttcaccattcaaaaaagatccggaggtaacagaaggatttgttccccgagttcaaccctccggcgagtgcagacttggatccaccgtaatattttgtgcgccgccggctctctggccaaaattcacgccgcatccacggcttacgcacctggctcgtcaatcagagccaacgccaaagtgcataccggggctgcgtggatcatcaagatagacataaaagacttcttcgaaagcatatccgagcgtcaggcctactatgcttttaggagtctggcctatccggccctcctgtcctttgagctggcacggctttgtacaaggattgctcctccacgcgatgatggggctcaaagaaaacgcgatttactgtggcgctggaacaacgaccgggcaaagacaggcaatccatacgggctggtgcagtctgtggggcatctgcctcagggagcccctacttctgctatgcttgcaaacctggtattcgcagcgctcgacgtacgaatcaatgctatagcccagaagcacggtgctacatactcccgctacgcggacgatattgtgctaagtcttactagcggctgtcgggtggaatgcgcaaaaatttttcgcgatgtgacatctgttattagtcatgccggataccggatcaacagatctaaatcccgaatcaccccccctggcgctcggaagatcgttacgggcctggttactaacgatgtcacacccaggctgccacgagagatgaaagaagacatcatgctgtcaatctatcatatcaagaagcacggattactatcacacatggaacggaggaagtcttcgagccccttgggttatctcaatcacctcattggacgcattttgtttgcccagagcatcgagaacaagtttgggagctgcgctctcaatgagctccgtgtggccatggcaccctacagggacctgctggatatggccaggatgttaaatccaaagaccagcggcagcaatgatttcaccgcgctgtatcttttggtcttcccctga

SEQ ID NO: 9079 - RNA, 1215 nt, synthetic construct
  source 1..1215: mol_type = other RNA
atgctgggaccttccctgcatgcaattgagttccatgcacgcggattcaacgagcagtatgtgaaagcccttgtggataccgccaaacacttgtcggctaagagagtgcctgtggtctttacagtgatgcatttggccactctcagcaaaaccagttggtcagctctcatgcagactatcgtgcggcaaagtgagaacgattaccgcgtctttagcatacgaaaaaagtctggcggttttcgtcgtatttgcgttcccgcgccccatcttatgcagacccagcgatggatacacgaccacatcctgaattcaaggggcgctctggactgcctccatggtgcgtcgactgcctacgggaagggcagctctattcttaacaatgcctctgctcacgcgggcagcaagtggctaatcaagatcgacattaaggatttcttcgagtccatcagcgaaagacagatctattacgtctttcggagattcggctacaaggccctgctggccttcgagcttactcggatatgcacgcgggccattccccctaggtatgatggtcgtccgaggcgacgagacaagacctggcgctggagcaattctcaagtcgtaggcaaggggccttatctggccaccgccacagtgggacacctgccacagggtgcacccacctctgccatgttggctaactacgcagttgcttcactagacgaaaaaattcaggcgatcgcagatggcgtcggggcaacttatacgaggtacgctgacgacatcgtactctccatgaccaactcctcccgggagttgtgtcaaacaatctttcggcaggtgtgtgtggaaattacgacaagtgggttccggctcaatgagaaaaagtgcttcgtgagaggcccaggcgacaggaaaatcgtaaccggactcatggttaatgatgtgaaaccaaggttaacaaagtctattaaggatgagatcgaagtcagcctgcactgtattgggaagtttgggctgctgtcccacatcaaacgcaagaagattaaaagtccgttaggatatctgaaccacttgaacgggttaatcaggtttgcttactccatagacgataggtttggcaattgggcaactaaagaacttgacagagttctggccccagaacgcgagacaatagaactcctgaaaaatttctcaggaagaccccgccctaacagacatatgttcggatga

SEQ ID NO: 9080 - RNA, 1215 nt, synthetic construct
  source 1..1215: mol_type = other RNA
atgctgggcccgtcacttcatgcgatcaaagcacatgctcacggcctaaacgaacagtatgtgaaggtcctcgtagacacagcccgccagatgtcggtcaaacgagtgccagttgtttttacccttatgcacttcgccacattgagcaacaccccgtgggccgcgcttattcagactatcgggagaagggcagaaaatgattaccgggtgttcaacattcgaaagaagagcgggggatttcgaaggatttgcgtaccagtcccccacttgaagcgcgctcaacggtggatccatgaccagatcttaaagtccaggggagccctggattacctccacgaggcatctaaagcctatggggatggagactccatcctgaacaatgctagcgttcacgcaggctccgagtggattataaaggtggacataaaggacttcttcgagtcaatctctgagagacaagtctaccatgtatttaggaaattcggataccgagctctgctcgccttcgaattagcccgtctttgcaccagaaccgcccctcgaaggtacgacggtcagcctcggaggcgggacaagacatggaggtggggctcaccccaggttgcaggtaaggtgccatacagatcccgcacgactgttggccatctcccacagggagccccatcttccgcgatgctggccaactatgtcgccgcctccctcgatacaaaaatccagactattgcggacgcagccggggcagcttacactagatatgctgacgatattgtgctgagtctgacgaatagcgatagagagagctgtcaagagatctttcgccaggtctgtctggcagtgaccacagctggctttcgtctgaatgaaaagaaatgcctgatcagaggacccggcagtcggaaaatcgtgaccggtctggtggtcaatgatgtgaaacctcggctgactaagagcataaaagatgagattgaactgagcttgtactatattggcaaattcgggctgctatcacacgccaagaggagaaagaccaagtctcctcttggttatctcaaccatttgaccggcttgatacacttcgcccactctgtggacgatcgttttggggcttgggctcaaaaagaattcgaccgggtgctagctcctgagagggaaacagtggagctcctgcgcagttttagtggacgcccccggcccaatcgccacatgttagggtga

SEQ ID NO: 9081 - RNA, 1104 nt, synthetic construct
  source 1..1104: mol_type = other RNA
atgctgctgtggacccctcacctattcgaaaaagcgggcattcagagaaagtacgatattccctacattgcaaggctcatcgattatggaaatcaactcagccagaggaacttaccagtgatatttagtctgaagcacttcagtcgcctgaccgacatcaactattcctatttacgggccgtgattgatagaactgaatacccatacaagacattcaaaatccgtaagaagacagagggattccggaggatctctgtgcctgactcaagacttctggtaatccagcagtggttgcataagcacattctttccaaaatccagccccatttttcgagtaccgcatttaatccaggctgctctatcatgcggaacgctcaaccccactgtggtgccaactggctcatcaagatcgatatcgaaaatttcttcgactccataagcgaacgacaggtctatacgcagttcaaggcactgggctattctaagtacttatgcttctgctttgccagactgtcaaccaggctagcctcccgagaggcaaaaaaatacaaaaaacctcgctggcaaaacaaacgccaccagtatcctgagttcattggcaacttgccacaaggagcccccacaagcccaattctcgccaatctcgtgtgtcgacagctcgacgcacaaattcatcagctgatccagcccatggggcttatatacaccaggtacgccgatgacattgtcatctccggcaacgcgctgactagaaaggatgcttctaagcttatccaggagataagcaagattttgaatcgcagcgggtttcagaaaaatagcctgaaaacacggatcctgtcaccgggggctcgcaagatcgttactggtctgaatgtcaatggcccaaatcctaccattcctaagaagctcaaatattcaattagggccgagcttcattacgctaaagtttttggggtggctgagcattgtaaaaaattgggttaccacaagatagacggatttcgtaaccagatccgggggaagattgattttgtaagaagtgtgaaccccaagctggccgacaagttctatgctcagctggacgacataaactggccgtga

SEQ ID NO: 9082 - RNA, 1026 nt, synthetic construct
  source 1..1026: mol_type = other RNA
atgcttccgaacattattcccctgcagacaattggggaattagctaatatcaccggcgtgccctactcgtacatcaacaatatcattaagctcaaagaggactcttatcgatcttttagtatatccaaacgaagtagcaacacaaaacggaaaatcttcgttcctaagcctatgctaatgaaggtccagaaggctataaaccgctatatcctccagaatattcagccccacccaattgccaccgcgtactcatacggctccaacccaatcaagaacgctgcataccattgtaatagctctatcctcctgaagtttgatatcaaagacttcttccactccttcgatgagcgggatgtatactacctctttctgagctttggttataatagactcctgagctttcagctggcaagattgtgcactaagatcgtggagtccacctggttcccaaacgagtataaagaccactacatctatccaagtttgactatcaagaagaagtcaacttttctgcctcagggatgtccaacgagtcctatgctttctaaccttctgatgcgcacattcgataataagctggaaatgcttgccaataagttctccttgaagtgcactcgctattccgacgacctgacctttagctctgaaagcaagatgtcccaggattcaattaagattgtaatcgctgaagtgaacaaaatgttaggtaagaagttccgtatgaatagggagaaacaaaaagtttaccacaaagggcaaaggaagatcgtgacgggcctaattgttaacaacgacacacctaagttgaccaaagcattcaagaacgatctgcggatgcatgtccatttcatagccaaatatggatacgtggaacatgccctcaagaggaattgcgaccccttttctttttataatcacttcaatgggaggatgaaatgggccgagctgattgagccggcctttgtgaataaactgaaacacctgttagtcaacatatcaatacccttcacctacagcgcggagtga

SEQ ID NO: 9083 - RNA, 996 nt, synthetic construct
  source 1..996: mol_type = other RNA
atgacccagtggaatcccaatctgtttcgcaaggagggacttagcaaaggctatgattcccattacttgactaggctggtggagcagggggaaactatcaacgagcgtaatctccctgttgtgtttagtttagcgcacctcgcgaacctgagccatacgttatacagcgatttgcatggcttcgtatccagaaacgagcttgagagaaaggacttcccctataaaaacttctctattagcaaacggaccggtgggaaacgctggatttctatcccaactccggccctaatggcagtgcaatactggataaaccagaacatcctgaatcgcgtgataccacacgctgccgcatacgcctatgtcccaaagcggaaaattatccagcacgcccagagacattgcggatctggttggctgatcaagatcgatatcaaggactttttcggaaacatttcagagcgtcaagtcttcgacgtttttcttaatctaggctatcccaaactcttgtcatttgagatggcccggctgtgtacaagggtaacgcctaagcggaaagggaagcgatggtgcaacaccaataacgaacacacaatcaccggctatgattcgaaatttgttggcagtctccctcagggtgcccccacaagtcctgcactgtcaaacctcgtgtgtattggattagataaacagctgacatccctggctatttcagaaggggctacttattccagatatgccgatgacatttgtttctccctgcccatggggtgccggaaaagtgcactgcacatcaagaaggaaatctctaaaatcctccatggctacggtttcagcgacaactccaagaagaccaggcttataccgcccggagctagaaaagtgctgaccggcctcaatgtcaataatgacacacctcgaattccaaaggaaataagggacagcgtgaggatgcacctgtactacgctaagaagaagtggtaccgcaattctttgtga

SEQ ID NO: 9084 - RNA, 1137 nt, synthetic construct
  source 1..1137: mol_type = other RNA
atgactcagtggaatcccaacctgtacaggaaggaggggttaagtaagggatataacgttcactacctgaccagcctcgtggaacaaggcgagaaatccaacgagaagaattttcctgtagtgttctctctcgctcacctcgctaatttgtccagaaccttatactcagatctgcacatcttcgtgagccgaaccgcgatcaaacggaaagactttccttacaaaaacttcccaattgccaagagaacaggtggtaagaggtggatatcaattccgacaccagctctgatggcagtccagtactggattaatcagaatatcctcaacaaggcaacaccacactccgccgcttatgcctacgttcctaataagaaaatcatccagcacgctcagcgccattgtggagccgcgtggctgatcaaaattgatataaaggacttcttcggcaatatatcagaacggcaaatctttgacgtgtttcttgagctggggtatcccaaactgctctcttttgagatggcacgcctgtgtacccgagtcactcctaaaagaaagggcaagaggtggaggaacatcgtgactgagcacacaatatccgattatgatagccggttcgttgggagtctaccacaaggggcacctacgtcccccgcactgtcgaacctggtgtgcatgaacttagacaaaaaattgacgtctttcgccatttctcagggcgccacctactctcgctacgccgacgacctttgtttttcactgtccgacggttgccgtaaggatgccctttatattaagaaggagataagcaagatcctccgagaacatggtttcagcgataactctaagaaaacaagaatagtgccaccgggagctaggaaaatcttgaccggactgatcatcaacgacgaacttcccaaaatccctaaggagattcgggatagcgtccgtatgcatctatattacgccaaaaagaatggcatcgcgtcacattgcactattcgcgggttcagaagtgtaattggctttaagaactatttgagtgggatgattggatacatttccagcatcaatccccagcagggcaagaaactccggactgaattcaatagtctgccctggattgattttgacctgtga

SEQ ID NO: 9085 - RNA, 1137 nt, synthetic construct
  source 1..1137: mol_type = other RNA
atgactcagtggaaccctaacctgtttcgcaaggaaggcaagagtaaaggcttcaaccctgagtatctgacagccctggtacagcagggggagaagacagatggcctgggcttccctgtggtgttcagccttgctcacttggcaaacctcagtcgcacactatactccgacctgcactctttagtctcccgcaatgagttggagaggaaggacttcccctacaagaactttcctatcagcaagcggaccggtgggaaacgctggatttcagtcccagtccctgcattgatggctgttcagtcctggatcaatcacaacattctttcaagaaccaaaccgcacgcagcagcctatgcgtacgtgcccaagaagaaaataattcagcacgcgcaaaggcattgcggtgccgactggctcgtcaaaattgatatcaaagacttctttgggtcaatctccgagagacaagtatacaatgtgtttcttggtctaggatatccaaaactgctgtcattcgaaatggccagactctgcacaagggctactccaaagcgacaggggaaaaaatggcggaatgagatctccacgtattcgatcagctcatacaattctgaattcgtcgggtctttaccccaaggagctcccacctctcccgcactctccaatctcgtgtgttttgaactggatgtggccctgacctctctggccaccagtctggacgctacttactctcggtacagcgatgatttgtgcttttccttgagcgaaggaaacaggaaatccgcccttaatattaaaaggcaggcctcgaaaatattacgggagcatggctttagtgataacagcagcaagacgcggattgttccaccgggagctagaaagatgctgactgggctgaatgtgaataacgccagtcctaagataccaaaggaggtgcgtgacagcgttcgtatgcatctttattattcaaagaagctgggaatcccccagcattgtaagaacagaggttttcgaagcatcatcggattcaaaaatcacctcagtggcgtgattggatatatatactctattgacaaggacctcggcaacaagtacaaaatcgaattcgattccctgccatggattgacttcggcatctga

SEQ ID NO: 9086 - RNA, 1137 nt, synthetic construct
  source 1..1137: mol_type = other RNA
atgacccaatggaaccccaatctgtttcggaaggagggtatcagcaagggttacgcccctaactatctcgccgcactgattgagagagcggagaaaattaatgagaataatgttcctgtggtgttttcgctcgctcatttagccaacctctccgggaccttatatagcgacctccactctttcgtgtctagaaacgccctggaacagaaagactttccgtacagaaactttcccattaaaaagaggtcaggaggcaagcgttggatttcagtacccgtcccacccctaatggctgtgcagagctggatcaacacaaatatactgaacaagataacgccccacgcaagcgcttacgcctacgtgtgtaacaggaatttgattcaacatgcccagcgccattgtggcagtgattggatcatcaagatcgatatcaaggacttctttgggaacatcagcgaacgacaggtttactccgtctttgttgaactggggtacccgaaactgttgagtttcgagatggctcggttgtgcacaagggctaccccaaaaaggaaaggcaaaaagtggatcaactacgctaatgatcacactattgaatcgtataacacaccttatgtcggatccctgccacaaggcgccccaacctctcctgcgctctccaatcttgtcttctctatcgtggataaaaagctttcctctctggcgctgagccatggagcaacttactcaaggtatgcagacgacctatgcttcagcctcatacagggaaatcgacacatctctctggcactcaaaaaggaggtgtccaagatacttaacgagcatggcttcagtgacaatagcaaaaagactcgcatcatcccccctggagctcgcaagatggtaacagggttgtgcatcaattctagttcacccaaaattccaaaagaagtgcgtgacgccgtgcggatgcacttatattacgcaaagaagctgggcattgccagtcactgtatgagcagaggtttccgctccgtcatcggctttaaaaactatctggccggtatgattgcctacgtgtcctcagttgatgtgaagctggggaccaagtttcggcagcagttcaatcttctgccttggatagacttcgatatttga

SEQ ID NO: 9087 - RNA, 1134 nt, synthetic construct
  source 1..1134: mol_type = other RNA
atgcaatggaacccaaacctgttccgaaaagaaggcaatgcaaggggctacgatgatctttacctgaacgccttagtgtcccagggacagaggactgccgctagagggctgccggtcgtgtttagcttggctcacctggcaaatctcagtaggaccctgtacgccgatttgcatggattcgtcagcagatcgggaatcgagtacccagactttccttataaaaacttccccattgccaagagaacgggcggcaaacggtggatatctatcccagtaccccagctgatggccgtgcagcagtggattaaccagaacattctgaacaaagtcgtgccgcatcctgcggcattcgcttatgttccaaagcgccgtctgatcgagcacgcttcactccactgtggggcggattggattatcaagatcgacattaaggacttctttagcaatatctccgagaagcaagtgtttaatgtgtttctcggtctagggtatccagccttgctctccttcgagatggcaagaatctgcacccgggtcacaccccttcgcaaaggcgctcggtggaagaatagcttcaaggcccattcaatttcaagctatgacagccgattcgttggctctctaccccaaggggctccaacatctcctgcacttagtaaccttgtttgtatgaaaatggacgaagagctgacagaatgggccatatctaaaagtgtgacatactcccgttacgccgacgacctgtgcttttcatttgttaacagcagccggcagtcagcatacgatttgcagagggaagtgaccaagatactccgcaagcacggtttttccgataatggaaaaaaaacccggatcatccctcctggcgccaggaagactctcactggactgaacattaatgccgcgtcccccagtatccctaaagaagtccgcgactctatcagactgcatttgtatttctccgagaagaatggtatatcggagcactgcgagaagcgcggattctactccattattggctttaagcatcacctcttcgggctgatcagttatgtgctgtctgtagacaagtctaaaggggagaagttccgacagcaatttaacgctttaccctggttagattttgaaaattga

SEQ ID NO: 9088 - RNA, 1137 nt, synthetic construct
  source 1..1137: mol_type = other RNA
atgactcactggaatcccaacctgttccgcaaggaagggtccgccaagggttacgagctcgcgtatctgaatgctctcgtggagcagggggataaaagcacagcacttggggtgcctgttgtattcagtctcgctcatctggccaacctgtctcgaacactgtactccgatctccacggttttgtaaggagagcagagatctctcgggcagactttccgtataaaaactttccgatatcgaagcgtactggcgggaaacggtggatctcaattcccgtccctccactgatggcggtgcagcagtggattaaccaaaacatccttaatagggtggtccctcacgccgccgcatttgcctacgttcccaagcgcaaactgattgaccacgcaaagaggcattgcggcgccgactggctggtcaagattgacattaaagatttcttctccaacatcagcgagcggcaagtgtttgacgtgtttcttaagctgggctacccaaagctgctgagttttgaaatggctaggctctgtactcgtgttacccctaaaagaagaggcgccaggtggacccatgtgaccggagaacatgccatcagcgactatagctcccagtttgtcgggtccttaccccagggtgctcccacgtctccagctctctccaatttggtctgtattgaattggacaaagagttaacccagttggctacagcgctatcagcaacatattctcgctacgccgacgatttgtgcttctcatttgttggcggcagccgccaatcagcatttgatttgaagcgggaagtgagtaaagttctgtggaagcacgggttctcggagaacaccaagaagacgcgaatcgtaccccctggagcccggaaagtattaaccggcctcaacgtgaatgccagcttcccaacagttccaaaggaggtcagagatctagtgaggatgcacctgtactatgctaaacttcgaggtataccagatcactgcaaggagagaggattccgctctgtcatcggatttaaaaatcacctcttcggactgatcggctacgtggctactgtggacgtgactcatggagaaatattcctaagccagttcaatagtctgccttgggtgaatttcgatctttga

SEQ ID NO: 9089 - RNA, 1134 nt, synthetic construct
  source 1..1134: mol_type = other RNA
atgcggtggaacccccacttttttaggcgcgaaggcgtcaacaaagggtacgactctaactacttggaggccctcgtccgccaggggaatctgtcgagcggagaacggttaccagtcatctttagcttgagtcatctggctaatctctccaaaactctgtacagcgatttgcacgggttcgtgtcccgagaggacatctttcgggaaaactttccctacaaaaacttcacaatagggaaacggtcgggaggacgcagatggatttccgtacccgttccgcctctcatggctgttcagaagtggattagtcagaatatcgtgaacagtgtgctgccacaccccgctgccttcgcatatgtgaggaatcggaggatcctggaccacgcttaccgacactgcggggcggactggatgctcaaaattgacattaaggatttcttcggcaatatctcagagaggcaggtttttaacgtcttccttagcctgaagtatactagactcctgtccttcgagatggccagactgtgcacaaaggcctctccgaatagacagggcgagagatggtgcaacgtggatcttgactattctgttagcggctatagttccaaatttatcggcagcttacctcaaggcgctcctacctctccaggattgtccaatcttgtcttttctcctattgatcatcaactttcagagctcgcccaggccgaaagcgcagtgtattcaagatacgccgatgatctttgtttctctttcaccgggtcctctcgtagtgcggcagttaagatgaagcgcgccgtagccgagatcctatggaacgctggtttttcagaaaacttgaagaaaacgcgtataatccctcccggggcacgcaagatcctaaccggcctgaatgtaaatgactccaccccaacaataccacgagaggtgcgcaacctggtgcggatgcacctgcattatgcgagggtgaacggcattccccagcattgtagggaacgtggatttaggtcagtcattggtttcagaaattacctcttaggcgtgataggttatgtggcaagcattaatgaccaggccggaaagaagttcctgtaccaattcaacgagctgaattggatcgattttggtctgtga

SEQ ID NO: 9090 - RNA, 1137 nt, synthetic construct
  source 1..1137: mol_type = other RNA
atgactcgatggaatcccaatctgtttaggaaagacggcctggctaagggcttcaatccagaatatctcggagcgctcattgcgcagggagagtcgctggtgtcgaaccaaatgcctgtagtgtttagcctcgctcacctggctagcctgtcacgtacattatatagcgatcttcatggttttgttagtcgttccgatatccagcgcaaggacttcccctatagatcattcccgatagctaagcgctctggcggggtacgctggatttctatccctgcccctccacttatggcagtgcagcagtggatttgtcaaaatgtcttaaatcgggtggagccgcatgctgccgcttacgctttcgtgccacggaggaggctgttggaccacgcacagaggcactgcggtgccacatggttagtgaaggtggacattaaggactttttctctaacatctctgagaggcaggcttttcaggttttccttagactaggctacccgaaactgctgtccttcgagatggcccgactgtgtacccgagtcactcccagaaggaagggggcaaaatggaccaactccaacgacgatcattctatccccgagtatgattgccggttcgtcggcagccttccacagggagcaccaacgtcccccgcccttagtaatctggtgtgtatggacttggatcgcgacctcacagaactggccgtttccaaaagcgccaccttttcaagatacgccgacgacttgtgctttagcctaacctccggttcaagagaggccgccttcgccttgaaacgggatgtctctaaggttctctggaaacacgggtttagtgaaaaccctaagaaaacaagagttgtgcctcctggagcaagaatggtcttgactggactcctcgtaaacgctaatgtgcctaccgtcccccgcgaagtcagggatctggtgcggatgcacctgcactacgcaaagaagaatggtatacccatgcattgcaaagcgcggggctttcgcagtatcttcggctttaagaaccacctgctggggctaattgggtacgtggcaagcgtggataagaaacatggggccgacttctacgcccagttcaaccaactgccatggatcgaatttgatctctga

SEQ ID NO: 9091 - RNA, 1155 nt, synthetic construct
  source 1..1155: mol_type = other RNA
atgacccgttggaaccctaatagttactacaaggagggtaaaaacaaaggatactcttccaactatctgaatagcttggtagtgcacgggaagaagatagctgccaataacatccctgtgatctacagcctgaaacatctggctcttcttagcgggacaaactacaatgaactgtaccagatcgtcagcagacttgacatcgaccccgagggcccttcccccaattacccttacaagatttttccaatacggaagcgcaggggagggaaacgccttattgcaatcccgtatcctactctgatggctgtgcagcgctgggtaagtcaagagatcctgaataaactgccagtgcacccagcggctttcgcctatgtcgccggtaagaagaatccgttgagggatcatgcaaagttgcactgtgatgctgactggattctgaagctagacatcaagaactttttctcgaacatatctgagcggcagatttataaggtgttcaaaacatgcaactactattccctcctctccttcgaaatggcaaggctgtgtactatgattgtccccagcaggagaaaacgccgatggaacaattcaaagcagttcaagaataagaacctgtatccatgcgatcacataggctttctgccacaaggtgcgcctacttctcccgccctgagcaatctcacatgtatcgacatggacaatgaactcaccaaattagccctcgaaaatggcgccaactactcccggtatgcagatgacttatgctttagttttaccatcagtacccgacgggaccttctaaaatttaaacgcacggcctgtgagctgctatggaagaatggcttctcagaaaacaaaacgaagacaaagattctgccacccggatctaaaaaagttatcaccgggctgattattaactccggcaagcccatgattcctaaggagctcagagatagagtgcgaatgcacttgtatttctcaaaaaagttaggcattcccgagcattgcaaacggagaggctttcgttctatcatcggattcaggaaccatctctatgggttgatactctacattaagtcaatcgatcccaagaaaggagaggtttttagggccgcattcaaagatctgccatgggttaatttcaacatctga

SEQ ID NO: 9092 - RNA, 1143 nt, synthetic construct
  source 1..1143: mol_type = other RNA
atgaatagatggaatccgaatttctactacaaggaaggcataaaacgcggatttaacacagagtacctggataagctcatagagcaggggagaaaaatccaggagaataacatacctgttctatttagccttgcgcacttggcaagctgctcgcgcactcagtattccgagttgcatagcttcgtagctcgcaccgagtacgggccagagggatacccctataggaatttccctattcggaagagaagcggaggtaagcgatggatttctgtccctgctccacctttaatggcagtgcagtcatggatcaacaagaacattcttaacagcattcctacacacccgacagctttcgcttacgtgaacggaatcaagtcaccgctaaaggcccacgccgagaaacattgtgatgctgattgggtactgaaggttgacatcaagaatttcttctcgaacatatcagaacggcaggtgtatcgggtgtttagaagtctgagttactccaaacttctctcctttgagatggccagactctgcacgcgtatcacccccggaaggaccgggaaaaggtggaacatcgattggaatgaaagtggtgtcgagggctattcttgcacttgtttggggagtctgccccaaggtgccccaagttcccctgcactgtctaacctggtgtgttttgaactcgacacccaattgcatgaactcgccctgtcccggaacgccacatattcccgatacgccgacgacctgtgcttttccttcatcaaatcttcccgggacgaggtctatcagttcaaacgcgaagttaataaagcactttgggataacagcttcaccgaaaatcccaaaaaatctcatattatcccacctggtgccagaaagattgtgactggcctgatcgtgaattctgataagccaagcattccccgcgaattaattgacgcgatccgaatgcacctgttctattcagaaaagtttgggatccccgcacactgtaggaaacgtggctttcggagcgtcattggcttcaggaaccacctcaaaggcctgatcatgtacgtatactcaattgacccaaagaagggcaatgagtttttagagaagtataacaggctgccctggctggaatttgagatctga

SEQ ID NO: 9093 - RNA, 1146 nt, synthetic construct
  source 1..1146: mol_type = other RNA
atgaaacggtggaatccgtatttttttagaaaacagggcgaagagctcaactacaacaagaactatttggacaaactcattcagataggatctcaaatcgatagcaaactgactcctgtcatattctccctcagtcatctttgtaagctggcttccgtgtcctatcaagaaatgcatgacatcatagcgaggaagaattttacgtccttcggctatccataccgtaatttcaccattaggaagcgatctggcggctaccgatggatcagcgtgccttgtccatcattgatgatcatacaacactggattgccagtgaaattctccgccagatgaaaccccaccaggccgcatacgcctatgtgaacaacctgaccagccccatcaagtcacacgtgcagaaccactgcggggccaaatggatactcaagctggacattgaggatttttttggtagcatctcggagaagcaggtttacaaggtgtttaagaattaccagtacccagatctactgtctttcgagatggcgcggttgtgtaccaaaattagtaggaataggaaaggcaaaaagtgggtcaatgacagaaagaataacgtggagctatcaagttatttctccaaatacattggctgtcttccccagggtgcccccacatccccagctttaagcaatctggtttgcatcaacatggatgaagagctgtctctgctgagccgcaacaacgacgccaattactcacggtatgcagatgatctgtgctttagcttctataccaccaatagacgcaatgtgtacatgtttaaaaagcaggtatgcgaaattctttggaaatatgggttccaagagaacatcaaaaagacacacattgttccgcccggggctagaaaaatcgtcactggacttatcatcaacgaacatgaaccaacaatcccccgggaggtaaaagacaacattaagatgcatctgtactacgcaaagaagtttgggatccctgaacactgcaaaaacaaggggttccgttcggtcattggattcaagaatcatttagagggactgatcaattacgtgacatctgtcaatcctgagcagggtaagaagtatgagaaggctttcctgactttgccttggttaaactataagctctga

SEQ ID NO: 9094 - RNA, 1140 nt, synthetic construct
  source 1..1140: mol_type = other RNA
atgaaccgatggaatccaaacacttatcacagaaacggcctggaaaagggttttgacccagattaccttctgacactggtcaaatccggaaaggccatcaagagtaaacataagcccgtcatattcacgttgtctcatctcgccaactgtactgatacacaatattcagatctgcacgctttcgttagccggaaaggatactttagtgacaccaatccacactatcgcaccttttcaataaaaaaaaggactgggggtcagagaaccatacacgcacctcaccctgtgctgaagatcgtacaatcttggatcgctcgcaatatccttgctgatgcaaacatccacgaagccgcaaaagcgtacaagaagggcgagtccattgtagacaatgcttctcctcattgtgaggccgagtggctgctgaagctggatatttgcgacttttttcacaactgttccgagcgccaggtgtactacgttttcaagtcaatgaactactcatctctgctctctcttgagctcgcccggctatgtaccaaggtggacgacaaacgacccttacatagatggaataacaccaacaagcagtataaaattgaggaatactccagcttcagggtgggctcattaccccagggagcccctacaagtccggccttgtctaacctaatttgcgaaactctcgacgaaatcctgattatgctcagtttgaaatactccggatgctacactaggtatgcggatgatctgaccttctccttcaacaattccaccagggccaaagtgatggattttaaacgtcaggtgtcgaacgaactcaagaaatttgggttcgagatcaataagcagaagacacgtgtcatcccacccggcgcaagaaagatagttacagggttgaatgtgaatggaagtcagcctagcctgacacgggagttacgggacaagattaaagcagacctctattactgcaagaaatatggcgtcgtgaatcactgcgaaaagaataaatacaagagcattatcgggttcagcaaccatatgaagggtatgattagcttcgtctacagcgtgaatcccgagctggctggcaagtataaaatcaagtatgacgagcttgatcttccgacgttggttctgtga

SEQ ID NO: 9095 - RNA, 1140 nt, synthetic construct
  source 1..1140: mol_type = other RNA
atgaatcgctggaatccgaacatctatcatcgtaatggcgtagacaaaggttttgagccagattacctgctgacgctcgtccagtccggcaaggctatcaacagcaaacataagcccgtgatattcactttgtcacacctcgcaaatgtgacggacacccaatattcgaccctgcatgagtttgtgagtagaaaaggatacttttccaatattgagccacactatcgcacctttagcattaaaaagaggacaggagggcacaggactatacacgccccccatcctgtcctgaaaaaagtgcagtcttggattgctcgaaatatactggcggatgcggacgtacacgaagccgctaaggcatataaacgaggggaatccatcgttgacaacgccctaccccactgtgaatctgagtggctgttaaaactggacatctgcgatttcttccacaactgttctgaaaggcaggtctactacgtgttcaaatacatgaactactcatccttgctctcttttgagctggctcgcctgtgcacaaagatcgatgataagaggccgctcagacggtggaataataccaacaagcaatataagatcgaggagtatgggagttttcgggttggatcactgcctcagggcgcccctacttctcccgcactgagtaatctcatctgtgagaagttagacgagatcctgttcatgttgtcccttaagtacagcgcctgttatacacgttacgccgacgacttaaccttttcatttaataactccagccgcgcaaaggttctggggttcaaatgccaggtcagcaatgaacttaaaaagttcggcttcgaaattaacaagaagaaaactcggattatccccccaggtgccagaaaaatcgtgaccggactgaatgtgaacggaaacaaacctagcttgacacgggaacttagagataagattaaggctgacctttactactgcaaaaagtatggtgttgtgaaccactgcgaaaagaacaagtacaatagtatagtcggcttctctaaccatatgaacggcatgatttcattcgtgtatagcgtgaacccttccctcgccgagaagtacaagaaacagtatgaggagctcgatctaccaagtttggtactttga

SEQ ID NO: 9096 - RNA, 1140 nt, synthetic construct
  source 1..1140: mol_type = other RNA
atgaatcggtggaaccccaacacatatcacaagaatggcatcgagcagggattcaaccccgattatctggtgaccctcgtgaaatctggcaacgcaatcaagtccaaaagaaagcccgtgatcttcaccttggcccatctggcaaattgtacagatacacagtattcggacttgtacgcctttgtttcaagaaagggttatttcagcgaatcagaacctcactatcgtaccttctccattaaaaaaaggagtggcggaaatcgaatcatacacgtgccacatccggtcctaaaaatcgcccagagttggatagctcgccacattttagatgatggagatgtccacgactgcgctaaagcttataaaagtggggaatccattatcgacaacgccagcccccactgcgaatctgaatggcttctgaaactggacatatgcgatttctttcataatatctcggagcgccaggtatactacgtgttcagaaagatgcaatactcttctctcttgagcctcgagctggcccggttatgtacaaagatcatagataaacggccaaaccacaggtggaataacaacccgaaaaactacaagatcaaagagtacagctccgatagagtcggttcactgcctcagggggctccaacttctccttccctgagcaatatcatctgtaaagacttggacgagactctgtttatgctcgccctggagtctaacgcttgttacactcgttacgcggacgacctcactttttcatttaataacaccaccaggaaggatattgtcaattttaagcgaaaggtttccaatgagctgattaagtatgggtttaagattaacgctaagaaaacccgcattgtggccccaggcgcgaggaagatagtaaccggcctgatcgtgaatggacctgtccccacgatccctcgcgaacttaaagacaagattaaagccgatctatactattgcaagaagttcggcgtggcaaatcattgcatcaagaacaagtaccaaagcatcattggtttctccaaccatatgcgggggatgattagtttcgtgaacagcgttgacaagaaactggcacttaaatacaagaaggcatatgacgagcttaatctgccaacgctcattttatga

SEQ ID NO: 9097 - RNA, 1140 nt, synthetic construct
  source 1..1140: mol_type = other RNA
atgaataggtggattccaaacacataccataggaatggtctgatccaggggtatgacaagacatatctcaaaaatctggttcagactggaaatataatctcagggacccaccaccccgtgatctttacactaggacatctgtctaaatgcaccaacacacagtatgacgaccttcatagttttgtgagccgcaaggattacctgtcagaaatcgagcctcattacaggacgttcaacatcaaaaaacgcaccggagggtacagaaacatccatgtgcctcaccccgtgctgaagatcgtgcaatcatggattgcacggaacattctgagacaggtggatgttcacgattgtgccaaagcgtataaggtgggcgaatcaatttacgataatgccctcccacactgtggagctcagtggttgctgaagttagacatcaaagacttctttagcaacatttctgaacggcaagtgtattacgttttcaggaagatgaattatcctgcacttctatctttggagatggcgaagttatgcacgaaagtggatcatctcagagtcggcaagcggtggtctaacaccgagaagaattacgcagtcaaggaatacctgtttgataaggttggtagcctcccacagggtgcacctacttcccccgctctcagtaatattgtgttcaaggagttggacgaactgttattcatgctgtctctcaaccacgaggcctgctatacccgatacgccgacgacttgactttctccttccactcctccagccgtgccgaaatcatcgcctttaagcgccttgtaagtaaggagctgctgaagtttggctttaatataaaccccaagaaaactcgaatcgtcccacccggggctagaaaaattgtaacagggctgatagtcaatacccataaacctagcattccgaaggagatccgggataaggtaaaagctgacctttactactgtgagaaatacggcgtcattaaccactgcgtcaaaaacaactataaatcgatcataggcttcagcaatcacataagtggcatgatttccttcatttattccatcgacccagtgcagggaggcaagtttaagaaagtgtatgataagctcaacctgccgttgttcgttctttga

SEQ ID NO: 9098 - RNA, 1143 nt, synthetic construct
  source 1..1143: mol_type = other RNA
atgtctatttggagtcccttgctgttcaatgcagagggcaagaagcaaggatatgattgcaggtacctgcataaactgaccgaccagggaaacaagctctccgactctggactgcctgttatttttacactagctcacttatgtgctatggccggtgtaagcttctccctgattcacagttgtgtgagcagaaaatatgacccttacagatcattcaccattaaaaaacgttcaggagggtacaggcagatcgtggtgcctgagcccgagctaatgcatctccagcgatggatcaatgaattcatccttaaaagggccaaagttcacagctgcgccgccgcttatatcagtggctcagacatcaagatgaacgcttccaagcatttgggcgcaaactggttaatcaagcttgacattcagagatttttcgagagcattagcgaacttcaagtctactacatattccatcgactcgggtaccccaaactgctgtcctttgagatggccagaatctgcactagagtcgacacacagtccaataggcactttcgccccagatggaataatcgcatccaccacttcgaaatactcgaatattgtgatagccgtgttggatacctccctcagggcgcccctacttctccatcactctctaacctgacatgccggaaactggataaagagatttatgatctgtcatgccgctctgactgtaggtacacccggtatgcggatgatttcgccttcagctttatcgacttagatcgagagaaagcatccaactttgtaaaccaggtgtcgcggataatcagcagttatggatttaggaagaatgcccgcaaaactaagatcattccaccaggctctaagaagattataacggggttggtgctgggtaacgggaaggtgcatctccagaaggagctgaaggactacatccggcaaaacatctactttgcaaccaagtacggggtggacgaacattgtaaaaagcgcggcttcgtctccattgatggcttctataatcacttggagggcattgtgaattttgcgcttttcatcgagccggatttcggggaaaaggcatttgaagaatttcgggctataaagtggccaagtctgatcgtcggtctgcacgcttga

SEQ ID NO: 9099 - RNA, 1113 nt, synthetic construct
  source 1..1113: mol_type = other RNA
atgctaaatggcgggccttttaagtatataaaggagtccctgatcaagtcaaatagcatcctttacaagatcaagatctctatatacgtgcggaagttgtcctctaagaatctccctatactcttcaacctaaagcatctgtgtaacataatcaacgtgagctatgttaaaagcaaagacattgtgtcacggaaatattacgcctacaaacatttcactatcaagaaacgaagtggaggtgtaagacacattcacattcccaaggatgagttgaggctcattcagaaatgggtgcacaataacatactgctgaaaaactcttacgacgacagtgcttttgcgtacattagcgggagaaatatcaaaatgcatgccgaaaggcactgcatggctcgatgggtgctgaagattgatctggagaactttttcgaaaacacaaccgagagaaaagtcttccacatcttcaaaaaaatgggctatagcaatatcatgagtttcgatctggccagactgacgaccattcctgtcaatataaaagcaaaggagaagctgaagaagtggaagaacaaatcatcgatcaataaaagcgatcgcattcttggatctctcccacaaggtgccccgagcagtccattgctgtcaaatctctgcttcgccgacctggacagggaaattttttccatcgctaattccgctgaatttgtctatacacgttactccgacgatttgatcttctctacctttgaaggtgaccggatgaaagtgctaaacttactgaaggacgtcaggaaacttctgtcaattggggggtatcggatcaacaacaagaaagtaaagatcctgtctcctggcgcacgtaagatcattactggcctgaacatcaatcagggctttcccaaagtgaataaaagctacataatggaggtcaagaaacatctctattactgcctcaagttcggaccattgtcccactgtgagaagattaattttcgcaacatcgtttccttcaaagcattcttaaagggccgcatcaactacattaagttaatcgatcccgttgtgggacttaagcttagtcagaagtttgagctcattcattggcccattatctga

SEQ ID NO: 9100 - RNA, 963 nt, synthetic construct
  source 1..963: mol_type = other RNA
atgaatgtctcctataccaaaaccaaggacatagtggatcgcaagagctatccatacaagcatttttcgatcaagaaacggaatgggggctttagaaatatccacattcctcaggacgagcttagactgatccagaaatggattcacaagaacatcctgcttaaaaacaattacaaggattgcgctttcgcatacattccgggcagaaatattaaaatgcacgccgaacggcactgcatggcacgatggcttttgaagatagatctggagaatttctttgagaatacaacagaaaggcgagtatttcatgtgttccgcaatatgggatattccaaaaagatgtccttcgacttcgccagattatctaccattcccatgaacatcaaaaaaaaagagtcaagcgggaaatggaaaaaccgttttccaatcgggcggctggacaggattctcggatctctgcctcaaggcgctcccagttcccccctcctgagcaacctatgctttagcgaactcgataggaaaatcatatcaatcgcggattctttcgaatttgtttacaccaggtacagcgacgacctggtgtttagttgtttcgagggtgaccgtattaaggttatcaagcttctcaagagtattagaaaactcctgtccatgtacggctaccgaatcaacaacaagaagatcaagataatcacaccaggagcccggaagatcataacaggcctgaacattaaccagaatacgcccaaagtcagtaagtcttacattactgaggtgaacaagcacctatattattgtaagaagttcggtccactcagccattgtgagcgcattaaattccgcaacactgtgtcatatagggatcatttaaaggggcggatagattatatccgcctgatcgaccctgtcgaaggaactaaactgttgcagaagttcgagttgatcaattggcctttgatttga

SEQ ID NO: 9101 - RNA, 1179 nt, synthetic construct
  source 1..1179: mol_type = other RNA
atggagacatggagtacacatcagttgtatcagtcggctgtggcctcgctcgggcttgatgcagccgctgacctgcgggtatactgccaacggctccggttaaagggggtcgccgttgtttttacactgggccacctggctaggattacggacgtgaactatcagactctaagggaatccgtgaataggagaagagagtctgcaaactatagaatgtacgcagtaaagaagcggtccggcggacgcagattcatacacagtgtgtgcaccgatctgtttaaggtacagcgatttatcaatcaggaaatcctccagaaatgtatgccacaccctgcatcttttgccttccacaacagcggcggaatccggaagtgtgccgccatgcattgcggggctcgttggctgttccagtccgatttaacagatttcttctacaatgtgaccgagattgacgcttaccgagtgtttcaggagatcggctaccgacacgtcctggccttcgaactggctagactatgtacgaccacccaccttccacgaagccagatgaggaggctgtatgtggaggagtgggcgtacttcaacaagcatgcccgcaaacagaccggtgatggggaggatgactctgtcaccatgccctatgccgccagatttggcgtcgcgggtgtgttaccgcaaggcgcacctaccagccctatgctgtccaatcttgcagctgcgaaactcgacgaaagcctccaaaactttgccagtaagaatgggttcgtgtacactaggtatgccgacgatattacaatctccgcatcagacctgcccaaatctgtatcttccttgcatcgttcaatcgtccaaattatccgcaaaagcgggtttaaggagaatcgcaaaaagactaggatagcaggacccggatccaaaaaggttgtgctcggattgcttgtggacggtgatcagccccgtatatcaaaggagacttatagacgcattgatcggcacttgcatgctagtctgaaatacggacttgttgaaactgccgtccacgaaggtttcgactcagctttcggctttcataaccacctgtctggcctcgtggccttcgtcaaagacgttgacacaaagcgctgggaggaatttgcgctgcggctgagcaaggtgagggtgccatggagcgaaaactga

SEQ ID NO: 9102 - RNA, 1197 nt, synthetic construct
  source 1..1197: mol_type = other RNA
atggagacatggagcgctcaccagctcttcactaccgccgaaagaagtatcggcaaaagcgccgcatacgccctgcagtcttacgcacagtccctggaagctaaaaagttgccagtggtcttcactctgcgccacttgtctacgatcacaggagtctcttaccgggttctgcaccagaccgtgaataggaagagggaggcatgtaactaccgcatgtatgccattaaaaagcggtccggtggtcgtagaataatccatagtgtctgtgaagacctcattcgggtgcaggactttgtaaacagagagattcttcagcggtgtcaacctcacccagcctcctttgcattccattcaagtggcggtataaaggaatgcgcttcgatgcattgtggcgcaaggtgggttttccagtttgatctcagtgacttcttctatgatgtaacggaaatcgatgtatatcggattttcgacgatttgggctacagatctctcctggcatttgaactggcgcgtctgtgcaccacaactaagctccccaggcaccttaaacacctgctctatcattgcgctaatcccgataacctgattcaggatttcgaagatgactttgagaaaccggggaatggggttcgccggcttccctatcctgagcgccatggggtggtgggtgtgttaccacaaggagcccctacctcaccaatgttatccaatctagctgctagacgtatggacgagctgctgcagagcttcgctttcgactccggctttgtgtataccaggtatgccgacgatctaacattttctgcagctcgattgcaagacaagcacggcgtgtgctctgtccgcagggaggtgatcgggctgatcagaaaaagcggatttaaggaaaacagtaagaagagcaggatagccgggcccggatcaaaaaaagtggttctgggccttttagtcgatggggacacccctcgaatttcccgcgagacttacagacgaatcgatcggctcctttacggcgccctgcagaatggcttcgagagcgcctccgcgttcaacaaatttgactcagcgttgggcttctacaatcacctagggggactgatcgccttcgtgaagtcagtcgacgagaagcgatggagcgagtttagcaacagaatgaggggaatcgagcaaaagtggggtgattttggagacatttga

SEQ ID NO: 9103 - RNA, 1185 nt, synthetic construct
  source 1..1185: mol_type = other RNA
atggatgcgtggtcagtgcaccacttatacgagaacgccaagaatcaacgggatatgcagacagctgcgtctctgcgtgactatgcagcccagctcagatcgagtggcctgccagtgatatttacgctaggccatctggccaagatagttggcgtggagactgaaattctgcatgagactgtgaatcgacagcgcgagtctgccaactacagaatgtatgcagtagcaaagcgctcgggaggaaggcgatttattcacgcggtgaccccagaattgtttagggtccagcagtatctccacaaagagatactgtgtggggttaagccacatcctgctgccttcgcttttcattctagtggtggcatcagacagtgcgcttcccaacattgtggggctcgatggcttttccaatacgacctgaaggatttcttttatgagattagcgaggtcgacgtctataggatctttaacggtctggggtaccgcaagcttctgtcttttgaaattgctcggttgtgcaccaccacacggctacccatctcattcaagcggtatctcagggcctcctacagtgagaaacccaacttcgacaacgtggaactacttgatgatgcattctccggatacctgaaattcaagccctacctgcacagccagagaaccggggtattgcctcagggcgctccttcctctccgatgcttagcaatcttgcagcacgtcatctggacgaatccctgcacgaatatgcgtttcagctcggattcgtgtacactagatacgccgacgacattagcatttccgcatacgacttgccaagcaaaatgtccagaggtgatatccacagggccatcgtgcatcggatcaggaaagcccgtttcctcgagaacgaaaaaaagacacgcatcgccgggccgggcagtaaaaaattagtcttgggactcctggtggacggcgactcacctcgcctcagcaaggagacgtatatgaggattgatcgcctcctgtatgccgcaaataagtacggacttgtcaacaccgccaaacacgaaaatttttactcagcttacggcttctataatcacctgtctgggctggttgctttcgttaaggacgtagatatcaagagatgggccgaatttaaactccggttaagcgagctggatgtgccctgggagactacatga

SEQ ID NO: 9104 - RNA, 1137 nt, synthetic construct
  source 1..1137: mol_type = other RNA
atggagacatggtcagctcaccaactcgtgactgcagcggagccctcgttgggtccagctatcgccgaacagctccggcgctattctactcagctgcgtaggcaagagctgccagtcatctttagtctgcagcatctggcgaaaattacaggggtccagtatcaaaccctccatgatacagttaggcgacggcgggaggctgccaactaccgaatgtacgcggtcagcaagcgcagcgggggaagaagatttattcatgccgtgtgcggcgagctgaaggccgtacagcagttcatcaatgccgagattcttcaacggtgtaagccacacccgtgtagttacgccttccattcctcaggtgggatacggcagtgcgcagctgcccattgtggcgctcgctggttatttcagtttgacctggccgactttttctacgacgttacagaagtggatgtgtataggatcttccacggcctgggttaccgacgtttgctggctttcgagatggccagattgtgcaccaccactcggttgccgaaaacctttcttcagctccccgcaacacgcaggagggacctcactcaggtgggagatcacgaggttgataggataagaccttatcagcgtcaccaacgaggggtgcttccacagggagccccttcctctcccatgctggccaatctagcagcagcagccctggattgcacgatcaccgaatatgcggataataacggcctcgtttacacgagatacgctgacgacattactctgagtgcccgagacttgagatacgaccgtgcaagaatccgccgccaggtgatttccatgatcaggaagtgcggattccgggagaaccctaacaaatgtagaatcgcagggcccggaagcaaaaaggtggtgctgggcctgctagtcgatggcgaatctcctagggcctccagggaaacctatcggcagattgatagattagtatacggggtccggaaatttggcggtaaggctgcagctgctcacttcggcttcgagagcgaatatggatttcgcaatcacttagccggcctggtggccttcattaagtctgtggacctcgacaggtggaacgaactttcagaagtccttcgccacgtaggaatatga

SEQ ID NO: 9105 - RNA, 1125 nt, synthetic construct
  source 1..1125: mol_type = other RNA
atggaggattggtccgcccaccagctgtttcaggcagcctccgcaagcctggaccgtagtacggctacagccctgtctgcctatgccaggaccctccagagcgctaaactcccagtggtgttctctctgcgacacctgtccgggattgtcggggtcagttacaagatgcttagagaaagcgtaaggcgcaagcgtgaggcagctaactatcgcatttaccgcatcgccaaaagagacggcactttcaggcacatccatgaagttacctctgatctgtttcgcgtgcagacgtttctggcccatgaaatactggcaaaagtgtctccccaccccgccgctttcgctttccacgctggtggtggcataaagaaatgcgcagcacaacattgcggagcgcggtggatctttcagtacgacttgtcgaacttcttttacagtatcaacgaggccgatgtgtatagattattctgtcatctcggctaccggccactactggcgtttgaattcgcccgactgtctacaaccatccgcatgcctccatatatggcggggattattaatatggtgtcaccagaccacaggggaatgccttatgcagatgcttgcaataaactgggggtcttgccccaaggagctcctagctcgcctgccatctcaaatctggtcgccaaagatctcgacgacaggcttacaaaggtggccgtccactacaagcttgtatacactaggtatgctgatgatataactatttccgccatggacgttggcaagggccggtcaagaggcgagattcatcggagcgttatccatgcgattcgaaaatcagggttcgtggagaacgagagtaagacaagaatcgccgggcccggatccaagaaattggttctgggccttctcgtagatggcccccagccaaggctgagcagacagatgtacgaacgggtggatacccgcttatatgcatgtagaaaattcggactcgaggctaccgccgacttttacaagtttgactccgcgtatggtttctacaatcacctagctggattgctctcttttatcaaggacgtggacccgttaagctggaactccttcgcaccgcggtttaaggagatacctcctccctga

SEQ ID NO: 9106 - RNA, 1173 nt, synthetic construct
  source 1..1173: mol_type = other RNA
atggaaacatggtccactcatcacctgtacaatgatgctctagctgtacacgacactgatactgccctggagataaggtcatacgcccagaatcttatcactaagggtcaccccgtcgtgttcagtctcgaacatctgagccgtatcacacatgtatcatatgccatgctccgcgctacgatagagcgaaaccgggagagcgctaattaccgcatgttcgccgtgagcaaaagaagtggagggctcagatttattcacgctgtgactggcgatttgcagattgtccaaaggttcatcaatcaggagatcttgcagaactgccgaaaccaccctgcgagctttgcattccattcaagtggcggaatcagaaaatgtgcagcgcagcactgcggggccaaatggctgttccagttcgatctctccgactttttttacgcagttaacgaagcacaggtgtttagaatcttccgtgagatggggtacagggagcttctggccttcgagctgggccggttatgcaccaccaccagattgccacgtaacaagcatatgtatcttaagtggcggcctggtcccccactgtttcctcgattcggaggcgaagcaagaggcgaaggccttccctacccacaatcctctgggcagctgggcgttcttccacagggagcccctacctcgccgatgctcagtaatttggccgctggtaagctcgacgaatccctgtctgccttcgccaacgacctgggatttgtctatacgcgctatgcagatgatatcacaatctccgccaccaacattccccgaggtgtggcaattggaacaatatgtcaccgcgttatcgactgtattcgcaaggctggtttcaccgagaatcgcgagaaaattaggattgccgggccggggtctaagaaggtcgtgctgggcttactggttgatgggccccagccccggatcagcagggaaacatataagaggatagacagacacttacacgctgccaaaatctacgggctagaggcgaccgctcaacatgagggatttgactcagcgtttggctttcataatcatctcaccggcctggtgaggttcgtgcacgacgtcgacttgaaacggtgggccgatttttctcaacggctgacaagcattgaagtgccatggcaggcaatgccttga

SEQ ID NO: 9107 - RNA, 1167 nt, synthetic construct
  source 1..1167: mol_type = other RNA
atggaggtgtggtcagtccatcagttgtttgaacaggctaaggccgaccttggtgtcgacaggtcctctgagctgagaaagtatgcgcagtacctgatccatagtggcctacctgtgattttcagcctcaaacatctaagtaagatcacccgggtgaattatggagttctcagagacactgtggggaggcgcagagagagcgcaaattatcggatgtttcctgtgaagaaacgatccgggggcagacgcttcatccacgctgtttcaggccagctgttttcagtacaacagtttatcaacgccgatatcctgcaaaatgtggctccccacacttccagctttgcattccactggaatggtggaatccaaaagtgtgctgccatgcattgtggcgcaaagtggctgtttcagttcgatctcagcgattttttctacgacataaatgaaatcgacgtgttccgcattttccagcaacttggttacagaaagttactggcttttgaactcgcccgcatatgcaccacaatacacctgcccgcacacctgaagtgcaccttcaaggtccatagatatttccctgagtgccatcccccatacggagtgagctacgatgctggggttttaccacagggcgccccgacatctcccatgttgtccaacctggccgcccgagaactggatgaaagactgtttgaattcgctgtcgcgaacgggtttgtatatacaaggtacgccgatgacattaccttgtctgcccgtgagctgccgtctcgggttagcgttggagacattcacaggcagtcgacccacatcatacgaacctgtggctttcgtgaaaacaagaaaaaaacccgcgtggctggaccaggaagtaggaaaattgtcttggggctgctcatcgacggcgatcaacctcggattagtcgcgagacttacaaccggatcgataggcacctttacgcagccactaaattcgggattgtagagacggcatcccacgagggattcgacagcgcctacggcttctataatcatcttgcagggctcatctcattcgtgaacgatgtggacaagaaaaggtggactgagtttcacgcgcggttatccaaaattacggtcccctggcagacaccatcgggcacacagtatggtgagttctctcagtga

SEQ ID NO: 9108 - RNA, 1185 nt, synthetic construct
  source 1..1185: mol_type = other RNA
atggaggagtggtccgtgcatcagtttcagcaaggcgcaattgccgcctcagctccgtgcgtggatgacctcgtgaggtacgcccgactgttaaaaaacaatggcttgccagtgatattctcactggggcacctgtgtaaaatcacccgcagcaactataaattcctgcataacattgtcaacagaaaggtcgattcacagaattacagacttttccccatcaaaaagcggagtggtggaatacgccacattcatgctgtggcgggcaaactgtacaaggtccatgactacatcaataatgatatcctgcagtcttgttctcctcacccaagctcctacgcatttcatcgttcgggggggatcttcaagtgcgctaaacagcactgtgagtctaggtggatttttcaatttgacctgaaggacttcttctactccatcagcgaagctatggtcttcacagcgttgaaaaacctgggatacaaaaagctgttggcattcgagctggcccgaatctgcacgactaggcaccttccagcgaataaaattcggtacacagctagattttctaagagcctccccagttattacaacaataagccttatagagagacttatcatcacggcgtgcttccccagggtgcaccaagcagccccatgttgtcaaacttagttgccctaaggttagatgaaacgttgtctgcctacgccgacgaaaatggcctgacctataccaggtacgccgacgatatcacactatccactctcgctctgccttccaaggtaagcgtgggcggaataaagcgcgccgtgattaagattatacgccgcgcaggatttatagagaaccccaagaagatccgagtcgcaggtcctggatcaaggaaaaccgttctcgggctccttgtggaccagtcgagtcctcggatttctagacacacctataagcgtatcgaccggctgctctattccatcagtcagtataaactggccggtgttgccgaacacgatggatttgattcatctttcggcctctataatcaccttcatgggctgatcaactacgtgaaagacgtagactattcccggtgggaagaattcagcaagcagtttcaaccgattaaggagcagttcgagagcgagtttgatgtttccaacacagctcaatttatgctaagtagtacttga

SEQ ID NO: 9109 - RNA, 1188 nt, synthetic construct
  source 1..1188: mol_type = other RNA
atggaaacctggtcagcgcatcagctctacaccgaagcggaaagctctctcggtgaggcagccgctagaaatcttcaggcttactcagagcagttaagagccaagggactccctgtcatcttctctcttcgccacctggcggagctgagcggagttcgttattggtttctgcatgagactgtcaacaggatgcgcgaggtagccaattatcggatgttcgccattaaaaaacggtccgggggccgcagacatattcatagtgtgagcaacgagttgggcagggtgcagcaatggattaaccaacacttactgcagaactgcaagccgcacgctgctagttttgccttccataaggagggagggattcgtcagtgtgcggagcgacactgtggagccaggtggctcttccagttcgacctggtggatttcttttacgacgtttcggaaagagactgctttaacgtctttaaagggttgggctatcgtcctctgctggcattcgagctcgctcgcatctgcacaaccactaggctgccagcctggtgtccacgggcagaattccatggcgagcaactccgatgggaaaacatctggtgtgaagatgatttaaatcctgtgaaccccaatacatccagaaactttccgtattacgagaggttcggaagacttggcgccctgcctcaaggtgcaccaaccagtcccatgctatcaaacctcgccgcaaagtatctcgatgaatctctgcagcacttcgctaataagaacgggctgatatatacgcgctacgctgacgacatcacttttagtgcttgcaggctaggggtggcaagaggcagggtgctgtggcaggtaaaggatcttataaaacgggcacactttgccgtgaatcccaagaagacacggattgccggccccgggtccaagaaactagttctgggattgcttgttgacggtagcaccccacgcatctctcgagagacatacaaacggatcgaacgactgctgtacggcgccaagcagtttggcttcgaggccgctgccagccactttaaattcgatagcgcatacggtttccacaatcacctgtccggattggtggcatttgtcaaagatgtggacaggaagcggtggcaggaatttaacgccgtgttgctgaatgctaaatcctcatgggggaatgacgtctga

SEQ ID NO: 9110 - RNA, 1134 nt, synthetic construct
  source 1..1134: mol_type = other RNA
atggaggactggtcgacacatcagctcaaagagaatgcgataatcaagctgggaagcgagaaggccaacgatctgcagaagtatacaacgaacttgaaaatccagtcactgcccgtaatatttaccctaaatcatctggggattatcaccaataccgaatattcctttctctataagactgtctgtcgcgagagagaatacgtgaactatagaatgtttccgatcaagaaacgctccggaggtactaggttcattcatgcagtgtctaagaaactctcaatagtgcagacctttatcaacaatatcatcttgcagagtcagcagcctcacaactgctcatatgcctaccaccctagtggcgggataaaaaaatgcgcagccatgcactgtaatgccaagtggctatttcagtttgatcttgctgatttcttctaccgcattaacgagattgacgtgtataacattttccagaggatgggctacaggaagctgcttagttttgaactcgctcgactatgcactacgatccgtctcccaagacagctgcaatctatgttaaagcaattcaagagcttcagcctggacgactacccattctataataacgatttcattggcgtgttgccccaaggctcaccaacatcccccatgctcagcaatcttgccgcgatggaactggacgaggacctgtacgtctttgctctgaaaaacgggttcatctatacaagatacgctgacgacctcaccttttccgcaatcaatctgcctcagggcatgagcataggcaagattcggtggcaaatcattcagattattcggaaaaactgcttcaaggagaattctaataagattcggatcgcaggtcccggcgccaaaaaaattgtgctggggctcttagttgatggtaatcaacctcgaatctctaaagagatgtacaaaaggatcgaaaagatcttctactacgtcaaccggtttaagtttgagaacaccgccaaacaccttggtttcaactccacttttggattaatcaatcacctgcttgggttgataagctacctgaaggacgttgatagtgatcgttatggattgttcaacaagaagttcaatgaactgatgctgtctctgggatgttga

SEQ ID NO: 9111 - RNA, 1131 nt, synthetic construct
  source 1..1131: mol_type = other RNA
atggaagcatggtctacccaccatttggctcagcaagccgcaaagactctcggcagtgatgctgcagccagcctccagagctacgcgcaggtcctcatatccaaaggtttggcagtcgtgtttaccctgggccatctcagccggattaccggggtttcttaccaagtcctgcgggatacagtcgatagaaaacgcgacagcgccaattatcggatgtacgccatcaataagcgcagtggagggttacgcttcatccattcagtctctagggacttacttatcgtgcagcgtttcattaatcagcacattctgcagaagtgtgccccccatccgagctcctttgcctatcatccttccggaggcatcaagaagtgtgccaccatgcactgcggagctagatggcttttccatttcgacctgaaagatttcttttacgacatcaccgaaattgacgtattccacatatttaaggctatggggtaccgtaatttgctcgcctttgagcttgcgcgactgtgcacaacgacatgcttgcctaaaggccaagaacgactgctgtttcactcgacgaattcgaaatacaacgtgtatagggatcccaacggaatagtgggcgtgctgccacagggggcacctacttcacccatgctctccaacctggctgcccagaagctcgacgaggaactgagcagttttgcactaatgcatgggtttgtgtatactcgatatgctgacgacattaccttctctgcatcatacatacctaaggggttgaatatcggtaacattcaaaggcagatcatccacattatcagaacaaccgggttcgaggagaacaatcagaaaatccacattgctggcccaggctccaaaaaggtagtgctgggcctgctggtggatggtaacgaaccaaggatctcccgggagatgtaccaccgcatcgagaggtatttatacgcgatcgagaagtacggcctacggaacgtggcctgtcatgagggatttattagtgcttatggattcttcaaccacctgacaggtcttatcgcctttgttaaggacgttgatcagaaacgctgggaagagttcagctctagaatttcaagaatacagactccctggcacctttga

SEQ ID NO: 9112 - RNA, 1149 nt, synthetic construct
  source 1..1149: mol_type = other RNA
atggagacttggtcggcccatcagctgtataatgacgctaagcaccgctttaaagatatcgaaaaggccagtagcctgcgatcttatgcacagttccttatcgacaagaacctcccagtcatattctctctgaagcacctggccaagataaacgacttgaactacagctttctgagacttaccgttgagcgccgtcgggaatccagcaattataggatgtacgccgtgaaaaagagagcgggtggacgccgattcattcacagtgtgacgaaaaagctgctgaaggtgcagactttcattaacactgagatcttacagtactgtctgccgcaccccagctcatttgctttccacccttcaggaggtattaggcggtgcgcagaacaacactgcagcgctcggtggatgtttcagttcgacattctcaatttcttccatgcaatcaatgaggttgaggtcttcaacatctttacaggtttgggatatagaccattggtcgcgtttgagatggctcgtatctgcacaaccacgcacgtcccaaaccatttaaagccgctcctgtttaggaagtctaacaacacaccctacaacttctatgcgaataagtctggggccatcggcgtgcttccacaaggggcacctacaagtcccatgttggctaatctggtggctaagaaactcgacgaggaactatcgtccttcgtgcggaagcatggctttacatacacccggtacgccgacgacatcactatctcagccgtagacttacccgacaatctctccattggggaaatacacagaagcgtgatcagcattattcgccggtgtaagtttcgcgagaatataaagaaaacccgagtagccgggcccggaagtaaaaaactggtgttgggcctgctggtcgacggcgataaacctaggatctccagagagatgtataaaagaattgataggaacctccatgctctggagaaataccctattgccgatgtggcaaaatacgaaggcttcgattcatcttttgggttcttcaatcatgtatccggactagtggcctttaccaaagatgttgataccgagaggtgggaaaagtttaagaaacgtatagatggcatcgagctcccttgggaatccaagcttgttacttga

SEQ ID NO: 9113 - RNA, 1143 nt, synthetic construct
  source 1..1143: mol_type = other RNA
atggaaacctggtctgtacaccatctgagccagcaagctacaagcgtgctgggcaagtcaattgcccaggatctgactagctatgcacagcgattacgaagatccggccttcccgtcgtgtttactctgcgtcaccttagccgcatcgtcggcgtcgattatagtctgctgcgcgctagcgttgagagacggagggagtcagcaaactatcgcatgtttgccattaaaaagaggtctggtggccgacgccatatccatgccataaccggtgacttgttcaaggcacagcagttcataaacgccgaaatccttcagaagttgaatccccacccggctagttttgcctttcacccaggaggtggaatcagggcctgtgccgcagctcattgcggagctcgctggctgttccagtacgatctgtccgacttctttcacagtatctctgaggccgatgcatataaagtgttcttcaccgccgggtacagaccccttctagcttttgaactcgcccggatttgcactaccaccagactccccgaccacctgaagcatcatctttgggcgcacagagcatggagggactataaattctacggagatcacactcatgccatgggtgttctcccgcaaggtgcgcctacctcccctatgctctctaatctcgcggcccaccacctggatatcgtgttaacagagtttgcagacaggcatgggatgtcctacacaaggtatgccgacgacctgacattgtcgacgagctcggacctgccagatggcatgtccatcggcaatattcaccgtgctgtcattgggatcatccggaaatccgggttccaggaaaacaaaaagaagattcggatcgctggaccagggtcaaagaagattgtgctcggcctattagtggatgggacggcacctcgtctctcaaaagaaacttacaagcggattgacagacacctgcatgctacacaaaagtacgggttggccaacgtcgcgagccatgagggcttcgatagtcctctaggattttacaaccacttgtccggcctgatagcttttgtgaaagacgttgatctggtacggtggaaagagttccacgaccagttctctaaaatagagtctccaatgaatggaggcgtgtga

SEQ ID NO: 9114 - RNA, 1152 nt, synthetic construct
  source 1..1152: mol_type = other RNA
atggaggcatggagtgtgcatcatctgagccaagctgtgactccagtcctaggcaaaagcgccgctgaccaccttaaagactacgcacagcgcctccggagagcaaatttgcctgtgatttttaccctgcggcacttggctaaaatcaccgctgttgaatatggagtcctaagggcgacagtcgaaagaaggcgcgagtccgctaattaccgcatatttgcagtgaaaaagaggtcaggaggcagaagacacattcacgccgtgagcggggacctgttcaaggtccagcaattcatcaacctggagctgctacagaagctccgtccgcatcctgcctcttatgcgtttcatgccgagggtgggattcataagtgtgcctcagtgcactgcggagccaggtggctgtttcagtacgacttagaaaacttctttcacgctttgagtgagtcagatgcctatcgggtattcatgaaagcgggctaccggcctttactggcttttgaactcgcccgcctttgcactacaacccggctccccgcccatctcaaacatcacttaagacccaagcgtcacgccgcctccatgaaagcctatcagttttacgtcgagaggtctggggcaacgggggttctgccccaaggtgctcccacatccccaatgctttccaaccttgcagctttcgacttggatgaaaagttgaccgcattcgccgatctgcacggtttcacttatacgcgatatgctgacgatctcaccttttctgcaggcggcgaactgccagagcgaatgagtattggagatatccatcgaactattgtgggcgttatccgtaaatgtggctttcgcgaaaacaccaagaagacacgcgtggcaggacccgggagcaaaaaggtggtgctcggacttctggtcgatggtaccgtgcctaggctcccgagagagacatacaagcgaatcgataggcacctgcacgccacacagaagtacgggctggttgcggtagctgcccacgaatcttttgactcggcgatcggattccataatcatctggctggcctgatagcattcgtaaaggacgtggacaccgccagatgggaggagttccaccggcagttcagcatgatccctgccccaatgtccgccggcacttga

SEQ ID NO: 9115 - RNA, 1149 nt, synthetic construct
  source 1..1149: mol_type = other RNA
atggaagattggtcagtgcaccatctgcacaaggccgccgagttgaagctgggtgcgagcgaggcagcgcagattagaatctatgcacagcaactcattaggaaaaagatgcccgtaattttcaccttaaagcacttgtctatgattgccggggtggactatctcgccttgaggcggaccgtggagagacgacgtgaggcagccaattatcgcatgttcgctataaaaaaacgtagcggaggcagacgattcatccactctgtcactgaaccccttcaccggacacagcaatttatcaacagcgaaatcctccagaagatcgaaccacacccagcttcatttgcgttccattcaagtggtggcattaggaagtgcgccgaagtccattgtggagccagatggatctttagcttcgatcttgccgatttttttttcaagatatccgaagccaaagcatatgagatcttccataaagccggctacaggcccctgctggcattcgagctggctagaatttgcactaccacccgcttgcccaagaaactgcactacctgcttcgcaacacagacaacgcttggtgtcagaatgagaactgggggaaatatcaaatctatagtaggcatgcctactcaataggtgtcctccctcagggcgctcctaccagtccaatgttatccaatctggccgccctgaagctggacgttgccctaacagaatttgctgataagtacggctttagctacacacggtatgctgatgacctgtccatttcttcttgctcggaccttccatcttccttaagcatcgcaaggatatgtcggattgttatcgggatcatccgcaagtgcggatttgaggagaatcagaagaaaactcggatcgcgggccctggcgctaaaaaaattgtgctagggctcctcgttgatgggcccacgccgagaattagtaaggagacttacaaacgaattgaccggcacctgcacgcaattcagaagtacgggttcgctgaagtagcaacgcatgagaagttcgactcccctataggtctgtacaaccacatccatggattgatctcctttgtgaaagatgtggacccgaagcgctggggagagttcaattgtcagctgctcgctatgccagccccttga

SEQ ID NO: 9116 - RNA, 1149 nt, synthetic construct
  source 1..1149: mol_type = other RNA
atggaggcttggagcgtgcatcacctcagtcaaaaggcagagcctatcctcggacaggctgccgccgatgacctaaaaacttacgcactccgattgcggcaagccggtctgcccgtcatcttctccctggggcacttgtctagaattaccggggtggactacagcctgttaagggcgaccgtcgagcgaagacgcgaaagcgccaattatcgcatgttcgccattaaaaagagaagcggcggccggaggcacattcatgccgttacaggcgaactgttcaaagcccaccagttcataaacactgagatcctgcagaagctggagcctcatgttgcttccttcgcctttcatgccgacggagggatcaggacttgtgcatccgagcattgcggcgcacagtggctctttcagtttgacctggccaactttttctacagtgttaacgaagcagatgtgtatggagttttcgtgggtcttggatatcgacctctcctggcatttgagatggcgagaatatgcacgactacaagattgcctaagcacttattgccccatctttggacccaccggtcacacaagtctcacggctatcagttttatgctgataggtcaggagctatgggggtcctaccccaaggcgcaccaacgagtccgatgctgtcaaatctggtcgcacgcagactggatgagaagttgaccgaatttagtacccagtatgggtttgtgtacactcgctacgccgacgatctgacactgtcttgtggcgggaatctgccacgtggaatggctattggaaacctccaccggaaggtgaccggcattatccgcaaaaacggtttcagagagaatcttgacaaaacacgcatcgctggaccaggcagcaagaaggtggtactgggcctcttagtggatggcgaggggccgaggatctccaaggaaacatttaagcggatagataggcacctccacgcctccgaaaaatacggtctacccgacgtggcgaaacacgaaaaattcgacagcccctctgggttctacaaccatcttgctggtctgattgcttttgtaaaagacgtggataaggtccggtgggaagagttccatgcccgtttctcgaggcttcagtccccaatgaattcttcagcgtga

SEQ ID NO: 9117 - RNA, 1149 nt, synthetic construct
  source 1..1149: mol_type = other RNA
atggaagcatggtcagtacaccacctgtctcagaaagccgaacctctcctaggacaggcagccgccgatgatctcaaggcatatgctttgcgcttacgtcaggccggcctgcccgtgatttttagcctcggccatctcagtaaaatcgtgggagtagattacagcctgcttcgtgcaagtgtggagcgcaggagggaggcggctaactataggatgttcgccataaaaaaatgttccggtgggcgccgacacattcacgcggttaccggggagctcttcaaagtccaacagttcatcaattccgagatcctccagaagcggaagcctcatgcagcctcattcgctttccatccggacggcgggattagagcttgcgccagcgaacactgtggcgccaggtggttgttccagttcgacctttctaatttcttttattcagtgagcgaggctgacgtttatggtgtgctcgcagagctggggtactcccccttgctggcctttgaaatggcgaggatctgcactacaaccaggcttccagagcacctgaaacgctacctgtggtctgccctgtcgcataaggtgcgggattatcggctgtacgtagacagatccggagccatgggcgtccttccacaaggtgcccccaccagcccaatgctaagcaatctggctgcgcgaaatctcgacaaagcactgactgccttttcgacacaatatgggtttgtctatactagatacgctgacgatattacattatccagcggaggaaacctgccggagggtatgagtatcggatctatccataggtctgtgataggggttattcggaagaatgggtttagagaaaaccctgacaaaaccagaatcgctggcccaggctccaagaagctggtgctgggacttctggtcgacggcgaggtgcctcgaatctccaaggagacgttcaagagaattgaccgccacctacacgccgcagaacggtacgggttagtcgatgtggccaagcatgagaagtttgattctcccataggtttttacaaccacttggaaggcctgattgctttcgtgaaggatgtcgaacgggagcgctggaaggtgttgtacgacagatttagtaaactgcaggctcccatgaacgttggctcatga

SEQ ID NO: 9118 - RNA, 1185 nt, synthetic construct
  source 1..1185: mol_type = other RNA
atggaaacctggtctgtccaccagctctctactgccgcgaagtctacattagatgagagcagcgtggtacatctaaaatcatatgctcagtccctgaagagaagcggcctgccagtaatctttaccctgggacacctcagtaaaattatagacatcgactactcgtttctccgagctaccgtcgagagaaggagggagtccgccaactatcgtatgttcgcaattaaaaaacggtctggcggcagacgccatattcatagtgtcacaggagggctattacaggctcagcaattcataaacagcgagattttgcagaagatcgagccccactcggcgtccttcgcttttcacaaaaaagggggaatcagagcttgcgccagtatgcactgtggggccaggtggatgtttcaatacgacctagccgattttttctacagtgtgaacgaggccaatgtctacggcatctttagtgccctcggttatcgacctcttttggcctttgaaatggcgcgcatctgcacgacacttcggctgccaaatcacctcggacacctgctcattgatccacgcactaaggtgaagggcaagttttataacctgtaccagcgttatatggaagtgccggggttcggcacaatgccctacatgtcttctatgggggttctgccccaaggtgcacctacctcaccgatgctgagcaatcttgcagcccggaatctggacgtggaactcactgattatgcagaccagaacggccttatctatactaggtatgcagatgacctcaccctgtccagctcagaaaacttcccagagggtctgtcaatcggagacatccacagatccatagtgggtataatccgcaggaacaagttcaaagagaacaggaagaaaacgcgtgtggccggccccggctctaagaaattggtgctggggctgctggtcgatggggattcccctcggctttccaaggagacatacaaacgaattgacagacatttgtacagcatccagaaatacggcattttgtcagttagcaagcatgaaaagttcgactcccctctgggattctataatcacctttcaggactgattgcttacgtgaaggatgttgacaccaatcggtggaaggaattccatcggcgcctgttagagatcagctaccccattgaaatgaattactga

SEQ ID NO: 9119 - RNA, 1164 nt, synthetic construct
  source 1..1164: mol_type = other RNA
atggagatctggtcagcccatcagttgtatcagaacgcagagtcttctcttgggaaaactcaggcacttaatctgcggaattatgctagcaatctgaagaagaacaacctaccggtaattttcactctcaggcacctttccaaaatcaccggtgtggactaccggctgctcaggagtacggtcagtcgacgcagagaatccgctaattaccgtatgttcgcaataaaaaagagatctggaggcagaaggcacatccatgccgtgaccggggaaatttttaaggtccagcacttcatcaacagcgagatactgaagaaactggtccctcataatacatcatttgccttccatcccaatggtggcatcaggaaatgtgccgaacagcactgcggagctaagtggctcttccagttcgatataagcgacttcttttacagtattaacgagtcagatgtgtatatggtttttaagaatgccggctatcggcctctcatcgcatttgagttatctcgtttgtgtactaccattcggctcccacagcacctgcaatcgttgatttccgtacccaaacattccacaaaggagtacaagctttacgggcaaaacaaggaaaagaacctgttctgggacatcagcgaaccctggcccttgggggtactgcctcaaggagctccgtcctccccaatgttatctaatctggccaccgtgaagctcgacatcagtctgtctgagtacgcgaacaaatatgggttcacttacacaagatacgccgatgacattacactgtcttgcggaggaacgctacctgactccgtcagcgtgggcaagatcaagaacaacattatcagcatcattcgcaaacaccactttaaagagaatgtgtcgaaaatccgagtggcaggcccaggctcaaagaaaatagttttggggctgttagtggatggcaacgtgccccgccttagcaaacagacctataagcggatagagagacacctgtacagcatcaagaagtttggactgagcgaggtcgctcgccatgaaaaatttgattcacccattggcttctataaccatgtggcgggtctgatcgctttcgttaaagacgttgataatgccaggtggctcgaattttcccagaagtttgtgagtattgaacacccatga

SEQ ID NO: 9120 - RNA, 1164 nt, synthetic construct
  source 1..1164: mol_type = other RNA
atggagatatggagcgttcatcagctctaccaagaggcggaagccagtctggacaaggaatctgccctaaacctcaggaattatgctaacaatctgaaaaagaggaactttcccgtgatcttttcactgcggcacttgtccatcattacgggcgtggattacagcgtacttagatcaacagtggccagaagaagagagagcgcaaactataggatgtttgccattaaaaaacgctccggcggtcggcgccatatccatgcagtcacatccgaactctttaaggtgcagcactttatcaactctgtgatactccaaaagatcaagcctcacaatgctagttacgcctttcactctgacggcggggtacggaagtgcgcagaacagcactgcggagcgcggtggttgtttcagttcgatattgcagatttcttctactcgatcaacgagtcagacatatacaatatcttcgtctctgccgggtatcggccactgttggcgttcgaactgtctcgcctgtgtacaaccctcagacttccaactcaccttagatccctaatcttactgcctaaatattccgtgaaagagtacaagttctacaaccagtacaataccaatcacaattcgcgaataatccctgagccatttcccttgggcgttctgccccaaggcgctccaagcagcccgatgctcagtaacctggccagtgagaagctggacgtgtcactggcagattacgctgacaaaaatggcttcatttatactcggtacgctgatgatattaccttcagttgtggaaatgacctcgccgacggcgtatccgttaagaaggttcgccgagacgtgatctctatcattaggaagcatcatttcattgagaacactaacaagatcaggatctcaggaccggggagcaagaaagtggtcttggggcttttagtggacggaaacgccccccgtctgagcaaagaaacctataaacgtattgatcgacatctttacgctatccagaagtttggtttaaacgaggtcgccaaatatgaaaaattcgatagccccattgggttttataatcacgtcgccggtctgattgcttatgtgaaggatgtcgacaatgcacgctggctgcagttccaccagaggttctccattataaaccatccttga

SEQ ID NO: 9121 - RNA, 1173 nt, synthetic construct
  source 1..1173: mol_type = other RNA
atggaaacatggtccacccaccatctctcccaggaggcagaggtactgctaggcaaagaatctgccttgaagttaacccggtattctaacaagttaaagcggaatgatctgcccgttatatttaccttgcgccacctgtctaagatcgtgaaagtagactacaagttgctgcgatccactgttaatcgccaacgggaaagcgccaactaccgtatgtttgcgattaaaaagaggagtggaggcaggagacatatccatgcggtgactggcgaactgttcaaagtgcagcacttcataaattctgagattctccagaagatcaagccgcacaacctctcgtttgcattccacactaatggtgggattcgcaaatgtgctgagatgcattgtggagcccgttggcttttccaattcgatattgagaacttcttctacagcattaacgaatccgacgtctacaaaatattcctggctgccggatacaggccacttttatcatttgagttggccagaatttgcacaactctgtgcctgcccgcacaccttgccagcctgatacagcgaaacgctcacagtaggaagaagtacaaactctacaatcccaacaaaaactgtagcagttcctttctcgacgagtataggccgaagccaatgggagtgctgcctcagggtgccccttcaagtcccatgatctccaatcttgtggctaaggagctggatatttctatggaggaatacgctgacaagaattccctgatatacacccggtatgcagacgatatcacgttgagctcatcttccgatctgcctaaaggggtcagcacagggaagattagacgggacatcatcgagatcatccgcaagaatcacttcaaggaaaacagaaataagaccagaattgccgggcccggcagcaaaaaaattgttctcggtctactcgtggatagcgaacggcctcgcctgtcaaaggagacatataaacgaatcacaagacacatctatgcaatcgaaaaatttggaatcgaggaagtggccaagtatgagaaatttgatagtgctcttggcttttataaccatatctgcggcctgatttcatttgtcaaagacgtcgaccatgagaggtggaatgacttccataagaagatctcgaaaattaccccaccaacgaactga

SEQ ID NO: 9122 - RNA, 1176 nt, synthetic construct
  source 1..1176: mol_type = other RNA
atggtgagttggtccgcccatcagctttacatggaggctaagagtaagcttggtacccaacaggccaccaatctgagacagtatgcccgcgtgctgcagcgaaagaacctgcctgtcgtttttacattgaatcacctggccaagatcacagggatttctcacaccctgctgagggataccgtggagagagggcgagagcgcaagaactctaggatctactccataaagaaaagcagcggcggcgagagattcatccacgtgatcaacgacgacttggcatttgttcagaagttcattaactctgagatcctccagaaactgacaccgcacccttgtagctacgcatttcatgaatcaggcggcgtccgggagtgtgctgaaatacattgcggggccaggtggctgtttaaatttgacctatgcgacttcttctaccacataaatgaaagacacgtcttcgaagtgttcctgaatgctggttatcgcaacttaatcgcatttgagatggccaggctgtgtacaaccacccggatgcccagcaacttacattacctgcttaagccaaacaagtcaggaatcgagacgcaagacaagaaataccgtttttacaaccagcataatgagaaattaggattgctcccccaaggagcgcctacttcgcctatgctctcaaatctcgtggcgttcaagctagatcagaaacttgaaacgttcgccagggaacatgggctcacctatacccgctatgctgacgatattactttttcgactagtgacgacctgccagagaaaacaagtattggatacatccagcggtccgtcatcaaaattatcagccaatgcggctttcggaataatacgggcaaaatgcacgtggcaggaccaggcagcagaaaaattgtgttggggctgctggtggacggagagaaggctaggatttccaaggccacattcaagcgtgtagatcgcctgctccactctatcaaagtatatggcctcgatgcagtgtccgtacacgagcagtttaagtccccagtcggtctatatgaacatctccggggtctgcttgctttcgttaaggatgttgacactgcccgatgggatgaattcaaaattcagttccaccaggtcacttctccctggactgatgaacccatagtgtcagggagcttgtga

SEQ ID NO: 9123 - RNA, 1149 nt, synthetic construct
  source 1..1149: mol_type = other RNA
atggaaacttggtctgctcaccagctctttaataaagctacagacaagttggacaacgccgcctctaaaaagcttagatcttatgctctggccctcaaaaatagaaaactgcctgtgatctttacactccggcacctatcccacataaccgatgtggactacagcctgttgaggaagaccgtcatgcggcggcgcgagatggccaattataggatgtttcccgtgcggaagcattcagggggctggcgttacatccaccaagtatcccgcgatttattcaaggtgcagcagttcatcaattccgagatcctccagaaactgagcccacatccgtccagtttcgcattccatagtaacggaggaataaaggcatgcgcatcacagcactgtaatgcccgatggctctttcaatacgatctaaaggatttcttctacttcattaacgagaagaacatttacacgctcttcaaggacagcggctatcgcagcctcctggcatttgaactggcgaggctgtgcacaaccacacatcttcctaatcacctgttgcattatatcaaacaggattcccactttttcaacaactacaatttctacaacgacatcaaatcccgaattggtgtgctgcctcagggagcccccacttctcccatgttatctaatcttgtggcatataagctcgatgaactgctgactaagctgagcgaggaatatggtctggtttacaccagatatgcggacgatattacattctcaagtattgacgactactcagtccaacactcccgctttcgccttcacagggaaattgtgaaaatcatccgtcagaatggtttttgtgagaatacgaagaaaactcggataagtggccccggggccagaaagctagttttgggcttgctggtagatgggtgcgagcctcgacttagcaaagagatgtataagagaattgagaggcttctgtacgccagcaacaagtacggaatcattgaggtcgctaaaaacgaaaagtttgacaccccatatgggttatacaaccatttggctggcctggtttcttttgtcaacgatgtggataaaaacaggtggcaggaatttaatgacctcttctcgaagatcaataacccattcgacctgaaaaccatatga

SEQ ID NO: 9124 - RNA, 1146 nt, synthetic construct
  source 1..1146: mol_type = other RNA
atggaaacatggagtgcccaccagctgctcaagaaaacgtcactcaagttcgatgacattactgcccaatcactcctaaagtattgccaagaactccagaacaaaaatctcccagtcatttttacccttagacatttaagcaagatcaccaataccgattatttggtgctgaggaagacaatcatgaggagaagggagttagcaaattaccgcatatttagcattagaaagcggtctgggggacgccgatatatccaccaggttacaaaagagttatttcaggtgcagcagtttatcaacactgagatactgcagaaaattcaaccccaccctgctagtttcgccttttactctaatcggggaatcaaatcatgtgctctgaaacactgcggtgcccgctggttgtttcagtacgacctcaaggatttcttttacaccatcaatgagaagaacatctacaagattttctacaaacacggatatcgttcgctgttggcctttgagctggctcggatctgtacgacaacccacctgccgaagcatcttctgtgctacatacatcaggagtacaactattttaacctcgattcctacaagttctacgccgacagccaacagggcgttcttcctcagggtgccccaactagccccatgctgtctaatctggtggcatttaacttggatgaaagcttgtccaagttcgctaatgagcggggcttgatctatactcgctacgcggacgacattacactgtcctcctacaaaaaaagctacactaagtatgagaggttcaatatccataagaacatcgtcaagattatcagacagcatgacttcctggtcaacccaaaaaaaacccgtataattggccctggagcacggaaaatagtgctagggctgcttgtagatggcgacgtgcccagaattcccaaagaaacatataaacgaatcgaacgcctcctgtacgctagtaacaagtatggccttctggaaaccgcacgacacgaaaagttcgacaccccttatgggttctataatcacctgtctgggctgctagcgttcatcaaggacgtggataatagtaggtggatttacctttccaaactcttctcaaacatcgagaacccattttataagaagatttga

SEQ ID NO: 9125 - RNA, 1137 nt, synthetic construct
  source 1..1137: mol_type = other RNA
atggagatcttcagtgcgcatcagctcttcaataaagcctcatctaaactgggcgacgtgtccgccaagaagttggtatcatattaccagaatttgcagacgcagaatctgccaattatctttacacttagacacctaagcaaaatcaccagtactcactatctggtcctgagaaagactattatgcggaggcgggaacgcgtcaattatcgtatattctctatccgcaagaggagcggtggctaccggtacatccatcaagtgaacaaggagctgttcaaagtacagcagtttattaacagcgagatattacagaagacactgcctcacccggcctcttttgcattccactccaatggcggggtgaaacgctgtgcccttaaacactgcggagccaagtggctgttccaatatgacctgaaggactttttctacacgattaatgagaaaaacgtgtacgagatcttttacaatcttggatacagaagcctccttgcctttgaacttgcaaggatttgcactaccactcgcctccctaaatgcctgaagaactacataaattcctattccaactgtatcaactacaagttctataacaaccatctcctcggcatcctaccccaaggcgcaccaacaagccccatgctgagtaacttggcggcctttgaactggatactctgctgacagacctggctaaaaagcacgatttagtttacacccgatatgctgacgacatcaccttctccacctatttagataagcgtaaggagaaattcaccattcataaggatatcgtcaagaccattgtggaaagtggtttcatcattaacaacaagaagactcgaatagctggacctggggctaggaaaatagtgctggggttgttggtggacggcgagaaacccagggttcctaaggaaacctacaagagaattgaacggctcctatatgcctcaaacaaatatggtctgattgagacagcaaaacacgaaaattttgacacaccatacgggttctacaatcatatctctggactcatggcttttgttaaagatgtcgattttgagagatggaagtatctgaataacgtgttctcgaagatcgaggatcccctcaacatctttattcagaattga

SEQ ID NO: 9126 - RNA, 1167 nt, synthetic construct
  source 1..1167: mol_type = other RNA
atggagaattggtccgctcatcacctgtttcaaaagtctatcccaattctggggaataggtcaagccaggagttgaagaattatgccatctctctgcatcgccgaaagctgcctgtgatttttacactgcggcatctaagcaaaatcacaaacgttgattacttgctgctcagaaagaccgtgatgcggcaccgcgagatggctaactacagagtgtttactatcaagaagcgcagcggcggacggagatatattcacagagtctcaaaagagctgtttaaggtccagcagttcataaatttcgagatcctgcagaagatcacacctcaccatgcatcattcgcctttcattcaaaagggggcatccatgcctgtgcactttcgcactgcggcgctcgatggctctttcagtatgatttaaaggacttcttctacagcatcaacgagatcgacatttacaacatattcaaggacaatgggtataggccacttttagctttcgaattggctcgcatttgcacaacgaccgccttgcccaaagacttcttcaaactacagaattacctgaactacatcagcaattacaagttcaacaacctgcagaactataaattttacaacaacaggtctgggcttatcggagtactgccccaaggtgcgcccaccagtccaatgctttccaatctagcggcgtttaaactcgacaattccctgactgaactcgcagacaaatacggactcatctacactaggtatgccgatgatattaccttcagttccagctctagtttgcccaggggcaaaataattacggatatccacaaggcaattattaacgcaatcagaaagaacgacttctatgaaaacgccaagaaaacccggattgcaggaccgggcgctcgtaagctcgtgcttgggctgttagtggatggtgccgttccccgtatcccgaaagaaacttataaacgcattgaacgactcttgtacgccataaaagagtacaatctgctcgaagtcgccaagcacgagaagttcgacacaccttatggcctgtataatcacctctccggtctgctggcctttgtaaaagacgttgatatagtgcggtggaggaagtttcagcagctttttctggagatagctccacctaacaatcaaaccatttga

SEQ ID NO: 9127 - RNA, 1134 nt, synthetic construct
  source 1..1134: mol_type = other RNA
atggaagcctggtccatacatcacctcatcaaggaagccaataggcagggaaatctgagcaaagagagcattatagatctccaatgctacgcacaaaacttgatcaaaaacgacgtacccgttatttttaccctaatgcacctggccttcatcacgaatcttaattatgatttcctgtacggcacagtgagccgcaggtttgacaaatcgaactaccgaatgttttcaatcaggaagcgaaatggtaaacaccgctttattcatgccgcaatcaaaaacctgcatatactgcacaactacatcaacaaagagatcttgaagaacattcctattcacccctgtgcctatgctttcaataggaatggcggaattctgaagtgtgctcaaaagcattgcggatgtgaatggctgttacagtttgatcttaaggacttcttcttcagcataacagagtctaatgtctacaatgtgtttaaatccatcgggtataaggacatattggccttcgagctggcccgcatttgcacaaccaccagattaccccgcagctacaacatgccaagaaacaaaaacgcgtataactataagcagtataagtacgacctcatcggcgtgcttccacagggtgcggcaaccagtcccgcattgtccaatctggtcgccaagaatctagatgaggaacttcaggagtatgctaaaaatctcggttttgtgtacactcggtatgctgatgacctgactttctctaccgtaagtctgcctaacaatttatccattgacactatacggagacagatcatcaagattattcgtaagaaccacttcattgaaaacaaagagaagtcaagaatcgcagggccaggggcgaaaaagctcgttctcggcctgctggtcgatggaaagcagcctcgtatcagtaaggaggggtttaaacggattgagggcctgctttacattatcaagaaatttgggttgcagtccgtggccaaggaacggggcttttattctacatacggcctcatgaaccatctgatcggactgatggcttacctgaaagacgtggatatcgctaaatacaataagatcgaaccgctattctctgagatcaagtcaaggtatggtgaactcttctga

SEQ ID NO: 9128 - RNA, 1131 nt, synthetic construct
  source 1..1131: mol_type = other RNA
atggagacgtggtccgctcatcacctttttcaagaggctagcaagcagcttgattgtgacactatattcctgttacagaattatgcgctggatttgcgtagtaaaaagcttcccgtaatctttagtcttgggcatctgggaaaaatcaccggtatcgactacgactttttgtataggagtgttaaccggaaatacgaatccatcaactacaacatgttctcaattaggaagagaagcggcgggaacagatttattcatgctgtaaatggcaagctctttaagctccagaagtacctcaatgaagaaatcctgcagaagattaatccacacccaagttcatttgccttccacgcctctggaggcattcggcagtgcgcaaaccaacactgcggatgtaggtggttatttcagttcgacctgaaagactttttctatacaatcgcagagccccacgtgttcaaaattttcaaggagattgggtacaagaagatactcgcctttgaactcgcccgcctgtgcaccacaatccgcttacccaaaaccaagagctcctatatcaagtacaacaaatatgtgtctgagaatactccctacttcccacagaattatattggagtgctgccgcaaggcgcacctacatcccctatgctgtcaaatcttgccgcacgcagactggacgaaatgctgtacgactattctcaaaactacggtctagtttacacgcgatatgctgacgatctggcattctcggcctctgtgctgcctccccataaatcaatcgcgcgaataaagagggatattattagcataatccgccgcaataacttcttcgagaacaacaagaagatcagaatcgccggtcctgggagcagaaagaccatcctcggactgctcgtggatggggagaagccacggctgaccaaacagctccggaacaggatcgaacggaacattttcagcatcgagaaattcggcattcgtgaagtcgccaatcatgacaaattcgagtctgtctacggcttttttaatcacctgtccggcctaatgtccttcattcacgatgtcgatttgactttgtggaataaactacagccgcgatttgctacaataaaaaagttggtggagctgtga

SEQ ID NO: 9129 - RNA, 1125 nt, synthetic construct
  source 1..1125: mol_type = other RNA
atggagacatggagcgctcaccaccttttcagcgccgccgcaacaaagatcggagttgctcgagctggcagacttgcagcttacgttgccaagctgcaacgccgaaatctgcctgttataaccactctagggcaccttgctgagatcgtgggcgtgtcctatagtttcctgagacagactgtcgagcggaagagagaggccgcaaactataagctgtttgccatctctaaacggtctggcggtcgacggtttattcacgaggtgggcacgcagcttttgatcgtccagcgcttccttaatcaggaagtgctgcagggaatcgcaccacatcccgctagctttgctttccatagtactggaggtattaggaagtgcgctcagatgcactgtggagcctcgtggctcctacacttcgacctcaaggactttttttacagtatcagtgagtggtcagtctatgaagtctttgccagcctccagtatcgccctctgctgtcgttcgagttagcccggctctgcacaacgctgcatttgccgggagcctcccaagcgtatctgcgaccttcaactgccgcccagaggtattccttctaccggaaagacgtgatgggagtgctgccccaaggcgcaccaacctctcctatgttggccaacctggcggcacacgatctcgacgcgcgtctacaggacttcgccgatgccgccggaatgatttacaccaggtacgccgacgacctcaccttctccacagtgcgtctctccgcgccgatctctcagttgcaatacgaagtaagccggcagattgggctgaccggcttttcagaaaataaaaggaaacgcagagtggcaggtccagggtcacgtcgcacagttttaggtttgctcgtggatggcgccgaaccaaagctgagcaggcaatttattgctcgggtagataggcatctgtacgcggccaaaaaatacggccttgaggccgcagcatctagggcagcttttgatagcgctttcggctttcataaccacctgggggggctggtggcttattccatggatgccgagagaaagagaggggcaatgttcttagaaagactgcgcgaaatacccgtcccctggcagaccgcttga

SEQ ID NO: 9130 - RNA, 1143 nt, synthetic construct
  source 1..1143: mol_type = other RNA
atggagagctggtccgcccaccatctgaataagaaggctctggagacgctatccaatgatgaggtaaaagacttgacgttttacgcccggaatctcattagcaagaatacccccgttatatttacactgaaacatctgagcgagatcatggaaaagcgatatacattcctgcgctctaccgtcgagaggaagagagaacactctaactacaagatgttctcaatttcgaagcgatccggaggcaggaggtttattcatgctgtgtccaatcagttacaacctgtgcaacaatggatcaatacggaaatactgcagaagcaaaaacctcacaacgccagctttgcattccacgcaaatgggggcataaaaaaatgcgcggccatgcattgcggagcgaggtggatactaaagttcgacattagcaactttttctactgtatcaacgaaacagacgtgtaccagttctttgtgagcctcggttaccgtccgctcctggcttttgagttagctcgtatttgtactaccctgcggctgcccatccagcaccagaaatatatcaggtcaagaaattcgagtagattggagtacaagttctattatcaaccagagggctgtcgcggagtcttaccgcagggagctcctacctcaccaatgctgtctaacctgatcgccactaaacttgacgagcagctcacccagtacgccctggaaaacggctttacatatacacggtacgcggatgatctcgccttcagtgcaatcgacttgccagagaaaaagtctattggcaagatccagtttgaaatcacaggtattatgaaggcacagggcttcaaggagaacgaaaagaagacctctgttgccgggcctgggtcaaaaaagatgatccttgggctgcttgtggatggagagcagccccgcttgagtaaacagatgtataagaaactcgaccgctacctctacgcaattgaaaaatttggtctggacagcgtcgccactcacgaaaaattcgattccaccttcggcttttataaccatctttgcggttatatcagtttcgtaaagtccgtggatgctccaagaggggaggagttcgaaaaacggatgaacaacattactcccccctggacttctcacccttga

SEQ ID NO: 9131 - RNA, 1146 nt, synthetic construct
  source 1..1146: mol_type = other RNA
atggaaatttggtcgttacaccaattgcattccgcctctgtcgaaaaactgggcctctcccaagctaatagcttaagacagtattcagagaatcttaaagagaacaacctacccacaatttttacactgaatcacctggctaagatcactggggtaacatatcacttcctccgctcaacagttctgagaaaccgggagcttgccaactacaagatgtacgcgatcaataaaaaatctggtggtcgtcgacatatccacagtgtgaatggcaagctcctcaaagtgcagacgttcattaacgaggagatactccagaacatcatcacttctaaatccagctatgccttctctaaaggaaaggggataaaaagttgcgcacaagcacattgtggcgcaagatggatcttcaagtttgaccttgaaaacttcttttacagcattaatgaggcccaggtatacacaatttttaatagtctgggctacacaagtctgctgtcctttgaactggcccggatctgcacaactacccggctacctgttgaattgagcaagctgctgaaaagggggacctttgatccctttaactccatcaattcgtacactatttacaacaagaactgttttctcggagttctgccacagggtgccccgacgtcccctatgttatcaaatttggtggctaagtcacttgacaccgtcctgaaggaactggcttctacctacggactgacctataccaggtatgccgatgacctcaccttcagcactagtatggatctaccaaagaatctgtccatcggggaacttcagaggcagatcatacagcaaattcgcaagcagggattcaaggagaattctaagaaaacggtggtgttgggccccggaagccgaaaaattgtgctcggcctgcttgtggatactgccgagcctcgcctgtcaaaagcgatgttaaaaaggatcgacagattggtgtatgcaagcagtaagttcgggatcatagaggcagctgagcatgaaggtttcgactcacccattggctttttcaaccacgtctctgggctcatcagctttgtcaagcatattgacaaccggaagtatcagtactttagctccaagttcccagatttcgatttgcacctgacctga

SEQ ID NO: 9132 - RNA, 1137 nt, synthetic construct
  source 1..1137: mol_type = other RNA
atggagacttggagtttgcatagactgtatacgtgcagcgcagaaaaactaggcgctgacaaagccaccaaattgaaacgctattccgaaaacttgaaacgcaaaaatctccctaccatctttacccttaatcatctggccaagatcaccggcgtggactatcattttttacggtctacagttctccgtaacagggaaatagcaaactacaagatgtacgcgatcagaaaacgatctgggggcaggaggcacattcattctgtcaatgggaagctcctgaaagttcaaaccttcattaatgaggagattcttcagaatatccctgtctccagttcgtcttacgcctttaagaaaaatagcggcattaaggagtgcgcccaagctcattgtgaagcgaagtggatctttaagttcgacctggaaaactttttctactcaatcaacgagcaccaggtctataagatcttcaaggacctcggttacactagcctcttaagcttcgaaatcgctaagatttgtaccactactagactgccaacaaacttatccaaccttctgaaggtgaagaacaatagtgacttcaattcgtaccgcttctaccagaacaactattgcctaggcgtgctgccccagggatcacccacgagtccaatgctgtctaacctggtagctcagaacctggacaacgcactgataggtttggcctccaattacaatctcacatataccaggtatgctgatgatctgaccttttctactccgataaaccttcctcagaatctgagcatcggaaagctccagcgggaaatcttttatgaaattcgtcgccacgggttcaaagagaataaaaaaaagaccgtgatcctaggacccggcagccggaagatagtgttgggactgctggttgatacatccgagccaagactgtccaaggcaatgctcaaacgaatcgatcggctggtgtacgccgcccacaagttcggtatcattgaggccgcagagcacgagggatttgagagccctattgggttctttaatcacgtgaatgggcttatttccttcgtaaagcacatagatatcaacaaataccactacttctcatcaaagtttcccattttcgagtttgataacttttga

SEQ ID NO: 9133 - RNA, 1140 nt, synthetic construct
  source 1..1140: mol_type = other RNA
atggaggtgtggtcactgcaccagctgtacacagaatcagtggagaaacttggagctaataaggcgaaacagttgcgtaagtactcgacgaacttaaaggagaacaatctgcctaccatatttactcttaaccaccttgccaagattaccggcgtgacctaccatttcctgagatctacggtgttacggaaccgggaaatcgccaattacaaaatgtatgctatccataagcgcaatggtgggctgagacatatccatagcgtgaacggaaagctgctaaaggtgcagactttcctgaatgaggagattctgcaacacactactgtaagtcgctcttcctatgccttcagcaagaatgggggtattaaaccatgcgcacaggttcactgtggcgcaaaatggatcttcaaatttgacctagagaacttcttttacagcataaacgagtaccaggtatataagatattcaaagacctgggctatacccctctcttgagcttcgaactagcccggatttgcacaaccataagattgcccacaaacatgcattctctgctcaaggaatcaaacaacaccttctttaaggactacaagttttaccagaacaattcgcgactgggcgtgcttccacaaggagcgcccacaagccctatgttgagtaatcttgtagcacgacacctggacaatgccctcaaagaactcgctgataactggggtctgacatacaccaggtatgctgatgatctcactttttctactccgacaaatctgccatccaacctttccatcggcgaactccaaaggaaggtcatctccacgattaggaagcatgggtttaaggagaataaagaaaagaccgtcgttctgggccccggcagtcggaaaatcgtcttaggactcctcgtggatacacacgagccacgcctctcaaaagtcatgttgaagaggattgacagactggttcacgcaagcaataaatatgggattgtcgccgttgccaaacatgagggatttaagtcccccatcggttttttcaaccacgtgagcgggttgatcagtttcgtgaaacacatcgatatgaacaagtatcagtacttttcctctaagttccctgacttcaaatttaatgatctgtcttga

SEQ ID NO: 9134 - RNA, 1143 nt, synthetic construct
  source 1..1143: mol_type = other RNA
atggagacatggagtgcgcaccacctgttcaagaaagcgacggcccagctgaatgacagcgtcgctttagatttgagtcgctacgcacagtgcctccgtaaccaggagctgccggtgatctttaccttgggtcatcttgctaaaataaccggcattgactacagatttctgcacgccactgtgaacagggaaagagaagccgcaaattaccgtatgtttgctatccgaaagagatctgggggaaaaaggttcatccacgcggtgtccaatactcttagcagcgtccatgagttcctaaaccgggaggtactgtcaaaggtcgatcctcaccccgcctcctatgcataccaccggagtggtggcattagagcctgtgcccaaaggcattgcggcgccaggtggctgctgcattttgaccttaaagacttcttctttacgatacatgaggccaaagtgtaccagattttccgggagatgggctacagagaattgctgtcgttcgagctggctcgcctgtgtacaaccaccagactcccaaggcacttatcacacctgactaagccttccgatccctgtttcaagctgaacgaacttccttatcgaagatatcactctatcggtgttcttccccagggggcctctaccagccccatgctatcaaatctcgctgcaaggcacctggaccaagatctgtacctctttgcaaaggagttgggcttagtgtatacccgttatgccgacgacctcacatttagcgcatatgacctccctcggggctggtccattggaaagttgaagttttacgtggaaaagaccatccggaagcatggattccgcacaaatccgtcaaaattttccgtgtgcggtccagggagtcgcaaaattgttctcgggctacttgttgatggagatcatccacgattgtccaagtggactcggcatcggatcgataggttactgtatagcgtcgacaagttcggatgggaaaaagtagccgagttcgatgagtttgattctctgtatgggtttttcaaccacctgcgcggactgatcgcttacgctaaagacgctgacccaatgcacggcgaacagtaccgctctaggttcgaagagctcatagaacgatttcccgtggagctctga

SEQ ID NO: 9135 - RNA, 1110 nt, synthetic construct
  source 1..1110: mol_type = other RNA
atggagaattggagtttacacactcttaaccagaaattggaggaagacttctctgatgagcagctgaacacatggattcaatatgcaagaaatctcagaaaacagaatctgcccattatcttcaacctaaaacatctatccaagatcaccaatatcaatcagcatttactttactctgtgatctgcaggtttaaagagaaggactattacaagatcttccgaataaagaagaagactgggggctacagattcatccattcacctaacaatgaattgaagaaggttcagtactttatcaacaagtacatcctctctaaattggatatacacaagtcctgttttagttatcacaaagatggcggggtgctgcggtgcgctgaacaacatactaatgccaagatcctcttcaaatacgacctgaaggacttctttttttgcattaacgagatgtccgtgtatcatctcttcaaaagcttgggctacaccaaaaaactgtcgtttcaaatggcgaggctgtgtacaataatactgattaaagatcacgggaagtacattaagaagtacaaggtcaaggataaagaaattgaactgggagtgctcccacagggagctccgactagcccaatgctgtccaatctgcttgccaatcagctcgacgttaaactgtcacagctggccgacacgaacaacctgatatatacccggtatgctgacgatctcacgttcagctcaaacaaaaagctttctaaaatcgagatccgaaccattaactccaagattctgaagatcattaagtacgaaaagttcatcatcaacaagaacaagatctccattagccgccagggaagccgcaaacaagtcctcgggctgattgtaaacaatgatacccccaagctgagcaaagatcgcaaaaagaagatagacacattcctttacgccatcgagaagttcggttgggagagtacaaccgagcactatggttttcgtgatagtttaggcttttttcaccacttggacggcattatcatctatgcagaacacattgacaaagacctaggaaagaagtatcggaataaactggataaacttctccctaaattgtttaggtga

SEQ ID NO: 9136 - RNA, 1143 nt, synthetic construct
  source 1..1143: mol_type = other RNA
atgaccatcgtgcccagtcatttgtattacctgggaggcataaaagccaaaagaattcctgccgtgttatccgctacaatggctaaagcagccaagttcctgatcaacgatgtcgtctacatccacaatctgcaacacttagtgaagctaagctctgtggataaggtgtacttggatgacatcatcctcagaaggaagaacgagtatgagcactatactgtcgaaaaaaagagcggagggagccgctttatctcggcccccaaagaggatcttaagcagcttcagaggtggattaattactatatcctccggaacctcaagccgcacccctgctgctactcttaccacaaaaatagctctatatactcctgcgcaatggttcactgttcctcacagtggctagttaagctcgacgtggagaacttttttgacatgacgagtgaacgctcagtgtatgaacagtttatcctcatcggatattccccaatcgtctcatttgcattggcacggatatgtacctatcaacccacctttctgacaaaaaaccactccaagtgggttctctataaaaggaagaatcgtgagttagcgtactcacgagacaacattaagtatattggtcgactgcctcaaggggcgccaacctcacccatgctttctaacatggtgtttttcgagctggacaagattatcttcaaactggtgcagtcccatggcgggctgtacacacggtacgccgatgatcttttcattagcttcccaaagaaagacatgaacaggtctgatattagcaaaatcataggcagagtggttgactacctgcggaaaaagggatattctctcaataagactaagatcaaggtaagtccgccaggggcaaagaagattgtactgggattgaatgtggacaaacatattcctcacttgtccaaagagttcaaaaaaagcatcgattcccatctttatgctctgagcgaatttggccctgtcgcccatgctcgcttcagaggtttcaatagtgtatacgggatgctggagcatattaagggtaagatattcttcgctaagactatcagtcaggactacggcctgaagtgtattcaggaattctacgccgccctggaaaaacacggctttaattga

SEQ ID NO: 9137 - RNA, 1143 nt, synthetic construct
  source 1..1143: mol_type = other RNA
atgactatcgtgccttctcacttatattatcttgggggtgttaaagcacgcagaaccccagctgtgttgtccgcgataatggctaaatcagcccagtttcatacaaacgacatcgtctacatccataacttgcagcatctggttaagttgacctctgtagagaagacatattttgatagagtgatactacgtgaggtccacgaatacgagcattattcgattgctaagaaaagtggaggctaccggtacatatccgctccgaaagaagacctcaaaaagctgcagcgatggatcaacttctacgtgctgaaaaatctgaatccacatccctgctgtttttcataccacaagaattcttccatctataattgtgcgcttgctcactgcgccagtaaatggctgattaaactcgatattgagaactttttcgacatgactagcgaaaggaacgtatatgaccagttccggctgattggctacagccctattgttagcttcgccctggcaaggatctgtacttaccagcccaagtatttaaataagaatcatgaccggtgggtgctgtacaagcgagatacccaggaactggtgtacagcaagaagaatgtcaagtacctagggagattgccccaaggggcacccaccagtccaatgctctccaatgttgtgttctacgagttggatgagctgatttataagcttgtccaggagaatggaggcctctacacacgctacgccgacgatatttttatctccttccctaagaaggaaatgggtaggaatgacgtaagcaagatcatcggcagggtgatagggtacctcagaaagaaaggttattccctgaacaagaccaaaattaaggtgtccccccctggggccaaaaaaattatccttggcctgaacgtgaacggtgatacgccgcaactctcaaaggactttaaaaacagcatcaactctcacctgtacagcctcgaaacatatggaccagtccttcacgcccaataccgcggctttgattctgtctatggaatgttagagcacatcaagggcaagattagtttcgcaaaaaacatctcgtatgactacggggtgaaatgctatgatgaattctattcagccctggagaaacacggattcaactga

SEQ ID NO: 9138 - RNA, 1143 nt, synthetic construct
  source 1..1143: mol_type = other RNA
atgaccatcgtccctagccacctctactatcttgagggcatccaggcacgcagaactccgagcgttttatcagccgtgatggcaaagagcgcaagatttcatatcgacgggatcacttatatccacaatctgcagcacttggtgaaactttccttgatagacaagaagtatctgaatgacttgatcttgagaaagacccatgactatgagcacttctcaattaaaaagaagagcggaggacatcgttatattagcgcacccaaggaagatctaaaaaggctccagaaatgggtaaacttctatgtacttaagaacctcagtcctcacccttgttgctatagttatcacaagaactcttccatttacaaatgtgctctggctcattgctcatcgaaatggctcataaagctggacatagagtccttttttgacatgacctctgagttatcagtctacaagcaattcaaatctatcggctatagtccaattgtctctttcgctctaacaagaatttgcacgtatcagcccaaatttctgaccaataaccacgatcgctggattctgtacaagaggaaaaataaggacttcatctacccccgggaagggatcaagtacataggaaggctgccccaaggtgcccctacctctccgatgctgtccaatatgattttctataagacagatgagctgatctacaattttatcaagaaacggggaggcatctacactcgatacgccgatgacattttcatctccttttcagaagaggaattcactcgcgatgatgttagcaacattatcggcaggattgtggggtacttaaaaagcaacggctacagtctcaacaagacgaaaatcaaaatatcccccccaggagcgcgaaaaacaatactgtccttcaatgtgaatgaatctaccccaaagctgagcaaagagtttaagaagagcattgagtcccatctgtacgccctgaacacatttgggccagtgctccatgcgcagtaccggggtttcgattctgtgtatggcatgctcgagcacattaagggcaaaattttcttcgccaagagtatctaccttgaatacgggatcgcctgttttaatgagtttaactcggctctggaaaaacacggttttaactga

SEQ ID NO: 9139 - RNA, 1143 nt, synthetic construct
  source 1..1143: mol_type = other RNA
atgactattgtcccttcacatctctactttataggaggcgtggaggctagacgcgaaccagccgtgctaaagagcctgatggctaaatctagcaagttccacgatcacggcctcacatacattcactccatccagcatctgtctaaactgatttacaccgatgagaactatttgaagagcatcatattgcggaaatcttctgaatacgaccactattcgatccccaagaagagcgggggaagcagattcatcagtgctccccgggacgagttgaagaagatccaacattggatcaacttcaacgtcctgaaaaatctaacgccacatccttgttgctactcctaccacaaaaaagcaagcatctacaaatgcgcagctatacactgctcatctaaatggctccttaagctggacctcgagacattctttgacatgacatcagaggtgcatgtttataaacagttcaccagcattggctattcaccgatcgtatcatttgcattggccaggatttgtacgtatcagccgaagaagctgactgcgcactattccacctggaagctccatagccgggtaaaccgcaaagaacccttttcccgatcagggatctcctacatcggaagactgccccaagggtcccctaccagcccaatgcttagtaatatggccttctataatctcgacgagaaaatctattcgctggtcaagtattacggtgggctgtattctaggtacgccgatgatattttcatttctttctccagtgctgatattaacaggactcttatatccaagcttgtgggccgtctgatcaatcacctgaaaaaggaaggctacaagctgaacaagaccaagataaaactttctccacctggttcccgaaaaattgtgctaggattgaatgtggacagtgaaacacctaagctcagtaaagagtttaaacgcagcatcgactcacatttatacgcattagcgaagcacgggcccaaactgcacgccttagagcggaactttcagagtgttttcggcatgctggaacatattaagggcaagatcctgtttgccagatctattagtagggaatatggtgataagaagctcaatgagttttacagcgccctggagtcccacggattcaattga

SEQ ID NO: 9140 - RNA, 1140 nt, synthetic construct
  source 1..1140: mol_type = other RNA
atgacgatagttccgactcacctgtattacatagagggggtgaagaagggacggcctagcagtctccttaaaaaactcgtttataagtctgggctgttggccgagcgtaatctgccctacattcattctgtaaaacacctgtcactactcacaggatgtgacgagaactatctgctttccattatcaacagatcaaataggacatatagcttttacactgtgccaaaacgcagcggtggtgtcaggttcatccacgcacctgatgaagagctgaaaaaactgcagcaatggattaatgcacaaattctgatcaacgtgcccgttcatccctgttgttattctttccacaaggatagctccattaagaagtgcgctgaaaagcactgtggcgtcaagtggcttatcaagatagatatcgagaacttctttgagatggtgagcgaaatagagatctacaaggttttcatcaagttagggtacaagcccataatcagtttagctctggcccgcatctgcacctatgagccgagatacctcactgggttctataacaaatgggtgatctacaaaaagagcaagcgactcccatttacatcagaaaatgctagattctttggcagactaccccagggagctcctacctcccctatgctgtcgaacttggtgctcagtagtctggatgagcgaattaaccgtctgatcaaatacaaaaacggagtgtattctcggtacgccgacgacatctttatcagctttggcgataaagacattaaccgcgtctaccttgaaaaggtcatcggacgggtgacccggtatctggaagactttggctataaagccaacaaaaccaagataaggctgatctcccctagggcactcaaaattattctaggcctgaatgtgggaggggagatcgtaaagctgaattccaattacaagaaggacttacagtgccacttctacggcattaataagttcggcctgatttcccatgcctctcatcgcaagtttaattcagtgcttggtatgttggaacatatcaaaggtaaagtcaatttcgcgtgccagatcgagccagattatggcattccattgaaggaggaattgaaaaacattctcaataagaacgggctttactga

SEQ ID NO: 9141 - RNA, 1143 nt, synthetic construct
  source 1..1143: mol_type = other RNA
atgacaatcgtccctagccatctctattacattgagggcgtgaaaaaagggagatccccgtccattcttaaaagcttaatcgtgaagagttccttcttcaactacaagaacattccctatatacatgacgtgaagcacctgtcacatctgctgggatgtagccagatcgatctgacttccattattaaacggaactattctggatatcgcttctacacggtgcccaaatacagtggcggtgtccggtttattaattctcccaacgactttctgaagaagattcaaagatggatcaatttcaacatcctcagcaaagtagaggtgcacccttcctgttatagctttcataagaacagcagcattaaaaattgcgcggagaagcactgcggagccaaatggcttgtgaagatcgatatcgagaatttctttgaaatggtttccgaagtcgaggtgtacaagcaatttaggaaattagggtacaaaccgattgtttcgtttgccctttctcgcatatgcacttacgaacctacccacctggtaaacttccagcataagtggattaattacaattcacggaccgattcactgccattctcccgaagaaatgtgaatttctttggacgcctgccacagggtgctccaacaagtcccatgttgagtaacctcgtgctgtcaagtttggatgagaaggttacaaggctaatccggaacaaaaatggtatatatacccgatatgctgacgacatcttcattagcttttccgaaatggccgtggacaggaaattcctcaggcagatcatcgggaagctgatttcgtatttaaactctttcggataccaggctaataagactaagatcaagataatctcaccaagaagcaccaaactcgtactagggctcaatgttgcagaggataaagtctttctgcagaagaagtacaaaaataacctcgagtctcacatctacggcatgaaaaagtttggtttggtgctgcatgccaaacaccgtaagttcaactctgtcctgggcatgattgaccacataaacggcatggtcaactatgcatcttacatcgaacctatgtatggcaacaagttgaaggaaaagataaagcacatcgtgaatatcaatggccttgggtga

SEQ ID NO: 9142 - RNA, 1143 nt, synthetic construct
  source 1..1143: mol_type = other RNA
atgacaatcgtgagcactcactcgtacttccaaggtggaattaaaaagggccacagtgcgaaacacctgtattctttaatgagcaaggctcataagctcgagtgctatgatataccctatgtgcactccatctatcatttggctatgctgtcaagactccctgttcatctcctgcactcctttaccgacaggaagtcaatccactatacatcttactccattccgaagcgcagtggtgggtgtcggtttctacacgcaccctcagacgagttaaaatccgcccagcggtggattaatgacaagatactgtcccaactgccggtccatagctcctgttacagctaccattccaaggggagtatcttggaatgcgcccagaagcattgcagctcaaagtggctcatcaaactggacatcgagaactttttcgatgaaatatcggaggtggacgtgtacaaagtgttcagaaccattggctataagccaatggtcgcctttattcttgcccgcatctgcacctacgagccttatactgtccggaataacaaacactcttgggtccagtacaataagaactcagacgatctgccctacggaaagaaacatattaagcttttcggccgagtgccccagggagctcctacaagtccaatgttgagcaatctggttctgtacaagcttgacgagaaactctcccacttcgcacagtcaaggggaggcatctattctcgttatgcagatgatctgttcatctcctttggatctgatgattttgataggactaaagctagccaggtcattggtagctgtttaagttctgtgcgcagctatgggtacaaactgaacagaacgaaaattaaggttgtgcctccaggcagtaacaaggtagtactcggccttaacgtaaatggtgacgaggttcgactgacaaagacctacaagaagaaaatagagtctcacatttacggcatcaaaaaatttgggatcgataagcacgccttgcacaggggattcgacagcgtgttctctatgattgaccacatcatcggcctaatcaaccatgccaaaagagtggaaccagaattcggggcggacaagcatgtggaatttcagcggatactcaccaatctgggcctggggtga

SEQ ID NO: 9143 - RNA, 1071 nt, synthetic construct
  source 1..1071: mol_type = other RNA
atggcccaggctcacaagcttgaatgtctgggcatcccatacattcattcatttctccactttgctcatctgaccaaactgcccgagtcctatcttagaagcgtggtcaatcgacacaacgccagctacacatcgtatgcgattccgaagaggtccggcgggtcccgttaccttcagatcccctcagatgaactgaagggcctgcaaaggtggattaactgtgaaatcctcaacagattgccagtgcactcctcctgctactcctaccacaagaattcttccatcgttcagtgtgccgagagacattgcagttcgaactggctcataaagcttgacattgagaatttctttgacacgattaacgaagtagaagtgtacaaggtattccgtaagatcggatacaaaccattaattgcctttgggttggctcggatttgcacatatcagcccataagcgtattacaaaacaagaaaaactgggtgcaattcaataagaatagtgacgagatgcctttccagaagaaacacatccggcacttcgggagggttccacaaggggcacccacctcacctatgctcagtaatctcgtgttagcggatctagatgagaaactgagttcttatgcacagaaacggggggggatctacactcgctatgccgacgacctcttcatctcttttagccaaaataacttcgaccgacagcaggcttcccaggtcataggaagcgttttgggacatgtgaaatcttacggctataacctgaaaaagtcaaagatcaaggtgattcctcctggatctaacaaggtgattctgggattgtctgttaatgataagcaggtccgcctgaccaagcagtatcgccagaaaatcaatagccacatctatggcattgtgaagtttggtgtggataaacatgcaatacacaggggctttgacagcgtcttcggtatgatcgatcatgtctttggtctgatcaactacgccaaaaccgtggagccggacttcggtcatacaaaataccaggagctgcaggatagcctgagaagttctggcctatcatgcacttga

SEQ ID NO: 9144 - RNA, 1065 nt, synthetic construct
  source 1..1065: mol_type = other RNA
atgtataaggctcacaaaatggaaaggtggggtattccatatgtgcatagcatttatcacttggcgatcctgtcaggcctttccgtgaacaaactgaattctatcgtcggtcggcaaaagcaatactacactgcctacgccatccccaaacgaagtggaggctcgaggtttcttcacgcaccagatgacgagctgaaaaaactacagcggtggataaatagcgagatcctgattaagttgcccgtgcacccttcatgctttagctatcacacaggcagttcgatcgttggctgtgccgagaagcattgcagctcatcctggcttataaaattcgacatcgaaaacttcttcgatagcatctccgaagtagacgtatataaagttttccggaagttcgggtacaaacccatgataagccttatcctggcacgcatttgtacgtaccagagcgagtcaattagcggagatatcctgcattgggtccaatataacaagaattccgacgaactgccttttaagaaaaagcacattcggttttttgggagagttccgcagggtgctcccacctctccaatgattagcaatctggtgctgtcctctctcgacgaaatgttaagtcagtacgcccagaaaaggggtggaatctactcaaggtatgctgatgatctgtttatatccttctcccagaaggattttgatcgtgttcaggcaagtcaggtgatcggccgagtcttaaactacgtgaagtcttacgggtacaagttgaacaagaccaaaatcaaggtgattccacctggatcaaataaagtggtcctcggcctcaacgtcaatggcgactctgtattgctcacaaagacttacaagaagagaatcgagtctcacatatatggagtgggaaaatttggcattgagcagcatgccctgcatcgcgggttcgactccgtgttcagtatgattgaccacatcaccgggctcattaaccatgctagactaatcgagcctaccttcggggagaagaaacacgaagagttcaagcgcctgctgagtacattaggcctctcttga

SEQ ID NO: 9145 - RNA, 1068 nt, synthetic construct
  source 1..1068: mol_type = other RNA
atgtccaaggctcatcacatgcagagatggggaacgccctacatacacagcatcgtgcatctatcacatctgagcaacagccgtatcgaactcattaaaagtattgtggaccgaaaggaagatttctacaccgcgtacacaatccctaaacgcagtggagggtctaggtttattcacgcccctaatgctgagctgaagtccctgcagaggtggatcaataccgaaatactttacagactgccagtacacaattgttgcttctcctatcaccgagactcgtctataatcgactgtgctaaaaagcattgcgcctcaagatggttgataaagttcgacattgaaaacttcttccataccataaaggacgtcgatgtttacaaagtgtttaggatgtacggctacaagcctcttatttcctttatgctggcacggatctgcacttatcaaccaaaggtggtcatagagaacaagctcaactggattcttttcaataccaagagtgacgatttagtgtattccaaaaagcacgtgaattttttcggtcgggtcccccaaggtgctccaacttcaccgatgttgtctaatttagtcctgagagagctcgatgagacactgaaccagtatgcccagaaacgcggaggcatttattcccgttacgcagacgacatgttcatttctttttctcaggacaactttgatcgcaagcaagcctcacaggtaatcgggagagtgtttacacatgtccggaaatacggctacaacctcaataagaccaagatcaaagttatcccccccggccaaaacaaagtgatcttggggctcaacgttaacgggcgggatgtgctgcttacacgggagttcaaacagaggattgagagccacatttatggcattaagaagttcggcgtgaaagagcatatgaaatacagggggtttaatagcatctatggaatgatcgagcacatctttggcctgatcaattatgcacgccaggttgatttcagttatggtgagatcaagcacattgaactgacggaacagctgcaggccactggactatggagctga

SEQ ID NO: 9146 - RNA, 1143 nt, synthetic construct
  source 1..1143: mol_type = other RNA
atgactatcgttagttcacagccctactttagtcaggggatcatcaaaggtcgaaacccccaaaagctgaacgctctgatgagcaaagctcggaaaatgcaagcccagggccttccttatattcattcactccaccatctggcccttcttacgaacacaacagtagattatttgaacaccatcgtttgcagagcctatgacgactacacatcttatcggatccagaaaagatcagggggaagccgcttcattaacgccccatctgatgagttaaaactactccagcgctggattaacaataatatcctgtataacgtgccctcccactggtgctgcttttcctaccataagaatgcgtctattatcgattgtgctcagcgacactgtcagtcaaagtggctgattaagttggacatagagaacttcttcgacactattaacgaagtccaggtatacgagacatttcactccttagggtataagccgatgattgcattttttctggccagaatatgtacctacgagcctaactggataagcacagacaaaaagtattgggtcagttacaacaccaattccgatgaactcccctatagcaagaagaatattaagtactttggcagggttccccagggagctcctacctcaccaatcattagcaatatggtcatgttcagcctggatgacgaaatcagcaacctgatccaaaataaaggggggatatacacccgctatagcgatgacatattcgtgtccttctctcagcctaacttcaataggaacgacgtgagcaaggtgataggcaaaatcttccaaaaatcaaagcggtacggttacaagatcaataagacgaagatcaaagtgcttcctccaggctcgaagaaaatcatcttgggactgaatgtgaatcaacgtaaaccggaactgaccaaggagtacaagaacagaattgaatctcatctgtatggaatgtccaagttcggaatttccaatcatgcacagcacaggaaatttgactctatcttttcgatgattgagcacatcaaaggcttgatcaattatgcaaggcagatttctccaaagtacggtactagtaagtacactgagctcagtgatattctaatgaaagagggcctctcctga

SEQ ID NO: 9147 - RNA, 1155 nt, synthetic construct
  source 1..1155: mol_type = other RNA
atgggcatcaacctgtctcacgcctatttaaaccaaggcgctagtctcggatatagcatcgaaaaaatagagtccctgcttatcgagtcttatgagctgataaagtcaggctttcctcccttgttctctctgaaccacctggcgaagaactccgacgtagacttttacaatctgaggaaagtgatccagcgaaaatgcacagacttcaaatacttatacgacatccataagatcccaaaaagatctgggggatttaggtttatccattccccgggttctcagatcaaacgggtgcagcgctggatcaatgagtgtatcctctataacagcaagcctcactggcgctgtttctccttccatcccggaggctcaatacttgattgcgcttcaattcactgtgaatctaagtggctaattaagatcgatattgagcggttttttgacagtattaccgagaaacaagtctatgaagttttcgtcgagctcgggtacaagccactgatcagcttcgaactcgcacgtatttgcaccgtcaatcacaagaagaaaatcaagaaacactactacaagaagtgggtgatgtttaataccgacaagggcatgccctataagaaagatgagattaagacaattgggtacctacctcagggtgccccaacaagcccacagttgagcaacctggtgttcaagaaacacgatgagcacattttcgaagtggcaaagaagaacgacttacagtatactagatatgcagatgatatgaccttttccaccgttaagaaaaatttcagcagagagaaagccgttactttcgtgaaggaactgtattcgtacctgagtaagtacgggtttagccccaatcacacgaaattgaaaatagtgcctccgggcgcccataaggtagtgctgggattgaatgtcaatagtaacactcccagactgtcacgtgtgttcaaaaaccgcgtcgagaaccatctgcggtgcatcgagaaatacggcttggaaagtcacaggattcatatccagttcaattccatttttgctctcatagaccatattcgagggcttataaactacgcccttcaaattgatacaaactacggtcacaagctctcccatcggtatctcgaacttctgaggtcaaatggattttga

SEQ ID NO: 9148 - RNA, 1287 nt, synthetic construct
  source 1..1287: mol_type = other RNA
atgctgagcgtcttttacgagaagtgtctggccctcattcggagccctctgctgcatcagagtctcgtccgtagccttccttccatcaacgaggccgttctgggttccatcaaaggatcttgcatgactatcggtcctactcacacctatatacaagagggactcgagaaaggcatatccgagcagaagctgaaggggattgtgtacgagtctttgaaacgcattaacccgagtgtgccctacctcttttcgttaaaccagatttgtcacattactggagtgtcttatccctaccttcgagagatcgttaggaggaattccactccatacaacttccacagaattcctaagaaatctgggggtcacaggttcttgacgattcccagaacggaactcaaactggttcaaacatggatacataaggaaattctggcctcacaagcaccccactttaggtgctatagctaccactcccagtccagcatcttcaattgtgcccgggaacactgctcctcgaaatggcttatcaagatggatatcgaatcattcttcgactcaatctcagaggtcatggtgtacaaggtatttcgcaaactggggtacaagccccttgtggctttcgaactgggccggatttgcacataccagccaacccacctgcggatcagcaataccctgaagtggaggaatttcaatactaatagtgctgagtatccgtataaacgcaaaggcgtcagtttttttggcagactgccacagggagcgcctacaagcccaatgctatcaaatttggtgtttcaggagattgatgagcagctgcactcctatgcaacagaaaacgggttagtgtatacccgttatgcagatgaccttacattcagcaccatcgacaaccgctttagtcgggagagagcgataaagttcgtatcctacgtaaagaaggtgctacgaacagaaaatttcaacaccaacaaaaccaagctaaagatcatccctcccggcagcaggaagattgtgctgggcctcaatgtcgaagcccaagagccattactctcaaaggggttcaaaaaaagagtggaaggacatttgcgcggaatcgagaaatttggcattcttcagcatgttgaacatagacggtttgacaccatctttggtatgctctctcatatcaacggactgataggctatgccaagcagatcgataacgcttacggcttccgattggaggcttggttcagttctattctgactcagaacgggatagtgaatgagtcttttcaggaatga

SEQ ID NO: 9149 - RNA, 1164 nt, synthetic construct
  source 1..1164: mol_type = other RNA
atgacaattggccccacccacacgtacatacaggagggcctggaaaaggggattccagagaacaaactgcgaagtatagtgcgagaatccctttcaagaagcaacacgagcgtgccttttgtgttctctcttaagcacgtctgtcattttactggcgcaagttacccctacctgcgggaaatcatcaggcggcgtcagacaccatatagtttccacaagatccccaaaaagcggggaggacataggttccttaccgttccggatatcaagctgaaaagggttcagaattggataaaccgagacatcctggccagtcaaatcccgcacttcagatgttacagctatcactcaaaaagctcaatatttaactgcgctcgcgaacactgtagctctaagtggttgattaagatcgacgtggagaatttctttgactccatcagtgaggtcatggtgtataaggtgtttaggtctttgggttacaaacctctgctcgcttttgagctcggccgcatctgcacctatcaacctacccatctgtccattaaaaacactctcaggtggtgcaatttcaacaagaatagctcgtcctacccatataagcgcatcgagattaatttcttcggccgtttgcctcagggagccccaacctctcctatgctgagcaatttagtctttcaggacatcgatgaggaactacactcttacgcctcttccaatggcgtggtatacactagatatgcagatgacctcacattctcaacaagtaatcgccagttttcaaggaaaaaggcgctcatcttcgtcaacaaggtgaaaaagattttacggactcggaatttcagcacaaacaagtccaaactaaagatcatccccccaggctcccggaaggtcgttttaggattgaacattgatgggcccaatcccctgctcctgaaagggtttaagaaaagactggaggggcacttgcgcggcattgagaaattcgggatacagcagcacctggagcataaacattttcagaccgtatttggaatgatctcccatattaacgggcttattggttatgcttcgcaaattgattacgaatacggtaatagactgaaggccaaattcagcgacattctcactcagaacggaatagtgaacgaatcatttcaatcttga

SEQ ID NO: 9150 - RNA, 1164 nt, synthetic construct
  source 1..1164: mol_type = other RNA
atgactatcgggcccacacatacctatattcaggaaggacttgagaaaggcatctccgaaaagagattgcagggaattgtgtatgagagcttaaagagatcaaacacttccgttcccttcgtcttctcactcaatcacatctgccacataaccggcgcttcatatccttcgttgagggagattgtcaggagaaatgagacaccgtactgctttcataggatacgcaagaagtctgggggacaccggtttctcacagttcctaatgccgaactcaaggtggtacagacgtggataaacaaggaaatccttgcgagtcaggcccctcactttcggtgctactcatatcatagcaagtctagtatcttcaaatgtgccgaagagcactgttctagcaagtggctgatcaaaattgacattgagaactttttcgacagcatcagtgaagttatggtgtataaggtgttcagaaaactaggttacaaacctctgctggcttttgagttgggccgcatctgtacctaccagcccactcatctgcggattaaaaacacactgaaatggcgctctttcaacacaaactctgcagagtacccgtacaagcgaaaaggcgtgtccttttttggaaggcttccccaaggagcccctacttcccccatgttatccaatctcgtatttcaggaaatcgatgaggagctccatagctacgcctccgaaaacggcctggtatatactcgctacgctgacgatctgacattcagtaccattgatagacgattcagcagagagcgggctatcaagtttgttcggcacgtcaagaaggtgctgagggccggtaatttcagtacgaacaagagcaagctcaaaatcattccaccagggtgccgtaaggtggtgctcggtctgaatatagacggacaaaaaccactgttgtccaagggcttcaaaaaacggttagaggggcacctgcgcgggatcgaaaagttcggcataccacagcacctagagcacaaacgatttcagaccgtcttcggcatggtgtcacatctgaatggtcttattggctacgcaaaacaaatcgattatgagtacgggaataggatggaagcacgtttcagcaacgtcctgacccagaatgggattgtgaacgaatcttttcaaacctga

SEQ ID NO: 9151 - RNA, 1149 nt, synthetic construct
  source 1..1149: mol_type = other RNA
atggccatcggacctgcacacatctatctgaaaaagggcatcgagaaaggaattgagaaagaaaatcttctcgccatttacaactcatctttgcctcagaaaaggaacttccagacatacatccactctctaggacatctgtgtcattttagcggcgtaaattaccactacctccgcagagtgattaaacgcgaaatcgactgttacgacgtctatccgatcgcgaagagatccggtggttccaggtatatctctgcacccgaggatgagttgaaagacgtccaaagatggatcaatcgctatgtgctgtccaatgttaagccacactggcggtgctttagttatcacgctgaggccagcatatacaacgcggccaaggagcactgtgggagtaagtggatcataaagttagacattgagaacttcttcgatagcgtgagtgagattgctgtgtacaaactgttccgtgaacttgggtataacccactcctttctttcgagttggccagggtgagcaccattgaaccattgcggattaataaaaagatggcagccaagtgggtcaattacaacacctcatccgatgagctaccttattcaaggagaaacgtgaaatactttggacggctcccccaaggggctccaacaagtccgtcgattagtaacctggtctttaagggcatcgacgaggaattccagtttttcagcgaaaagaacaatctgatctacacgcgctacgccgacgatatttgcttttcttcacacgaaaaatccttcaaccgagagtcagcgcagcaggtggtatcttattgcagctccgtcctgcgggctaatgggtatgccaccaaaaagctgaagactaagataattccccctggcgtgaggaaagttgttcttggctttaatgtggaccacgatgagcccaagctgacaaaagcctataagaagcgactggaaagccatataagaggcgtcgaaaaatttggggcaatcgctcacgctaagcataagaagttcgattccgtgctgggtatgctcgagcatgtgctcgggttagttaaccatgctaagttagtggaatacggatacgccgtaggcctgaaaaataagctggacactgcaaaacagcgtcagggattcatcggctga

SEQ ID NO: 9152 - RNA, 1071 nt, synthetic construct
  source 1..1071: mol_type = other RNA
atgacgataaattccacccacagttacatagctacaggactttcgaagaacattgacttgacatttctcgagaatatcatctccgagtcaaatagccagaagtttaacaatcggacctatatacacgggctgaatcacatttctcacctaactggagttgactatttcttcctgcacgatattatgacccgcaaggagaacccttacaagatattcttcattcgcaagaacttagggaaccgcgagatcaaagaacctaatcagcggctgaaattggtgcaacgaaccatcaatcagcaagtgctgtctaaaatcccagtgcactggagatgtttctcttaccataagggggcttcaattgtcaaatgcgcatccgagcatttaggggccaaaagtctggtgaaattcgacatctccgacttcttcggcaacataaatgagctcctggtttacaaatccctcatcaaactcaagtatagcggtagctcgtcttatgccatggccaggttgtgcacacatccgaattccgagaacgataactttggcgtgttgccccaaggagcgcccactagtccaagcttaagtaatctcgtctttttcgatgtagactgcaagcttcagaggctggcacacaaaaacaatctaatctactcccgatacgccgatgacattactttttcaagcttcaacgatctctcccgtcaggagttcctggatttgaagctgagcgtggtaaaaatcctgaagtatcataacttcgaactgaatagggacaagatcaaatttatctcatctagcactcccaaatttgtgctgggaattaatgtgggcggcgaaaccctaaagctgagcaagcggtacaagaacgatattgactgtcatatttacggactgaaaaagtatgggctcgtcgagcacatgaggcatagagagtttacgtctgtttttggcatgattcaggaactttttggtaagatcaaccacgctaagagcgtcgaagaatcttttggtctttcaagagaaagtgaacttagaaacttcatccagacaaagggcctgtttttcaactga

SEQ ID NO: 9153 - RNA, 1065 nt, synthetic construct
  source 1..1065: mol_type = other RNA
atggctatatcatcaacccatagctatcactcagtgggcttgcggaagaacattaatcccgctcttctgaagaagatcatcttagagagcaatagccagaagctccacaaccgcacatatatccacgatctgaaccacatatctcacctcagcggagtggactctctcttcctgtacgacgttatgatgcgaaacaataaaccgtaccatagcttcgagatgaaaaaaaaaaacggcacacggaccataaaagtccctaacgataagctgaaagtcgtccagcgggtcatcaatcaggaagttctgtctaagattccagtgcactggagatgtttttcctaccacaaaggtgcaagcatcgtgaaatgcgcaagtgagcatctaggggcacaatccttgattaaattggacatctccgacttttttggtagcatagatgagtttactgtgtataaggccctgcttaagctcaaatattccccacccagtagctttgctatggcgaggctgtgcacacaccccaataagagtggcgaagtctccgttctaccacagggcgcccccacatccccttccctttctaatatcatcttcttcgacattgactgtaaactgcagaagttagcctctaagaataaccttatctacagtcgatacgccgatgatatcactttcagctcgttctataagatggatcgttcgaccttcctggagattaagctctcagtagttaagattctgaactactacaggttctctctgaacaagaaaaaggtgagattcattcactccggaatgcctaagtttgtgttagggataaatgtgtctgggactacgctgaagttgtccaaaaaatacaaaaacgacatcgattgccatatttacggcgtaatcaagtatggtctgcaccaccatagtctgcatagagaattcgctagtgtgttttgtatgatccagcatgtgttcggaaagatttatcatgccaagtcagtagactacgacttcgggatttcaagggagcaggaatttcgcaattatctccacacccaaggactctttttttga

SEQ ID NO: 9154 - RNA, 1146 nt, synthetic construct
  source 1..1146: mol_type = other RNA
atgacaataggccccactcactcctacctaaagaccggattaagtaaaggatttagcaaggagaaactgcttacaatactcgagagcagccatgagaaagaatccaagagtctgagttatattcactctctgaagcacatttcacacatcaccggagttcattacatcgtgctgcgaaatattgtgttgcggaactcgaacccctacctggtgtacaatctcaaaaagaaggtatcaggctatagggatattagttcgccaaatgacgatttgaaactcgtccaaaagtggattgctcagaatatccttatcaacattgaaccccactggcgttgctatagctaccacaagggcgcctccatcatcaagtgtgcccaagagcatgtggagagcaaatggcttatcaagctggacattaacaatttcttcgggtctattcaggaatcccaggtctacgacgtgttcaagtcccagaattacaactctttagtcagctttgagatggcgagattgtgcacaatcaatacggagtttgatcactccagctcaatcaagcattgggttaaataccggaataagcgctctaccagcccttattcatcactcaaaataaagagattcgggcatctgccgcaagggagcccaactagtcctcacctgtccaacattatatttaagtccgccgacatcgaactccagtctattgcccagcgctatagcctcgtgtacaccaggtacagtgatgacctgtctttttccacaggtgacaagaagttcaatagaaagcatgcaaaagctttcatcactgaagtgagtaagatcctgaaaaagcaccactatcagttgaactctaagaaaaccaaaatcatccccccttcaaagtctaaagttattctaggcctgaatgtagatggtgatacgccaaaactgactaaaagctttaagcagaggttaaacttccatattcggggcatacaggaatttgggataatagaacactctcagcattcccacttcaattccatttttggcatgatcaacattatctcagggaaaatcaacttcgcaaagagcgtcgacattaactatggaaacaaaaccgagctgatcttcaaaaagatcctccaacaggagggtcttatctga

SEQ ID NO: 9155 - RNA, 1215 nt, synthetic construct
  source 1..1215: mol_type = other RNA
atggtgttcagctactctaactcgtccgtggtcgtcagcgtgatcgttggggtggctgagcagaacctgagtatcaagggaagctttgtaaccataggacccacccacacctatatctacgaggggattagaaaggggtacagcgaaaatcaattgttggagattatttcccgatcttcaatacagaagtcaaatggtgtgagctatcttcacagcctgaaccatatatcatacatcaccggcactcactacctgttccttcggagtgtcgtggataggaccacactgccctataagcagtttaccatccctaagaaaaacggaggggaaaggaatgtgtcctcaccagttaagcagctaaaaattgtccagcgctggatttgcacacacatcctcgccgacaaaattccacactggaggtgtttctcttttcataagaaggcaagcatcctgaattgtgcacgagaacactcaggtgcgaagtggttaatcaagatcgacatagagaactttttcgatagcatcaaggaaaatcaaatctactccgtgtttaaatccatgggctacaattccctcgtgagcttcgaattggctagactttgcacgctgtccagtgaaatcagtacttccgagctgatcaattctaacaccaagcagctcccttataaacggcaggaaaactttacaacaggtagactgcctcaagggtcacccacttctcccatgctctcgaaccttgtattcgacagtctggatgtaatcttccagcggctcgccgagaaaaaaagcttcgtgtatacaagatacgccgatgacatttgcttcagcagttgccagcgctcactgggccgggaagagtgtttgcagattatcaagattgtgtccaggattcttcggtctaataactaccaaatcaaccgcaaaaagttgaaaatcatcccgcctgctaccactaaatccgttctcggcctgaacgttgattgggacacgccaaaactgtctaagcagtttaaaaagcgttgtcaatttcatgtgagaggtattactactttcggactggccgagcatgctaaatatcgtaggtttgaaagtgtctacggcatgattaagcatgtttatggcctcataaattactgcaagcaggtcgagccatcttatggcgcacgcttagagattctactgataacagccttagagaaagagggattctcctga

SEQ ID NO: 9156 - RNA, 1140 nt, synthetic construct
  source 1..1140: mol_type = other RNA
atgaccattggccccacccacacatatatacaggaaggaattaggaacggctacagtgaggcacagcttagtgacctgctaaaactgagctcattgcagaaggaaaaaggtattagctatcttcattcgcttaaccacattagccacattaccggggctcattatctgttcttacgagcaatcgtcgacaggacctctagtccttacaaacagttctcaattccaaagaagaacggtgggactcgcaatgtctcggcacccgacgaacagctgaaaattgtgcagcggtggatctgctctaacatccttagcaaggccccccctcattggagatgcttttctttccacaagaaggcatctatcataaagtgtgctagagaacatagtggagccaaatggctggtgaagatagacatcgagaatttcttcgatagcatcaaggagacgcagatctactccgtttttaaatctatgggctataactccctcgttagctttgagttggctcgcctgtccaccgcgctatctgaaagcccggctgacgagacaaataacgaattctccagagcttccatcgagagtctgccttataaaaggcagcaggggttgttaggaggcaggctcccacaaggcgcacccacatcccccatgctgtccaacttggtctttgagaaactggataatatcttccaacggctcgccgaaaagaaaagttttgtgtatacacgttacgctgatgatctgtgtttttcatcctgcaagacttcacttaagcgtaatgattgcttgcagatcatcaagatagtatcacgagttctccgggcgaactcataccaaatcaaccaaaagaagctgaagatcattcctccagggactaccaaatctgtgctggggctgaatgtggactggaatagcccaaagctctctaaacagtacaaaaagagatgtcagttccatgtaaggggtatagccgagttcggcctggccgagcacgccaaatatcgccggtttgaaagcgtgtttggtatgattaaccacgtgtacggactcattaattactgtaaggatgtcgagccatcctttggagccaatttagagacgctcttcactaacgccctggaaaaagagggcgtgcgctga

SEQ ID NO: 9157 - RNA, 1179 nt, synthetic construct
  source 1..1179: mol_type = other RNA
atgcaacgtgtaagtcctaaccagatacataggtgcgccgagctgaagtcatctaatgaggagtttatccaaaaactggtgaaggatagcagaaagctatattccaaaggcctccctatcatctttactctgaggcacctgagcaagctcacagatgtgaattttaagtacctgcactctattgtcggcaagaagattaacccctacaataatttcagcatcaacaaagcacgcggcgggaaaagaaatatatcgtcacccaacttttacctgagacgcgtgcaggactttatcaaacaggagattttggacactaactatgtatcgtcccagattagtgagagcgtttttagctatagaaaggcattatccatagtcgataatgctaaattccacataggggcgaaatggattattaagacagacatcgagaacttctttgatagcattaaggaatatcacatctaccatttcttccattctctggggtacgcatctttactttccctagagctctcccggctggtgacctggccgtcatttgatattaacttcgatctcggcctgagccaggatcggtccctgaatgaggatattacttttacctccaagtacaagttctactgttcttctgatgttattggctccttgccccaaggagcgcccactagtccacagctcagtaacattatcttcagccctattgacgaaaaattcaaaatccttagcgaagagtatggatacatttatacacgctatgccgatgacctctttttttcaacccgaaataacatcgacatcaactcagcccgaaacctgcttaatgaagtgcgttacatactaaacagttccaactacaagatgaacaacaagaagacgaaaatcatcctgccacgggctaagaaggtgataaccggaatcgtcatcaccgacgacaaaattctgttagacaggaagttcaaggacgaaatcaagatgaatatcttctttgccgagaaaaatggacttgaagctcagaggaaattcatcaagttccacggtaacacacataccttccttaaatatctcttggggaaattgaatttcgctaaccaggtggaaccagactttgccaatatctggaaaaaacggctgttgaatctggccaagaattctggtttcacgatgatatactattga

SEQ ID NO: 9158 - RNA, 1173 nt, synthetic construct
  source 1..1173: mol_type = other RNA
atgcagcagctgagtccttatacctttttggatctcgctgaagcgcgtggatactctgaagcatacaaagacgctatttccaatacggctgacgcactgtcacgctccggttgtccaatcatcttcacgttggggcatctcgcagccctagctgatgcagactatagctacctgcacagcatagtctccaggacaatcgatccatactgtcactttagtatccccaaacgcaacggggacagacgagccataagcgccccgcacgataagcttaaatccatccagaaattcattctggatacaatcctcaacagcagtggtgttgtggccaaaatctcacagttttctttttcctatcgggagaagatttctatatactctcatgctgagaaacacgtcggcgccaaatgggtggtcaaaattgacatcaaggacttcttccccagttttaccgagattgacgtgtacagactcatgtgttcactggggtatgcccccttgctctccttagaaattagtaggattctgacctggcccaaaaacgatctttttcttcaggatgaggaggccgagactaatcatcaaaaactcttagagtccaagtataagctgtataacggcagcgttaagaagatcggagtattgcctcagggcgcccctacatctcccatgctctcaaatctgctgttcaaggaatgcgacctgttgattaacgaagcggcgaaagaatatggctgcctatacacacgatacgccgacgatctgattttttcggccaatcgcctgagcaagcaaaaagctaaggagctgatcagctatctgcggattatcctcaagtgcaacaagtttgaaatgaatgacagcaaaactagggtgtactttcctgggtctaaaaagatcataactggcctttacgtgaataacaaccggccaacccttggtaagaagtacagagatgctattaagaagcacattttcttcatcgagaaattcggaatccagaagcaagccgatcatgctggatcaaaagacgcaaataccttcctagcccacctgatcggcaagatcaacttcgccctccatatagagccaaattttgcattatcccagctgcaaaagctgaaaaatgctcttaagaaggcaaactacataaaccagaagttctatccgtga

SEQ ID NO: 9159 - RNA, 1143 nt, synthetic construct
  source 1..1143: mol_type = other RNA
atgaaaatctggcagcccgccttatatcgaaaaaccgctctgaagaaaggattgtccctgtcaattatcaataacgccatcaagatttacacgcactttagcaagactcctttcccctgtatcttgacaatcaaccatctatccaagatactgaacatcccctacccggcactgaagagatatacatacaatcagatcgacaactacaaacatttctctatccggaaacgctccggcggaactcggcgcatctacagcccaaactataacttactcagaatacagcagtggattaatcgagagattctgcagaaagatactaacatctccgatttcagttacgcctttaggaagggactcagcattagagattgcgcatcaatccactgtaaccaatcttggctcattaagttcgacattaagaactactttgagagtatatctgagatcgatgtgtacaattacttccataaactcggctacaataaattacttagcttccaactcgcgcgcatttgcactgtcaatgacagcagaaataaaaccattgatacactgccatcgaaattcatctatcacaagaataagcagtacaaattcctgcagaatagtgaaataggcttccttccccaaggcgccgccacctctcctatgctcgctaacctgatcacatcacagctagacgaggacatcaataactttctgcagagcatcgatcttgacttcaattatagtaggtacgcagacgatatttttatctccaccaatagcaagcaaatagacgatacacacattaggaaggtactgaactctgtgtattccataataatcagtcatggttttgagccaaacaaaaataagaccaagatatttcggcctggcaaatgcaaaaacattctggggattaacgtgaactcatccgacgtgaagttgacaaaacactttcgtaatatcctcgaatgtcaccttttctatttcaagaaggataagattcagcataccctgaatagggggtttaatactgtttttggggctacggcttatattcacggtctgttgtcatatgccgaacagattgactctaactatgtcaagaagctgaaaaagaagtaccagatcgataccgacttctttaacatctga

SEQ ID NO: 9160 - RNA, 1008 nt, synthetic construct
  source 1..1008: mol_type = other RNA
ttgactctgtcccacctcgctcgagagacagagactaagtggggataccttagaagcattgtccagcgccaaatcgacgactacacagcaatccgaagactgaaacgagatgggacgtacagagcaatctgggccccaatgccctctttgatgcatgtgcagcggtggatcttgagtaatgtcctttcgggtttaaagtttcacgacgcggcctacgcttatcgtaggggccgctgtataagagattgtgccgaacaacacatcggggcccggtggctgctaaagatggacctgcataattttttcggaaccattgaggaagcaagggtgtatggcgccctgagggggatgggttatcccgctctgctggccttcgagatggcaaggatttgcaccaaacctctctggctcgatgccgacaagaggtggctcgaagggaggggtgttgatgcctatggttccccactacggggcgtattaccgcagggagctcccacctcaggggcattggctaacgctgtcgcctttagcatggatgcgatgctgcgccgcctggctgacagtaatggcctgtcttacaccagatacagcgacgatctgaccttctctagctccgggccttttgaacgtgcaagtatagtgaagctggtgacagaggtggaacgggccatttccctggctggcttcgttgtccatagaaaaaaaacacgcgttgtcccgcctggagcgcgcaagatcgttctcggcttgatgctcacggagcgggaggtacgtctggtgccagaattccggtctaggttagacaatcacatccggtgcgtggacaaatatggcccagctggccatgcagccgccagaagattcgattcagccctgtcaatgataaactacgtggatggatgcctcgcttttgcacttgacattgagcctgagtggactgccgatcgcaaccagaggtggcttgatgcgctttatcgacacggacaccccgtgaaccgagacggctga

SEQ ID NO: 9161 - RNA, 939 nt, synthetic construct
  source 1..939: mol_type = other RNA
atgaacgagtactccagtataagaaggcgcaagcaggatggcagctttcgggaaatttctgccccaaaccccaatttgatgcacgtgcagcgttggatgctgtcgaatgtcctgactggcctccagtttcacgacgccgcgtttgcttacagaagaggcctatctataaaacattgtgcggaagtccacgtgggcgccaattggctgctgaaaatggacttgcataatttcttcggcagcatcgaggaaagcagggtgtacggtgtgttgcgtcggcttgggtatcctgctttgctggcactggagatggcccgaatctgcaccaagcccatcacccttcctggtatgaccaagccgcgcctcagtggtaggggagttgaagcttattccacaccaaataggggggtgctgccgcaaggagctccaaccagtggggccctggctaacgctatcgcatttcgactggatactatgctcgcttctatcgccgacgaaggcggactgacatacacgcggtacagcgacgacctgacctttagctcatatgagggactctcacggacagccgtctcaaagttaatcctgcagattgagcatgccatatctctcgccgggttcgatgttcacaatgggaaaacacgtattgtaacccccggagccagacaaatcgttcttggtctgatgctgactcctgaggccgtgaggctattaccagagttccgccaccagcttgataaccacattagatgcgtggagcgatacggccccgctgcacatgcgaacacgagacgcttcgactccgccctctccatgattaactatgtagacggatgtctcgccttcgcagtggatatcgaacctgactggactgctcggcgcaagattaggtggcgggcagcattagggcagcatggccaccccgtcgcacaggatgcgtga

SEQ ID NO: 9162 - RNA, 1128 nt, synthetic construct
  source 1..1128: mol_type = other RNA
atgtcaaccccttctccccatttgtatcagaaggctgcgattgcagctggagtgagtgcgagcgtggccaggagagcaggatccgtgtcacgggatattcaggccagtggggctttccctgtcctgacactgagacatctagctcacgagacgggcgcctcttacggctatttaaggagaattgttaaaaggtatgccgacgagtaccagagcatccggcgaatcaagcgcgacggcactttcaggctcataagcgcccctaaccccatgttgatggacgtgcaacgctggatcctggaacatatcctgaataccctgccacgacaccccggtagtttcgcctatcaccggggcatcggtataagacagtgtgcagagctccatgtgggctctaggtggctagtaaagatggatctgcacaatttcttcggtgagattagggaaaaccgggtataccgcgtcttccgccaactcaattacccagccttgctgagtttcgagatggctcggctttgcactcgcctggatcgaatcgacccttttactgaagcagtcgagcgcggcgtcggctcttatgacgatggacgcctgggaagacttccgcagggagctcccacatctggggctctggcgaatagggtggccaccgatctggacaatgaactgcagaacctggctgacggatcggggtttatctattcacggtactcagatgacctcacctttagcagccctgccccattttcccgacccgaagggatgcgtctcatttccgcagttagccgggctgcctctttagccggcttcgagccccaccgtagaaagacaagactcgtgccgccaggcgcccgaaagatcgtgcttggattactggttagcgacacaggcgtgaaacttttgccagagtttaggagacaaactcagaaccacatacgggccgcaggtaagtttgggatccagcagcactcctccaaacgtaacttccattccgtactttccatgataaatcacgtcgatgggaggctcgcgtttgcatacggtattgatccagagtggacgattcctgaaatgctggcctggaccgaggtgttggaaatgaacgggtacccctcggttgcaaaagcttga

SEQ ID NO: 9163 - RNA, 1125 nt, synthetic construct
  source 1..1125: mol_type = other RNA
atgaccaagctttcctctcacctgtatctggctaacggaactcagctgggacgcgatgccgaggtgttacggagggcatctatcgctaatgccgcaatggtgaaatcaggggtcagacctattcttaccctgaggcatttcgccagggacagcgaactctcttatgactacttgcgcaaggtagtccggagaggcgtagatgactacgagactattaaacgcaagaaagatgatgggtctttcaggtttatctcctctccccgacccgacttgatgcatgcccagcgatggctcctcgagcatgtcctgggaaatctagatctgcacgaggctgcctttgcctatcgtaaaggagtgtcaatagtccactgcgcagaagttcacgtcggggcaaaatggctggtgaagatggacttacataacttcttcggcgaaatttcagaatcccgggtctatagcgtcttccgaaacctgaatctctccccattgttgtccttcgaaatcgcccggatttgtacaagagtgccgagtgaagcagagatgacaggcaaggtgcgtctgtttagcgcttacagtcagcacgctgagggagtactccctcagggtgcgcctacgagcggtgctattgcaaacgctgtagctactgcccttgatgtgaaactcgacgcgatagcctctcggcgcggctttgtgtacactaggtactccgacgacctcaccatgtcgacacatgaaaagatctccagagatgatgcgagtaagctgatcgccgactttgcgcgcgctatacacggcgccggatttcgcgttcatagtaataaaacgagagtgatcacaccaggcgcccgcaaggttgtgttagggctgctcgtcggtgataggaacgttagactgctgcccgagtttaagcggcaagtgttgaaccacatcagaggggtgaggaataatggcctggttgcacacgccgcacataggcggttccgaagctcactaagcatggttaattacctagacggctgccttgccttcgcccacggtgtggacagagagtgggctgctgcagccaccagctcatggcgtgaggcccttaccaacgatggcttcctggacagtgcaggggtgtga

SEQ ID NO: 9164 - RNA, 1014 nt, synthetic construct
  source 1..1014: mol_type = other RNA
atgagcaaggacccagcttcagtggcatcactcggcgagctggccaccctgacagaaacgccttactggtacttgcgtagcattgtcgagcgccgcactgacccctacatgtctcttcaaagggccaagagaggaggtggcgtgcgcccaatttcagctccagagcctccgctgatgcacgtccagcggtggatacttcacaatgtactagatggactagatgaacactctgccagttacgcgtaccgccgaggccgatccatagctcactgtgccaaagcccatgtcggggcaaggtggctcgttaagatggacatccataactttttcgggactgttaccgaacagagagtgtataaagttttccgggacctggggtacgagcggcttatcagtctggaaatggcacggttatgtacacgagaggagatgaagtcttccacaagagctccgggtttccgatatacagcagttccctcctacgtcagtggcaccattggcgtgttgccccagggagcaccaacttccggggctttggccaatgcagtggctaccagaattgacagggccttaagtgggctgctgggcgaccgtggcattacttatacccgctatagcgacgatcttacgttctctaccagggatggtttcgatcgcgtgcgtgccagcgacctcatctcccaggtaactggcgtcgtacagagctgcgggtttcaggtgcacaagaaaaaaacccacgtggtgcccccaggagcgagacatgtggtgctcggattgctggtgacagaaaacaacgtgaggctgctccctgaaatcaggaggagaatcgagcaacacgtcagaggggtcgagggctttggtgtgcggcatcatgctgaccaccggggatttgatgatccttcggccatgatcggctatgttggaggttgcctgtcttttgcgctctcagtagatcctgactgggccgcacccatgtataggcggtggatgaaggccctgagcgctccctggtga

SEQ ID NO: 9165 - RNA, 1131 nt, synthetic construct
  source 1..1131: mol_type = other RNA
atgagtattgacgcgccacatctctaccggaaggcagcacttgctgcgggacgctcaaatgcagcagttgaagccactctttcacgtgcccacaccacagctctccggggtgctgtgcccatctttagcttaggccacctcgcccggctgtccaatgttgattatcagtttctccatgatgtggtgtgcaggaaggtggacccctatcagtccatcacaatgcggaagccatctggaaagattagacccatttcagccccgaatcaggaattaaaagcagtacaacaggtcatcctgtatagagccttacgcaacctcgacccgaatcccagcagctttgcctacaccaaaaacttgtcggttctggactgtgcgaaacggcacgtaggcgctaggtgggtgataaaaatggacctgagggatttcttctcatccgtggatgaacgaagcgcttaccgcacgttcatcaaacgtggttacgctagtctgatggcgttcgagatggcaaggatctgcactcgggataggagccctagaaggggagctagagagtatgtggaccgctaccctagaattcccgggtatgcatgcggctctgtgggcatgctacctcagggcgcgcctaccagtggtgccctagctaatgaggccgccagaccactggaccgaaagctggcctccttggccgcatcatctggcggcatctacaccaggtattccgatgacctggccttcagctgggcccaggacgtcgatcgctctcatctgcatgggtttgtctctaacgtcaccgagctttgtgctttgcagggcttttccgtgcacaggagaaagacacggatcctgtcccctgggagccgtaaggtcattctcggactcctggtcgatgagagttctgttcgactgttgccagagtttaaacggcgcgtggataaccacataagatgcgtagctaaattcggggctagcaagcacgcagaagagcgcggtttcatgagcattttcgaaatggtgaaccacgtggacggatgtcttgcctacagtcatgggatcgaaccagggtggacagaggttcgaaacacgaagtggaaggaggccctgtcgaaatccggaatacaatctgccacttga

SEQ ID NO: 9166 - RNA, 1092 nt, synthetic construct
  source 1..1092: mol_type = other RNA
atggccgacggtggcgacccttcggtggtgaatcgcgctacagccgaactcgcacggctgaaggcccaaggcgcttatccggttctatcgcttgcccacctcgcccacgagacaggtgcatcttactcatatctgagggaaatcgtgaaccgaacccgagacgcctacgcctctgtggctcttcccaaacggtccgggggcactcggcctatttccgtgcctgagccaatactgatggatgtccaacgctggctgctgtccaacgtgctgaatagagtgcccgagcatccagcttccttcgcatacaggcagggggtgagcatcgtgcagtgtgctgagcaacacgtaggcgcgcagtggatggtaaagatggacttgcataactttttcggaaccgtacttgagagctccgtttaccgcgtgttcagaaccctcgggtatagcaagctcgtggcttttgagctggccagaattaccactcgtgcggaaggaaatatacgggcatcaggcagtgagcacgtaattggagattacagtatgcataaccagggtgttttgccccagggaggccctacttctggccagctcgccaatgcagccgctggtcgtctggaccgcctgttacaggcctatgcgacgagatctggcctggtgtatacaaggtacagtgatgacctggccttctcaggacatagtacctttagcaggatgaaggcgagcggcgttatcggggaggtgtctggactggtgagaagggctgggttcgaagcccacagaacgaaatccaggttagtcccaccaggggctcgcaaaatcgtcctaggtctgcttgtcgacgatagcgttcgtctccttccggaggatcgacggcgaatcgaagtccacctgcggggctgcgaaatctttgggttggcaaagcatgccgcacaccgcggatttgattccgtgttctcattcattgatcacctagacgggtggatctcttttgcattgggcgtcgaacgggccagagctacagtttggcggcagaggctccgccagattttgagcgcagatggactgcccgccgacttactcaggagagtcgcttga

SEQ ID NO: 9167 - RNA, 1125 nt, synthetic construct
  source 1..1125: mol_type = other RNA
atgcgcccacctcatttgtattacagagacgggattgccctaggggttgatcccgacgtgttggaacgtgcagccgatgagagggctcgcctgagggctcaaggtgcctaccccctcttatccttggcacatctggctcacgagactggtgcctcctacacatatctgcgggaagtcgtgtcaagaacaagagatccttaccaggatgtagcgattcccaaagcagacgggggaaccaggcctatctccgctcccgaacccatactcatggatgtgcagcgctggatcctgaagcatctgctggagaggaccccaacacacccggccagcttcgcctatcggccaggaaccagtatagtgcattgtgcagaacagcacgcaggcgcatcctggatggtcaagatggaccttcatgacttctttggcactgtgactgaaacgtctgtgtatcgggtgttccgccgtcttggctacgcaaaactagtgagcttcgagctcgcgcggatcacaactcgagcccagaacgcaaggtacgccccatggctcgccggaaaccggaccatcagggcctacagcgttgacgcagagggggtgcttcctcagggaggtccgagctcaggtcagctggccaatgctgctgccacaagactggatagactgatacagtcgtttgctctcgaggctgggctgacctatacgcggtattctgacgacctgatgttttcttcccacgccgcgtttcgaagggtcgatgcagtgaatgtaatccggagagttagcggactgacccgtgccgctggctttagccctcaccgcaacaaatcacgcatcgttccacctggcgcccgaagggtggtattgggcttactggtggatgacagtgtccgcctgcttcccgaacacaggaggagaattgaagttcacatccgggcttgcgagaagtttggattggccgagcatgctgcgcatagaggattcgactctgtgttcagttttgtcgatcaccttgacgggtggattagtttcgccctgggcgtcgagcgggatcgagctatggtgtggagatctcgattcaatcacgtcctctcaggcgccggcctcttatccgctattcaacgcgtatga

SEQ ID NO: 9168 - RNA, 1125 nt, synthetic construct
  source 1..1125: mol_type = other RNA
atgatccctccacatctttaccatcagcagggggtcaatttaggcattgaaccatctgcccttaagagagcttccgctgagagggccagactccgagctcagggagcctatcccatcctgtcactgggccatctggcctcggagacaggggcaagttactcctacctccgcgagatcgtaagccgcagccgcgatccgtatcgtagcattgccatacccaaagccaccggagggacccgacccatttctgccccagaacctattcttatggacgtccaaagatggatcctgagaaacatccttgataaattgcctatgcaccccgcctcctatgcgtaccggtcaaagacctccatagtgcagtgcgcatctcagcacatgggtgcaagatggcttgtgaagatggacctacacgatttttttggaactgtgggcgaacagtcggtgtaccgcgtattccgtaagctcggatacaataaactcgtttctttcgaactagcccggattaccacacgtactgaggacctggagagggcaccttggctcgctgctaacaccgtcataggatcctacgcggttgccggtatgggggtacttccacaagggggcccgacatccggaagtctggctaacgccgccgctacgcggttggatcagctcttgcagaagttctcactgcagcggagcctgaactatactagatatagcgacgatctcaccttttcaagcctggacgcattcgaccgactcacagcggaaagtgtggtgcaagaggtgagtggcttggtgaggaaggccggcttcgtaactcaccgcgctaagacgcggattgtcccacccggatctaggaaggtggtcctggggctgttggttgacgactccgtgcgcctgatgccagaacacaggcggaggatcgaagtgcacttgaggggctgtgagaaatttggcctggcgaaccacgctgagcataggaaattcaattctgtttttgctctggtcgatcacttagcaggctggctcgccttcgcattaggtgtggataaggttgtcgcactaagctggtgccggagatttaataaaatcctggagcgagagggtctgccccctatgcctcatctggtgtga

SEQ ID NO: 9169 - RNA, 1131 nt, synthetic construct
  source 1..1131: mol_type = other RNA
atggcggacgcaagtccacatctgtatattgcacagggtttggcacaggggcatgcagctgaagtggtgtctagagcctccatcgtgcggtcccgccttctcgctaatggcgtccctcctatcctgagcctgcgtcatttagcacagctgaccggcgtgtcatacggttacttgcgagagattgtagggcgagtgcgggatccttacctcgatatcaaccgccggaagagagatggcggcattcgggagatatccagtcccgaaccggtgctaatggatgtgcagaggtggctgctccacaatgttttttcgagcgtccccatgcatcccgccagcttcgcataccagcgggatagatccatcgtccagtgtgctgaacagcacgtgggggcgaggtggctggttaagcttgacctgcacgactttttcggcagcattcaggagaagagaatatttgacttgttgttgcgcctgggatactccaaactggtgtccctggaaatcgcccgcatttgtactcgcctccgaggccccagatatgaaggctatcagaacttttgggcctataacgccattcctagttacgtggtgggtagccaaggggtgcttccccagggagcccctacctcaggagctctggccaatacagtggcatctaatcttgacgccaaactccacgatctggctgctagtagaggacttgggtacacacgttatagcgacgacctcacgttcagcgccggtccagattacgataggaaacaagctaccgctctaatagcccaagtgaggaacatcgttagggaccagcacttcgtcttacacgagaaaaagactcatgttgtgccgccaggcgccagaacagttgtcctcggcttgctggtcgactctcagggcgtgcggctcttaccagagtacaagcgcaggctgcaagtacatgttagaggagtagggaagttcggactagttgagcacgcctctcaccgtggttttgagtcagtgctgtcattcgtcaaccacgtcgacgggctcatcgcatttgctgccggagtagaaagggagtatgcgcaacatgctcgacgggcctggaatgatgccctggcgaggtctgggtatccactggaggtctga

SEQ ID NO: 9170 - RNA, 1143 nt, synthetic construct
  source 1..1143: mol_type = other RNA
atgactcgggactcaccccacctgtacttcaaaactggacgcgctctgggccgcgatgaggctacacttaacagtgctattgaacggtccagactgattcaggagacaaacagaagaccagttctgtctctggggcacctcgcagctctgacagggacacggtatgcatatctgcgagagatcgtggaacgcactagcgacccctattcagaacataccagggcaaagagcggagggggttcgaggccaattagtgtgcctgatccactgctgatgcaggtccagcgatggatcttggagcacgtgctgggcagtacacggacccaccccaattccttcgcatataccactggcgtgtctatcaaggattgcgcgaacgtgcatctaggggcatcctggttgattaagctcgatctcaggaactttttcggatctatcgacgagaatgccgtgtactccgcctttagaaggctggggtacggtccgctcgtttcacttgaaatggctagaatatgtacacgtcccgccggtccgcgaatgcaatccctgggtggaaagcggcgttacgcgagcgtaccatcatacgccgtcgaatcccgcggtgtattgccccagggtgccccaacttctggcgctcttgcgaatttagtcgcccttcggttagaccagcagctcagtgagctcgcgaccacaaggggggtggctgtgacgaggtactccgatgacatcgccataagcgccggccctggattcacccgacgagatgcctcagagctgatcgctagagtcgccaggatcgccgccggaaacggctttgagctacaggataccaaaaccagagtgattcctcctggggcccgccatgtggttctcggattattggtggacggcgacagcgtgagactggtccctgaatttaaacgccggatctctacccatgttaggggagtatctgagttcgggctggttgcccacacgaatcaccggggcttcagaagcgcatttagccttattaatcatgtcgacggctgcatagcctttagtcaaggcattgaacccgcttatgctgcaagcgtccgcgcccgttggactgcagctttgaatgcgaccaactaccctgcaggaatcggctcggagaggtga

SEQ ID NO: 9171 - RNA, 1125 nt, synthetic construct
  source 1..1125: mol_type = other RNA
atgaatccttctacactccaccagtacgtagaagcaggccggtctgcaggggtgcctcttgacgtccttcgcgcatctgtggctcaggcttctgcgacacgtagcagaggcgccggacccattttgtccttgggccacctcgcccatctgactggtacgccatacctgtacctacgcgaaattgtacaaaggcaaagggacccatatgacgacgtcattttaagtaagagatccggagggacccggtctataagcgcgccagagcctgtcctgatggatgtgcatagaactgtccttcatcgggccctctccaacttaccgctccacccattctcatacgcttatacagccggccgaagtgtccagcagtgtgcagagcagcatctgggggcccagtggatgattaagtttgacttgcacgacttcttcggtcagatacaggagagagacgttttccgagtgttcgagggccggggatatagtaagctcgtcagcttcgaactggcgcggctgtgcactcgcctcaccgtattcgatcgccccgaaagaggctccggtcggtaccaagccatccctggctacgaggttcaggtgtctggctgcctgccacaaggtgctcccacctcaggcgcactgagcaatatggtggccactcccctagattatgacatggctgggttcgccgctaggagtggctttacatatacccgttattcggatgatatggtgctgtccaccactctgaacggattcgaccgcacccaggccaagtcgatcattagagaggtgtcagagatcatcgggttccacaggtttcagctgcaccagaaaaaaacaagggttgtacctccgggggcccgtaggatcgtgttagggctgctggtggacggagatagacttcgcttgacccccgaatttcggcgaagagtggaggtccatatccgaggggttagcaagtttggtattgctcaccatgctacacataggcgctttgattccatgcttagctttgtttcacacatagacggatgtatcgcatacgcccacagcgtgcaacccgattgggcggatgcaaggcagcatgaatggctggtggccctccggaaacacggatttcctacgtga

SEQ ID NO: 9172 - RNA, 1119 nt, synthetic construct
  source 1..1119: mol_type = other RNA
atgaaccaccccgctccccatcgctactttaggctgggccaggaatcgggagttccagagcaggttttgcaagcctctgctgcgagaaatgccataacacaggcccacggcgccgaacctattctgagcttgggccatctggcccatcttagcggcgcaccatacttgtatttaaggcagattgtacagcgcacgcgcgatccatacggggatattagcaggcagaaaaaaactgggggcataagactgatcagtgctcccgagcctgtccttatggatgtccaacgcctgatcctacggagagcattgcgaaatctgcctttacacccgttctgttacgcctaccgtgagggacgcaccatccaggcatgtgcacagcagcaccttggtgcaaagtggatgattaagttcgacctgcacaatttctttggacagattgaagagagggatgtctatagagtatttgacagttgcggttattccgcccttgtgtcattcgaactcgctcgcatatgcacgcgttcccgggtggctgactttcactcccgaagtggcagatactccgctattaccacatacgacgtggacgtgacaggtagacttccacaaggggcgcctacttctggggccctctccaacgcggtggctacaccactagactataccctgcatgagttcgccactggggcaggttttgtgtatactcggtattcagatgatatggtgctgtctacatgccaggacttcaaccgcgcccaggcagtgaccatcatccgagaggtgagccacctcgttgcaacccataggttccggctgcatcgtaaaaagactcgggtcattccccccggggctagacatgtcgtgctaggcctgctggtggacggcggagaagtgaggctgaccccggaatttaggcgaagggttgaggttcacatcaggggagtacgggagttcgggctgtcagagcacagtgaccacagaaagtttcgatccctgctcagctttatcaaccatgtcgagggatctctcgctttcgccagatcaatccaacctgcgtgggccgatgaaaagcgggccgaatggcggtctatcttgggcagcttaggactcaccctctga

SEQ ID NO: 9173 - RNA, 1119 nt, synthetic construct
  source 1..1119: mol_type = other RNA
atgaatcactcctctcctcaccactactctagagcaggcagggaggctggcgttagtgaaagcgtggtgagagcagcattggcccagtcgcatttgatcgaggaatccggatcatttcccatcctgagtctgggacatctggctcacctgtctggagcgccttacctgtacttacgagagatcgtacagcgcgtccgagatccttatcaagacatttcccaacggaaaaagagtggtggaacacgcccaatctcagctcctgagccagtcctgatggatgtgcaccggttcatactcgacagggcgttggcatcagtgccactacaccccgctagcttcgcatacactagaggtcgcaatataaagcagtgcgccgagcgacatctcggggccaaatggctgtttaagttcgacattaccaacttcttcggtcaggtgaaagaaccctccgtttttagggtgttcaggcgacaggggtatagtcgcctcgtgtccctcgaactcacgaggatatgcacccgggccccactgagtaaaaacctcggcagccgttctcggtacgatgtcattccttcgtatagcgtagaccagcggggatggcttcctcagggagctccaaccagtggcgcgttatccaacgctgtcgcagccccacttgatcacgatctgacatcactggccgaccgtcatggcctggtgtacagccgatattccgatgacatgtttttttctgccgggcaaggcttttcccgtcccaaagcaaaggctttggtaagagaagtggaccggacagttcaaaggcacagattcctgctgcataggaagaagactagggttatcccgcccggtgcccgccatattgtgttggggttacttgtggacagcggccaggttcgcctactcccggagtttagaagacgggtagaagtccacatccgcggcgtgggaagattcgggcttgattcacatgtcgagcacagggggttccggtcaatgtttagctttatcagccatgtcgacggctgtcttgctttcgcctctagcgtggaacccgactgggccgagtcttgtagagttcgctgggaggccgtgctgaaggatcaggggttccccatttga

SEQ ID NO: 9174 - RNA, 1125 nt, synthetic construct
  source 1..1125: mol_type = other RNA
atggatcattcatcgccccatctgtaccgccaggcaggcttagccgcaggggttgaacgggctgtgttggaccatgctctggaacagatggtccggaatgaggctagggacgccctcccaatcttgtctctcaagcatctcgcccacctgacaggtgctccctacctgtacctgagagatatcgtcgcccgcgtggcagatccctacaccgacattgtagcccctaaacgcagtggaggaaagaggcatatttctgcaccagagccgggactgatggacgtgcaaagagtaatcctcaagcgcgcccttggaaacattccacaacaccctagctcctttgcgtatagacagggtatttccatcgttgagtgcgcaagaaggcatctgggagccaggtggctggtcaaactcgatcttcacgacttttttggcagcatttcagagagacaggtgtatctcgtgttcagggcccggggttatagccgtctcatgagcctagagctggcccggctctgtacacgtgctgggcttagcggatcacagcgcgtgggctccactcggtattccgctatcccctcttatgcagttaacactgtggggtatttaccacagggggggcctacctccggtgcattggctaacgctgtggccactccgatggactacgctcttgcaggccttgcacaggagtgggggttggtctacacaaggtactctgacgatctggtcttctctgcgggccacggctttaatcgggccatagccgtgagaataatcggcaaagcgacaagcgctgtgcgatcacaggggtttattttacatgaacgcaagacgcgaatcatccctcccggagccagacacattgtcctgggtctgttagtggacggcgatgtggttcgactgaccccagagttcagacgtcggatcaatgtacacttgcgcggagttgataagttcggcctgaggtcccacgctatccaccgaggcttccgaagtctgttcagcttcgtgaaccacatagacgggtgcctagcctttgccatgagtgtcgagcctgaatgggccagggaaaccgtgagtgcatggaggcaaatactgcgggcgcaggccttccccgtaaattga

SEQ ID NO: 9175 - RNA, 1128 nt, synthetic construct
  source 1..1128: mol_type = other RNA
atgtcacagcctccaccccatcggtatctggctagaggaagggccgatggcgttagtgaaactgtcctcagggccgctgttaagaataccactaagacggatgctcatgatgctctctctatcctttcattggggcacttgagccacttgactggagctccatacttatacctgaggggcatagtgcaacgcacatcggatccatacgacgacattatgagaaaaaagcagacgggcggaagcaggctcatctctgcccctgagcccgtcctgatggacgtgcaaaggctgattctcgaaagagccctgactggaaccccgatgcatccagcctccttcgcttaccgtcgaaagcgcagtaccctgatgtgcgcacagcagcatgttggggcccgctggatgcttaaatttgatctgcacgacttcttcggcagtattacagaagtgcaggtctataaagtgtttagatcaagggggtatgagcctctggtgtcctttgagctagcgcggttgtgcacgcgctccacaacaatgccctcatggtctacccggcaccaagtgcggtatcccgtgatccagtcttacaacggccggaccttaggttccctgcctcagggaggtcctacatcaggggcactggcgaatgccgtagctacaccactcgataattccttaagcgacctcagccatgaccatggcttcacttacaccagatattctgacgacctcgtgttctccagcgccaacaagttcgacaggacagtcgcccgggccataattaacgcagtgagacgctgtgtctctggtcagggctttcgacttcacgccaagaaaaccagaatcatcccccctggggcgcgccacattgttctaggccttatgctgagtgatgacggtgttaggctgacccccgagttccgccgacgaatcgaagtccacgtacacggggtgagcacttttgggctgttggctcacgcagaattccgtagattcaggagcgtgttttccttcatcaaccatgtcgatggatgtctggcctttgcagagagcgtggagagtccgtgggcacttcggctgcgtggagagtggcagcgagtactacggaaagagggctttccagcaatgtga

SEQ ID NO: 9176 - RNA, 1110 nt, synthetic construct
  source 1..1110: mol_type = other RNA
atgaacaattttagccctaatctgtatatcaaccagcggccaaatgaaatgcccgggcgtgtcgcgaaaatcgcctggaggggaatcgtgtcccagagggatcgggggcttacccctattctgaccttagggcatctggcctcagccaccggaattgatcatgcattccttcgatccgtggtggacagaagttgggacccttaccaggaaattaaaatctcaaaaaagcggggcggtactcgcaaattggccagaccacacccactgcttatggaggcccagcgttggatcctgtataacgtcctgccaaacctggagctcaatgatgcaagttttgcatatacatcaggcagatccatcgtggattgcgcgcagcgacatgtaggtgcccggtggattttgaagctggacctcaaagacttcttcgactctgtttctgaaaagagcatatatcggatcttcctcaaccttggctacgagaagctggtcagtctagaactagccaggttatgcactcgcgtaacacctaatagtcctaggtttggtggtaacctggataagtacgagactatatttgactatcgccaccccgcacaagggcaattgccacaaggagccccgacatccggggcactagctaatgcggctatgtttagaatagactgtgctctgcagaagctggccagaaaacacagctacacgtacacccgatacagcgacgatctcgttttctccacaggcgaaaaagcttcacgatctcagctgatcaccctcaagaagaaaatccagcacgagattgttagcactcgtttccaacttcgcaaagacaagacaagaattattaccccgggcgcccgcaagatagtgttgggacttctgattactgaaagcgaggtccggctgacgcccgagtttaagaggaggatcctcgtccacctcagaggcgtggagaagttcggactgtactcccatgtgcagcaccgcaatttcgattcgaccctcagctttatcaaccacttggaaggcctcattgagtttgcttctaatgtggagcccgaattcgctcatgagtctttaaggaactggcgggagatggtgcccctgatctga

SEQ ID NO: 9177 - RNA, 1143 nt, synthetic construct
  source 1..1143: mol_type = other RNA
atgactagcgctccacacctgaactgggcacgcacagtggattttggcgctgcccccggaattgccgacgctatgttccacaggagcgagatcctcagacgcaccggagccccagttatcctgtctctgaaacatttagctctgtccgccagcgtggattacggctttctgctgggcgttattaggcgatctgctcccgcatacagagctattcgtattccaaagaatacaggggggttcagagatctcctgtcaccttcagagtccctcatggccgtgcagagatggatccttcatgaggttttgacacaccagccgcggcatcgtaacaactttgcgtactttcccggagtgacagccagggaatgtgctgcccgacacgctggggcaaaatggatgatcaagacagaccttcacaattacttcccttctattaccgaaaaaaaggtgttcgaggtgtttgaagggttggggtattcccgcctcgttgccttcgaactggctcgcctgtgcacttggacgataagtcagacccccacagccgtcactacagtgcaacagagggcccgcagctccactggcttgccttatccggtgatgctagagggagtactgcctcaaggagcacctacctcgggcgcccttgcaaatgcctcaaccttcagcttagacgagaaactgtccgacctggcaattaagagcaacctagtatatacccgttactctgacgacatgactttctcgtcagcaagtcccctggatcgggatgtcgctcgcctggtgatcaggcacatccggactatagtcggtaagtccggcttagaactccacgataaaaagacgaaattgataccacacggagcaaggaagattgtgctcggtatgctgatcaccgaggacggtgtgagtgtactgcccgaacagaggcggatgatcgacctgcatatccatgcggtcggtaagtttgggccagtcgcctacgccacgcagcgaagattcgagtctgtgctatcttttgtcaatcacgtggagggctggcttgcgtatttgagtcatatagacagagattggaccgcccagagacggctcgcatggaacgctgcgctcgatcggcatcacgtttccgtcatgagccttggctga

SEQ ID NO: 9178 - RNA, 1143 nt, synthetic construct
  source 1..1143: mol_type = other RNA
atgcgaaacgaggcacatctgtcctgggccatcacaagcatgagcggggaacgccctgccttggctgatgccatgatgcgccaatctgaaacgcttcggcggacaggcgctccggttctgtattctctgaagcatctagcattaactaccggcgtcgagtacggctacctccgccatgtcattcagagaaacgccccagcttataaggcaattcgcattccaaaaaatacaggcggatacagagatctgctctcccctacagacagcctgaagcatgtgcagagatggatcctgcacgagattctcgacaccgtccctaggcatatcaataacttcgcatattttcgagacgtaacagctagggaatgcgccatccgccacgctggtgcgacttggatgatcaagacggacctgcaccagtattttccctctatcagtgagaaattggtgtacgaagtgttccaaggcttaggttacagtcggctccttagtttcgagctcgccaggctgtgtacctggaataagttagggcgacttgcacccaccggagcagttcccagatcacacgggagtgtgcgttctctgccttacccacccgcccctttgggctttcttccccagggtgctccgacttctggggctctggctaatgcagccacccggaggctagatgacgccctctcagatttcgcgatagccaaccacctgatttacactcgctatagcgatgatatgacattttcatccccctcagccttcagcaggacagtcgcctcagagtttgtggttcagatacggaaaatagtgaccgcgagcggtcttgccctgcactcccagaagaccaaagtgatcccacctggcgcaagaaaaattgttctgggaatgctgatcaccccaggaggggtgggaatactcccagagcagcgtaggactattgacctgtatgtgcatgccgtatccacgtacgggcccgtagattatgctgccagaagaggctttgacagcgtgttctccttcatcaaccacgtggaaggatggctggcgtacctgtctcacattgacgcattgtggactgccggcaggtcgcgttcctggaatgacgctctacggaagcacctcatcgaggtcagcagtttgggatga

SEQ ID NO: 9179 - RNA, 1137 nt, synthetic construct
  source 1..1137: mol_type = other RNA
atgagcactgatgcccacctaagctgggctcctcccgtaattagcgggggcgatggcccagccctagcaaatgccatgatgtttagggaagaaactctgaggcaacatggcgctcctgtgctgtacagcctgaaacatctggcacttagtacaggagtagactatggttttctcagaggagtgatcagacgcaatacccaggcgtacaaggcgattaggattcctaaaaataccggcgggttcagggatctgctgtccccagcacctgctctgatgcaggtccagcgatggatcttgcatgaaatcctgtctaaggtgccccgccagataaactcattcgcctactttgctaagatcacgccgaaagagtgcgttgaacggcacgctggggcatcatggctcatcaaaaccgacctgcacaattatttcccctcgatttctgagaagagtgtatatacagtgttcttgaatatggggtatagtgacttggtcagtttcgagctttctcgcatctgcacttgggtgcggcccggtgttcagttagaggccactgagagcgccattactgattctgagatcccttatccaaggaccccccttggctacctgcctcaaggatcccccacatccggcgcacttgctaatgcctgtacaagacagctggataacgacctgtccacgctcgcgttgaacgctcacctccgctacacacgctacagcgacgacatgacatttagctccagaggtccgctcgatagagcaagggccgcggagttcataggacaagtccgacggctcgtgaccgcctccggattaacgttacacgcaaagaagaccaagataattccaccaggtgccagaaaaattgttctaggaatgctggtgaccgacaccggggtgggaatcctgcgggaacagcgcaggatggttgatctccatatacacgctgtcgccaaatatgggccaattgattacgctgaacgacgtaactttgacagcgtcttgtcctacatcaaccacgtggagggctggcttgcctatctctcacacatcgatggcgactggacatcacggcgtagacgggactggacctctgccctgtctgtgcataacgtcagtgtgacttcactgggctga

SEQ ID NO: 9180 - RNA, 930 nt, synthetic construct
  source 1..930: mol_type = other RNA
atgcgaattccaaagaatacggggggtcacagaacattacatgccccggccgacagcttgcgcatcgttcaacgctggattctccatgagattctccatgtcattgataggcacgaaaacaattacgcatattttcctcaggtgacggtgaaggagtgcgccagcaggcacatcggcgcatcctggatgatcaaaaccgacatacacaactacttcccgagtgtttccgcacgctccgtctatggcgtgtttttgggtctgggctacgctcccctggtagcctatgaactctcaaggctttgtacctggccaatcggcgggcccgatttatcccatctggcgaccctggaacccccaaccgacagcgacttggtctacccatctttatggtcagaagcccttccccagggcgctcctactagcggagcccttgcaaatgcctgcacacgggaaatggacgcacggctctctagcttcgctataaaaaaccggctagtatacactcggtacagcgatgatatggtattctctggaatcgggtcgttcagtagaagcctaatctcagagctgatgacagaggtccgaaaaatagtcgtcagcaatggcttcgctttgcatctgaagaagactagagtggtgtctcctgggtcccggaaaatcgtgcttggactgctcgtgcaggaagagtctattgctctgctgcctgagcatcgccgtatgattgacctgtacattcacgcgacatctcgatatggacccgtgggttacgctggggttaggaagtttgaaagtgtgatctcatttatcaaccacgttgagggctggctgtcctattcaagtcacatagacgaggagtggacccgtgagagaagtgtgagatggagggccgccctggataagcaccaggtgtatgtggattccctcggatga

SEQ ID NO: 9181 - RNA, 1545 nt, synthetic construct
  source 1..1545: mol_type = other RNA
atggtgtccgcctcacctcacctttacctgcggagcgtgcccgaaaggcgatctgcacggactgctaaacgcgccctgcggcaagccgctgacgttagagctcatggtctgcccccactggtgacactgggccacttggcccacgtaaccggtgtcccctatggcactctgagacgagtcgtcgagcgccgtggcttcctctatgaccctgtgcataaacccggcaaagccgatcgcggaccaaggaagctgctcgcccctgaccccgagctcatgaccgttcagcggtggctcctccatcacgtcctcgacccccttcctgtgcacccagatgcatacgcatacgtgcgtggccgctccgtcgctgattgtgctaggcggcatttgggagccagatggctgatcaaaatcgatataagggacttctttggcagtgtcggggaaagacgcgtgcatcgggtctttcgaacccacgggtatcagcccctggttgcatttgaacttgcaaggctttgcacttgggacgataggcacgccggcattgaccccgctagacgtgacaggtaccctaaggtgacagcctaccaaggagggtgggggggtttcctaccccagggtgcaccaacaagcggcgcccttgcgaatctcgctgtgcgaccgatggatgacaggctaagccacatcgcggcccgccatggtctggtgtataccagatactcggacgatatggtcttttctgcgggcacgacattcgtacgcaggagcgcggtcgccatgttgcgcgaatttacccacgccatccagggctatggcttcgccgtccacccgagaaagacccggattgtagccccgggggcacgtagatccgtgttagggctcttggtagacggcgatacccctcggctgacgccagacttcaagtctcgggtgctcagtcatgtttacggcgtggagaagtttgggctgccatcccatcagcagcatagaggcttcgcctcactggccgggttggtgcaccacgtggatggcctaattgcttacgcacgtggaacagagcctgagtgggcagagcctttacgcgcaagatggagagctgccctggaggctcagggatggtcaagcgcatatgctgatgatagagccgagggcccaccaggagggaatccatgccgcagaccttctggaggcggtccccacatactggggagtgtgcggccggtttttgctgcagtggctgccgtagctggtggcggaggagcagagggtgctgtcgcagtcgtggcgggattagaaggacgagacggagatgccggtgcgggagagtgtggagaagtggttgacgcgaggcgacgacggcgcaagcaattcggcgagcccgtgcttgaggagttcggaggggtcctggaaggggttgggagggtggtaggcgaaggggttgccgatggtgtgggggctggagctgcctttgagcctggtagggacgccggcgatcagctgactgacgtggtgctgggggaaagggaattgcggtgcgttacagcctga

SEQ ID NO: 9182 - RNA, 1128 nt, synthetic construct
  source 1..1128: mol_type = other RNA
atggtatctgcctccccacacctgtatttgcgctccgtgccggccagccgttctttagggacagcccggcgagcactgtcacagtcagctgacgccggaactagagggttaccccccgttgtgactctgggacacctggcccaccttaccgggatcccgtaccggacattacgaggcgcggtcgaacggaggggctaccattataccccaattcacctccccgggaagcctgatagagggcctcggaaactgctggtgccccaacctgaactgatggccgcccaacggtggttgcttcatcaccttctcgatctcctcccagtccaccctcacgcctttgcttacgttaaaggccgatcagttgctgagtgcgccagacgtcatcttggcgcacagtggctgatcaagatcgatatacaggacttcttcggcgctattggtgagagaagggtccatcaggtttttagagctcaggggtaccagccgctggtggcttacgagctcagccggctgtgtacatgggatgatagacgagatgacgtagaccccgtgcggaaggataggtatccaaaaatcacggcctaccaaggaggttggggaggcagtctgccccagggtgcaccaactagtggagtgcttgcgaacttggcagtgaggcccatggacgaccgcctcagcgacattgcggcacgtcatggcctggtgtataccaggtactcggatgatatgatcctcagttccggagatcctttctccaggcccgccgctgttgcagctcttagagagctcacccacgcggtgcagggctatggcttcgagcctcatgcccgaaaaacacgcatagtgcctcctggagctaggcgcgcagtcttgggcctgttggtcgacggcgacgtgctacgcctgactccagcctttaagtctcgcctgctggcccatctgtacgggattgagaagtttggtctaagggcccatcagcaacaccgcgacttcgcttctctggctggtttggtgcaccacgtcgacggccttgtagcatatgcactgggagccgaaaccgactgggcccacccagtccaggaaagatggagggggatgctacgggcacagggatggagcctcgattga

SEQ ID NO: 9183 - RNA, 1155 nt, synthetic construct
  source 1..1155: mol_type = other RNA
atgacaatagggagcccgcacctgtaccggagggatggacgagccgagggcaaaccagaggcactactggacgccgctttggctcaggcctatgctgtagaggcaaatgggttagcagccgtcctaactctgaaccatctcgccgtgcgaacaggggtgagctacaattacctccgtggcattgtgtctcgcaccttcgacccctacgcagacttggtaattgaacgtagaaacggcaggaagatgcgacctatcagcgttcccgatccaccattgatgcgggtgcagagatggattctgcaccgcatagcgtccagaattccggtccacacagattcctatgcttatcaggcaggcagctcgattcgggcttgtgcaatgcggcacgctggagctaggtggctggtgaagcttgatatccgcaacttcttcgaaacgataaatgagagacaggtattttcgctctttcatgaggctggctacgtccgcctggtttcactggaactggcccggctgtgcactaggagtgcagcccacgccagtcatgtggacgtgaggcattttggcggggatgtgagagacagggtgatccagtcttataatcagcctgtcctgggctttgttcctcaaggcgcgcccacttctggagctcttgctaatgcaatcttccacgagctggacgtgacattctccacccttgcccacagagagcgcatggtgtataccagatacgccgacgacttgaccttctccagtatcgaagagttcgatcgttcacgcgccgcgcaattgattcggaaggtggggagcgagctacggtctgagggattcagccttcatcagcagaaaaccagaatcgtccctccaggtggaaggaagctcgtcctgggcctgctcgtcgatagggacgacgttaggttatcaagatcaatgcggtcccgcatcgctgaaaatgtgcgcggtgttgaaaaatttggattagccacccacgtactgcatcggcgattctcttccctcgacgggtttgtgagacatgttagtggtcttctggccttcgccactgatgtggaacccggttgggcacgacacatgagcaagcgttggcaagccgcgctcagggccaacaactggctcgattttacgtttaaccgctga

SEQ ID NO: 9184 - RNA, 1149 nt, synthetic construct
  source 1..1149: mol_type = other RNA
atgaccaccggctcaccacacctctatcggagagaggggcgagcaaggggaaaacctgaagcactgctagacgcggccttaacccaaacacagagcgttgaggcgaacggcctggctgctgtcctgaccctcaatcatttagcagtccgtacaggcgtgtcctacaactaccttcgagggattgttgagcgcaaatgggacccctatgatgacatagtgctgaagaggagaaacggtagggggatgcggcctatttctgccccccactctcctctgatgagagtgcagcgctggatcctccacagaattgtcgatcgggtaccagtccacgcggacagctacgcatatcaggcggggtctagtataagatcatgtgccagtcgccatgccggagcccgttggttagttaaactggacatccgtaatttcttcgagactatcgatgaaaggcgcgtgtacactgtattccacaaagccggatacgttcagcttgtggccttggagttggcccgcctttgcactcgttctgcggcccatgcctcccacgtggatagccacaggtttctttcgaatatgagggatcgcgtgattagtccgtatagccaggccgttctgggctttcttccgcaaggtgctcccaccagcggcgcattggctaacctgatcttttatgaactggacacaacattctccaggatcgctcaactcgagagaatggtgtacacccggtacgctgacgacctcaccttctcgactatcgaagagttctcacggagccaggctactagtctgatacgcgaagtggggacggaactgagacgagctggattttctctacatgagaagaagacgaggattgtgcccccaggcgctcggaaggcagtactaggcctcctggtagataataataaggtgcggttgaacaggatcgtccggggccggattacagataacgtgcgaggagtggagaagtttggtctggccgcccatgtcgcacatcgccgattctccagcttggacggttttgtgagacatgtttcaggactcctggcatttgctgccgatgtcgaaccagagtgggcacacgctctgggggagcagtggagaacagccctccacgccaataactggtccgaaccttccttctga

SEQ ID NO: 9185 - RNA, 1158 nt, synthetic construct
  source 1..1158: mol_type = other RNA
atgataacggactccccccacttataccgtaggaatggagttatcaactcagtgcctgaggaggttttgtctaatagccttatgcaggcaggccgggtcgaacaatatgggctggccagtatactgaccctcaagcacttggcagtacaagcaagatcctcatacggatttctgcgcgggattgtggagcgcaagttcgacccttatactgacatcaagatcaagagaactaacggcagaataatgaggcctgtgtcaagtcctagtcccgggttaatgcccattcagcggtggatcctggcccatatcgtcagtcgcctgggaacccaccccaacagcttcgcatatacccgaaataagagcataaagtcttgcgctagtaagcatctgggcgccaattggctcgttcgcctcgatgtgcagaatttctttgaatctatcgacgagagcagcgtgtatcgcgtgtttgctgaggctggatatcagcctctggccgcttttgaactcgctaggatttgtactcgatacgccccacatgctcaccacgtcgatgccgaaagattccgatctaaaagccactacgccacgattcgtcaatacaacatgccgtacatgggctttgtgccacaaggcgcaccaacatccggtgccctcgccaatctggtcgcgaaagatctcgaccttaccttaacccaggttgctgaaaaatatggcgcagcctacacaagatattccgatgatatgacattctcatccactagcaagttcactagatctaaagccctctcgcttattgaagaatcccggaccgcacttttcatgaacggcttcaggttgcatgacaagaagacccagatccagccacccggcgctaggaaaacaattctggggttgctggtggatggtgattcggtgcacctgaataagcggattcgttccaggatcgagaaccacgtacggggggccgagaaatttggtctgcgatctcattactcacatgtaaactttgcgagcctagagggattcgtcaatcacgtgtctggactgatcgcgttttggctggacatcgacccggagaactcccaggacattcagaaaaggtggaaagagacactacggcgcgatgggtggcatcaggtggactactggagaatgtga

SEQ ID NO: 9186 - RNA, 1242 nt, synthetic construct
  source 1..1242: mol_type = other RNA
atgatcaccggaagcccacacctgtatcggagccggggcatcaagaggaacgtggcaaccagtgtcatcgataacgctattgccgcggccgaacgagtagagaaaaatgggctcgccgcggttctaacgttgaatcatctcgcacattctacaggtgctgattatggctacctgagacagatcgtgacccgctcaattgatccgtacaccgacattgtaatagcacggagaaacggcagaaaaatgaggacagtgagctctcctgaaccctcactcctgcaagtccagcagtggattttgaggtccatcgccgaaaagatcccaacacacagttcaagttatgcctattctcctggtaggagcgtgaagcagtgcgcgtctaggcacgtaggggctaagtggctgataaagcttgacattagaaacttcttcgagtccattactgaggtccctgtctaccgagtcttcaggagagtggggtacgaacccctgcccgcactggaacttgctcgggtgtgtactagatacgacgagagggaccccggcatgcgcttagatcgggtgctagtcagggctaaagagtacagttccattcaagtttatcggaaaccactcctgggatttctcccgcaaggtgcacctacgagcggagcccttgcaaaccaggttgccatgccactggatgaacgcctttccgccatcgctgactctcgcggcctgatctacaccagatacgccgatgacatgacattttccagcggcggacctttcaccagaagtgcggcccttacactaattaatcaggtaagcggagcaatccggcagcggggattcgctgtgcacgaccaaaagactcgtatagtgacccccggcgctcgcaaagtggttctcgggttattagttgacggtgaccgggtgcgcctgactaaaaaaatgaggcagcgtatctctttgcatgttcgaggagtcgagactttcgggtttatcgatcacgcaaagcatgtcaagttttcctccgtggatgggttggtgctgcacgtgagcggcctgatatcgtatgcttcagacattgagcccgcctgggccgatgagtttaagcagcgatggcgtaatgttgtggccgaaaaactggacgtggagctgccatcctttaatcgtgatgtcggcggcaagtcatataagtcggggcagatcagacacctcgtgcctttgtctgcccgcctgcatcgccgagagaactga

SEQ ID NO: 9187 - RNA, 1230 nt, synthetic construct
  source 1..1230: mol_type = other RNA
atgcggaccgacagcccacatttatacagacgcgagggacgacgccggggattgtccaacgaagtgatcgaccgggtagagatggccagcgcacggctacttgcacacggcgtagccgttgtgcttacactggggcacctggcctggagaagtggagctccctacccatacctgaggaaggtcgtggagcggtctattgatccttaccatgcgtttgctataaacagacgggctggcaagaatcctcgcctgattagctctcctagcccccttctgatggacgtgcaacgttggattctcgctcgcatccttgatcatgtgaccccacaccctgcctcatacgcatatcggcggggggtcagcatcagaatgtgtgctgagcaacatctcggcgcgaggtggctggttaaaatggacctccacaacttttttcacaccatagatgagcgccaggtgttcaaggttttcgcagatcttggatatgccccgctgcttgccctggagttagcacggctgtgcacacgccgtgcatgggatggtttcccccacccgaccaggttccaggtgcgaaatcatcgtcactcagttattcctacttattcggcagatgccatcggcttcgttccacagggcgctcccacttccggtgctatcgctaatctggcagtcagaccactggacgaagccttggccgctctaggctctgcccacaggctcgtgtacactagatatgcagatgacatcgtcttttctagtgctggagcctttgatcgacgagccgccgccagcctgatgcacaaggctcgacacgaaatagcggcctgcgggttcgcagcgcatgacaaaaaaacacgcctgacaccacctggcgctaggcgtattgtattggggctcctcgtggacggcgacaaggtcagactcccctccgaaatgaggtcacgcattgccacacacgtgcatgctgccgagaaattcgggttgagggaacatcagctctccaggggtttcacttccgtgttagggctcgctaggcacgtggatggattgctagcatttgcgtcagacgtcgatcccgcatggactgatgacctgcggaccagatggagacgcaccttgctgcgagacgcctctgccctgggtgcctttgagatcagtgacgtctacaggcagagagacgacggcacgaccgctgcgtatacagtggccgccacgccctgggatgcactgtga

SEQ ID NO: 9188 - RNA, 1200 nt, synthetic construct
  source 1..1200: mol_type = other RNA
atgaccattggccctccacatctctataggcttcacggacgggttcgccagcaggacgaacacatgctgcaggcggccatcgaacaggctgctagggtggagcgcagggggttagcgcatgtcctgactctcaatcacctagcccaccgtactggcgcaccctacccctatctccgcgaaattgtcgaacggaagagagatccgtatcacgtttttgaaatccgaagaagggttggcggttctggcagggtgattagctcccccgacccgacactgatgcacgtacaacggtggatcctgtcgagaattctgaatcatgtccctgtgcatccagcgagcttcgcatatagaactggcttctccatccgggcatgcgcctctcaacacttaggggccgactggctggtgaaacttgacttgcataactttttccacaccattgatgagcggcaagtgtaccaggtgatcaggcaggctggctatacgaggctcgtcgctctggagatagcccggctctgcactagacagagcacaggaaccttccctggtagtcgtcggtttcacgctatgcgcattcatgatcgtgtgatcgctaactacacgacaaattgtctggggttcctaccccaaggtgcccccacatcaggcgcccttgcaaacttagtggctcgcccccttgacgatcgcttgaccgccattgccgacgatcaccagctggtgtacaccagatacgccgatgacattgtactctccggactggggccattcaatcgggctcatgcagcatccattatacgactcgcaggcaccgccatccgagagtcagggttcgagcctcacgatggtaaaacccgagtggttcctcccggcgcccgtagaatcgtcttggggctgctgatcgacggcgagaggttgcgcgtaccacgcgacactcgatctcgcatagaggcacacgtgtacggagccgagagatttggacttgtgcatcaccagataaacaggaagttcgcttcagccttgggactggtcagatacgtggatggactcctggcttttgctcatgacgtcgatcctacatgggctacaccctggtgggaaaggtggcggagacttgtactggatcaggccgccgcaatcgcgccatttgggccagacagtatcgttcgggcaccaaccagcgccgacagtcctgatcagtga

SEQ ID NO: 9189 - RNA, 1251 nt, synthetic construct
  source 1..1251: mol_type = other RNA
atggacaaactgagcaacgcctggatggtgagaggtgctcgggctcctacaggagtgtggcgagctacgagaacaagccccccaggccgcgatacgccaaaagtgggccacccaattgacagccccgcactgtatagatcacttgggcggcgcaatggggttacatcgtctgttatcgacgaggccctcgagcagatgaggcgagtacgcagacaggggctcacccctgtactgaccctggggcatctagcgcaccaaacgggcgcaccctatctgtatctgcggagggtcgttcaacggcggcaggatccctacactgagttctcccgccccaaacgtgagccgggcaagtctaggaccattgctgcgccggcacccgtactgatggatgtgcagcgttggctgttggctaacgtggtcagcccaattcctccccacggggcctcttatgcataccagcagggaagatccgcagtgcagtgcgcacagcttcacttgggggcgagctggttactcaagttcgacctccacgatttcttccattccgtcaacgaaagggccgtgcagagcatcctacgctcagtcgggtacaactcattgatatcttttgagatcgcccgagtgtgtaccagagtgcctggaggcatcacctggccccactttagatccgcctatcaagccatacctggctactccgcccctgtgctcggttaccttcctcagggtggcccagctagtggcgctcttgccaatctagccgcacggccactggacgaagcactgtcttcggtggccgaccgctaccggatgacatatacccgctatgctgacgacatgactttttccactctgcgctccttagatcgaagtacacttactcggtgcgtgagcgaaatcagtgccaccgtttctgcagccagatttcggctccacaggaagaaaacacgtatcgtcccacccggcgctaggaagattgtgctgggcttactggccgatggtgagagactccgactccctcgtcataccaggagaggactggaggatcacatcaggggggtagcaaagttcggtctgggggcccataaagagcatgccggatactcaagtgtccaaggatttgtgcatcacattgacggattgctcgcttacggccatggcgtcgatccagtttggactaagccgctggctgctcagtgggaaaggttgatgaatgcagcgggacttactgcccaggaacgcaggctgtggtga

SEQ ID NO: 9190 - RNA, 1023 nt, synthetic construct
  source 1..1023: mol_type = other RNA
atgctcacgctcgcccacttagctcaccaaacgggcgcgccatatatctatctccgcgagattgtgcagagggtgcgggacccctacgcagaattttcacgcccgaaaagagaaccaggtaaggccagagttatcgcagcacctgatggggtgctgatggatgttcagcgatggttgctcgctggtctgttcggacgcattcagccccaccgcgcctcttacgcctaccagcaagggcgatctgcagtgcagtgcgcccagcgacacctaggagcctcctggttgctgaagttcgatctgcacgatttctttcacagcatcgacgaaagagccgtccaagccctcgtccgggaatcaggctacaatcggctggtgagttttgagattgctagagtgtgtaccaggctgcccggcggaaatacagtgccttatactaggagcgcctaccagggtatacccacctataggaccgggacacttggcttcttgccacaaggggcacctaccagcggcgctatcgctaacctgattgcccggactctcgacgacagtcttgtcgccatagctgaccggtacgatatgacctatactaggtacgccgatgacatgaccttgtctacctcccgcaatctggatagatcagtcttaactagatgcgtagctgagattagcgctaccgttgcgcgaacacgctttaggctgcaccgcaaaaagactaggatcgtgccacctggcgcccggaagatcgtactcggactgctagttgacggtgatcgtgtccggctgccgcgtcatacaagaaggcggttggaagaccatattagagggacaacaagtttcggactgactgcccatgtagcgcatgccggctattcctccttgcaggggtttgtgaaccatatcgacggccttttatcgtacgctcgaggagtggacgcagcgtgggcagatcagctgaaggcaaaatgggaggacgctatggccgcagagggactgaacggccttgagcgtcacgcttggtga

SEQ ID NO: 9191 - RNA, 1056 nt, synthetic construct
  source 1..1056: mol_type = other RNA
atgcgtggcttagatgcacgcgggctcacacctgtcctcacgctggctcacctggctcatctcactggtgccccctatttgtatctgcgggagattgtgcagcgccggcgagatccttacacagagttctctcgacctaaaagagagatcgggaagactcgaacgattgcggcaccggaccctgtcctgatggacgtgcagaggtggctgcttcggcacgtgtttggaaggctcaccccccaccaggcttcatacgcataccagcagggccgcagcgctgtccaatgtgcccaacgccatctgggtgccacttggctcctcaaattcgatctgcataatttcttcccaagcattaacgaacgagcggttcaggccgtggtacacgccgctggatacaataaactgatatcgtttgagatcgcgaggctttgcacaagagtgccctgggtcgtggagtggccatattctggctcctcataccaaaccatagacacctatcggacaccccgtgtaggccgcttgcctcaaggggcaccaacaagcggagctttagctaacctggttgccaggccccttgacgaaacgttatccgctctagccgagaggtatgacctgacttatactcggtacgccgatgacatgaccttttctgctttcagacgctttgaacgacctgccctgacccggtgtgtggcagaaatcacccaggccgtcgcagcaactagctttacactgcataggaagaagacaagagtagtgccaccgggcgccaggaaaattgtgctaggcttgttggtggacggggatgaggtgaggcttccccgtcagaccagaaagcgcctagaagaccacatcagaggggtggcaaagtttggctttaccgcccacgtcgaacacatcaggttctccagtctccagggtttcacccatcacgttgacggtctgttggcgtacgcccagggagttgatgccgcatgggccagaccacttacccggcagtgggaggatctgctgactgctgagggattctccatcctcgaaagaagtcggtggtga

SEQ ID NO: 9192 - RNA, 1170 nt, synthetic construct
  source 1..1170: mol_type = other RNA
atgagcaccgactctcccgcggcctatcagagaatcggccggcagagaggggtgccagatgtagtggtggaggcagcactggaacaaattcgccgggtgagggctgtcaatctgacaccggttctctctctgaaacacctggctcatcttaccggcgctagctacatctatttgcgtgagactgtccagcgaaagcgcgacccatatgtcgaattcagccgtccaaaacgggctgagggccagttgcgcacaatcagtgcccctgatccgcccctcatggccgttcagagatggatattgcagagaattttctcaagactgcacccccactcagcatcttacgcctaccaagcgggaaggtccgctcggcagtgtgccgaacagcaccttggcgccaggtggctgctcaagtttgacctacacagcttcttccactccattaacgaacgcgccgtttttggaattctagcaggacagggttataacaggctggtttcgtttgaaatcgccagactgtgcacgaggtacgcggggcatgtgagaggcctcaatttcagcaagtttcgggccaccgccagttggcctcaccacttcacaatcccttcttactcggtgccatggctggggttcttaccccagggagcacccaccagcggagccatagctaatatgactgctttgcagctggacgagctgctgtccgacgtagccgatcggtatggccttgtttacacaaggtacgctgatgatttaaccttttcaactgtgggaaggctagcgcgcagtgctgcccgaagatgcgttggggaggtacaggctgcaacggcccaggcaggcttccaactccatcaacgaaagacccgtgtggtccctcctggttctcgcaaaattgtgcttggtctgttggtggactcagactgtgtccgactcccagctgacgcccggagtaggctggagacacatgtgcggggtgtagcgaggttcggccttgtcgcacacgctcagcattggaagtataactccctcactgggctgatccatcgagtggacggcctgctggcacatgcacgcgatgtggatcctctctgggtcgcccccttatggcgcagctggaacgatgccttggaggcccaggggttttccgacgtggagtttagacaatggtcctga

SEQ ID NO: 9193 - RNA, 1095 nt, synthetic construct
  source 1..1095: mol_type = other RNA
atggagggagctggccgcgcagcaatcctgaccctaggccacctggcacaccttactggcgtgagttcacacttcctcagacaggttgttgagcggaggagagatccatatcatgccttttccatttcaaagcggagtcccgagcgagggaaacggacgatttcagccccctccgccgagatgatgagcgtccagaagtggctcctgaagcgagtcctaaaccctgccatcggccatcccaacagcttcgcttatgagccgggtaggtcaattaggcaatgtgcggcacggcactgtggcgccagatggatcgtgtccctggacctgcacgacttttttcatagtgtggacgagaaaagggtgttccaggtcttcgagacactcgggtacaatcgcctggtaagctttgaattgtcccgcatatgcacccggctaattggaagaaatatcaagcctagtaacgtacggcccgagacttactccattagcgcatacgtttctgaaaacctcggatttctgcctcagggcgcgccaacttctgggaaactcgccaacctggttgctgcggacctggacgagagattactgtctctcgccacagaataccgccttgtgtataccaggtatgctgacgacttatttttttctagttctggcgacttcgacagagccgtggccgtgagattaatccgagaaatcggtgatctggtggctgtcagcggattcgagatacacaggaagaaaacccgagtccttacccccgggtcgcgtaagcagatactgggtcttctggtggatgatcttgccggtccaagattgacaaggcgcactagagctcaaattgaggcgcacctgcgaggggtcgagacattcggagtcgtggcccaccgcgaacatcggaggttcgatagcacgtggggattcgtggctcatgtatggggcctcttggcctttgctgcttcaatcgaacctgattgggcacgtccagcccgtttccgctgggaaaatgcattgagccgggatgggtggggctctgatgtgtttaggccggacctgtacttcgttaattcccatttggcagaacgcgaatcctga

SEQ ID NO: 9194 - RNA, 1128 nt, synthetic construct
  source 1..1128: mol_type = other RNA
atgattactgacagccctcacctctatgtaaggaacgggttggccgctggcctccctatcgagctacttgacttgtttgtgaggcgggcccaagccacagaacagcagggaatcagggcagttctgacgctgaaacacctggctcaccagacgggagctgatcatcgatacctgagagatattgtggggcgtgagatagatccttatactgagttcgaactgcgcgggaagcgacgtattagctctccacgcgctcccctcctagcagtccagaagtggatgttaactcacatactcaatcatgtgccctgccacccctccagctttgcatacgagcggcaaaagtcggtggcgcagtgcgcgagaagacacttgggggctaattggctcgtgaagctggacatgcatgatttcttcgccagtattgatgagaggcagatctttcacgtttttagtgagttaggctttgggcgccttgtctccttcgaactagcaaggctgtgtaccagaccaggaatcggagccagacattctgtcgcggctgaaaaagctgcctcaagcgctgactacacagtgattgataagtaccagaccgccgtcggcttaggcttcctgccgcaaggatcacccacctccggagcccttgccaacctggtgatgcgcgatgccgacatgcagatcgctgaggcagtagccggcacaggtattgtgtacaccagatatgcagacgatatagcgttctcaacatcccggaagttctctcggagggaagccagcgagctgatccggatgactgatcatattttgggacgctctggcttcctgagacacaataaaaagacccaggttattcctccaggcgcacgaaaaatagtgctgggcctgcttgttgacggggaccgtttgaggatcccggtcgacgctcggaaccgcatcatcaacgacatctggggtgctgaacggtttgggctgccagcccatgcaagacatcggggtttctccagcaccatcagttttggcgaacgactcgccggtatgctcgcctactgtcacgatgtggaccctaaatggacagcacccctttggcgcaggtgggccaaaatcctgtctgactatgagattcgatga

SEQ ID NO: 9195 - RNA, 1149 nt, synthetic construct
  source 1..1149: mol_type = other RNA
atgataaccgactccccgcacttgtatagggtccgaggcctactcgccgaccactcaacagccttgattgagaacgctatcgcccaggcacatcaggtcgaggctaggggacttgaagctgttctgagcctgaatcatctggctcggcgtactggggcgaccaggaattatctccgggacatagtcgagagaagactggacccatatactgagttccagaagacctccagtacgagagcacgcacaatcagcgcccctaggcaacctctgatggaagtgcaacgctggattctgagaaacatcctaggccgagtgcctgctggccccttctcctttgcgtacgagcataacaaaagcatcactatgtgtgcccgacgccatttaggctgcaagtggctgatcaaagttgatctccacgatttctttagttctatcgacgaagtcgcagtgtacgccatttttcatgggttaggataccaggcactcccatctctcgagcttgcccgcatttgcacccgtcagggtgtgggcgcgtctcacaagcgtcactttccctcagccagccgcgtagacaggtaccagcggatccccgcctatctgagtagggcgctgggattccttccccagggttcacccacatcaggcgctctggctaatcttgtaatgaagtccctggacgaacacatagccgcattgagccacccgttcggatttgtctacacacggtacgcagacgacctggttttcagctccgcagatagatttgacaggaagatcgcaattgggctgattcaccgagtgactgatcttttacgcacgcacgagttcattgtccacagggccaaaacaagagtggtgcctcctggggctaaaaaaatcgttctcggattgcaagtggatggtgatagagtgcgcctcccaccagatgcacggaggagaataaccgaaaacatcagaggtgttgaacgattcggcctaaccgaccatgtggcccatcgccattatagttctgtggtgggctttgtcgagcggatgcgggggctgctggctttctcgtacgatgtagataaggagtggaccgccccagtgtggattcggtggggagaagccttggaaagggccgggtattgggagcggactgcttggtga

SEQ ID NO: 9196 - RNA, 1140 nt, synthetic construct
  source 1..1140: mol_type = other RNA
atgaccctggactccccgcatttgtatcgagccgccgctgctcggctaggtatctctgcggagactgccaacaatgcgattcgcgaaacggagttactccgggatgccggcgctacaccagtgttaaccctcggccatctggctcacctgactggggccaagcattcatacctgagagccattgtggaaagaaggattgatccctatgaggagtttaccagaatgcgacgtaatggagggaagatgcggatgataagcagccccgagcctgtactgatggaagtgcagcgctggatactcaccaacgttcttacgcgagcaaaaccacaccatgccagctacgcctatactagagacagatccgttgcggcctgcgctcgtcgacatgtaggagctcgcttcatgattaagcttgacctgcacgacttttttcacagcatcaatgaataccgtgtttatagtctctatagaaacctgggctacaatcggctggtcagtttggagctgtctcggattacaacccgatacagtgaattcgctctgcaaactccgatccctgcccctaggacgggggattacccaatgatccccaggtacagggtcaactatctcggctttctgccacagggtggagcctcgagtggagccgtggctaatctggtagtccgccggatggaccacgaaattcagtccatggcgtccgaccattcattaacatatacccgctacgctgatgatcttgtgttgtccggcgcaggagagttctctcgcgatacatgtcgcgatgtggtgcggttgatccggaggatcgtgtctcacaacggcttccatctgcacgaaaaaaaaacaaggcttactagccccggggggaggaaggttgttctcggagtcacagtcaccgacagcggcattaaactttcaagagagatcaaggcaagattggccaaccatctgtacggcgccgggaagtttggaatcggcagacacgcatcctctcgcgggttcacttcaacagtgggttttgtcaggcacatgaggggcctactcgcatacgcccacgacatcgaccctgatttcgctgcacccctggcagcacgttggagggaggtggaggtgagagacggtacccggatagcatga

SEQ ID NO: 9197 - RNA, 1134 nt, synthetic construct
  source 1..1134: mol_type = other RNA
atgacctacgattcacctcatctgtacagaaaactcggacgcgagcgtggggtggacgatcaggtcctggatagggccatgcgccagatatcccgcttgagggcagccggagttacgccagtcctgactttgaatcacctggctcaccttaccggcgccaagtatgggtatcttcggagaatcgtggcccgggaactcgacccctacaccgaattcactagacaacgaaggacaggcgggaaaatgcgactgatatcagccccccagcctgttctgcgggacgtacaaaggtgggtgctggaccgcatcctccaccggatcccggttcacccagctgcatacgcttacgtgcccggaagaagcgtagcagcttgcgcccgctgccatattggcgctcggtacttattgaagttcgatctgcatgactttttccagtctatatcagagtaccgcgtgtttagtgtctacagatctcttggatatcagccactgattagcctcgagcttgctcgcctatgcactcgggatagcgccgcagtgtttgggcgacgtaccttgaccgcccctcaagtggagagataccaggctattcctgcatatcggtctggctcccttggttttgtccctcaaggctcccccaccagtggagcgatcgctaatcttgtgactcgcaggctggacaccggactgcagcgactagccgtatccgccgggctgacttatacgaggtacgccgatgatatcgtcctgggagggagcgatgccttcgacagggaacattgtcgtaaattggtgagagaagtccggaagatcgtgaggcacaacggtttttgtctgcaggaaaagaagctgagaatcataccgcccggggctaggcgtatcgtcttaggcgttgttctcacagacgacgggattacaattagtagggaggttaaggatcggctcgccaaacatctcttcggcgcagaccgattcggtattcatcgccacgcggagcactatggctttacatcggtgttcggctttgcgaaccacgtgacaggtctgctcgcattcgcggctgatatcgacccaggttatgccagaccattaatcagacagtggcaggcaattgagagccggtctggcgtgtga

SEQ ID NO: 9198 - RNA, 957 nt, synthetic construct
  source 1..957: mol_type = other RNA
atgatttccgacagcccacaccaatatcgccttcagggcgcatcccgagaggtgcctgcccaagttatcgagaactctattgcccaggctcaggtgactgaatccagaaacctgagagctgtcctcagtctgaagcaccttgcccaccagaccggttgctcttatatttacctgagggaaatcgtacagagagtcagggacccctattcaaccttctcacgccgtagaaggtcgggcgtgagaatgagaagcatatcatcccctaacccgccattgatggcggtgcagcgatggatcctgcgtaatatccttaaccatgtggaccctcatccctcttccttcgcataccagaggaataggagcattgtacagtgcgcctctcggcatataggggccgattggctgctcaagctggatctctttgactactttccaagcatctccgaagaggtggtgtactgggagttccgacgatctggatatagccggctcgtcgccttcgaactggctcggatctgtacaaggccaacgaatgagtcacccccgatccggagtcgcagcaaatatcgcgccattcccagctacgcctcagcaaaagaggccggcattttgcctcagggggctcctacatctggagcgatcgcgaatttagtgtcacgccaattagatattagcctgacgcggttggccaacgcaagcggtctaacatacactaggtactctgatgacctggtttttagtgggacaggacccctaaatcgcgacaccgcaactcagaaaatccgggagatcgacaacattatatcctcttgcggctttgaaacccaccggaagaagacaaggatagttacccctgggggcagtaaagattgtagcggaccctcaagtaatagtgtccgctccccaactgcttccagagtccaagctaaggatcaggacacccactcgagacgttga

SEQ ID NO: 9199 - RNA, 1122 nt, synthetic construct
  source 1..1122: mol_type = other RNA
atggtgattgattctccccatgcatatagactccggggccttcagcaggggcacgatccagaattgctccgaagagcggtggccgaggctgacagagtagaggggcgtgggctgacatcagtactgaccctaaagcacctcgcccaccagacgggcgcaacctacatctacctgagggagatagtgcaacgcaagcgggatccctataccgagattttaaggtcccgggcaaatggcaggcccatgagactgattagcgcccccgatccagtgctgatgtcagttcagcgatggatcctggaaaacattgtgggacgactcacggtgcatcctgcttctgctgcatacgggaagggtaacagtgtggcggcttgcgccaggcgacatgttggtgcctcctggctcgttaagatggatgtccacaacttctttcacagcatcgacgagcgcgccatatacaaaattttccagaacgtcggctattcttcactggtggctttcgagctctccaggatatgtactagacctgttccaggaagcccccatatccacccagtaaggcgcgacagagtgatcgaatcttattccacagctaacttaggcatcctgcctcagggagcccctacttcaggcgtgcttgccaatatcagtttttttgcttgcgatgaaatcttgagcagtctggcagaatcgtgtggattggtctacacccggtacgcagatgacattgtcttttccgccggagaaagttttacacgaagagacgcagacgcgctgatagagatcgcgcgtgacgccttacttgcccatgggctaactcctcaccgtggcaaaacacaggtggtgccgccgggtgggaggcatatcgtccttggccttttggtagacggcgaccgcgttcgcctcaccagagagttccgccaacgggtccaaacacatattagaggagtggaaaacttcggtctggctacccaccggaggcaccggaaattcgcaagcactgctggcctgattaatcatgtgaatggactgctggccttcgcctttgacgtcgatccagcttgggccggggagattcgcgcacactgggctagcatcttggccgcccagatgaatcggtga

SEQ ID NO: 9200 - RNA, 1149 nt, synthetic construct
  source 1..1149: mol_type = other RNA
atgactgtggcatctcctcatctgtatcggcggcacgccccagagaatacagatcgtcagctggttgaaagggccctggctcagagctccgcccctctttccaaggggctcccttctatcctaactctgaggcaccttggccatctgaccggggctgattacaagtatctgagatcggtggtgcaacgtgaatacgacggctacaggaccttcagtatcagaaagaggtcgggcggtacccggttgattgcatccccagagcctgtgctgggcgaggtacagagatggattgccagtaaagttctcaataaggtcagcgttcacaaaaattctttcgcttataagcccggctcaaaccccaaaaagtgcgcgtccgtacatcttggggcttcatggcttataaaaatcgatatccacgacttctttgagtccataaccgagaggcgcgtgtactattctttcctggactgtggatatcaacccctggttgcatttgaactgagtcgcctgtgcacacgcgtgttcaccggaaaaccgaacgtggggccgcagtggtccacaagacgaagacacgggtcaagagtctatgcaacttctgaactgggtcacctcccacagggggcacccacaagtcccatgttaagcaatatggtgtccttcgagcttgaccacaagctcagcaccctcgccaacgattacggttttgtgtacaccaggtactcagatgatctggccttcagttctggagagaagttcactcataaagctgccggagagtttgtccaaaatattgaccggatcctaaagagctttggccatgtaatacatcagcggaagacaacgattgccccacctggagccagaaaagtcgtcttaggactgttggtggacggaagcagcccccgactctccaaagaactcagggctcgagtgtcagaccacgtgcgtggcatcgagaagtttggcttagcaatgcacgcttccgaacgccattttgcgagtatctgggggatggtcaaccacgtgaacggtctaatcagccatgtccgcggcgttgacccagaactgggcagcaacttgcgctctcggttgacgactgccttggcgattcaggggtggtcagctgagacaattgccggtcacccttga

SEQ ID NO: 9201 - RNA, 1167 nt, synthetic construct
  source 1..1167: mol_type = other RNA
atgacctctatccccccacacctataccgaaagctggccccaaaagaactggatcctgtcattgtagatcgggccctggaccaactgttagctgtagaggctaaccgcttgcccggcatcttatcccttagacacttggccgccctaacccgtagtgactacctgtacctgagatccatcgtggcccgggagacagacgcctatcgtacctttactattaggaaacgctctggtggaggcaggctcatcgcagctcctcagcccgaattgatggccctccagcggtggatttcaaaggaaatactggcaaatataacgccccatgtggcgagccacgcttatgcacgcaagagctcaccactgaagtgtgcgaatctgcacgtgggcgctagttggctcataaaggtggacattcacgatttctttgaatcaatcactgagcggagagtgttcttcgcatttcgacagatggggtaccagcctatcgtcgcctttgaactggctcgcatttgcacacgtgtgcggattgatctgcccctaagggaccgaaggtttgccgccgcgcgaaggacagtcggaattgctaaatatgggcattcacagatgggctatcttccgcaaggcgcaccgacgtctcccatgctcgcaaatctcgtcagcttcgagatggatagaaaactgaccgagtttggggctgagaagggcctgacttacactagatactccgacgaccttatattctccagcggacgaagtctcagccacaagaccgcagagacatatgtggcgatcatctctaggatcatcaatagcttcgggcatgacgtgcatgaacgcaaaaccaccattgcccctccaggcgcgcggaaagttgttctgggtctgctcgttgacgacacaggggtgagactgcttagggagacacgcgatagagctgccgatcacgtgaggggcattgagaagttcggactggcagcccacgctactgagcgccattttgcttccctgtggggaatggttcggcatatccacggattgctgaggcatatgaacagtgtgcagcctgaggtcgccggtccactcttagcccggttggaagccgtacttgcaagagaaaagtggcaggggtcgttggatgacaacttctggctcaacgatcttttatga

SEQ ID NO: 9202 - RNA, 1149 nt, synthetic construct
  source 1..1149: mol_type = other RNA
atgatttctgccagtccccaccagtatcgtgcgtcggcattagcccgcggaattacacaacaaaccgtgcagcacgccttggaccaggccgaacaggctgagaagaggggagcgcctgctatcctgacgctgcgtcatctggcccacgtgactggggcggattataaatacctgcggctgattgtctcaaggtctgaagacgggtataagccttttaccataaggaagaaaagcgggggtggacggctaatcgcagcaccagagccccaactcctttccgtacagcggtggattagccgcaatgttttggccaacaggccagttcactctagcagtatggcctacgccccaggtgctagtcccctgaaatgcgccgctcgacatgtaggggctagatggctgctcaaatttgatatccatgacttctttgagagcattagtgaggacagggtatactgggcattcagatcctgtgggtatcagcctttgatcgcattcgaactcgcccgcatctgcaccagagtacacagcccgtacgtccagatagattcaagatggcggtctggccggactcatggtcctgcagaaatcaccgcctactctgatgatcgcctcggccatcttgcacagggggctccaacatctcccatgctgtccaacctggtgagcgagccaatggacgacctcttggcgaagattgcacgggaaaggggcctggtgtatacgcgatactcagacgacgtggtgtttagtaccggcactaccatcactcggcgcgaggtgagaaacctggttcacgatgtgaagcgcgtgttcaattccttcggccacctgttgcatcggaagaaagttgtgatcgctccgcctggagcgcgaaagctcgtcttaggcttacttgtcgatggagacgaggtgcgtctttcaagagagtacagagcccgagtggaatcccacgtcagggggattgagaaattcggcctggccgagcatgctgcatctaggcattttacatccgtctggggaatggtccgccacgtgggtggccttatagctcacagcagagctgttgatcaaacatatggcgacagcatgcagctacgactctcagctgccctggaagcctcgggatggtccgatgcctccccctga

SEQ ID NO: 9203 - RNA, 1233 nt, synthetic construct
  source 1..1233: mol_type = other RNA
atgatttctgcctccccaaatctctatcggtctgaaggagctgagcgctcaattgaccccctgattgtcgagcatgcattgcagcaggccttgcccgttgagcggaaaagactccctgccatcttgacactcggacacctggcacaccttacaggcattaactacgcctacctccgagcaatcgtggagaggcatgccgacccttacactcctttcagaatcggcaagcgcaaggggggctctagattgatctcagcacccgagccgctacttctcgccctccaacgctggctggcgaggaacgtgctgaataacatagaagtgcatcatgccagctgcgcatatgcacaggactgcagtccagcccggtgtgctacgagacatctgggcgctgcctggctgatcaaggttgacatccacgactttttcgagagtattactgagcgtgctgcctggcgggtctttaggagcgccggttatcagcccctgataagcctggaactggccagactgtgtacgaggcaacctcacggacgggagatagtgaacccaaagtggcacgtggaggatgcagggtcctattcgatccgtccttacagaactcgaatgatgggtcatctgccgcagggcgccccaacaagtccaatgcttgctaatctggcctcttttcgattggacgaagctttagaggctttgggggggcgctatggcatggtgtacacccgctattctgacgatatcgcattcagcaccggaggcaccttcgatcgcaaaagagctggtcagcttattatagaagtcgaacgtatcttcagatccttcggtcacgctctgcaccggaagaaaatcagcgtagcgccacctggagcgaggaaggtcgtcctggggcttctcgttcatgggtcacgactccggctaaccggcccgtacagacgcaggctagctgaccacgtgcgcggagtggaacagtttgggctgtccgctcacaaagctcacaggcactttgccagtctttggggcatggtgcggcatattcagggactgctgggatacgccgagagcgtggaggggaaagcagcgcacgcggatatgcgagccaggctcgatgccgcattagccagggatggttggcccgacggaatgcctcccgaaacccccatgccagcacagcaacccccacctgatgtaggctccgcagctgttacatcatccgctttacctcccgccggctga

SEQ ID NO: 9204 - RNA, 1152 nt, synthetic construct
  source 1..1152: mol_type = other RNA
atgatctcggcctctcctcaccagtatagggccgatggcagggcaagaggtagaccagagccggttcttgatgctgcgctagctcaagcagcggggccagaattacagggcgctcctgccatcctgacactgatgcatcttgctaagcgaatggacgtgtcctacaaatttctgcggagcgtgatcgcgagtaaggagggtacccactatagggactttcacatttctaaacgcgacggcgggggacgaagaatcgctgttcctagtcccgaactgatggcagtgcaacggtggatcgtccgcgaaatcctgcgtgataggcccgtacaccgggccagcttcgcttatgcacggggttgcagcatctacgcttgtgcacggaggcacgcttcagcggggtggttactcaagctggacattcacgacttcttcgagagcattcccgagaaggccgtctatagggtctttcgagagataggatacgcccgcctggtgtcctttgagctagcccgcttgtgcacacggccttgggtggcacctccaagagggaagagagccgagaggaccgtcgccaatcccagcagaagaggaattgaaatataccgccgcgagttgaccggttacctgccacagggcgcccctacttccccgatgctcagtaacttggtgttccgagttctcgacgaacatctttcacagcttgccaccaggcacgggctcatttacactcgctattctgatgacctgaccttctccggacccgcctctggatttagccgcgatcgcgccacggaaataatctcagaagttagggatttgcttgccactcggcgattcaggctgcatgagagaaaaattacaattgtgccacccggaggccgcaaagtagtgttagacctactcgtcgaccgggccgcaccacgtctgtcaagggagctgcgtgggcggctcgaagatcatgtgcggggcatagagaagttcggaattgcgccacatgcagcagctagaggcttcgcttccgcaacaggcatgatcaaccatatcgctgggctcctgagatttgcaggccacatccagccagctttcgccgatcccctgagagcccgatttgccgctgctttggcccgttggcggtggagtcctgtggactga

SEQ ID NO: 9205 - RNA, 1029 nt, synthetic construct
  source 1..1029: mol_type = other RNA
atgataagtgctagcccacaccagtatagagccgatgggagggcactaggacgtcccgaaccggtactggacgcagctttagcccaggctggtagagcagaagcgtcaggcgccccagcgattctaactctgatgcacctagccaagcgcatggacgtgagccatacatttctcaggtctgtggttggttccaaagaaggtacccactaccgggaatttcacatcagcaaacgcgacggaggcggcagaaggatcgccgtaccttcacctgaactgatggccgttcagcgatggattgtccgggaaatcctgagggaccgacctgtccatcccgcctctttcgcatacgccagagggagtagcatctacgcctgtgcaagacagcatgcaggggccgggtggctgctcaagttggatatacacgattttttcgagtccatttccgagaagagcatttaccgggtgtttagggagatcggctacggacggttggtggcattcgagcttgccagactgtgcacacgtccgtgggtggctcctccaaggggaacgagggcagctcgatccgttgctaacgcctcaagacggggaatcgagttctatcggcgggacctcacaggatacctcccccagggggctccaacttctcccatgcttagtaatcttgtgttcagggtgctcgatgaacgactgtctcaattagctgcaaggaacggccttatctatacccgctatagcgatgacttgaccttttcaggcccagcctccggcttctcgagagccaatgctgccgccttcattggccaagtccgtgagttactggctacccgtagattccggctgcacgagcgcaagattaacattgtgcccccgggcggacgaaaagttgtgctggggttgctcgtggatcgctccgtgccacgcctgtctagggagctgcgcaatagactggaggaccatgtccgcagcgcgataccccctgcgatggtcgtacggatcggtcctcccatctcgactttttctagttga

SEQ ID NO: 9206 - RNA, 1170 nt, synthetic construct
  source 1..1170: mol_type = other RNA
atgatcggggccagcccccatcgctatgttgtggatggtcgggccagcggccgaagcgatgaactactagttcgcgctctggcacaggctagatccgttgaggtcgctggagcccccgccatagtgacactgcggcacttggccgcgagaatgggcgtggactaccgatatttgcggtctgtaattgcgaacagatcaggagatcggtacagagacttctccatttctaaacgaggtggaggagggagacggattgccgtgcccgaaccaacacttatggcggtgcagcggtggatcgtgcgagagatactccgtggacgcccagtacatcctgactctcacgcctatgccgctggctcctccatagtggcttgtgcacgcagacattgcatggccggctggttactgaaattggacattcacgacttcttcgagagtgtaccggaacgctccgtgtacgatgtgttcaggaccatcgggtaccagccactggtgagcttcgagctggcccgtctgtgcactcggccatgggtggatccccctcaggataggcgggcagccagaaccgtatcaaatcacgccaacagaggcattgacctttaccgcagagaactgaccggctttctcccccaaggagcaccgaccagtcccatgctgtcaaacttagcctgtgtcggcctcgacggcaggctgtctagcttagcacgctcagctggtctgacttatacgcggtacagcgatgaccttacatttagtggtcctcccggaactttcgacaggagccacgcggtcgctatggttgacggggtccgtgatgtcctgagggatcacggctttcgaatgcatgagagaaagattagtatcgtgcctcctggtgggcgtaaggttgtcctcggactgctggtggacagggataggccgcgacttcctggggggcttcgccaaaggttgtctgatcacgtgcggggaatcgagggattcggcatcgccgcgcatgcagccgagagaaattttgaggccgttacagggatggtcaatcatatcgctggcctgctccggtttgcaagggacgtggagcctgccttcgcagacagactcagggtccgctttgaagctgcactcgctaggcacggttggggcgctgcaccagaatcggggtccgaaccatga

SEQ ID NO: 9207 - RNA, 2118 nt, synthetic construct
  source 1..2118: mol_type = other RNA
atgactactacagacgacttcgccgacctgacaccagagcaattcctcgaggccgtcgtgtcagggtcaatccacccatacaccgaacataggattcctaagagaagaggcggactacgcaccttgcatgctcccgtgcctcgcctttccgagatacagcaggccgtcctggctaggctggaaaccctgccagccgaagtgcaaccccatccggcagcttttgcttaccgcagaggtaggagtgtagtcgactgcgccaccgtacatctccgagcccacactgtgataaggctggacattgcagatttctttggcagcattcgagagcgccacgtccacgctgctctgaaggatgcttggacacgtcccacggagcctgagtaccgggtgggtttagtgaaggatgacaacggaagaaggaaaattggcctgcggcgggatggccgtacactggatacctatatcacagcaagattggttaccgtttctccgcccgaaccgagccagacttggaccaatcggggaactggaaggcgctcagtgtatttggcagcgacagggcaggaattctccgtgcggaggccacatttggtgtatcggcacacgcgtgagggctttctccctcagggcgcaccgacctctgggtacctcagcaacatcgtgatgcgcgacgtcgacgaggttgtagcccatcaggcagaaagccttgggctgagatatacccgctactctgatgacatgtatttcagcagtcgaggcctcgtgcggcatgatgacgttgatcgcctggttgccggcgtcaaagaggcacttgaacccctggggatgaagctgaacgccgagaaaacctacgtcgccagacctggagccaggcggtcagtactcggaatccttgtagacgggcctactccacgattgacaagggagtacaagcgccggattacgaagcacgttcgcggggccgcgagctttggcattgagcagcacagaaggcaccaggaattcgaggatctggcagaactggatgctcatgtgaccgggctcctctcttttgctcatatgatcgaacctgcctgggccgagaagcagctgactgcttggaagcgactgcgagggattcccctggagcacgaagaaccagtgtctgcgcagcacggcctcgacctaccatgggaggaggagatggaggtcagccaggccgacctggctaaggattccatcgacgatctgatcaggggcgcgcagaggtataggagctcttcagattatctccagatgctggaattcgttgggagatttaaacggtacgctccttttaatgccatggtcgtgcatatccagaaacccggtgcaaggtatgtattaccctccagtgagtgggagtccaagtaccgtcgcgtgcttaagccaggtgcgaagcctcttttgatatttcaacccagaggcccctacctgctggtgtacgacgtgggcgataccgaagcactacctggcgcactgccattgcctcgcgggattaccgcgcctgtgtcagtgtcgtccagagccggagaaagagaggtgctagaagtgtggcaccacaccgagactaacctcgccccattaggaattcgactgacattagttgaccatggagccagctcctgtgggagaacctatagaagtcggtccggcgggtctgtcaaacgtcccggaggtagacgaggagatcccccagagacttaccccacactattcgagatcgaagtcaatggtaatctccctctgctggaccggtatgcaacactggctcacgaacttggccacttattctgcggacacttaggggccggacccggtgaaacatggccagatcggcagctgcggcctctgagtgaagaagatgccgtgaaggcacatgctcggaatgaggtggaggctgagagtatcgcctacatggttcttaaacgtcttgacccagacgtccgcatgggagactatataacgggtcacctcggcccagacaggcaagtgcccgagacggtcgcattgaacctcactttcaaagccgccggccttatcatcgagatgggtaaaaagaggctctcctcggctaaattgcaaaaaccgaagaaatga

SEQ ID NO: 9208 - RNA, 2118 nt, synthetic construct
  source 1..2118: mol_type = other RNA
atgaccgcagcagatgatttctgggacctgaggcccgaggccttcatccacgccgtggtaagcggcagtatttacccctacacagaacatcggattcctaaacctcggggtggactgcggaccttacacgcacctattagacggctcagctggatacagcaggagatactggcacgcctgggcacactaccagctaggttccaaccacacccggccgcatttgcgtatagaaagggacgaagcgtcgtggactgtgctgctgtgcacctaagagcccatactgtgatccgcttggatgtggcagatttctttggcagtatccgggaacgtcatgtgcacgccgctcttaaaggtgcttggccccgaacagcagggcctgagtacaggatcgaactggtggaaggtgacgacgggtcaccggagatcggtctgcgcagggtgggacgaactctgggggcatacaccacagctcggttggtcaccgtctccccccctgagtcgaaccacacgtggcccaatagaggcacagggcggagggatgtgcgtctcgaagccactggtcagcgctttagtgtacgccggcccaccctggtccatcagcacactcacgaggggtttctcccccaaggggcacccacttctggttacttgtctaatatggtgatgagagacgttgacgcagtgctcgcgcataaggccgaatcctggggcctgagatatactcgatacagcgatgacttgtacttcagctcacgcggaccagtcagacctgaacgcgtagacaggctagttacagaagtgaagcgagcgctagagcctctgggaatgagactcaatgctaagaagacctatgtagcccggcctggggccagacgctctgtacttggcatactggtggatggcagcacaccacggttgaccagggcgtataaacgcaggatcacactccacgtcagaggcgccgcttccttcggcgtgatgcagcactgctatcatcagaagttcgaagatcttgccgaattggatgctcatgtgaccggtctgctgagttttgcccacatggttgagcctaggtgggcaggggagcaattggccgcctggaagaggctgcgggaaataccgctcgagcacgaggaacccgtgatgactcaacatggcctcgacctcctcttcgatgaggaggtcgacgtcagtcaggctgacttagctaaggcctccatcgacgatttggttcgtggcgcacagcgctatagatcttccgcggattatgtccaactgttagacttcgtgggcagatttaaacggtacgccccattcaacgcgatggttgtccatatccagcgccctggggcacggtacgttctgagcagcgctgagtggaaatcaaagttccttcgagtgcttcgtcctggcgcccagccgcttcttatttttcagccaaggggcccctatatgctggtgtacgatgtaggcgacaccgaggcgttacctggggcaaggcctttgcccagggaggtgacctcacccgtggctgttacctcgagggctggagccaagaaggtcgccgaagtgtggcatcatacagaagccaatctggccccactgggtgtgagactgacactggtcgatcacgccgcatcttcctatgggagaacttatccatcacgatccgatgggttcgtgagccgcccaggaggacgaccaggagatcgaccagagaagtaccccatcctttttgagattgaagttaacaggaacctctctctcctggaccggtatacgaccctggcccacgagctcggacacctgttttgcggtcatctgggcgctggaccaggagacgcttggcctgacagacgttggaggccccgctctgatgaggaacgcattgctgcccacgctcgtgacgaggttgaggccgaatccattgcgtacatggttcttaaaaggctggacccagatgtccaaatgggcgactacatcacgggacacttagggccggaccagcaggtgcccgactcagttgcactgaaccttacgtttcgggctgccggcctgattatcgagatggggcagaaaagagtgccagccgccaaactccagaaaactaagaaatga

SEQ ID NO: 9209 - RNA, 2118 nt, synthetic construct
  source 1..2118: mol_type = other RNA
atgacaacagctgatgatttcgtggatctggaccccgcccagttcctgaaggcagtcgtgagtggttcgatctttccatatacggaacaccgtatccccaagcatagcggcgggatccgaactctgcatgctcccgttcctcgcttgtcggaacttcaacaggggatcctcgccagattggagacactccctgccaggtttcagccccacccagctgcgtttgcctatcggggcggtcgtagtgtcgtggattgtgctgcaattcatcttagagcccacacagtgatcagactcgatattgcagacttctttggttcaataagagagaggcatatccacgccgcccttaaagacgcatgggcgaggcctaccgaaagagagtatcgcatagacttggttaaggatggggacggatgccgggaagtagggctccgacggataggaaggaccttgtcaacatacacaaccgcaagactcgtcacggtatcccctccaggaagcagccgtacatggaccaatagggggactggaagacgctccgtatacttggaggccacaggccaaagcttcacagtctcccgcccggaactgttatataaggacacgagagaggggtttctgcctcagggggctcctacttctggttatctgtctaatatcgtgatgagagatgtggatgccgcagtgacgcacttagcagagagccttggcctgcggtacacacggtactcagatgatatgtacttcagctctaggagactggttaggcatgagaaagccgaccggctcgttgacggcgtgaaaaaagccctgataccccttggaatgcgcctcaacactaaaaaaacctatgtcgcccgccctggagcgagacgaagtgttctgggaatcctcgtagatggccccactccaaggctcactcgggaatacaaacgccgcattaccaagcatgtcagaggcgccgcttcctttggcattgagcagcactcccgccaccagggattcaagggcctggctgagcttgatgcacacgtcacagggctgctgtctttcgcccacatggtggagcctggctgggctgaagaacagctggccgactggaagcggttaagggaaattccattcgaacacgaagagccggttatcgcccagcacggtctggactggtatggcgacgaagaggtggaggtgtcccagagcgacctggccaaagcaagcatagatgatctcgtccgaggcgcccagaggtaccgaagttccgccgattacctacagatgcttgagttcgtgggaagatttaaaagatacgctcctttcaatgcgatggtcgtgcatattcagaagcctggtgctcgacacgtgctgtccagttcagaatggatgagtaagtatcgtcgagtactgaaacccggcgcccagcccttactgattttccagccccgaggaccctacatgctggtctacgacgttggcgacactgaggcacttccaggcgctcaaccacttccacgtactgtgactgctccagcatccgtcagtagccgggtgggggagaagaaactagtggagatttggcatcacaccggtaccaacctggcacctctgggaatcaggctgaccttggtgaacgacggggccagctcttatggacggacctaccgcaccaggtcagacggctttgtgcaacggccgggatcaaggccaggagacaggcctgaacggtatcccagattgtttgaaatcgaggtaaaccgcaacctgcccctactggaccgctacgccaccctagctcacgagctcggacatctgttttgcgggcatcttggcgcagggccaggtgacttctggccggatcgcaggtcaagacccagctctgacgaggaacgggtgaccgcacacgcgaggaatgaagtcgaggccgagtctattgcttacatggttctcaagcggctggatccagacgttcaaatgggcgattatatcatcggccatctcggtgtggggcaacaggtgccggagtctgtggctctcaatttgacttttaaggctgccgggctgatcattgagatgggcgggcgtcggttatccgcgaccaagttgcagaagcccaagaaatga

SEQ ID NO: 9210 - RNA, 2097 nt, synthetic construct
  source 1..2097: mol_type = other RNA
atggcagatgacttcgccgatctctcccaggcgcagtttcggaaagcggtggtgagtggctcgatctatccctacaccgaacaccaaattcccaagcgcaggggaggcctgcgcattctgcacacaccagtcagaaggctgtctgagatgcagcgggggatcctcgctcggctggaacatctgcctgccggattccagccacatcctgccgcttgcgcctacaggtcaggcaggagcgtcgtggactgcgctgcagtgcacctcagagcgcacactgtgatacgtctggacatcgcggatttcttcggttcaattcgggagcggcacatccatgctgcactcaaagatgcctggtcccatctggccggacgggagtacagaatcgacttagtggaagatgggaatggtcgccaagaaattgggctcaggaggaccggcaggacacttaggacttttaccctggcgcgtcttgtaaccgtgtcccctcccggaccgaaccgcacttggacgaacagagggaccggaaggcgctctgtccacttggaggcaactggtcagtcatttagcgtttcacgaccagaccttgtgtataaacacacccgcgaaggattccttcctcagggcgctcccacctctgggtatgtcagtaacctggtcatgagagacttcgacgcggtgatcacgcatctggccgaatccctgggtctgcgatacacacgctattccgatgacatgtacttttcttcccgcaggctcgtccggcacgagcatgttgacagattgctggctggagtaaaagaggcactggagtccttggggatgcgactgaacacaaagaagacttatgtggcaaggcccggggcacgtagatccgtgttgggaatcctggtagacggcccagcccccaggctaacaagagagtataagcgccggatcacaaagcacttgcgaggcgccgccgcgttcggtatagaacagcaccggagacatcaggaatttaaggatctggtggaactcgatgcccatgtcacaggactattaagctttgcacacatggtagagcccggctgggccggtgaacagttggaggactggaaacgtctgcgggagatacctctagggcacgacgagcccgtgaccgtgcaacacggacttgatctaccttgggccgccgaagtagaagcctctcaggccgagttagctaaaacctcgatagatgatctcgtgcggggggcacaacgttatagaagctcttccgactatttggagatgcttgagttcgtcggtcgatttaagcgttacgctccttttaatgcaatggtggtgcacatccagaaaccaggcgccaggtacgtccttccaagcagcgagtggaagagcaagtaccagagagttcttcgccccggcgctcagcccttgctgattttccaaccgcgcggcccctatctgctggtgtacgatgttggcgacacggaggcactccctggcgctttgccactccctaaggccattactgctcccgtctctgtagcatctagagctagcgaaaaggaactggctgaagtgtggcattacactcaagttaatttagcccctctgggaattcggctgacactggttggccacggggccagtagctgtggacggacttatcgatcaacaagtgatgggttcgttgagcgaccgggaagtcggcccggtgatcatccagagaagtaccccactctgttcgagatcgaggtgaattggaatctgccgttactcgacagatatgtgacccttgcccatgagctggggcacctcctttgtggccatctcggctcagggccagaagatgcttggcctgaccgatttctgcctaaaacggtggaagttcacgctcgcaacgaagttgaggcagagagtattgcttacatggtcctcaagaggctggatcctgacgtccagatgggagactacatcaccgggcatttaggcccgaaccagcaggtgccagagacagtggcactcgacctggcctttaaagccgccggcttgatcatagagatgggtaaaagaaggattccagctaccaaactacagaaaccaaagaagtga

SEQ ID NO: 9211 - RNA, 2103 nt, synthetic construct
  source 1..2103: mol_type = other RNA
atggctgacgattttgcagacctcgcccctgcccagtttctggaggccattgtcagcgggtctatctacccctacaccgagcataggatccccaaacgccgggggggaatcagaactctgcatgctcccatccctcggcttagcagaatacagcaggaaatcctgacatgtctcgaggcactgcctgcgagactccagccacatccagctgctttcgcctaccggtctgggagaagcgttgccgactgtgccgcagtgcatctgagggcacacacagtgatacgcttagacattgccgactttttcggaaatatccgagagcggcatgtgcacgctgcgcttaaagacgcttggacccgtcctaccgagagagagtacaggatagatctcgttgaggatgaccacggcggacaggaaattggtttgcggcgcactgggaggactctgggtacatatgctatggctcgcctcgtaactgtgagcccacctgagccctcagagacttggaccaatagaggaacaggcaggcggatcgtccgcttagaggctaccggccaggacttcagtgtccatagaccctccctagtctaccagcacacgcgcgagggttttctgccccaaggtgccccaacatccgggtatttgtccaatatggtgatgcgggaagtagacgccgcagtgactaacctggctgaatcaatgcaattacgctacaccagatatagcgatgacatgtatttcagctccagacggcttgttcggcacgacgacgttgatcggttggtggccggggtgaaaagagcactcgtctctcttggcatgaaactcaacgccaagaaaacatacgtggccaggcccggcgcacgtagatcagtcctaggcattctggttgacggccccaccccccgacttaccagagagtataagagacgaatcacaaaccatgtgcgtggcgccgcagctttcggcattgagcaacacagagatcaccagaaattcaaagacctggccgctctggacgctcatgtcaccggactcctgtcgtttgcccacgtcgttgagccaggatgggctgataaacagctgacggattggaagcgacttcgacgcatcccggaacaggaggagcctgtgattgtgcaacatgggctggaattgccgtgggacgaagaagtggaggtatctcaggagaatctggcaaaagcgtcaatcgacgatctggtgaggggagcccagcgatacaggagttcgtccgaatatttacacatgcttgagttcgtgggccgattcaagcgttacgcgcctttcaatgccatggtggtacacattcagaggccaggagcgcgctatgtgttgccaagctccgaatggaggtctaagtatcgacgggttctgaagccaggggcacagcccctgctcatctttcaacctcgcggaccctacatgctggtctacgacgtcggcgataccgaagccttgcctggggcctggcccttaccaaaagcgattacagcccccgtgtctgtgtcaagtcgggccgatgagagggatgtagccgagctgtggcacaacaccgagacaaatctggcaccgcttgggatccggctgacactggttgataatgccgctagttcctgcggccgtacgtatccaagcagaagtcgcgggttcgtagaacgccctggttctaggccgggcgaccgatcagagacataccctactctttttgagatagaagttaaccggaatctgccccgcctcgataggtatgccactttggctcatgagctgggccatctattttgcggacacctcggtgctggaccaggggaaacgtggccggatagaaggctccggtccagttctgaggccaccaacgtccacgcaaggaacgaagtggaagcagaatccattgcatatatggtcctgaagcgcgtggatcctgaagtgaggatgggcgattacatcaccggtcacttgggaccagaccagcgggtgccagaactagtggcgctgaacctaacttttaaggccgccggtttgataatcgagatgggcaagaagcgtattcctgcaagcaagctccaaaaggctaagaagtga

SEQ ID NO: 9212 - RNA, 1983 nt, synthetic construct
  source 1..1983: mol_type = other RNA
atgagacttgtcgggtttagatcacacgagtacggagaatgcattaccgtggtgaccgacgcggcccataaggaatttctgtctgccgttgtctcaggcgccgtttacccctacgttgagcacgtagtcgccaagcgcaccagcggagtgagaactctccatgcgcccgtagagcagctagccagggagcagcgcatgatcctgacacaactacgggagcgtgggggatctgtccatccggcagcctacgcctataggacgggctattccgttgtcgattgtgcccaggtgcacatgaacgcgcatactgtggtaagactggacattgccgacttttttggatccatccgagaacggcatgtctatgaagtgttcgaggaactgcgtgatggacctacgcggtcgtatgagctgaccaggctgactacagtaagtcctccaacaagcaccgcttggcggaatcggggaactggcccgtctgtcaagagcggggtgatcgagagatcgccccgttacatgcataacagagagggattcctgcctcagggggcacccacttcagggattctgagcaatttagtgatgcgagccgtcgacgctcatctccatagttacgctgaaagacagggttggcgatataccagatactcagatgacctgtacttctcctcacgcaaactcgcggatcaccgtcagattgatcggctcattagagaggtgaaaaggaggctggggcttctgggtttgcacttgaacgataagaagacctgggtggctcgcccaggtgctaggagatccgtactcgggatcctagtggatggaccagtgctccggcttccgcagagctacaagcggcgaatcacaatgcacgttcgcggcgtatcttcttttggcatagctcatcatgcagaccacgctggctttataacggtggacgacctggattctcacgtgaccggtctgctatcatttgcacaccaggtggaacccgagtgggccgcagaacagctgcataagtggaggcgactcaggcgcttagctctgacccccagcgtgagtactgatgctgccgacctagttctcgctggcgccacggaggctaaagccagtatcgacgctcttgtggcaggcgcacaccgatatagatctgcacgcagctatgccgacctgttaagcttcgtgggcgcgttcaaaaggtactccccctttaatgccatgttgattagtctccaacgaccaggagcaaggtatgtcttaacagaggcccggtggcggtccgatttcagacgcgtattggagcctggcgcccaaccgctggtgatactgcagccaggtgggcccttcatggtggtgtatgacgttggcgacaccgaagcactgccaggcgcattggcccttccccctgaggttaccgacccagtgagcgtcagggccactatcacagctgccgacctccagcaaaggtgggattggaccgtgaataatctcgcccccttggggatccgtctgacttccgtcgatcacgccaattccagctgtggctccacataccgcgccaggacccagggtactgtcaaccgtctggcagccacagggcggacacaacctgaagagttccctctcttgttcgagatcgaggtgaacaaaaatcttaagccaattgacaggtatgcaaccgtcgtgcacgaactggctcaccttttttgcgggcacctcggcacgagtcccattacaaaatggcctgaccgccgaggaggtgctcagtctcggaacgaagtggaggctgaaagtataacccacatggttctgtccaggttagatccagacgtcgctatgggggattacatcctgggctacgttcggcgggcggatgatatgcctgacgtggcacttaacctgatgttcaaggcagcgggagaaatcattgaactgggctcaggaagaatccctactacaaaattgcgcgccgagcgcagagcttga

SEQ ID NO: 9213 - RNA, 1974 nt, synthetic construct
  source 1..1974: mol_type = other RNA
atgcactatatgactatggcttccgccgtcggaaagagtgccccagacaggggtgctaccgaacgctttctcgcccaggtcgtgaggggagaagtctttccttacacagaattcccagtggcaaaacgtacgagcgggattcgcgtgttacatgcgccagtgcctgagctggccgctaagcaactggagatcctggggcgccttcagagaacagccgtaaccgatccagccgcctttgcctatcgggcaggctattccgtggtggactgtgcaagagtgcacctgcgggctcacaccgtggtgagactggatgtggcgaatttcttcggcagtatcctggagaggcacgtctactcagccctccaagaggtcgacgatgcaccctggtccaactatacaactactcgcttgaccactgtttctccccctgggtcgcctgcttggcgaaatcgagggacaggtgagcttgtgaaagatggttcagtcgagcgcagtgaccggtacatgcataatagggaaggcttcttgccccagggagccccaacgagcggaatgctgtctaatctggttatgagaaaggtcgacgaggccctgagagcgtacgcagagcatgagggcctccgctacacaaggtattccgatgatctctattttagctcccgaacctttgtggctcaccggcaggtagatgcattagtcaggaaggtgagacagagcctggcagagttagggctccgtctgaacgatcgtaagacatgggttgcacgccctgggcatcgtagatccgtgctgggcatcctcgtagacggcccgactccgagactgagtcgggattacaagcgaaaagtgacagttcacctgagaggggctgctgccttcggtgtggccgatcacgcctcatttcggggttttagcgctgccgagcagttggacgcacacctgaccggacttctgtccttcgcacatcaagtggaaccagcctgggccgctgaaagacttgcgacctggaagcggctcaggtcactggggacttcgcacggcactgaagccctagctgaccccgctcaccagctatctggggctgccgaggccaaagccagcatcgatgccctggtggccggtgctcatcgataccggggatctcaagcatatgtagaactcctgaagttcgtcggaacttttaagcggtattctccctacaacgcaatgctgataaacttgcagaaacctggcgctcggtacgccttgaccgaacctcgatggcggactgagtacggccgggttcttgaaccaggggcacagcccttggtgattctccagcctggcggcccattcatggtggtttatgatgtgggagacaccgaagctctacgaggcgcccatccccttccgcctgagataacaaacccagtcgctgttcagtcccgcatcagtgaccccgagcttaagcagaggtgggactggacactcaataatttagccccgctgggagttaggctcaccctggtaagccacgcgaactcatcatgcggaagcacttaccccgccagaaggtctggtacggtgaccaggcttagcgcgaccggcaagacacgccctgaagaattctccctgctcttcgaaatcgaagtaaatacccaccttgccctggtcgacaagtacgctaccttggtgcacgagctggctcatctcttctgcgggcatgcaggcccaagtcctgttgcctcttggcccgataggcgtggcggctcaaaagcgcgcaacgaagtcgaggcagagagcgtggcacatatggtgctggggagattggaccccgacgtaacaatgggcgattatattctgggtcacttagacaaagatggagacatgcccgaggttgcgctcaacgtgatgtttaaagtcgctggagacattatcgagctagggtctggccgcattgcaacgaataagttgaggaaagagctaggaagatga

SEQ ID NO: 9214 - RNA, 1338 nt, synthetic construct
  source 1..1338: mol_type = other RNA
atggcggtggttcatatctccaaccaggggggagcaagccgaaggccaactcccactgctttcgtacagcaagtggccagaagagtggacgttcccgtcacatacgccagagacgtgctgactcgcagcatttttccatatcgccgggtggaggtgagaaagaggaccggcggacaacggattcttcattctcccgaattgcctctgatgaggatgcagcgcctgcttcttgacgacctccttccttctgctccgacgcacgcatcaagctacggctatgtgcctggtgcgtctgtgctcgactgcgccagcgtgcacttgcggtcccatacagtagtgcgcatcgatatcgccgacttcttctcttccataacggagcgccacatcttccgggccctaagcaccacagggtggccttcgcacattggtgggccagttgctggagcccggaccagtcacgtaggaccacggatgagtaggctgttggcctatgagcttgccgtgctcacaacggtcagtcccccaggctctgcaacttggcccaataggggcaccggctctcgcgtcatagacgaagattccgctatcccgcgagcacacccttatagcggccagactgaggggttcctgccacagggctcccctacctcaggagctctgagtaacctggtgatgaggccaatcgatgatctcgttcatgatgtcgcacgcaggatgcatctgagatttagcaggtacagcgacgacttgtttttctcatcaacccggcccatcactcccgataccgtggccagactcgttcacgaagtgcgcgcagccctgcagattattgggttacacgtaaacgactccaaaacacgcgtggcccgtcccggtagtagacgcacagtcctgggtgttctcgtggatcagagcgcgcccagagtcggacgggacgttcataggcgaatcgacatgcatctacacggatccagaaggtttggcatcgatgagcacgctgaacaccgtggctttattgatcctgaagatttccggtcccacatgcaagggttaatatcctggattcagatcgtcgagccgggtcgtggacacagatacgccgaagattgggctcgggccatacgacattctcgtctctacgcatctccagacctggctctgggggagtcgattgcggccctgtcacctgtgaatccacctaccgagtcagctgctaagcagtccatcgacgatctgatcgtcgcaggcgtccggtaccgaagcaccgtagagtacttggaattactgaggtttattgagcgattccatcattatgcccccagtacaagatgttcatga

SEQ ID NO: 9215 - RNA, 1947 nt, synthetic construct
  source 1..1947: mol_type = other RNA
atggccgccgattccggactggatggcgacaggctcactgccttactgaaccgctctacttggccctacagtgtgctgcagcacaggaagccgggtgggggtagtcgcaccctactcaccccggcacccgatctgatgcggctacagaggcgggtccttgatgaggtactagcccaccacgctgtgcaccctgcggcttatgcttatcggccgagaaggagcgtcgtagaatgcgctcaggtgcactgtagggctcatactgtggtgaggctggacgtggctgggttttttgacaacatacgggagcggcatgtgtacgcctctttgcgcagacggcccgcaattggaggtcccctgtctgccgtgcaagcctacgagctcaccctcctgtgtaccactactccacctgacagcgaatcctggatcaatcgcggtacaggggccaggcgacttgggcaaagaagcacggacccacttgtcgcccgggcctatccatatcaggaccagcgcgagggcttccttcctcagggtgcacccacatccggggcgttgtcgaatctagttatgtacgaagtagatgtggagctttctggactcgctgatcgattgggcctgcggtacacgaggtacgccgacgatttaatctggtcaagcagggcgttggttccgcggcgcattattgcccagctggtgaccgatgtgcgtacagttctggctactaaagtgggcctccacctcaatgatgctaaaacgcgtgtgtcacggccaggaagtaggcgtctcgtcctgggactcctggttgatggatccgccccccgcgttccacgcgaaacatacagaaggctcgagtgccatgtccgaggagtgcgcatcgcagggttacgcgcacatgcggctcatatggggtttgagactcctgaggcggcccgcaacgctgttgatggcctgctgagctgggtgcggttcgtcgaaccagcaaagggccgtctgctgaccgatgcatggtcacgagcactggaagtaggcgatgtcgaactgttgggggaccccacctccaccgaactgccaagtgatttagacacgggcgaagcacgtgaaagcattgccgccctgcttcgccacggttctgaatatagatcgtcagctgagttcgcagacttgatgagattcatcggggggttccatagatacgccccttttaatgccatggtggtgcgactacagcgcccaggctctacattcgtacttaccgaggccagatggcggcgggagtataggagagttcccaagcccggagcccagcgcataatgatttttcagccgaggggaccctacatggttacttatgacgtgggcgacacagaacccttgcgagaggcccctccactgcctcacggtgttacagacccagtcagtatcagaacagctatccctgtacaggctctggaaaccgcttggtccaccctcctggataactccgttagatggggggtgagggtgactctggtggaccatgccgcaagcgcctgcggtagaacctataggacgcaaatgaccgaccaacttgtccgaagacccggccctaggggcaaaggagaggacgtccggcctctccggtttgaggtcgaggtgaatagaaacctcccagtcccagatcgcctcgcaaccctggtgcatgagctggcccacctgagctgtggccacctaggaaagcaccctgaacttccttggctggaccgacgtggcgggaccagaaggagagacgaggtcgaggcagaggcgacaacatacttagtgttgagccgattggaccccacactgactactgacgactacctcttaggccacttgggagagggcacagagctccctgatgacctgcggcttgatttgatggtgtcttgcgcttcaagactgctggaaatgctgctttcccgtcagccctga

SEQ ID NO: 9216 - RNA, 1917 nt, synthetic construct
  source 1..1917: mol_type = other RNA
atgcgtgatgtcttggccaggcgacgctcaccgtaccggcagtttgcaatacccaaacgggctgggggcatgcgtgtgatacacgcacctgaacccgagctgcagatcctcttacgcagagtgctgcggacagcactagaccaactgccacagcatccaatggcgttcgcctataggaaccgtacttccatcgtcgagtgtgcacacgttcacctccgggccgacacagtgatcaggctagatattgcagacttctttacctccgtacgtgagcgttatgtgtttgaagctctgatggccctgactgacgacgagtggttaccattggggcgaccttctaggcttgctgcacacgaaatggcgagactaacaactgtcacgcctgacgatagtggggcttggcttaacagaggcaccggcacgcttaccgttgacgaccgagcccgcccaaggagctacccttataagggccagcgagaaggctttcttccccagggcgccccaacctctggtgctatctctaatctcgtgatgcgccccgtcgatgaggccatctttcaagtggcggaaaagctggggctgcggtatacaaggtactcagacgatctgtacttctcttccagacgccgggtgctgcaccacactgtcgatgctctggtgtctggagtgaggccacccctcgctgagctcggactacacttaaacgcgcacaaaacaagagtagctaggggcggggcaaggcggacagtacttggtatgctggttgatgggcatactctccggctgcctcgcgagcaacataggaatattgaactgcacctcagaggagcagatcgccacggcctggagcaccatgccgaatcgagaggatttgacagtgtcgaatctctggagcgccatgtgtcaggcttgatcggctgggctcaacacgtggagcctatgaaaggtgccacctaccggagtcactggcacaggacaaggtcacggagcagcgcggctgcaaatccccaggtggagcatgccgacccaaccgtgtccgtggatgacagcgccagagcttcaatcgatcggctgctcgcccagggccatgccttcagacagagcaaggactatgcagagtttattgggttcatcggccgcttccgaggatactctccattcaatgccgccatggtgagactgcagaagcctgggagtcgcttcgtggccaccgaacagaagtggagaactaagtatcggcgcgtaattcgaccgggtgggcagcctctggtgatgctcagacccgggggaccctatatggttgtgtacgatgtgtccgatacagaggcgcttccgggctccaaacccctccctagacacgttactgatccgctggctgccgactccagcttaaacagcgccacggtggaacgcctgtggaaggtcacaatcgacaacgctatcaggcatggcatacgtgtgaccttggtagacaattcccccgctcacgccggttcggctagatggtcacgcctggagggacatgttactcggcccggaaagaaatccggggccacccctgaaacctacagcttgacccatgaaatagaggtttcacgaaagttatccgcagtggaccagtacgtcactctggtccacgagcttgcacatatctactgcggacatcttggtacgcctgatgtggccctgtggccaagtagaaggggtggagttgtacgggatgaggttgaagcagagagcgtcgctttcattgtcatgtgcaggttggacccacagtttacaatgggcgactatctcctgggctacttgagtaacagtaccgaaattcccgatggagtcagcctccagaggatgatgcaagtggcctctgatattatgcaaatgggacagcggcgattgaaagccggggagatttga

SEQ ID NO: 9217 - RNA, 1089 nt, synthetic construct
  source 1..1089: mol_type = other RNA
atgtggctggccgaccctcgggactttctgctgggcctgaaactggcccgacttttgggggacgctggtctgggcgcagagagaaccagagccataatccgcagagaggtcgatccgtaccgcgttctgactgtgcccagaatccgtgccgccgccagagaaatccggaagcctgacgcagatctgatggcctttcagagggccctcctcgctgaatggacaccaggacacgttgcgcatccccgcgcattcgcctacgcaaggggtaggtccattgtagactgtgctcggctgcacctgggagcagagctggtggtgaggctcgacatttcaaatttctttcacagcattacggaaaggcacgttttccgggcacttcccgggccacactcccgtaattccttcgacgctgcccagataacccgcttagtcacagcaccctctaccagcccattatcatggaaccagcggagaacaggagccatccagttgtgcaatcccaggcagtgccgctgttggccccttagatgcgagaaggtgcgtgctaattattttggacacgcgccagagggctttctaccacaaggcgcccctacctccgggctgctttctaatttggtaatgcgggaattcgatcagagaatgtatgaatgggccgaggcgaacaggtgggtgtactctaggtatagcgatgacatgcatttcagttcgcggcgacctcgagctcacacagatacggatagactcgtgactcacgtgcggcgggagttaggacggctaggcatgcacctgaacgataaaaagaccacagtagctcgccgcggtgctcgaagacaagtcctggggttgctcgtcgatgggcatcacctgagactcacccgcgaatataaaagggagttggagctccatacacgcggcgttagtgagttcggtttggaaccgcatgcccatcactgggggtttgagaacgcaggcgcacttgtgactcacgtcaacggcaggctcgcgcatgccactcatgctgaacctgactggggagtgcctgctcgagagcgttggctggccgctaccactcattacagcgtgtga

SEQ ID NO: 9218 - RNA, 1122 nt, synthetic construct
  source 1..1122: mol_type = other RNA
atggtcgaaagactggatcctaacctgagatcatacttcgatctctccagcctggtccaggtgagcggggctgattctggctttatcgaggacgtggtggaccggagactgtctccatactacgtttctgccgtgcccaaacgaactggaggcaagaggcatatcgaaaaaccgaatgccgagattctggctatccagcaacctattctacgcgacatcctgatgactaggagtcccagcgagaaagtgttctcatacgttaaaggtcgctctcctgtgcagtgcgcacgtcaacatctgggcgcgcggtggttgctgagagtagacctcaaggcctttttctactccattagtgaggtggacatttactacctgttcctgaaggaattcggtttcaagcagctgaccgcattccagttagcccggttggtgaccgtagtatccgacgattccctggaggtgtctgaggtggatcttcttaaagcccacccacacgtcagtaagtatcggagcaggtatgtcgcgggttatactccccaggttctcggccatctgccacatggtgcccccaccagtggggctctgagtaatctggtttcaaggcaactagaccacgccattgctgccctcgcggtacagcatgaattggtgtttgcacgctattcagatgacatctatctcagcgcaaggaggcctattacaaggactcaatcaacgaaagtcctctccgacttgagcggagtgatacgaggaaacgggtttgtggttaaccagacaaaaacgcggatgagcttcgaggatgacaagaagttagtgcttggaatacacgtcgacggcgatcgcctaaggctccgtcgagagtaccgggatcgcatcgactatgaattgcacatgatcgaaacccacggcgcagagtctcacgctcagaagcgaggggataagggagtcgcttttctcctggggcgcgtttccggccttatcgcccatgcccaggatgtggatccagaatggggccggggacgacgtgcaagatttagagccatactcatggacgggaaatcgacagaagctcttttacacaagcacctgaccgagcgcagagagcggcttagatccacatga

SEQ ID NO: 9219 - RNA, 1194 nt, synthetic construct
  source 1..1194: mol_type = other RNA
atggagagcccacatctatatcgctccaaagccccgattgggctggacccagctgtgatagaacgcgcaatccgcctcagcacgacacagtctgccaacggggtgcaacccattctgactctgaagcacctggccaaccaagccggagtcggcttcgtcttcctggaacgggtgtgcgatcgaagcatagacccctatgttatctatggagtgaggaagcgagttggcagctcacgcaggatgatagcagcccctgaggagcagctgcgggttgtgcagcgttggttactggatcatgtgttcaccaatatgcacgtgcactctagtgctttcgcttatgtgaaggggagaagcgctcctatggcagccaggctgcacctcggggctaactggatgctcaaactggacgtgcgcaatttttttcacgccttcgacgaacgacaggtatacgatgtcctggcgggcacaggctactccgacttggtgcgcctccaggtggctcggatttctactagacacgttagggagtatctcccttggcttcccgagaaatacagagagtcccgttcccaggaaggtgcatccgccgcacggtttgctcataccgcggctgagatagatgcatttgagcttacagcgttacctcatgatggaggatcacggctcggatacctaccacaaggagcccccagttcgggtgccatctctaaccttctgtcacgggaacttgacagggacttggccgaactgggcatctctagaggcttggtttacacccggtacgccgacgacatcgcactgagcgctagtaccccgttttcaagaaaagaagcggaggcgctcatgcacgatgcttccagggccctgcgcaagcacgggttagagccaaatcatactaagacccgtattgtgcgccccggattgcccatcgagttgctcggggtgagggtcgatggcgaatacacaagggtcagtagaagagtacgggagaaaattgagttccatattcgagccatcgagaagtttggtcttgcagcccatgccgcccacgcaggtttcggagatgcaatcggctgtgcaaatcacgtaatcggcctggtcagatacgctcatgacgtcgaaccacagagagccggcgcttatttcgctcggattgaacgagccatccctgggctacaggttaggcctctgtga

SEQ ID NO: 9220 - RNA, 1194 nt, synthetic construct
  source 1..1194: mol_type = other RNA
atggagagcccgcacctttataggcgtaacgcaccaacggatacagaagccagcgtgatagacagagcgatccagttgatgtctctgcagtcacggagtggggccaccccaatcctaaccctcaagcaccttgctgtgcagtctggcgttaggctctcattccttgagagaatcgcagacagggaactcgatgcatacgacgttcacgaagtgaaaaaaagagggcgctcctccaagaggctgattgctgctccccacgacgagctgctgagggctcagcgatggctcctggataacgtctttgcccacgccagcattcacagcgccagctacgcctaccagactggaagatctgcaaaattgtgtgcgcagcaacatttaggcgctcggtgggctatcaaactcgatgcgaaggatttctttcaccagtatgatgagtttcaggtgtttaacctgctgcgcggctttgggtactcacccttagttcgcctggagatcgcccggatttgcacaagacatgtaagtaccgaccaggactggctccctgataagtataggcaaccgactcgtctgaggtcgataccagagctgcctccagctgaatacatgtggagtggacctgacctgattgacgtggaagcatatgcacacctgccacatagtcagggacgacgcttgggttatctaccccagggagcccctacctcaggcgcaatttctaatgctttggcttacgatctcgaccagtcgtttgagaaacttgcagaagctaatcgaatgacctacactaggtacgccgatgacattttcctgtctagctacagtatcttcgagcggcccagcgcggagcagatagtgcatcaagcccattccattttcgaacaacacgagttgcagcctcacgcccgcaagtcccggatactgacaccaggtcgacccatcgagctgcttggcatccgggtcgacggcgagtccacacaactacctaagcgcattaaaagcaagatcgaatttcacatccgcggagtcgaatcattcggggtccatgtgcacgcctctcattccggcttcagagagggtctggggttcgtaaactatctggaaggcatgatccgatatgccatcaatattgagcccgaaagaggaagaagatggaatcggaggctccggcatgccttatccgggcgtgtgtga

SEQ ID NO: 9221 - RNA, 1191 nt, synthetic construct
  source 1..1191: mol_type = other RNA
atggaatcccctcacttatatagaaagaatgcgccttctgacctggacccggcagtcgttgagagggccatccaactgtcacaggctcaagaggccgcaggagtggcgccaatactgtcgcttaatcatctggccgtgcaggcaaacgcccccctgaaagtactggaaagaattgctgcccgagctgtggatgcataccatatccacgagattcgaaagagagatcgggtgtccaagaggatgatcgccgctccaacacccgagcttcggcaggtacagcgctggttgctcgataacgtttttgccagggttcccgtgtcaccgtacgcctttgcatacgtggaaggtcgctctgcacctcaatgcgcccggagacatgtaggcgctacttggctagtcaagctcgatgtgaaagacttcttccatgagttcgatgaggcccaggtgttctcagtgctgcgcagcgttcagtattcggccctggtgtctttggagattagccgtatcgttaccagacatgtctccacccctcaggcttggctgcctaagaaatatgccagtactagcccacgccgcccaatgccagatgccgaactggtccctgacctctttgatcatgcagacgatgcgcctgagtacctgagccacccccagggagtgcgactagggtacctacctcagggcagtccctcttccggcgcaataagcaacatcttgtcccggcagctggacgaggaactcgctgctttagcaagtgcccgtgggcttactttcacacggtacgcagatgacataacgctgtcttccggtgaaattttcaacagggggagagctgaaaagatcctccacgaggcgaccgccattttgcacagaaataggcttacaccaaatcggcggaaatctaggatcgtgacccccgggcttcccttggaggttgtaggagtccgcgtcgacggtgacgaatcacggctgccgcgtcgactgagagacaggattgagttccatctccgaggaatcgaacagttcggctttgccgctcactccaggcacgtgggctttgatgacgtgctcggatttagcaactttctgtatggcctcattaggtacgctcacgacgtgcaaccaagcttagccgccgcctatttcgctcgcgctgatgcgcactttcccgcagcccaggtcgggagttga

SEQ ID NO: 9222 - RNA, 987 nt, synthetic construct
  source 1..987: mol_type = other RNA
atgtctggggtgtcctacgccttcctgcgccgagttgtcgagcgggagagtgacccatacaatatttataccattcggaaaagggatgggaaatcgctgagaagcattgccgctccttctgaggctctggccgccgttcagcgttggctgctggatcaaacttttgctagaatgccatccaccccttggagcttcgcttacgaaaaggacaatagctccgtcaagtgcgcccaggaacatctgggtgctacatggctgttgaagatggacttgaaagactttttccatcaaacagacgagcgtgacgtgtaccacctcctacgaaagtatcgctactcagaattagtagcatttgagcttgcacgcatcgtgacacggtctgtaagggatcctcaggattggctgccccccaaatatgcgtcaaccgttgaatggcgacgcggagccggatttccgtacggcaagagggtgcggctcggatatttgccccagggtgcgtctacctccggggcaatcgccaacgtccttgcctccggacttgacagagccctacacgagctcgctatctcccacggcacaacgtacactagatatgccgatgatttaacctttagcggcggtccatatgaccgggcctcagctagagagtttgcaagcagcgtcactagtgcaatcttcgcagctggctacactcctaataagaaaaaaacgcgcttgatcgcccctggaaggcgtctggaagtgctgggggtgcttgtgaacggcagtaagctcagggtgcccgctagattccgaaagcgggtggaagcacatctctacgggctcgagagccacggcgttatgggccacctgcattctcgcggtttcagagacatagatggaatgtctaggcacatactgggcttaattgcccatgtacacgcggtggattcatcgctggcgaaggtctattacaccaggttcgccagtgcattcccaaacccctga

SEQ ID NO: 9223 - RNA, 1155 nt, synthetic construct
  source 1..1155: mol_type = other RNA
atgaatctgtccccgcatctgtaccgcaaaaacgctccctctggattggacggcgccgtggtagagagggccattaagctcacctccgagcagagagctaggggtgtggaacctattctgactctgaaccacctcgccgccctttcaggaaccagcggcaattatctccatgccgtcgtggaccgccaagtggacggttacgacctcttcaatattcgcaaacgagcatccgggcggcggcgttcaatagctgtcccacaccccgaattggccaaggtgcagaaatggctgcttacagatgttttcagcaaagtcactgtacactctgactgctttagttacaggcacgggatcagcattaaggactgcgcaagtcggcatcttcatgctgagtggatgttaaaagtcgacctaagtgacttctttcaccagatagatgagagacacgtcttcggggtggcctcgtccctgtatgaacccctagtggccttcgaagtgtcacgaatcgtgacaagacagcctcacgtgggccaaccctggcttccgaagaagtatctgcggacagttcaccagattccaaccaagtcttcttacccttataagcgatcagaaaagatcggctacctcccacagggggcatccactagcggctatatcagtaacctggtcgctaaacccctggataccgcccttagctctatcgcggcggcactggagttgacctatactcgttactccgatgacctggcctttagctccgctcgcgtgctctcaagaagtcaggggctggatgttttgcgcgaggtcgcaagaatggtgggcaaaacgggctttcacatcaatgagtctaagacgagattttctacacgtgccaacggcctgaatctactgggactgaccgtagatggggaatcgctcaggctccaaaggcatctgcggacaagaattgagtttcacgttagtggagttgaaaggttcggagctaacgcgcattcaattcactgtggattccgggatgtgctgggcatgagccatcacatcctgggtcttttggcttacgcaagccatatcgagccagccaaggcctccatatggcgcgcaaggttagatgccagccgagacgcattgctcttcggtgcgcctttagctgagtga

SEQ ID NO: 9224 - RNA, 1029 nt, synthetic construct
  source 1..1029: mol_type = other RNA
atgttcatatccaagaggcctatccctgacctggagcaccttgccctggctgttggactgcggcctgagtacctgagagatgtcgccgctaggcgctctgacccgtatcatgagttccaggtcgccaaagctcgaggctccgttcggaccatagccgcaccagagcccgatctcgctaaggcgcagagatggattctcgataatatgttcctcggttctcacgctggagggcgcagcttcgcctataggaaaggggtgagcgtaaaggactgtgcaactgttcacgtaggggcaagatggctggtcaaactcgacttacaggacttttttcacagcatcgattccaggagagtggcgcgtatcttccgaaaggtgggctgcgacgaggtgacctcggtgcaactggctcggctgtgcactcgtcggaactcaggcagtattggacagctcgccggtccaaccccgcttgattatttgccccagggcgcccccactagtggaatgcttgccaatctggccgccgagaacctggacaggtcgatgtcccgcttagcatcacggacagccctgaaatacacacgttacagcgatgatcttacctttagtagcgaagaggacttttctagagcaagcgcatttgcactgattcggggtgctagaggagaaatcgcccggaaccacttctcaatgcacgaagataagattaggatcagtcctcccggctcccgcctcgtagtcttgggattgctggtcgactccgatagggttcgcctgcgcggggactttaaaaagacacttaaatggcatgtgtacggctgtgctagattcggccccaatgaatacagtgcttctcgagggtacgccagcgtggaggactatcagagccatgtgggcggtctattcgcgcatgccgtggatatcgaaccagagtgggctgccccattgcagcgatcttggaaggaactaacggcggcacaagccgaagccgcttctgctgggtccttagtggtgtcagcatcaggcgactga

SEQ ID NO: 9225 - RNA, 981 nt, synthetic construct
  source 1..981: mol_type = other RNA
atgcttatcaataagaggcctattcctgacctggaacatcttgcgttagccgtcgggttgcgtcccgcctatctaagagacgtcgctgcccgatcgatcgacccataccgtgaatttcaggttgccaaggcccggggttccgtgaggacaattgcagcaccagagccggatctcgcaaaagctcaaaggtggattctggagcacatgttccttggctcgcacgccggagccagcagtttcgcatatcgaaagggtgtgtccgttggggattgtgcgagggtgcatgtgggagcccgttggctggtcaagctcgatctgaaggatttctttcacagcgtcgacgcacggagggttgcgaccatatttcgcaaggtgggctgcgatgacgtgacgtctgttctgctagccaaactgtgcacaaggagaaaaaatggatctcggggtactctgacaggagccaccccactcgattacttgccgcagggcgcccctacctctggtatgctggctaatcttgccgctgaaaacctggacagatcaatgagtcggcttgctagtcggtacaggctcatgtacacccgctattccgatgacctcaccttctcctcaaacagagatttctcacgcgcttccgctttcgcgttagtcaggagcgcccgcggcgagatcgcaagaaaccattttagcatgcatgaggacaaaattagaattagcccacctgggagccggctggtagtgttgggcctgctggtggattctgagcgagtgcggatgcgcggcgacttcaagaaaactctcaactggcacgtgtacgggtgtactagatttggacccgacaaatatagtgcatctttgggcttctcctcaataagcgagtaccaggcacacgtaaatgggctatttgcccacgctatcgacatcgaacccgagtgggcaggagctctgcatgcccgatggaaggaaatcacagctccccgctga

SEQ ID NO: 9226 - RNA, 981 nt, synthetic construct
  source 1..981: mol_type = other RNA
atggaactaacaaacctgcagcagctcatgcagaaaacacaggtgagtgaaaccgctttgtttgatctcatgcgcggacaggttgatccttatactgagttccggattcccaagggccgtaatggggccttcagaattatagctgccccctcaagggacctggggaagttgcaacgaagcatcctggacaatatcctgagcgctcctcagagagcctcccaatctttcgcctatcacagaggagtctctattacggactgtgcacgcgttcattcaccggcaagatggctcgtgaagctggacttaaaggacttttttggctctgtgtctgccgtccgagtggccgctgccttttccagtattggacttactgaagaattcagttcacaactcgcgttcatttgcactcgtcgtgcaggggaagagggtaccaggttccttccacagggtgcgccaaccagcggtttgcttgcgaacttagtggcagccgctttagacgagtcgctcgtgctgtttgctcagcacctgaacctgcggtactcgcgctacagtgatgatctgatcttctcctccagtggaacattctccaggagcaaggccttgcgcatagtcaggcaggtgcgcagcaaagtcgcagctcacggctttaccctaaatgaggacaaaatccgcatcagaccaccgggctcccgacttctcgtgctcggaatgctggttgactcagagtaccccagactgaggcacgatttcaaacggcttatcgagtggcatgtatatggcagcgagcggtttggcatcgccgaatattcagcgtctagagggtttgcatccattgagagctacctgcggcatgtagatgggctgctggcccacgccttggacgtccaacccgattgggctgcacctatgcggcagaagtggaacttcataagctctgccccagctggcggtctgctaaggcctcctagggaggtgccctga

SEQ ID NO: 9227 - RNA, 1230 nt, synthetic construct
  source 1..1230: mol_type = other RNA
atggagctgctgccctttaatcctattgtcaaaccgtctcgcgtggctccagcgcaaattaacagcttacgctaccttctcagactccacaacctggagaatcctgaggagagtatcctgtacccatccgcccatgtggccatatcatcccacaacaccgccgagatttggcttgatcacgagaagacaactagcctccgtaaggtacccttatactataaatatcgatctgtgcctaagcacagtggcggcaggcggattctgtcagaacctagtagctcactcaagtctctacagcggtggatcctcagacactgtttcaccgacgatatggtgtcgccagccgcctatgcgtatcgacccggcagaagcatccaggactgcgcagctgtgcatatcggggctaagtggctcttgaagctcgacttaaaagatttcttcgggggtatttccgaagcccgtgtgtatgaactgtttagggctatcggatacaaggagctggtcgcattcgagctggctaggctgacgacttttctccctgacaagaatatcaggagaaatattcaggccctatacaacgaaaaatttgagatcaccccagccgcccggaactacacaaaactcgaaatcagtatcgacagctcctcaggcccgtaccctagatatcgcgggagcgctggcaagataatacggggagttttgccccaaggcgccccaacgtccggcatcatcgctaatatttgcgccggggaactggataaagaacttgccagtctggcactatataatggattgaggtactcccggtattgtgacgacctgtttttcagccccagacccgaccatgaacatttcgataggtcttttgcaggattaattattcgagacgtcaatagagcagtgctgaaacacgggtttcgcatcaaccagggtaaaactcgcgtggttccacccggatccaaaaagttgattctgggccttcaagttgacgattctgtgaggttggatactgctttcaaaaagaacatagattaccacatacgagggatcgcaaagttcggattgcagcagcatgtcgcacataccaaggggaccccacctcccgttctgtctttcctgaatcacctgcagggtcttattgcttttgcgaaaggcatcgagtactggtacggagagacacgggagacaaacctgaagcgtgccctttcagtaggtgaagtcacacgctga

SEQ ID NO: 9228 - RNA, 1068 nt, synthetic construct
  source 1..1068: mol_type = other RNA
atgtccaacagggggggcagtcgcaatctgttccgcgaaatccagaaggtgaatcatgattgctcgaagttcggcgtttctccgatatatactttgacccatctgtgcgttgtggccaaggtcgcacacaaagacgcgagggatgtcatcttcaaccatcaggctcattataagagcaggaggataaagaagaaaagcggcagcggctaccggaccatctatgaaccaagtccccagctgaagagccttcagaaaacaatcctgcataactgtctccctacggccccagctagtgagttgtcctttgccttcgaaactggccggaatacactggcagcagcagggcaacacgtaggcgccagagcgatgatccacgtggacgtgagagatttttttacctccgtggcctctaaacagatttactctgtgtttcacaatctcggatatcccgagctgctgtctctcgaaatggcactgatttccaccgtagggcacacggtcactctgcgccaattcgtggaagacggcctggtgtacgagattctagaccctggatatctcccccaaggagcttccacatcaggtaaactgagcaatatggtttgtgctgacttggatgagaaactgtccgcgatctcacataaatggggaggggtgattacaaggtacgccgacgatatcacttttagttcaccagtccccctttctcgtagcaagtgtacatcaatataccacgatctccgtaaagctctgcttcagagtgggttcgttaccaactctcggaaaactaagatcttccctaacgtccgagagttcaaaatgttaggtttatgcgtcggccaggagaatgtatggctcaacaagtcgtataaaaagaccctcagagcacacctatacagccttgagaagtttggaatttttaagcacagcgtgtctcggaacttcgactccgacttagagtttatgtcctacatgtggggtcactacgcttattgcgccaatgtggataagaaattcgccggggagttgagatcacgactggaagccgccggaattcgcaagatttga

SEQ ID NO: 9229 - RNA, 975 nt, synthetic construct
  source 1..975: mol_type = other RNA
atgacacacctctgcgttattgcaagagtctcgcatgaggtcgcacgtgacgtgatcttcaaccatcgtgtgcattataagagcaggcggctggcaaaacggccaggccatgggtacagaactatctacgaaccctcagctccacttaaaagtttacagcgcgctatcttgcagaattgtctgcctaaagcgagccttaccgacctgagcttcgcctttgagacaggcagatcaacgtctggagctgcacggcgacacatcggagctagaagtatgattcacgtggacatccaggacttctttgactccattcgatctaggcgcgtgtattcagtcttcgctcaactggggtacccggaactgctggccttggagatggcggtgatagccagcgtaggccacgaagtggccctcaggggagagaacgataaggggttcacctatgaatttcttgaagaaggccgcttaccacagggtgcctccacttctggaaagctatccaacctcgtgtgcctccgcttggacgatctcctgctgcagattagtgatcgatggggtggtgtagttacacggtacgctgacgatatttcgttttctacccctcgccccctttccagaaaggagtgtgccagtatatactttgagatccaagatgccgttcatcgttccgggttccagctgaaccctagaaagactaggatactgccccggggcaatgagtttagaatgttaggcctatgcgtgggacagaagcacgtctggctgaacaaaaattacaaaagcgcaatcagggctcacctgtatggggtggaagagtttggaatatcagcacacgccatttctcgggggtttgatagcgactatgagttcatgaatttcatctggggccactacgcctattgtgtcgacgttgatgtgaccttcgcgcgcgaattgaggtccaggctcgagatcgccggcgtaagccgaatttga

SEQ ID NO: 9230 - RNA, 1005 nt, synthetic construct
  source 1..1005: mol_type = other RNA
atgacccataatgtggtaccggtctatacgctggcccacctctgtgtcattgcgaaagtgccatacgaggccgcacgcgacgttattttcaaccaccgagctcactacaccagccgcaagctcgtcaaacgctccggtctgggattccggactatccatgagccgagtccccagctgaaatctctccaacgggctatcttgcagaactgtttgcctagggatgcaagttctgctttatcatttgcctttgaagcagggcggaatacttctcaggcggcccgacaccatataggggctagggcaatgatccacgtggacattcaggattttttcggatccataggaagcaggagggtctacagcattttcgctaaactcggctacccagagctgctggccttggagatggcctttatcacatccgttggtcacgaagtgacactgagaggccctgatgacagaggcgtgccttatgaattcttaaaggaaggccggcttccccaaggtgcctccacctcagggaaaatcagtaatcttttgtgcagagaacttgacaatttactcagcgagatcgctgtgaagagaggtggcgtggttacccgatacgcagatgatatcagcttttcgtggcctaacccactgattagatccgagagtgggactattctggctgaaatagaccgggcagtcagtgaggccggcttctctctgaaccggaagaagacaagggtaatcccaaagtctcacgagttcaggatgctgggcctatgcgtaggacaggaaggaatctggcttaaccgcaattacaagtcccatatacgcgcccacctgtacggcgttgaggagttcgggctatctgagcatgccatttcccgtgggtttcactcagacctcgagtttatttcattcatctggggacattatgcttattcagcctatatcgatcccagctttgcgagcgaagtgagagcacgtctggaaatggccggcgtgcccgacgtgtga

SEQ ID NO: 9231 - RNA, 1068 nt, synthetic construct
  source 1..1068: mol_type = other RNA
atgaaaaggcgaaatgcgacggaagcactgattcggagtgtcagacggatcgaaaatgactgttcccgcagcggcgtgcttcctatttttaccctggtgcacctgtgcgttgtgtccaaaactccctataataccgccagagatgtgatcttcgatccgagggtacattactcgacccgccgcatggccaaaaggagtggttcaggctttcgctcaatccatgagccatctcctcctctgaaggcactgcacagggccattctcgagaattgcctcccggtgagtggcgttagtgacatggcttacgcgtttcaccctggccgagatacgctagccgccgtacgggcacacgtaggagctcagtcaatgattagagtggacatcaaggacttctttggatctatcgggacaagaagagttgcagccatttttatgaatctgggttaccccgagttgctggctcttgagatggccttactgactacagtgggccacgaagtgattctgagaggcgagcacgacagcgggccaatatatgagattcataaggaggggcggttgccacagggagctagcaccagcggtctactcgccaacttgatatgcgcacccttagaccagcttctgagcatggtggctctccaatgggatggggtcatcacccgttacgcggatgacatctgtttctcatcccacactccaacatctcgtgaaaaatgccaggatatactgcgggacatcatttgtgccatcgaatctcaggggtttaagctgaacagcaagaagactaggatacaccccaaaggtaaagtgttccgcatcttagggctctgtgtcggcgagtccgacgtctggctgaaccgaaactataagcggtctttggagtctcatatccatggagtcaagaagttcggactcatcaaccattcctactcgaggggatacggctccgatcttgaattcattgagttcatgtggggccactatgcttattccatacatgttgatcccacattcgggatctacctcaaaaatcagctgcaagaaaacaacatcgtgagcatttga

SEQ ID NO: 9232 - RNA, 1107 nt, synthetic construct
  source 1..1107: mol_type = other RNA
atggtcgggatcgccagtccccatgcctatagtgcagccctgtcagctagggggggtagccctcagctgttgcgcgagatacgtgagatcgacaggctgacccgctcttcacatgtaattccgctatatactttaactcatctctgcacagtggccaaagtcccttacgaggccgccagagatgtaattttcaaccacagagctcactactctgcccgtaagctgaagaaacacagtggaaaaggctttcggaccatacacgctccctctccacatctcaagagcctccagctggctatcttggagaattgcctacccaaacggcccacttctgatttgagttacgcttatgagccacgccggaacacccttgaagcagccagaagacacatcggcgcaaagacgatgatccagcttgatctcgccgacttctttggctccatatcaagcaccgccctgtacaagacatttgttgggttcggctaccctaaactgctggcattcgaaatgtccctgattagctctgtgggacatgaagttacgctgcgtggcccagatgagaaaggagtggtctatgaactcctgaagtccggtaggctccctcaaggagcgtcaacctccggtaagctaagcaacctggtgtgtattggcctggaccagctcctgggggaagttgctacagcctggggaggcattatcacacggtacgcggacgacatcacattttccactggtcacgcagtgagcagatcggagtgtaatagcatattgagagacttaaagtccgctatccacgtgtccggcttcactatgaatgagcggaagacccgagttacccgcagtggacaagagcaccgagtgctcggactttgtgtggggcaggattctgtatggctgaatcgcaactataagaattcgattagggcacatctttacgggttggagaaaaacggccttgctgaccacgggattcacagggggttttccagcgatcaggaatttatgtcattcatctggggacattacgcctattgcgtctatgtggatccagacttcggcgcagaaatgcgagcgaggctggagttagcgggtgtggaacgggtctga

SEQ ID NO: 9233 - RNA, 1113 nt, synthetic construct
  source 1..1113: mol_type = other RNA
atggtggaaaagatcgcaccgcatgaatactttaaggagcttagcgagagggggggctctcggcagctgcaaaaagtgattacgaaggtaaaccaggaatgtgctgaaaataatgtcctgcccgtgtatacattgaatcacctttccgtcatttccaagatccctttattcgtgaccaaggacatcatcttcgaccacagtaaatactacacaaggcaaaaggtggcgaagagatcctctcccggctttaggacaatttatgcccccaagttccctctgaaacaactgcagcgtgctatattgtctaactgcctgcctaacaatggacaggttggcatctcgtatgccttccagaagggatcaaatgccataagtgcttgccgacagcacctgggtgcacggggaatggttaaactcgacgttgctaacttttacgggtccatctctaccccctccatttaccgaatcttccacagcttaggttatccagagctgatgtcaattgaaatggccctcatttgtagcgtggggcaagtagtggagatgcgccccgatgaccagagcggaaagatctataaaatcaagaaacgggggcgtctcactcagggatcaccagcctctggtctgctgagcaatatccattgccgcaagcttgatagaaccctagagttgatagcaagagatcacggtgccatcgtgacacggtatgctgatgacattactttttcaactcgggagccaatgtcccagtacgtagtcaactctataattggcagtagtatccatgcgctcaaaaggcagaggctgaacttgaaccgccgcaaaacgtccgtcattagaaacgggcgcagcttcaacctacttggcctgagggtggcagatgacggcctgcatctcaattccggatataaatctaccgtgagaaatcacctgaagaaggccagcctgcagggggttagtaaatactccttgagtctcggctacagctcagacttagagttcatctttatgctgtggggccattacgcatacagcatgggcgtcgaaaaggattttgccgctgagatatcgtcaaaactacacaccctcgggattcctcgacttactgcctga

SEQ ID NO: 9234 - RNA, 1134 nt, synthetic construct
  source 1..1134: mol_type = other RNA
atgtcagtgtcatctcacgctttcacggagggactgttcgccgcaggcggttctcctgctctactcaggcagattcacagggtcaattttgactgcggtaacgccggggtcaccccactgtacaccttgggacatcttgcgttcttatctgcagttccacatggggtgctgcgcaggatgctgctcgaaactaagtcacactatactgaacagcgcctcgcaaagaaaaagccaggtactggatacagaacaatccgcataccaagtccggcactgctgaaagttcagcggtttattctgggcagatgccttcctcctggtccctcctcccctattagttacgcgtatactaggggacggggaatccgcgatgccgcagaacgacacgttggggccagaaccgttatcaagttagattacagcgacttcttttcctctgtgggcagcaaggcggtatatagagtcttcgagagtgccggctaccccgagcttctggcttttgagatggctatgctttgtacttatggtgccactatacagctcaacaatgaggtcaatgggaatagaccttataagaacgtgtccaggcggtttctagcccaaggggcccccacatcaggagctttgtcaaacttcgctcttcgatccctggataagagcttgggcgagtttgagttgagcggcttcacattaacaaggtatgctgatgatatcaccatcagctcaccgcgcaccatgacccagaaagaagtaggctcccttatccggaacatcaccgaactgagctcgacgtacaatctgtcgctgaacaaatctaaaacacaggtgctccggaataagaattctttccgtatcctcggactctctgtcacatctagcggcgtggggctcacccgaccctataagcgtagttttgaatcagagctgttcggcatcaaaaaaggaggcttgtccaaccaggctatttaccgggggtacagcagccctatggactacattgcattcctgtgggggcatgtggccttcgccaagggaatagacccaatttggtcccaacgtatgagtgaaagactggagtccatgggggtgccctttatcgacgccattggcgtgtttggcagcagtctgccctga

SEQ ID NO: 9235 - RNA, 1086 nt, synthetic construct
  source 1..1086: mol_type = other RNA
atggaggcgcagcaccgcggattggacaaggatacgattgaggcatccatccgtcagtaccagtcaatgttggactgtgggatcctgccgatcttatcactcaagcatttcgctaaactcgttaacgtggactacagctatctgcggaggatcgtgggcagaaagattgatccatataaaaccattgagcagcagaaacgatccggcggtaccaggcttattagcgcccccgagaagcacctccaggatacacaaagatggatcctggattatgtcttatccgatgctaagactcatccccttagtttcgcctacgaaaatgggaaatccatcttgaagtgtgctaaaatccatgtaggaatgcgatggatgattaaactggacctgcggaacttctttgatagcattaaagaaaaccggatttacaaagtgttcagggaactcggctaccctagtctggttagctttgagatgacccgcatctgcacaaggtcacaaggctttaactcgatcaaaaaggtcgcaaataagtatcctgttatccatacttacctgtatggagcctccgggtgccttccacaaggtgcaccaacaagtgggaagttggcaaacatagtgtgttatggcctagatgaggagattaaccggcttgccataagaaatcgttttacctactctaggtactctgacgacattttcctctccacatgtgattcttttaatcgcaagaaagctcaacagataattagctgcgtgaacaatttcatccataaggaaggattctctctacagaaaaagaagactcacattataactcctggggcgagaaaaatcgtcctgggtctgaccgtcaccgaccaaggcgtcaagcccatgcggggatttcgaaagcagatagagagtgacattcacggcgtgaagaaattcggtctggtgcagcatgtgcagcaccgccactatcacagcatcttttcattcatcaatcacgtggatggctgcatagcctttgtatacggaatcgacagccagctgggggacagatacaagaagcagtggggcgaagccctctctaggtataatctgtga

SEQ ID NO: 9236 - RNA, 1110 nt, synthetic construct
  source 1..1110: mol_type = other RNA
atgtcgcctccacacctgtcatcagcgaacgaagaaacttcatgcgaggaagctgcaattgttagccgaatgcgggagatcagtggcatcatagagtccaacgatgcccatcccatcttcaccctgaatcatctcgcgtacgaggccggtgtctcctacggcttcattagatcggtggtcgccagaagaatcaatccctaccgccattacgagatgcggaaaagaaggggaggctatcgtgttatctcttccccagtacctgacctagcacgggtccaacgctttatcctgcggaagatcctgtctgtgcaaagggacaatccagctagctacgcctatagagaaggtaagagcatcaaggattgcgcatcaaggcacataggaagccgctggatgatcaagatggatatcgaagacttcttcgggagtgtgaattctaagcaggtgtactttctgtttagggacctgggttatagctccttggtaagcttcgagctttctagactggtgacatggggctgttctcccactgcaatgaattggcagccttacgactacaagatctcagattatcgacatagcatagtgggatccttacctcagggcgcccctacaagcggcaaaatagctaacctaattgctagggatcttgacaagtctcttcacggattagcaaaaacctatggcgccatttacacccgttattccgacgatattatattttccttccggcgcaacattacgaggcccgaggctcgcgtgatcgtcaagaagtcctatgatctcatgagggccaacgggttctctccgaacctcaaaaaaaccgccgtaattcccccaggagcacgaaagattgcggttgggctcgtggtgtcagacaacgtgtacttgagtcgcgagtttaagcgacgtactgagaggttggttcacggggtctataaggagggcgtggtcccgtttagtgaaagagccaagttccgcagtccaattgggctgattaattacatcgaaggaagcctggcctttgctgcccacattgacagaaaatgggctgaagggcagcagcagaaactgctctccagtatgcggaaaaatacaaaaatccggtga

SEQ ID NO: 9237 - RNA, 1023 nt, synthetic construct
  source 1..1023: mol_type = other RNA
atgcgctcagtggaggagtggaaacacttcttcctgtctcgaggaatcgccaatgaactgatcgagcgctacctgaagcaaatttccctgctgtccaacactaaatccccaatcattttcgaattggagcacctgtccctactggttggggtcaaatatgaagtgttgctcaacatgatacgagggtcaagcagctattatcgtacctttagcatcaaaaagagggctggaggcgagcgggtcattgaggcaccatacccctccctgttgcagtgtcaaacgtggatctatcaccagatactgttaaagagccctgtccatgattgtgcgcatggctacgtccccgggaggagtatctttacaaacgctaccgtacacctggggtgcaagaccctgctcaaaatggatttcaaaaacttcttcccttcagtgggtataggttgggttattaagttcttcagcgagctgggctacgataagaatgtggcttacgcacttgcagccctctgctgtaatcgagggcgtgtggttcagggcgcctccacatcaccctacctcaccaatattctcctatacaacctggatgaccggcttttcaagctttcttcgagatccggactcaggtacacaagatatgcagacgatctgacttttagcggaggttacatttctacgaaattcgtggacttagtcagttctatggtaagcgaatttggcttggtgatcaacgattcaaagacaagactgctgatcgaaaagaataagaaattggtgactggcctatctgtgagtggaagttctcttcgcataacccgcgaaatgcggagatcgattactaaggacgtgttctatattgagaagtacggcctctttagccatgtttctcagatgaagatcaaagaccctttttatcttgagagcattgcgggaaaagtggctttttggatccaggccgaaccgctgaattcctttgccctccggtgcagggacatcttagccggtaactttagtagagtagagtga

SEQ ID NO: 9238 - RNA, 1083 nt, synthetic construct
  source 1..1083: mol_type = other RNA
atgaaaaaaatcgacgagtggaagcggttttttgagaagaggggggtgatccccgaactcattgaaaaatatttggaccagatcgctcgcttaaacaagagtggggcaccaatcatttttgaggttgagcatctaagtctcttgatcggtataaagtacgatacactgctgaaaatgatacacgggggcagcagtttctaccgaaagttcaccattaaaaagaaaagcgggggagacagagtcatcgaggccccctacccaagtcttatgcagtgtcagaactggatctatgaaaatatactcctcaagtgcgaggtgcatccgtctgcccacggttacgtgcgggggaagagtatcttcacaaatgcgtcccctcacctgaacaggtcctcactgcttaagatggattttgagaacttcttcccctctattaagattggctgggttgtgtctttcttctcccgtctcggatacagcaagaaagtatcatttgctttggcctccctgtgttgcaacgatggatgcctggttcagggtgccccaacctcgccatatttgaccaatatcctgctgagaagactggacaaaaagctttttcaactggctgccaagtctgatattgcttacactcgctatgcagatgatattacatttagcgcgcagctcattccttcctatttccctggattggtggcctctatctgtgcccggtacgcccttaagatcaatagcaacaaaacgcagttgctggtcaacaaaaataaacgggtcgtaaccggcctttcagtgtcgggcgagtcactcaggattactcgtgaattaaggcgaaaaatcaagcaagacctgttttacatagaaaaatacggcttactgagccatatctcctcccaaaagatcaaagaccccttctatctcgactctattctgggaaaggtcaatttctggctacaggctgagcctgctaacgaagaagcactgtcatataaggaaatactgctgagctactttagcaattctaaggtggacgtgctccttaaacgcaagtccactagacgcagcgtcggcctactggcagcagagtga

SEQ ID NO: 9239 - RNA, 1026 nt, synthetic construct
  source 1..1026: mol_type = other RNA
atgaagaaacttagcgagtggaaacaatttttcttgtctagaggactgagtcaagaactgatacaacgctatcttgatcagataaaaatgctggcaggctcaggatctccggttatcttcgagctggagcacttgagcctgctggtcgggattgattcaaagacagtgctagccatggtgcatggctcttctagtttctaccgagcatttaccatcaagaaacggtccgggggggagaggatcattaatgccccctacccaagcttactccagtgccagaactggatctatacgaacattctactgaattgtcccgtgcatgataatgcccatggctatgtccgcggacgctccatcttcacgaacgccagcccccacctgaattgcgctgtactccttaagatggacttaaaggatttcttcccttccattggaatcaactgggtgataaatttcttttccgatctcggttatagtaaagtggtcgctcaacttctggcagcgctctgttgtaatagaggcgccctggtgcagggtgctagtacatcaccatacctcaccaatattctgctccgtcggctggacgaacgcttcagcaggctcgcccagaagaataacctgaattacactaggtatgccgacgatatgacatttagcggtggatacatttccaagaatctacctcagcttatttcctctattaccctcgactacgggttgaccgttaacgacgctaaaaccagactgatgatcaacaaaaacaagaagatcgttactggcctgtctgtggctggcactagtttaaaaattaccagggatttgaagcggacaatcaagcaggacgtattctatattgaacggtacgggtttctctcccacgtgtcacagcagaagatcactgacccattctaccttgactcgatctttgggaaagtcaacttttggctgcagacagaacctggcaacgcggaggcaatcagatgccgtgacatcttgcaccccaactttggtataagccgactgtga

SEQ ID NO: 9240 - RNA, 1029 nt, synthetic construct
  source 1..1029: mol_type = other RNA
atgaagaagataaacgagtggaaaagatttttccttagtagaggtattcctcagaagacaatagaccaatatctggatcagattaagttgctaactgtgagcaattcccccataatctttgaggtagagcaccttagtctccttctgggaatcgaatatctgactattcaggctatgatcaacgggacaccgaagttctaccgcgagttcatcattaagaaaagggcaggaggaaaccgaacaatacacgctccttatccaagcctgctgcattgtcaggactggatataccagaacatcctactcaattgtgccgtgcataataatgcccacggctatatccccaagaggtccatctttacgaacgccagcccacacctgaattgcaaagtcctgctgaagatggacttgaaagactttttcccctccatcggtatcgggtgggtcgttaacctctttagcggcctgggctattctcatggtgtttcatacgctctcgcctcattatgctgcaacaatggatgccttgtacaaggggcgtccacgtccccttatttgaccaatgttctgctccatggcctggacgaacggttaaccaaacttgccagtaaatctaatctgaaatacacccggtatgccgatgatatgaccttctcagggggatacattagcaacaaaatgcctgcgttaattgaatcaattgtcaatgactacgggctggtcgtgaatgccacaaagaccaaactgatgatcaacaagaacaagaagattgtgactggcctctccgtggcagcagatgctttgagaatcactagggagctccgacgcagcatcaagcaggctgtgcattacattgaacgttacggttttctgtctcacgtgtctcaggagaaaattaaggacccattctacctggatagtatcctcggcaaagtgaatttctggctgcaagcagaaccccactcgtctgatgcaaaaaactgtcgggacgtcttgctaccatatttcggcaagaactaccaggcctga

SEQ ID NO: 9241 - RNA, 1080 nt, synthetic construct
  source 1..1080: mol_type = other RNA
atgaatgaggccgtcgttaagacctggagaaaacattttgaaagacgcgggatcagtcgagagttaattgaaagttacctgccctacattcagaaattgtgtaaaacctcctctcctgttatctttgagtttgaacatctctcgctgctcataggggtggaacagcatgagctgcgtaaaatggtaaacgctccacacgctttctacaggtccttccagatcaaaaaaaggagcgggggtttgcggaaaatttgcgccccttacccatccatgttaatgtgtcaggattggatctataacaacatcctcatcaacaaaccggtccacagcgcagcccatgggtttgtgcccggaagatctatctttagcaatgccagtgcccaccttaactcaaagtgccttatgaagatggacttgaaggatttcttcccttccattccaatcaattgggtggtgaactacttcctgtcattgggatatgcagacaacgtgtctttctatctggccgctctttgctgtagcgagggtcgcctagtgcagggatctagcacatccccctatctgacaaatattctgctgaagaatctcgatgagcgaatctcgctgctggcaaaatcatacaacctcaattttaccaggtatgctgacgacctaacattcagcggcgaatacatcccgcacaagctgattggggtcgttactaagataattgttcagtacggactggcagtgaacgataaaaaaacgcggctccaaatcggctccaatcaacgcatagtcactggcctgtcagtagccggttcaatgttggctgtcccccggaccttcaagagggaccttaagttagaactgcacttcatcaagaagtatggttatggcagtcacgtgtctaagatgaagatccggaatccttactacatagagagtctaataggcaagctcaacttttggctccaggtggagccatctaacatggacgcgctgtccgggattaagcttctcaaaggcattcagcaaggcgagattagcttgctgcaaagatccgtgggagatagcgatcagcttaatctgcatgcgtga

SEQ ID NO: 9242 - RNA, 1047 nt, synthetic construct
  source 1..1047: mol_type = other RNA
atgactaagtctgtcaaggactggctgaaacacttcgagaggcgaggtatatcacgggatctcgttgaatcctacctgccgtacattaaaaagctgaatcaaacatcttcccctgtcatcttcgagttcgagcatttgagcttactgataggtgtggaccagcatgaacttcgcaagatggtgaacgcccctcacgccttctaccactcctttcagatcaagaaacgcagcgggggcatgaggaaaatccacgcaccgtatccctccatgctcatgtgccaggactggatctacaaaaatgtgttgatcaacaagcccgtacactcagccgctcatggcttcgtaccaggccgtagtatctttacaaatgcgagcgtgcacctgggcagcaaatgcctgatgaaaatggacctgaaggatttttttccatcagttcccatcaattgggtcatcaactatttcctgagcctcggttatgccgataatgtctccttttatttaggggccttgtgttgttgcgagggaagattagttcaaggctcggcgaccagtccttatctcacgaatatactcctgaaaggtctggacgagcggatctctttgctggccaaagcatacggactgcgctttacaagatacgccgatgatctcaccttttcaggaaactatatcccccataagcttataggcgtggttagtgaaattattgtccagtatggcctgcgggtgaacgacaaaaaaaccaagcttcaggtaggggctaatcaaaagattgtgactggactatccgtgtctggcaatgcactcgcacttcctagaaaattcaagagggaactgaagatggagctgcacttcattaagaagtacggatacgtgtcccatgcttctaagaagaaaattaggaacccatactacattgattcggtgattgggaagttgaacttctggctacaggtggagccagctaacatggaggctcttagtggactggaactcatgcgagggatccagctggggcatgtctctagcctacagagccacgtgtga

SEQ ID NO: 9243 - RNA, 1023 nt, synthetic construct
  source 1..1023: mol_type = other RNA
atgaaaaaaatatcctacgagagttggagaaagtattttcttagcagagggatcagtcccgactacattcaggcctatctgagctacattgagaagctgagctccacatcttcgcctgtgatctttgagttcgaacatctctccaagctgatcgggattgagtacgacgcccttaggtccatggtgaattcaccatcttcatactacagggtcttcaatatcaagaagcgggccggaggccttcgtgaaatacatgccccctacccaagcctcctgatgtgtcaggattggatctatcgaaacatcctcttatcaaagccggtgcacgcagcagcacatggcttcgtaccttcacgatccattttttccaatgctagcaaacacctggggaagaaatgtctactcaagatggatatcaaggactttttcccatccatcaagatcaactgggtgattaagtatttccagactatcgggtatgccgacaacgttagcttttatctggcttccttgtgctgcagcgacggcgcactggtgcaaggctctagtgcgtctccctacatatctaacctgttgctgtacggtctggatgcgcgcctgagtcgtttagctaaaagttacggtgtcgaatatacacggtatgctgatgatttgaccttctcaggggactatatacctcatttctttatcggattcgttaccgagattgtgggtgattacggactttctgtcaatgaaggcaaaactagattgaagattggagacggtcaaaaaatcgtgacgggcttaagcgttgcaggagagaaactaaaaattccccgcgagcacaaacgccggatgaagcaggaactccactttattaggaaatatgggtacctctcgcacatggccaagcagaaacggagggacccattcgccctggaaagccttctgggcaggttttcattctggttgcaggccgagcctgacagttccgatgctcgcggcggagtagagtacctcaagtctataagatggctgtga

SEQ ID NO: 9244 - RNA, 1035 nt, synthetic construct
  source 1..1035: mol_type = other RNA
atgaataataacacaattgtgaagaactggctcggctattttcgacaacggggcgtgtcaggactgcttattgaggtctatgccgagtacatcaaaacactggttgggaactccgtccctgtgattttcgagttcgaacacctgtcgcggctgattggtatagatcaggctagatttagggccatggtgaattcacctagtagcttctacaggaccttccacatcaaaaaacgccttgggggtctgcgcgaaatatcttcgccctttccctccttactgatctgccaggactggatatacaagaacatcctactgaacatcccagtccactcctgtgtgcacggatatgttcccggacggagtattttcaccaatgcgactccacatttgaatgcgcggtgcctcttgaagatggatataaagaactttttccctagcatcaagattgactgggtggcaaacctgtttaatcagatgggctatgccgataacgtctccttttacctggccagcttatgttgcaaaaacgggcgccttgtacaaggcgccagcaccagcccgtatcttacgaatatcctgctgagaggcttggaccacaggctctctagcttagcaaaatcctacaacatggaatacactaggtatgcagatgatctgaccttctctggcgaatatattcctcattctgttatcggagtggtgggggccatcatctcagactttggcctggagccaaacgtggagaaaactagactccagatcgcacgtaatcagaaaatcgtcacaggattgagtgtagctggggaatcactaggcgtgccgcgaagcttcaagcgcgagttgaaaaaggacctgcattttattcagaagtttgggttcgagtctcacctcgctaagaaaaagataaggaagccattctacattgacagtctcatcggtaaggttaatttctggctgcaggcagaacccgctgatcagtacgctatgcaagccctttccatgctccagggaattcatgagcgtagagccgtatga

SEQ ID NO: 9245 - RNA, 1032 nt, synthetic construct
  source 1..1032: mol_type = other RNA
atgaatgaagcactcattaaacagtggctggcacattttagaaaaagaggcgtgtcaggtcccctcatagatgtctacgctgtttatatccggaccctgattggtaatagtgtccctgttatctttgagtttgagcacctgagcagactgattgggatcgaccaggccagattcagggcgatggtgaatagttcctctagcttttacaggacctttcatattaagaaacggttgggtgggctgcgagagatctcttctccgttcccttcactccttatttgccaggactggatctataagaacattttgctgaacatccctgtgcatagctgtgttcacggatatgtgcccggacgatcgattttcactaacgccgctccccatctcaactccaaatgtattctcaagatggacatcaaagatttcttcccatctatcaagattgactgggtggccaacttcttcaaccagttggggtatgccgataacgtctccttttaccttgcagctctgtgctgcaaggatggctgtctcgtgcaaggcgcatccacaagcccatacctaacaaatatactgatgaggggcctggatcaccggttgtacaaattagcccagagttattcaatgaagtacacccgctacgctgatgacttaacatttagtggggaatacatcccacatactgtcatcgaggttgtggatagcattgtgtccgactttgggttagaagtgaacactgacaagacgcggctgcaaatcgaccgtaatcagaagatcgtaaccggactgtccgtcgctggcaagagtatttcaatgcctcgctcttttaaaagggaacttaagaaagagctccacttcatccaaaaatatggctatcagtcacacctgagcaagaagaaaatccgcaagcccttctacatcgattctcttataggaaaggtaaatttctggctgcaggccgaaccagcggacacatacgccataaaaagcctgttcatgctacacgagatacagaagggaaattccatttga

SEQ ID NO: 9246 - RNA, 1032 nt, synthetic construct
  source 1..1032: mol_type = other RNA
atgaacgacattaaaatacgtaactggctgtctcatttcaggcaacgaggcgtctccgaggccctggttgagatatacgctgagtatatcaaaacgctcgtgggaaactctgtcccagtgatcttcgagttcgaacacttaagcagattaatgggcgtggatcagacccggttcagagctatggttaattcaccctctagtttctatcgcacattctacatcaagaaaaggcttggcggcctgcgggaaatttcatcgccgttccccagcctcttaatgtgccaggactggatttacaagaacattctgatcaacattcccatccacccgtgtgctcatggattcgcacctgaaaaatctattttcactaacgctacacctcacctgaaggcgcgctgcctgcttaaaatggacatcaaggacttttttccatccataaagatcaattgggtggccaacttttttaatcagatcgggtacgcagacaacgtcagcttttatctggcaagcctgtgttgcaaagaaggtcgtctggttcaaggcagtagtacttccccctatctcaccaacattctcctctacggtctggatcagagactttttggacttgccaagacctataatatgacctatacacggtacgccgatgacttgacgttctctggtgagtatatcccacacactgtaatagacatcgtgaagtcaatcatattggattttgggctgaagcctaattccgaaaagactaggctgcagattgataaaaatcagaagatcgtcacaggcttgtcagtagccggggacagcctaagcgcgcctagatccttcaagcgcgagctaaaaaaggaactccacttcatccgaaagtttggatacgagagccatttggccaagaagaaaattaggaaacccttttaccttgattccctcatcgggaaagtgaatttttggctgcaagccgagccaaatgatcagcatgctaaacaggcactggtgaccttgcgggagctgtacgaaagtcgaaagatttga

SEQ ID NO: 9247 - RNA, 1050 nt, synthetic construct
  source 1..1050: mol_type = other RNA
atgattaagaagacatttgacaacaacagttcattagactcaaaagtaaacaactggattgagtacttcaataatcgaggtgtcagtctggaactgatcgacgaatataagaccttcattcttaacctgatctccaaggatctgcccgtgatattcgaacttgagcatctctccttgctgctgggaatccagtactctgagttcctcaagataattaacaacccagatgagtattacaggaagtttgacataaagaagagaaaggggggaaaacgggaaatactagcaccactgccgagcctgcttcactgtcagaggtggatctataaggagattcttacaaagtctaagacgcacaataacgctcatggcttcattagcaacagatcaatcatcactaatgcgtcactgcaccttaacaagaaatgcatcctgaaaatggacatcaaagactttttcccctcgatccccattaattgggtgattaattactttagctccctgggatatcctaacaacatttcctactatctatcagccatctgttgctgcaacgattctctccctcagggcgcagctacaagcccatatctgagcaatatcttgctgttttccctggatgatcggttgaccaagttgagcaagaagtacaatctggtgtactctcgttacgctgacgatatgaattttagtggggagtacatcccttcccacttctcggaaatcgtttctgagatcattctctcctatgggctcgaagcaaataaaaacaaaactcaactcctcaccaaaaaaggaaaacggattattactggcctgtctgtcagcggcgagaaactgaccttgccacgcaacaaaaaaagagaaatacgcaaggaggtgcactacatcgagaagtttgggtatctcagtcatgccgccaagctaaaaatcaagaatcctgcctacattgactccttagagggtaaattaacattctggctgcaggttgagcccaataatgccttcgctaaaagtggcttgctccttatcaagagcataagggaatga

SEQ ID NO: 9248 - RNA, 1047 nt, synthetic construct
  source 1..1047: mol_type = other RNA
atgaccttccaaaagctggataaggtgcaggaattgaagataaattcctggtacctgtatctcaagaaccgcggattgccttcagacctcatcgacgagtacatttcttatatcatatccctgatcgacaagaacttgcccattatatttgaactggagcatctcagtaaactgctgagcatcaactacatcgagttgttaaagatcattaactctcccgagaactattacagagagttcaatatcccaaaacgaaaaggtgggactcgtaatatactaagtccttacccatctctgctccactgtcagaagtggatctacaagaatattttatcgaagatcgccatccatgatgccgctcacggcttcattaagaaacggtccatcatgtccaacgcagaaaaacacgtcgagaagaaatgcatcctgaagatggacatgtctgatttttttccaagtatccccattaactgggtgataaacttcttccatagtcttggctatagtaacaacgtctctttttacctgagctcaatatgttgcttgaacaatggcctacctcagggtggggcaacaagcccgtatctctcaaatattctcctggtaagcctggacaggcgacttaccaacctgagcaaaagctataagctggactacactcggtacgcagacgacatgacttttagcggcgattacatccctctgaagttctccgaaatcgtgtcacagattattgacaatttcgggcttcacattaataacgataagacgcagcttatcaccaaacccggcaaaagaattatcacaggagtttcagtggctggaagcaagatgaccctgccgcgcgataaaaaaagagagattcggaaggaagttcactacatcaaaaaatttgggtatctctctcatgcgtccaagatgaaaattaggaatccagcctatctatccgtgttagagggaaagctcaatttttggcttcaagtggagcccgataatgaatatgctaaacaggccattgtcttcatcaggacactgaagaatatatga

SEQ ID NO: 9249 - RNA, 1032 nt, synthetic construct
  source 1..1032: mol_type = other RNA
atgaagaagaacaacacgattgaatattggatctcctacctgatcagccacggcgtgtcactggatataatcgaggagtacaccccctacattaccaatctggttgacaaaaatctccctgttatcttcgagcttgagcatctgagcttactaatcggaatcaagtacttggaactcctcaagatgatccacagcccagattccttttaccgagaatttgacattcctaaaaagaaaggtggggtgagacatattgtgtccccatatccgtctctcttgagctgccagaagtggatctataataacatcctgaagaagatctccatccaccctgccgcacatgggtttaatctgaatcattcaattgtcacgaacgcccaaagtcacttaaataagaagtgcctgctgcagatggatgtgaaagacttcttcccatctctgcccattaactgggtcattaatctgttttcttcacttggctactcacacaatgtctcgttcaatctggcgagtctttgttgtttaaacgacaagctgcctcaaggagcagccacatctccctatctttccaacattttgctcgtgggattggataaaaggctgtcacttctcagtactagctaccagttaacttacacaagatatgctgatgacctctgtttcagtggcgagtatatcccgcacgaactgattcaaaccatagagagcattattatcgactacaatctgacccccaacaagaacaagacaaggctacagcttaataacaataagcggatagtaactggcatctccgttagcggtccaaaagctacaatacctcgccagctcaaacgggagctgaaacaggagctctattatattcagaagcatggctacctctcccacgtgactaaaatgaagataagtaaccccaaatgcctacagtccttggaagggaagttctctttctggttgcaggtagaaccagacaacgattttgccaagaaatctctgatgtttctgatcaaactgcgtaaagagaacacctga

SEQ ID NO: 9250 - RNA, 1035 nt, synthetic construct
  source 1..1035: mol_type = other RNA
atgaataagaaatacaatatcccatactggaagaagttctatcgctctagaggcctgtcagatgaaatcatcagtatttatcttccgtacatcaaaaagttgcagaaaaataacgcacccgtgatcttcgaatttgagcatctgagcaagcttttagggctcaagcgagctgagcttagcaaaatagttaactcaccagagtccttccacaggaaattcacaattcctaagaagaaaggtggccagcgggaaattgtttctccttatccttccctgctgcactgtcaaaagtggatttatagaaacatactcctgccgcagcccattcacgattcggcgcacgggttcgtcccaaaccggtctatctttacttacgctagcatgcatttgtctaagaaagccctgctgaagatggacttgaaggacttcttccctagcatcagcataaactgggtaatttgttacttctcttccctcggatatgccaacaatgtgagcttttacttagctagtctgtgctgctacaagggacatttgtcccagggcagctccacatcaccctacctcacaaatatcttactgaaaggtctggataagcgactgcagaaactatccacaacctatcagctcatttattctagatatgcagatgacttgacctttagtgggaagtatataccccacagctacattgagattgtcaacgcctgcatcgtggactatgggctggaggtcaatgaagataagactcggctacataccaaacccggccaaaggatagtgacgggactgagtatcagtggagatgaactcaaactgcctcgtaaaactaaacgcgagctcaaacaagaaatccattacatcaagacctttggttacatctcacacattagcaagaacaaaatttccaatccatactacctcgagtcactgatcggcaaggtgaacttttggctgcaggccgagccagacaatctgtttgccaaggactccttgaaccaccttcttgagatcaagaggtcggcactatcttga

SEQ ID NO: 9251 - RNA, 1005 nt, synthetic construct
  source 1..1005: mol_type = other RNA
atgaaagactgggaaaagtacttcatcgatagaggccttccaactgacactatatcaacctatctgtcctatattagccagttgtcggagaatcaggtgcccgttatttttgagttcgagcacctcaccaaactgctgggattgaagagaaacgtcctagccaaaatcgtgaacagcccagaacactttcatcgtaaatttagcatccgcaagcggtcaggtggcaaacggattattgtgagcccttatccaagtctcctgtactgccagaagtggatctacgtcaacctcctgttaaaacagaaggttcacacagcagcacacgggtttgtgcctggaaaaagcattttctctaacgctaagctccacctgtccaaaagaagcatgttaaagatggatcttaagaacttcttcccaagtatccctatgtcatgggtcatcaatttctttcacgacctaggctacgctaaaaatgtgtcatcctatctggccagcctctgctgttacgagcataggttatctcagggagcggccacatctccctacctgagtaatcttctccttaagaatttggatgatcgcctgagttcgatatctaactcctatcgcctccaatactctcgatacgctgatgacataacttttagtggggactatatcccgtccaagttgattaagatcattgaggagatcgtagatgactacggtctggcaattaatcagaagaagacacggctgcataccaaaccgggacaacgaatcgttacggggctatctgtggtaggcgaggaactgaccatccccaggaagatgaaaagggacctgaggcaggaagtgcacttcatacggaagtatggttaccttagccatatctccaaaatgaagattaaccatcccttctacttggaatccattgctgggagatttcagttttggctgcaggccgagcctgaaaatgagttcgccaaagaatcactgacatatctccaaaagatcaagggctga

SEQ ID NO: 9252 - RNA, 1005 nt, synthetic construct
  source 1..1005: mol_type = other RNA
atgttcgaacagtggatcgattttcttaacgatcgcggagtgaagaccgaagtcatagagagcctttccccgatcattcagacactgtcttccaacaagttgcctgttatatttgagtttgagcatctcgctaagattctcggattcaatgaagcttcgctcgcctctatgattaactccccaagcaatttttatcggacattctatatccccaaaaggcggggtggaaagcgagaaatatgtagcccctatccttctctactggagtgccagcgttggatctacaagaatatcctgctgaaactggatatccattcggccgctcacggctttgcaccaggcaggagtatcataaccaatgcaaaatgccacttgagtaaaaacgcggtgcttaaaattgatctgaaggacttcttcaactcaatccccatcaattgggtaataaacctgttctactccctcggctatcctagaaacatctcattctatctagcttctttgtgttgcctcgaaggcagcttatctcaaggggccgtgacgtccccctacctctcaaacctgcttgttaaacaactcgacagcagactgaccaacctgtcattaaaacatcacctggtgtactctaggtacgcagacgatatgtcctttagcggggcgtacgttagtaagaacttcattagctcagtgggggaagtcatcactgatttcggtcttatggtgaatcattctaaaactagcctgcgcaccggaaatagcaaaaaggccatcacaggtatcatcgtgagtgggaatcgactcagggccagtaagcagttaaagagaaagttgtcccaggaggtacactacattaagaaattcggctttctatcccacattaataagctgaagattcgcgaccctaactataaactgtcactgattggcaagctcaattttctgaaacaggtcgagccagacaacgagtttgctattgacgcccttaattacctgcggaagttggagtga

SEQ ID NO: 9253 - RNA, 1035 nt, synthetic construct
  source 1..1035: mol_type = other RNA
atgcacaaagagaagcacattatcagggcctgggaggagcacttcaaagaccggggcatcagcagcgacctcatcgtgcagtataccacttatataaagaagttgagcgaaaacgacctcccaatcatctttgaaatcgagcatctgtcccttctgataggaatcaacctgccctcattacgaaagattattaatgctcctgagaagttctatcgcactttttcaatccccaagagacggggtggagagcgggagatatccgctcccctgccttcactactagcctgccaagattggatttacaagaatcttctcgcaaaaattagcatacacgatagcgcgcatgggtttgtccctggccggagtatcctcacgaatgcaagtccacatctggcccaaaaagccctgttgaaaatggacttgaagaacttcttcccttcgatccccattaactgggttatgaagttatttagtgacttcggttacgccaacaatgtcgcgttctaccttgcctcaatttgctgtctgaacgaaagtctggcacagggatctgctacatctccctatctcagcaatattctggtgaaagggttagacaagagactgaaggctctttctgattcctatcatttggaatacaccaggtacgccgatgacctgaccttcagcggaaattatattccacatacatttccctccaccgtagaggagatcgtgtccgactttgggctggaagtgaatattgaaaaaacccgcctgcacactaagccaggccagaggattgttacagggatatcagtggcgggtgctacaccgtctctgcctcgagccagtaagcgtcaaattagacaggaggctcactttattcagaaatacggccttatctctcacatctctaagaaaaagatccgtgcaccaacgtacatcgattccatcgaaggcaaactcgccttctggttgcaggtcgagccgaacaacgagttcgcacgcgaaagcctctcccacatcaggaaaatacgcagagatcatcagtga

SEQ ID NO: 9254 - RNA, 951 nt, synthetic construct
  source 1..951: mol_type = other RNA
atggttacgacttctctgaagaacgccgtcctgttgcaggatttgccagtgatatttgagctggagcatttgagcaagattattggtgtggagatcaggaccttgcagaaaatgatctactgcagccgaaagttttatagatcctttagcatacccaagcggaatggcagtcgccggcagatcgacgcaccttatccaactctgttactctgccagaagtggatctacgaaaacatcctgaagaaaacatcggttcaccatagcgcacacgggtttatcgagaaaaaaagcattatcaccaacgccttacctcataaaaacaagaagactctcctgaagattgacctgaaagactttttcccctcaatccccctgaattgggtcgttaaccacttccttagcctgggctacgccaacaacgtatccttttacctagcgtctctttgctcgttggaagggaatctatgtcagggagcgccaacatctccctacctgagtaacattcttctaaccggcctggataaccggttaacgaaactggccgcatcatattgtctcgagtacacacgctatgctgacgatatgacattctctggaaattatattccgcacactctcatcgtgaccatagagaatgtgatctcctcctatggcctttccgtgaattcagaaaagaccagactccatctgaagaaggggcagaggattgtcaccggaatatctgtaagtggcgattccctgagtgtgcctagagagtacaaacgcgctctcaagcaagaaattcacttcattgagaggtacggttacatctcacacgtgagcaaacttaaaataaacgaccctctgtatctcgaaaagctgatcgggaaagtcaatttctggctccaagtggaaccagagaataatttcgctaagcatgccctcaagctgcttcgtgctgcccgaaaatga

SEQ ID NO: 9255 - RNA, 1026 nt, synthetic construct
  source 1..1026: mol_type = other RNA
atgaaaaataataagatcaagtcctggatcgatttttttgccgatcgcggagtcagtaatgagcaggccaacctttacatccagtatatttctggccttcttgactcaaattcacctattatattcgagaaacagcatctgagccaccttatcgggattgatgaagccacactggatcggatgatatccagtagcaaagacttctatcgtgaatttaacatcccaaagaagaagggtggcatgcgcaaaatcgtcagcccatatccttcactcctcatgtgtcaaaagtggatctacaagaacatattgctgaatgacaaaccccatgacgcctgtcatggatttacacctgctaaaagcatcatcaccaacgcttctattcatctgaacaagccatgcctcctaaagatggacctgaaagactttttcccctctattccgataaactgggtgataaattacttcaaacacctggggtatacgaacaacgtatctttttacttagcatccttatgctgttatgacaggaaattggcacagggtgcgtccactagcccgtacctgtcaaacttgctgcttaagggcctggacaacagattaaataatctgagcaagaagtaccggctgagttatagtaggtacgcagatgacatgtgcttctccggcagttacatccctaacaaaattatcggagtgattacagagatcatcaaaaagttcggcttgtctataaacgaggaaaaaaccagcctcctgattcactccaacaaaaaaattatcaccggcctgagcgtttccggtcaacagttgtcactccccagggagtataagagaaagctgaagaatgaactccacttcattatgaagtatggatacatttcgcacattactcagcaaaagatcaaagatcccaattacctgttttccatcctagggcgagtggggttctggctgcaggtggagccaaacaatgaactggctatctcttcgagagattacctcctaagcattctcaagtctaattga

SEQ ID NO: 9256 - RNA, 1029 nt, synthetic construct
  source 1..1029: mol_type = other RNA
atgaagaataatgacatcaatagttggatggagttttttcttgacagaggagtgagctcggatcagatcaattattacatcccgtacattgctaaattgctgaaaaccaactctcctataattttcgaaaagcagcatctggcccatcttatcggtatcgacgagtctattctagacaagatcatcagttcccccaaccatttctacagagagttttttatcccgaagaagcgcggtggactccgaaaaattacttgtccctacccaagtttgttgatgtgtcagaagtggatatacaaaaacatcctcctcaacgatactccccacgtcagctgtcacggattcacaccttcaaagagcattattacaaacgcctcactgcacctgaagcagaagtgcctccttaaaatggatgttaaggacttctttccctccataccaataaactgggtcatcaattactttaagggcctggggtattctgataacctgagcttttatatgagctccctgtgctgccacgacaagaagcttgctcaaggcgcgagcacgtctccatacttgtccaacttactattgaaagggctcgataaccgtctgaataatctatccagaaagtacaggctgacctattcacgatacgctgacgatatgcacttctccggagattatattccttcagatctggtaggcgtgataacttctataattaacaactatgggctctcagtgaacgaaaaaaaaacagccctttatatcaagagcaataaacggatcatcaccggcatctctgtggccggcgacgagctgagtctgccaagggattataagcgcaaactgaagaatgaactgcacttcattgagaaattcggttacatttcccatatcacccagaagaaaattaaagaccccaactacctctacagcattctcgggagggtgaatttctggttacaaatcgaacctgacaacgacgcagcaattaaaggccgggattatctgatgcgggttctgaagaataatttatga

SEQ ID NO: 9257 - RNA, 1026 nt, synthetic construct
  source 1..1026: mol_type = other RNA
atgaagaataacaatatttccgcatgggtcgactttttcgctgaccgcggcgttagtgatgagcaaactgacttatacatacagtacatcaccgtgctcctgagcagcgaggtgccaatcatattcgagaaacaacatctttcacacctgattggaattgatgaatctatcctggataaaatggttagctcctcaaagaacttctacagggagtttaacattcgaaaaaagaagggaggtgagcggaaaatagtatctccataccccagcctcctgatgtgccagaagtggatctataagaatatccttctcaaggacaaacctcacgaagcctgccatggctttacaccctctaaaagtataatcaccaatgcctctatccatctggacaaggcctgtctgcttaagatggatctcaaagatttctttccgagcattcccattaactgggtgattaactattttagacagctgggttacagtaataacatctcattctacctggcaagcctatgctgttacgagaaaaaacttgctcagggagcaagtaccagcccttatcttagtaatttgctcctgaaggggttagacaatcgcttgtccaacctgtcaaagaagtatcagttatcttactcacgttatgccgatgacctgtgtttcagcgggaagtatatccctaataagatcatcggagtgatcacgaacataattgcgaactacggcctccaggtgaattccgacaagactagcttgctgattaaggccaacaaaaagatcatcaccgggatttccgtcacagggcaaaaaccatccctaccaagggaatacaaaaggaagttgaaaaacgagctgcacttcattaaaaagtacggctatctctctcacatttcgcagcagaaaatcaaggatcccaattatctgctttccattttgggcagagtgtccttttggctgcaggtcgaacctcacaatgaactcgctataacatcgcgggactatctactgtctatcctgaagaacaactga

SEQ ID NO: 9258 - RNA, 1026 nt, synthetic construct
  source 1..1026: mol_type = other RNA
atgaaaaacaatgaactggcgtcatgggtggacttctttgctgataggggtgtgactgatgaacagattaacatctacattccgtacattaagaagattctggagagtaaggtccctgttatttttgagaagcagcacttggcccatctcatcggcatcgacgagaacactctcgacaaaatggtgtcttcgccagactccttttatcgggagttcaatatactgaaaaagagagggggcacacgcaagatcgtaagtccttatcccagcctacttatgtgccaaaagtggatttacaagaacatcctccttaaggactcacccgacaaagcatgtcatggcttcaatccatccaaaagcattatcacaaatgcatccgtgcacttgggaaaagcgtcactcttaaagatcgacatcaagaatttcttccccaccattcctataaactgggtgatcaactactttaagaagcttggatacgcagacaacgtcagcttttacctctcagcactatgctgttacgaaaaaaaattagctcagggcgctgccacctccccctatctttctaacctattacttaagaagctggatgatcgtctggagaaactgtccaaagcctaccatctcagctattctagatatgccgatgatatgtgctttagcggggactatatcccgtacaacattatcaacattatcacggagattatcgagtcctatggactcttcgtcaacaaggataaaactagcttgctgatcaatgccaacaagaaaataataaccgggatttctgttagtggcgaaaccctgtctctgcctcgggagtataaaaggaagctgaaatcagatctccacttcatagaaaaatacgggtacatcagccacattagtcgaaagaaaataaaggaccccaattatctgttgtctatcttgggtaaggtgaatttctggctgcagatcgaaccatccaatgagacagccattaatggaagggatatgctgctggctatcctgcgcgaacactga

SEQ ID NO: 9259 - RNA, 1035 nt, synthetic construct
  source 1..1035: mol_type = other RNA
atgaaaaaaaatgagaatgaactgaccctctggatcgacttcctgatagatagagggatcagttccgaacagatagccctgtatgtcccctacattagcaagctcttggaaagcaatctgcctatcatttttgagaaacagcaccttgctcatctaattgggatcgatgagaatactctcaacaagatgacgtcctctccacactcgttctatcgaaactttaacattccgaagaaaaggggaggctttagagagatttttagtccttatccctccctgcacatgtgtcagaagtggatatacaagaacattctgctgaatgacaagccacacaatgcatgccatggctttactccatccaaatccatcattacaaatgccgccatccatataggccaaagctcactgctcaagattgacctcaaaaacttctttccaagcattcccatcaactggataatcaactttttcaagcggaaaggctacacacataatgtgagtttttacttagcctcactgtgttgcaataacaaggtaatggcccagggcgcaccgacctcaccttacctttcaaaccttctgctgaaagggttggataaacgcttatacaacttaaccaagaagtacaacatcaaatacagtcggtatgctgacgacatgttcttttctggaaactacatcccctatgatttcattcgcgtgatcactaatatcatagaagactacggtctgaacatcaataaagataagacagcgttccttatcaacgcaaataagaagatcattaccggcatttctgtgaacaataatacactaagcctgcccagggagtataaacgcaaattgaaaaatgagttgcacttcatcaagaagtatggttacttgagccacattaacaaacaaaagatcaaggatcccaattatctcttctccattctcggaaaaataaacttctggcttcaggttgaacctatgtctaagaaagctatcgagagcaagaagctgatcatttctatcctgaagatgggggcttga

SEQ ID NO: 9260 - RNA, 1032 nt, synthetic construct
  source 1..1032: mol_type = other RNA
atgaacatgaaaaaaaatacgctggagcactggagcgagttttttcacgatcgaggtatctcctatgagctgttcgaaatttacctcgtctacattcagaagctgatcagcaccgattcacccatcatctttgagaaggaacatttgagtcagctcctgggcataaacgacagcattctgaataagatgatcaactcccctaataatttctatcggaagttcacaatcccaaagaagaggggcggcgatcggaatattgtggcgccgtacccttctctgctgtcctgccaacactggatctacaaaaacattctcttaacagagcagcctcactattcgtgtcatggattcactcccaaaaagagtatcatatcaaacgccaaaatccatatcgggtctaaaaccctgctaaaaatggacctggaggattttttcccttccattccaattaattgggtggtccgctactttcagcaaagaggctatgcaaacaatgttagcttttatctggctgctctgtgctgttacgacgaacacttggcacagggcgccgccacaagtccgtatctttcaaatctgttactaaagggtcttgatgagagacttacaaacctctgcctgaaatataatctgaagtattccagatacgccgatgaccttacgatcagcggagaatacgttccccatactttaatcgaggtcatcaccgagatagtatctgactacggactgaaagtgaacataaaaaagaccgctctcttgatcaacgctcgcaagaagattattactgggatcgccgtaactgaagacaatatacgagtgccacggtcttttaggagggaacttaagaacaccatgaatttcatcctgaaatacgggttcatttcacacgtgacccaattgaagattaaggacccctactatctcttctctctaattgggaaagtgaacttcttgatgcaggttgaaccagagaacaaaaacgcacgtgaatggaagagtacactcattaatatactcaagagccagtga

SEQ ID NO: 9261 - RNA, 1026 nt, synthetic construct
  source 1..1026: mol_type = other RNA
atgaacaaaaatgatatccatagttggttggtcttttttcaagaccgaggtctaagccacgacctgattaacaagtacattccctatatcatcaagttgcagaagaacaacatccctgttattttcgagaagcaacacctatctcatctgattgggatccaggagcgggtcttagataaaattatcatcagccctagtaagttctatagggagttctctattcctaaaaaacagggcggcgtgcgggatattaagtcaccatacccctccctcctcatgtgccagagatggatctacaagaatatcttactgaaggattccctgcaccccaattgtcatggtttcacccctagtaaatccatcttcacaaatgcaaacctacatacaaacaagaagtgcattctcaaaatggacctcgaaaatttctttccctcaataccaatgagctgggtaatcaactacttcatgaaaatcggctatactcataacgtgtcatttagccttgcctctatttgctgttacgatcgccacctggcgcagggagcagctacatcgccgtacctgtccaacttactgctcaagaagtttgacgctagaatagaggccctctgtgtcaagtataacgtgacttacagcaggtatgccgacgacctgactttttctggggagtacatacctcaccggttctcatccattgttgaagagataatcgagaattacgggcttacccccaataaagaaaagacccgtctcttgataaatgctaaccagaaaatagtgaccggcatctccgttagtggagagaatattgcacttccacgcaagtacaagagaaagctgaagaacgaaattcactttgtgattacgtacggctatgtcagccacatcaacaatttgaagatcaaagaccccaattatcttctggccctgttgggaaaagtgaacttctggctgcaggtagaacccaaaaatccactggccctgcgagggaaagaatatctgtctaaagtgcttagggataaatga

SEQ ID NO: 9262 - RNA, 1014 nt, synthetic construct
  source 1..1014: mol_type = other RNA
atgaaaacgaacgagtggagggcttactttgaagaccggggagtgagcacagccagaatcgataagtacgtgtcttatattgagtgcctcagcaagaagaatcagcctgttatctttgagctggaccacctcagtagtttactgggtatccagatcgagtatctgtcaaagatgattgcctcttcacactctttctataggaaattcagtattcctaagcggagtggcgggaaaagagagattcttgcgccgtacgagtccttgttgacatgtcagcagtggatcctgaaaaacatcctcaaaaacattcctctgcattccgccgcacacggcttcagatcagggaagagcataaagaccaatgccctggcacatatcaatggaaaggcactgctcaaaatggacctaaaagactttttccccagcatccccctgtcttggatcattaagacctttcaggacataggctatgcgccaaatgtagcctactacttagcttcattatgttgctacgatgagaaactggcccaaggggctgctacctccccagctctgtccaatatcgtcctgacaagcctagacaagcgtcttgatcgcctcgccaaaaagtgctctataacttatacccgatacgccgatgatctgactttcagtggggaacacatccactcaagctttagcaagcttgtgactaagattgtcgacgaatatggcctcgttgtgaacacggacaagacacgcctcaaagtgaaaaacggcactcgcattgtgaccggtatcggaattcttaacggcaggttgtccatcccccgggaatataagcgagaactgaaaaacgagatattcttcatcaggaaattcggatttgtctcgcatctctcgaacaaaaagataagcaaccccaattacattaactccttgttgggtaagatttccttttggctatacatagaaccagataatcaacttgcaattgactctcataagctggtactgcagctgatcaatgattga

SEQ ID NO: 9263 - RNA, 1014 nt, synthetic construct
  source 1..1014: mol_type = other RNA
atgacacttctcgagtggaagaactactttcaggacagggggatcgagccagacctggccaagaaatatctggcctacataaaaggactgcagaagaacaattgccccgtgattttcgaactcgatcatttatcacaactcttggagattgacctgaattacctggcgaggatgatctctgcatccggcaacttttatcgtagctttcacatccctaagcgttcaggaggtgttcgagaaatctgtgcaccacaccatagcttactaagctgccaaaggtggatcctgcagaacatcctgaataacatcgatttgcaccctgcggcccatggattcactgctggaaagtccatcaagaccaatgcaatttcgcatctcaattccagcgctattctcaagatggacctggagaacttcttcccatctatccctcaggcttgggtcatccaggtgtttaaagagttcggctatgcgcccaatgtgagctattatctgtctgccctgtgttgttgcgacggggcattggcacagggagccgctaccagtccggctctgagcaatcttattcttagatcactggataagcgcctgtccaagctcgctagaacatgcagcctgatatacacacggtatgccgatgatcttacgttctcaggtaaacgcatccactttagtctcccaatcaaggtggaagagattgtcaaggagttcgggctaaaagtgaacacgaaaaaaactcgattgaaattgactcacggcgcccgcatagtaaccgggatttgtataacaaacggcaagctgtctgtgccccgggaatacaagcgcgagattaaaaacgacctctttttcatacggaaatttggttacctgtcccacattgccaacagaaaaattaagaatcccaactacctttcctctttacttggccggatcagtttctggctattcgttgaacctaccaatgagtttgccatcaagggcaggaataccgtcctcgaactgatgagaagttga

SEQ ID NO: 9264 - RNA, 1014 nt, synthetic construct
  source 1..1014: mol_type = other RNA
atggagtcgacacaatggaggtcttatttccgagatcgcgggatacctaacgaactgaccaaaagctacgtctcttatgctggcagcctccagaaaaagaacttacccgttatctttgaattcgagcacctgagccttctgctcggattaaacattgagccactggcacgcatgatcgcctctccttcaagcttttacagggagtttgcaatccccaagcggagtggcggaaaacgcaatatttgcgcccctcatgagagtctgcttctagcacaaagatggatcctgaagaacattctggaaaagtccgaagtgcacgtagcagcgcagggtttcttgcccgggaggagcattaaatccaatgccctgatccatctgaactcgaagaatctcttgaaaatggacttacgggatttctttccgtccatcccaatgtcctgggtaatcaatgtttttaaggattgtggatacgccccaaacgtcgcctactatctggcctctttgtgctgtcactcagaggctctcgcacagggtgctgcgacgtcacccgctctgtctaatattattctaaagagcttcgacaagcgtcttactaggttggccaataagtgcggcctcaaatattcacgctatgcagatgacctgaccttctcaggggagactattcatcacagttttagtggcgctgtggagaagatcactgctgagtacgggctggccgtgaataaggagaaaacacggcttaagataggccacggagctcgggtggttaccggcatcagtattcagggagggagactggccgtgcctagcaaattcaaacgtgaactccagaatgaggtctttttcattcgaaagttcggtctgcttagccatctgtccaacagaaagatatccaatccaaactacctgaactctctcctcggcagggtgtccttttggctacacatcgaaccggaaaacgaaaaagcccagcttgcgagaaaattgatcatggacacaatgaagatatga

SEQ ID NO: 9265 - RNA, 1014 nt, synthetic construct
  source 1..1014: mol_type = other RNA
atgaatatttccgaatggagatcatactttctggaccggggaatcaaggaagacctcctggggatttacctgtcatatattcgcaagctcaacaagttcaaggttcctgtgattttcgaactcgatcacctcagctcactcctagggatcaatgtgaaatttctgacacgcatgatctccagtccagaggacttctatagaaatttcctcatcccaaagagatctggcgggaaacgagagattagtgcgcctcaccagagtattctgtattgccagcgttggatactcgtgaatatcttaacccatattcccatccactattccgctcatggcttttgtgctggcaaatccatcaaaagcaatgcacagatccaccttaacagcaagtcccttctaaagatggacctgaaagattttttcccctctatacccaaaagctggataatcaacattttctcagatttgggttacgcgcccaatgtgagctactacctggcaagtttatgttgctataacgatcacttggcccaaggtgctgcaaccagccctgccctgtctaatatagtcctgaggggattagataacaggctgcagtcgcttgccgataaatgcggcttgagatactctcgctacgccgacgacctgacattttccggagataaaatctccgtaaactttccagaactcgtcgaggggatcatacataattatggacttaccgtgaacaaggacaagacgcggctaaaagccaagtttgggagcaggatagtaactggcgtctccatctcaggtggctctctgagcgttccacgggaatataagaggaacctgaaaaacgagattttcttcattcgaaagttcggcatcctttcgcatgtgagtaagaaaaagatcaagaaccccaactacatttattctttgctgggaaaactggctttttggtcttacattgagccggagaatgaataccctatcgaggccaaaaagttcctggttgagttgatcaaggactga

SEQ ID NO: 9266 - RNA, 1011 nt, synthetic construct
  source 1..1011: mol_type = other RNA
atggagtgcacttggaataactatttctcagatcgcggcttaagtccggacattattaagcagtacgtagcgtatgccaataacctcgagcgaggtaatctgcccgtagtgttcgagatcgagcatcttgcaaacctgatcgggatcaagtaccctgaaatcaacaatattatcttcggagccaagagtttttacaggaccttcaagataccaaaacgacgcgggggctgcagagttatacagagcccatatccaagcttactcagctgtcagaagtggatatacaacaacattctcaagaaagtccagacacatccttgcgcctatgcatacaaggaaaacatttccatcattcacaatgcgtccatccacctaaacgcagattttgtgttaaagttggatttgtcggacttttttcattcaatcccaaaatcctgggtggtgaattttttttccgaactgggttatgccaataacgtctccgtggcccttgctagcctgtgttgtgttaatgacagcctccctcaaggcggcgtgaccagtccagctctctctaatatattggtcagctcactggatgagcggttgaacaggcttgctcacacgttcgatctgtcttactctagatacgcagacgacatggttttttccggcaagcggattcccgccaccatcattaaatatgtgacaggcattatcgagtcttttggattcgccatcaacgatgagaaaacaaaactactcatcaaggaacggcagaaaataattactgggatcgacactaccggacccaaactgacacttccccgcaatcggcgtagagaaattaagaaagccatgttcttcatcaacaagcacggactggtcgctcacatgaacaatgagaaaatcaggaaccctaattacctcctgtcactggaaggtaaaattaggttctggctgcaaatagaccccgaaaataacgaggctaagaagttcctgggggacatcattagaatcaagctgaattga

SEQ ID NO: 9267 - RNA, 1011 nt, synthetic construct
  source 1..1011: mol_type = other RNA
atgaacaaaacgtggcgacattattttatcgataggggcattaatgatgaccttttagaccagtatgtgatttacgccgataatttggagaaaaatggtcttccagttattttcgaagttgaacacctgagcaacttagtcggcattaagtaccctgaaatcaacaacctgatttttggaaccaagtctttctatcgggagtttaaaatcccaaaaagacgcggcgggtacaggactattcagagtccctaccctagtctgctctcttgccaaaagtggatttacgacaacatattgcagaaaattgagacacacccatgtgcttacgcctacaaaaagaattgcagcatcatcaaaaacgcaagcgtacatctaaatgaaaatgtggtcctgaagctagacttgtcagactttttcatgtccatacccaaatcatgggtgattaacttcttctcaaatatcggctatagcgggaatgtatctatagccctcgcctctctctgttgcctgaatgacagtctgcctcagggagcagtgacatccccggcactgtccaacattctggtgagctcccttgacgagagattatatagactggctagcgtgttccagctgaattatactcggtacgccgatgatatggttttctctggaaagaagatttctaagtcgatcatcaagtatatcgcggagatcatagaatcctttggatttaccctgaacaccaagaaaacaaagctcctgatcaaaaaaaagcagaagatcgtcaccgggatcgacattacggggagtaaacttacactgccccgtaacacccggagggaaatccgaaagactatgttcttcataaagaagtacggcctgatctcacacatgaacaatgagaagatcaagaatgtcaactaccttagctcgctcgagggtaagatacgcttttggttgcaggtggatcccgagaacatccaagctaaagagtttctccatgatctcattcgcatcaaattctcctga

SEQ ID NO: 9268 - RNA, 1014 nt, synthetic construct
  source 1..1014: mol_type = other RNA
atgaataataactggcatgattatttagccgatagaggtctgaacaatgcacttatcgaagagtacctggcttatattaatcgtctggaagagaattcgatccctgtgatatttgagaatgaacatctctccagactcctcggcattaagtaccctgaattcaacaagcttatttttgggactcacaagttctatcggaagtttaaaattcccaaaagaaagggaggctacaggatcattgcaagcccttacccaagtctgtttagctgccaaaagtggatatacaataacatcctcaagaagattcccacacacgtttgtgctcaggcctataaaaaggaccatagcattatcaagaacgctaacctgcacctcaataacgacgtgatgttgaagatggacatcaacaatttcttttcggaaattccgattaactgggtgatcaagctgttttccgatctgggatattctaaaaatgtttctttcgccctggcatcactttgctgtttggacggcgtattgccacaggggggagtgacttcccctgctctaagtaacattctaatgctgagcctggataacaggcttcataaattagcggagaagttcgacttaatttacacccgctatgccgatgatatgtttttctccgggaagaaaatatccagcaagctgatcaattacatcaagaatattgtcgaggagtataacttgagtatcaatgaaagcaagacgaaacttctgaccaaagagaaaaggaaaatagtcacaggcatcgacacctcatcctctaagctaacactcccacgagccacccggcgcaacatcaaaaagtctatgcacttcatcattaagtacgggctcatcggtcacatgaacaatgtcaaaataaaaaaccccaactacctgctgtcactggagggcaaaatacggttctggctccaggtggaacccgagaatcaggaagccctgtacttcctgaacgagatcttgaagatcaaaaaactttcttga

SEQ ID NO: 9269 - RNA, 1017 nt, synthetic construct
  source 1..1017: mol_type = other RNA
atgaaaaataattggaaggacttctttgagtcccgtggaatcaaggacgattttattgacaactatctcaagtacatcgagtacatcaacaaaaatgagataccggtgatctttgaggttgagcatcttagccacctcattggcatcaaataccctgaaatcaacaatatcatctactcaccctctgacttctacagaaagttcgaaattccaaagcggaatgggggcagcagggaaatttctactccctaccccaccttgatgaaatgccaaaggtggatctatgaaaacatattgtcaaagatcccgactcatcagtgtgcttatgcctataagaaagaccactccatcataaagaatgccagccagcacgttaacaacaagaacatcattaagatcgatctgaagaatttcttcccatcgattcctattaactgggtgattaacctttttgtcaagctgggatactccaataacattccttttattcttgctgcattgtgctgtaatgagaattgcttacctcagggggccgtaacaagccccagtctcagcaatatcctgctgtatagtctcgatgacaggctgtttaaattaagtgaaaaactgggcctgacttatacaagatatgcggacgatatgatattctcagggaagcacgtgtccccaaaaattatcgagtacatccgccacatcatcgagacatatggtttcgagctgaacaatagcaagaccaaaatactatctgcagacaaacgcaaaataattaccggcgtcgatatctctaacaatgagctgaaactaccccggcgcaccaagcgagaagtgcggaaggtgatgttctttattaagaagtacggtctgatgaaccatatgagtaatctcaaaatcaagaaccctaattaccttctctccttagagggaaaaattaacttctggctgcagatcgaaccaacgaacgaggaagccttgtcatacagagatattatacgtgtcctgaaaaagtggatttattga

SEQ ID NO: 9270 - RNA, 1017 nt, synthetic construct
  source 1..1017: mol_type = other RNA
atggagcagaactgggaagagttttttaaaagtcgcggcatcaaagaaagttacatcgagttgtacctccagtatattaagtctatcgacaagaacgacttacccgtgattttcgaaattgaacatctaagccacatgatcggcattaaataccctgagataaacagcctgatttatggaaccaagaatttctaccgaaactttaagatacccaagcgaaacggcggcgttcgcatcatcgatagcccatatccaagtctcatgaaatgtcaaaggtggatttatacgaatatcctgcttaagctgagtgtccaccactgcgcctacgcctataagaaggacacatccattgtcaaaaatgcttctcagcacttgggaaatgagtgcattttgaagctggacatcaccgacttcttttcttcgatcaaaattaactgggtgattaacctgttctcacgcctgggttattccaagaaaatctcttttagcttagcggcactgtgttgtcttcataataagctgccccaaggggctgtgaccagcccttgcttgtcgaatatattactttactcactcgatgagagactcttccggctgtcagttaaacttaagctgaagtatacaaggtacgccgatgatattgtattctcaggagacaatattcatcccaacactatcatctacatccgttccattattgattctttcggctttagcatcaacgagagaaagaccaaactcctgaacaataagaagcggaagataattactgggatcgacatctctaataataatctcagcctgccgcggaagactaaaagggagctaaggaaatccttccattacatcaacaaattcgggttgatagggcacatgaactccctgaagataaagaacccaaattacatccagtcccttgaaggtaaagtgagattttggctgcagatagaacctgataataaagaggcactagactatctctttttgctgaagaaactcaacctgctgacaatctga

SEQ ID NO: 9271 - RNA, 1005 nt, synthetic construct
  source 1..1005: mol_type = other RNA
atgagaagagaatgggaggatttctacctcgagaaaggcataaacaccaatttcattagcacctatcttgactatatcaaagcactggagtcccgcaatattcctgtgatttttgaggtagagcacctctctaaattaatcggaatcaaataccctgagattaatgacattgtgttcggtacaaagtcgttctatagggaattcaagattcctaagaaaaagggcggatatcggaaaatctccagtccctatccatctttacgaaagtgccagacctggatacacgaaaaaatactttattctctgcgaacccataaaaacgcctttgcatacaaaaagggaaaatcaatcatcgacaatgccgagcagcatctaaataaccactttctcctcaaagtcgacattaaagattttttctccagcatcccaattaattgggtgatcaaactctttgatagcctaggttacgcgaagaatgtgtcctacgccctggctagcctctgctgtttgaacggctgtcttccccaggggggcatcacttcaccctccctgtcaaacattctgctgtatccactggacgaaaggctgtccaaattggcactgaagttcaacttgaaatacagtcggtatgctgatgatatggtctttagcggggaagctatcccgtctaagttcatttcttacgtcactgacattatcgagagttacgggttcattctgaacaaggaaaagacgaaattgctgaataatactaagcagaagatcgttacagggatcgacgtgtcaaaggataagctgcaacttcctcggaagacaagacgcgagataaaaaagatcatgtactacgtgaagaagtatggcatctttagtcatatcaacaacgagaagatcaaggatccaaactacattaaaagcttagagggaaagatacgtttttggctgcaggttgaacccgacaaccaggaggccaggagctacatagaacacatcaatcaaatgaagtga

SEQ ID NO: 9272 - RNA, 1029 nt, synthetic construct
  source 1..1029: mol_type = other RNA
atgaagaagaggaaagagctaactaccaaactctgggaggattatttcttggatcgggggctgagcagtgagctgaggaagacctaccttgaatacataaacttcatctccgagaaggacttaccagtgatctttgaaactgagcatctctcgaatctcattgggattaactatcagtcactgaacagcatggtgaacaatcctgattctttctaccgcagtttcaagattaaaaagaaaagggggggctcaagagaaatctccgctccctatccgtctcttatgatgtgccaaacctggatctatgagaatattcttgtggactatcctatacaccactgtgcacaggcataccggtctaagcacagtatagtgaccaatgctaaaattcacctgggctccagaacaatcctgaaaatggacctcaaggatttcttttctagcatccctatcaattgggtcatacagttctttagcaacctgggttaccccaataatctgagctatgcattagcctccctgtgctgcttagaagattgtctgccacagggcgccccaacaagtcctgccttgtcgaatatcttgctaataagcctcgatcggcgactgtatcggttgggaaaaaaatacaacctctcctacacaaggtacgccgacgacctggtcttttcagggagttacatcccacataaatttatcaaggtggttgccaatatcgttacaaacttcggtctgaccattaacgacgagaaatcacagctaataatcggagacaagcaaaagattgtcacgggtatttctatttcaggctccagcccctgtatcccccgcaagactaagcgcgagatcaagaaggagctccatttcattaaaaagtacggactggtgtctcacgtaggaaagatgaagattagaaacccaaactatctggcttccctggaaggcaaaatccgattctggttgcaggtagaacccaacaataaatttgcgctcgaatcccttctttttattagaagcaaacgtgcttga

SEQ ID NO: 9273 - RNA, 1023 nt, synthetic construct
  source 1..1023: mol_type = other RNA
atgaataagaccctcaaggaatggaagagcttttttgaggatcgcggcattgagctagagctgattaaggaatatctggaatacatcgatcggctggaaactaatgactgcccagtcatattcgaagtggagcatctctccaaattgatcggcatcaactatgaggacctgaataaaatgatcttcggggagaaatctttctaccgcacattctatatcaaaaagcggtctggtaataaacgggagattagcgctccctacccttcactggccctgtgccagttgtggattaaggaaaacattctatcactggataagtctcatttctgttcccacagctatactaagaagcgcagcattctgtcaaacgcaaaaatccacatcaactccaattcaatactgaagctggacattagagacttcttccctagtattaagataaactgggtgatcaactactttagctcactcggttattccgaaaatgtcgcctttgccctggctagcctttgttgcctcaatgatacgcttccacagggaggaagaacctcgcctgacttatccaatctccttttaaaatccctggacaagaggctgtacaggctggccaaaaaattttcctttaagtacaccaggtacgcggatgacatcacattttctggcgatgacattcccgcaattttcataaactacgttagtgacatcctggtgaattatggctttgtgttgaacaacaacaaaattcgactcatcaagggcgataagcaaaagattatcacagggctcgacgtatctggagagaaggttcgtttacccagaaaaatgaggcgagatcttaagaagcaagtgtactacatcaagaattatgggctattgagtcacgtctctaaacagaaaatcaaagatccgaactacatccagagcctcttgggaaaactggctttctggatgtatgtggagaagagtaacaaagaagtaaaagggatgtatgagttcataaagagtcttaacagagacaattga

SEQ ID NO: 9274 - RNA, 1023 nt, synthetic construct
  source 1..1023: mol_type = other RNA
atgaacaatactctcaaggaatggaaacgcttttttgaggatagggggatcgagcctcggataatatccgagtatttaaagtacatcgacaaactcgaatccagcgggtaccctgtcatttttgaagtggagcacttgtccaagcttataggaatccgttatgaagacttgaataagatgatcttcggctctgagagcttctatcgaacgtttaaaatcaaaaagcggtcaggagggaaaagagaaatttccgccccctatccgtctctggcactgtgtcagtcatggattaaggagaatatactagagctcgacaagtctcatttctgtaatcattcctatgcgcgcaaaaggtccatcgttacaaatgctaaaatccacgtaaactctaacagcgttctgaagctggacattagagacttcttcccaagtatcaagatcaactgggtgattaactatttcttttctctcggctatagtgagaatgtggccttcggtcttgcctcgctttgctgcctgagcgatagtttgccacagggtgctcgtacttcgccagatctgtctaacctgctgctcaagtccctggacaagagactgtataggctgagttcaaagttctcctttaaatatacccggtacgccgatgatattaccttttcaggcgacgacattcctgtagtctttattaagtacgtcaaggatatcctggtggattacggcttcgaacttaacgagaataagataaggctcatcaagggtgagaaacagaaaatcgtgacaggactggacatcagcagcaacgatatcagattacccagaaagacccgacgcgatttgaaacgccaagtgtactacattaggaagtacggactcctaagccacgtttctaaacaaaagattaaagaccccaactacattcagtcacttctgggcaaattggcattctggagctacgtggagaaaaataacaatgaggctaaggaaatgtacgaatacatcaagagtttaaaccggaatgggtga

SEQ ID NO: 9275 - RNA, 1119 nt, synthetic construct
  source 1..1119: mol_type = other RNA
atggctcttaagtcccctatctttcgcgaacgcaatctgaaagattttaacgcgatgcacagccttgagggatcgttctacaagtcattccccatgaaacggtcgcaggagatcaaaaactggcaggtgttttttgcagacaggggggtcagcgagagtctcatagagcaatatatgccatatgttgagaaacttctcgtagctgacttgccaatcattttcgaactcgagcacctctctaagctgatcgggatcgaaatttccgaactgcataagatgattggaaattcctccaaattctacagggaattttctattgccaagaaacgggggggccggcgtactgtttatgccccatatcccagccttctgatgtgtcagacgtggatttatgagaatattctgaagtctaggacagtgcatttttgctgtcacgcatatagacacaagcgctccattataaccaacgctacacctcatttgaacaagagagcaattttgaagatggatatggagaacttctttccctccatacccattaactgggtcatcagattcttctctgatctgggctactccaataacgtggcatactacctggccgccatctgttgcgttgaaggttccctgccccaaggggccagtacaagccctgcgttgtccaatatccttctgaaacatctcgataaccggctgtatcagctgagcatcaagtacaacctgtcatacacccgctacgccgacgacctaactttctcaggcgagtacatcccaaataggttaatcaacgtaatcagcaacattgtgagcgactgcagcctgagtgtcaatgaacgaaaaacctcactgataataggcgataaacaaaagatcgtgaccggaatttctgtccagggcgaaaatttaagcctgcctagagcttctcgacgtcagatcaagaaggagattcattacatcaaacagtatggactagtgtcacacatcagtaagttgaagatcaaaaatccgtactatctgcactctctcgagggtaagctaaggttttggctccagattgaaccggagaatgaaagtgtgctggagaacttaaatttcatcctcgagcttaaagacatatga

SEQ ID NO: 9276 - RNA, 1032 nt, synthetic construct
  source 1..1032: mol_type = other RNA
atgaaaaagaaacaggagctcgagatcaagtcctgggagttatttttcatcgatcgcgggatcagtgaacatttaattgcacagtacatgccttatgtaagaaacttgacacaagccaacctgcccgtcattttcgaaatagaacatttgagcaagctgatgggcgtggaactaagtgagcttcagaagatgattgcaaacccccgaaggttttatcgggaattctctatccctaagaagcgtggcggtagaagacccgttagcgccccctacccaagcctgctgctttgccagacatggatatatgagaacattctcaaagctatctctgtgcacttctgctgtcatgcctacatcgagaaaaagtctataatctccaatgccactccacacctcggaaagaccgctatactcaaaatggacatggaagagtttttcccgagcatcccgatcaattgggtgattaacctgttctcaaacctgggatacgctcacaatgttagttattatctggccagcctatgctgtcttaatggggtcctgccacaaggagcatccacatctcctgctttgtccaatattttgctgaaacaccttgactcacgcttgtataagctcagcaagaagtataagctggcgtacacccgatacgcggacgatctcactttttccggagactatatcccacataaacttatcgatgtgattagtgacgttataacagataccgggctctctgtaaacaagcaaaagacgagcctcataattggcaacaaaaagaaaatcgtgactggtatcagtgtgcagggcaataatctgaccttaccccggtcatcaaaaaggcagattaagcaggagatccactacattaaacagtacggcctgatttcacacatcagcaaactgaagattaagaatccttactacatccaatccctggaaggtaaactacggttctggctgcagctggagcctgataacgaatttgcatcggagtctcttgcctttatttccaaactgaggaaggtctga

SEQ ID NO: 9277 - RNA, 1038 nt, synthetic construct
  source 1..1038: mol_type = other RNA
atgaacagcaagaagacggaacaagtggtcaacgagtggaaattctatttccttgaccgggggattagcgatcacctgattccacagtatttgagctatgtggagaagctcacaaatcagcagctcccaattattttcgaggtggagcatctgtcagttctaatcggcattgaatatggcgaactaaataaaatggtgcatgatagttccaagttttaccgtgagtttgaaataccgaaacgcagcggaggtaagagatgcatttcagccccatacccctctctcctgatgtgccaggattggatatacaacaatatcctcaaaagtcggaacttacacttttgcgcccatgcttacagaaccaagaaaagtatagtgaccaacgccaaaaaacatttgggaaagaatgccctattaaagatggacatgcaggactttttcccttcgattcctataaactggatcgtcaattttttctcgggcctgggatatagcgacaacgtggcatactctctggcgtccctttgttgtctgaatgacggtcttccacagggagcttccacaagccccgctctctctaacattctccttgtgtctctggacagtaggctgtataaactgtctaagtcctacaatatctcctatacaagatacgcagatgatatggccttttcaggcgattacgtcccccacaagatcatagaggttatcaccgatatcatctatgacttcggattcaaagtcaatgagaagaagaccaagttgatcattggggacaaacagaagatcgtaactgggatctccgttcaaggcgaattcctcactctgcctcgcaagactcggaggctgatcaaacaagagatccactacattaacacatttggcctggtgagccacataggtaagatgaagattcgaaaacccaattacttgttatcactcgaagggaagctgttgttctggaggcagatcgagcctaacaatgagtacgtacttaacaacctggaaaaaatttcctctatcaaatgggggctgtga

SEQ ID NO: 9278 - RNA, 1032 nt, synthetic construct
  source 1..1032: mol_type = other RNA
atgcccgactatcaaattcaaaaatggaagaccttcttccatgaccgtgggatatctgattatctgatcgtgcaatacctcccttatatcgaaacgctcgtgtcaaataaggttccggtgatttttgaaatcgaacacttgtcaagactaattggcgtcgacataactcaactgcggaagatgatcaactctcctcagcatttctatagagaattctccatcccaaaaaggcgggggggacatagaaaaatcctggccccatacccgagtctgttaatgtgccagacctggatatatgagaacattctcaagtctattcccatacacagttctgctcacggatatgtgaaagagcgctcaattctcagcaatgccacaattcatctgaagcaaaatgccctgctaaaggtcgatctgaaagacttttttccaagcatctccatcaactgggtgattaatctgttttccagtttaggctattccaacaacgtaagttactacctcgcagctatctgttgctgcgatgagtgtcttcctcagggtgcagctacttcaccatacctctccaatattctgctggtaaacttggattacaggttgcataagcttagctctaagtaccacctaaattatacacggtacgccgacgacttggttttctctggtaaatacataccccacaacctgatcaacatcatcagctccattatcgcggattttggactgaacgttaaccaggccaagacaagtttaatcatcggcaataagcagaaaatcattaccggcctgagcgtccagaaaaacgaacttcagcttcctcgcagcaaaaaacgacagatcaaacaggagatctattatatcaagaagtacgggcttattagccacatatccaagctgaagattaataagctcaattaccaccagtccattgagggcaaacttaggttttggctccaggtggagcccaacaataagttcgcactggagtcattgaattacattcactcgctgcagaacatcctgataaattga

SEQ ID NO: 9279 - RNA, 999 nt, synthetic construct
  source 1..999: mol_type = other RNA
atgaaaaaaatttctctgcgcatgcaagaatgggagctgttcttcaaaaataaaggagtgtcgacggacctgattaacatctatctgccctacattgagtacttggagagccagaatcttccggtagttttcgaagcagaacatctgagtaacttacttggtattaagccagtcattttatacaagatggtgagttccccatcgtctttttaccggtcctttgatatcagcaagaaaaagggaggcaagcgacgtatctcttccccttaccctagcctcctaatttgtcagaaatggatctatgagaacatcctcatgggcttaaaaacacactattgcgcccatggttacatcaaatccaagtcaatcgtgtcaaatgccaaggctcacctgaatgagagagtcgttctcaaaatggacctgcaagatttctttgacaccattacaatcaactgggtgattaacctcttctcaaagctcggatacgcgaacaacgtgagttatatcctggccagcctatgctgttttaatggggctttgcctcaaggagccgccacatctccagcactgtctaatattcttctggtgcaccttgacatgagaatttatcgcttggctaagaaatacagcctcacctatactcggtatgctgatgatctgacattcagcgggaactacataccccatacctttatcgagatcgtaaacgagataatagtggacttcggcttgaacgtcaataagcagaaaaccaagctaataatcgggaataagcagaagattgtcactggcattagtgtcaagaattcacggcttcagctccctaggaagacgaggagaaccttgaaacaggagctcttctatatcaagaaatatgggctgatctcccacatatccaagctgaaaatcaagaaacccaactacctggatagcctgcagggcaagttcgcattttggacttacgtggaaccccataatgaatttgccaggcacgtttga

SEQ ID NO: 9280 - RNA, 1029 nt, synthetic construct
  source 1..1029: mol_type = other RNA
atgaattcaatccacaaaaatcagattgcgtcctggaacagattctttgatgataggggcatatcctctcatctaacacagcaatacattgactacatcagtaaccttatctgcgccgacctgcccatcatatttgaactggaacaccttagtaaacttacgggaattaatatcgacacgctgtgcaaaattatcggtgacagcagccatttttatagggatttctccattgctaagcgccgaggagggaaacgtctcatttccgctccttatccaagcttaatgacttgtcagacctggatctatgagaacattttgaagaaaagtccatctcacttttgtagccacgggtactcacctaacaagagcattattaccaatgccaggcctcaccttgggaacaaagcaatcctgaagatcgacatcagagattttttcccctcaatatctatcaactgggtcatcaagtatttctcagacctgggatattccaacaatgtggcatattacctggcatctatatgctgtctaaataaagccttaccccaaggggctccgacatctcctgccctgtcaaacatcctgctgcgtggcctcgatcggcgcctgtacaagctgagcaagtgctacaatctgacctacactaggtatgccgatgacctcactttctctggagaacatctcccatataaggtgattagtatcatctcacagatcgtgtctgactacggtctgagtgttaacgagaaaaagacctcgttgattattggcgataagcaaaagatcgtaacagggctatccgtcagaggcgatacattacagctcccccgatcctcgcggcgggagattaagaaagagatttactacatacgcaagttcggcctcttgagccatatcagcaagctgaaaatacggaagaccaattacctggactccttggagggcaagcttagattttggttgcagatagaaccaggtaataaattcgtgcaggagagtctcatcctcattctgagcatcaaaaactga

SEQ ID NO: 9281 - RNA, 1029 nt, synthetic construct
  source 1..1029: mol_type = other RNA
atgaaaaacacccacaagaataaaattgcaggctggactaagttctttgatgaccggggggtttcaagtcacctctctgagcagtacattggctacatatctaacctgatatgcagtgacttgcccgtaatctttgagcttgagcatttatcaaagctgactggtatcaacatcgataccttatgcaagattatcggaaacagtaatcacttctaccgcgaattttcaattaataagcgcagaggcgggacaagactcattagcagcccatatccgtctcttatgacctgtcaaacctggatatacgaaaacatccttaaaaagtcccctatccaccactgctcgcacggatactctcccgataaatccattatcactaatgcccatcctcatctggggaagaaggccatcctcaagctcgatataaaagacttcttcccctccattccaatcaactgggtgattaaatacttcagcgacatcgggtattctaataatgttgcttattacctagcgagtatctgttgtttggatgaagcactgcctcagggcgccccaacaagcccaatgctgagcaacattctcctgaggagcttggatagacgtctgtataagctatcaaaaacgtacaatctcacatatacccgatatgccgacgatttgacattttccggaaaccatattccccataagatcacttctgtcatcgagcaaatcgtcctggactatggtcttctcgtgaacgaaaaaaaaacgtgcctgataatcggcgacaaacagaagattatcaccggcctatccgtgcggggtgacaggttaaagctgccgagggcatccagacgcgagattaagaaggagatttactacatacgaaagtacgggctgctgtcgcacatatccaagctgaaaatccggaaaacaaattatttggctagcctcgagggaaagctgaggttttggcttcaggtggaacctgaaaacaatttcgctcaggagagtctgactctgatcctgagcattaaatcatga

SEQ ID NO: 9282 - RNA, 1041 nt, synthetic construct
  source 1..1041: mol_type = other RNA
atgaccaaaagcgccgaggaaattaagaaggagatcaacgactggaagaagttcttcattgaccatgggctggagacaaatctcatcagtgactacttgagctatatctctagtctgatcgagaataatgcccccgtgatctttgagataaaacacctctcccaactaataggaatcaacacgagcgagttactgaaaatgatttactccccaagcgatttttaccgggaattcgaaattgctaagaggagcggcggaaaacggaaaatcagcacgccatatccatctcttaagaaatgccagaggtggatttacgagaatattttgaagaagcagtccgtctcgtcacatgcacacgggtacgttcaatctaagagtatcattaccaacgctacaatccacgccggcaaaaataacctgctcaagatggacatcaaagatttctttccctccatcagtattaactgggtcattgtgtttttcaagaaactgggatatgcacatgacatctcattctatctcgcgagcctgtgttgcctgaaaaaccatcttccccagggtgccgtgacttccccgtgtttgtccaacatcctgtctctttcattggataatcgactcggcaaactgtcaaagaagtataaggtcacttatacccgttacgcagatgatctttttttctccggcgataagattcctttaagcctaatcaagtccgttactaacattgtaacaagttatggtctgaacgtaaatactgaaaaaacccacctcatcagaacaagcaaacgcaagatagttacaggggtggctgtgcataacgaagtgattaccctgccccgcacctacaaaaagaatataactaacaccctgtaccacatcaaaaagcacgggtatttgtctcacgtctcaaaactgaaggtgagaaatccttactaccttgagtctttaattggcaagctgaatttttggcagcagatcgaacctgacaacaagttcgtggaaaaatctatatcgtacctcaaggagataaaaaagcagtga

SEQ ID NO: 9283 - RNA, 1041 nt, synthetic construct
  source 1..1041: mol_type = other RNA
atggccatgacagccgatgcaattaagaaggaaatctccaattgggaatccttcttcgtcgaccatgggattgaagagaaatttacttcggactatatgtcctacataagcccgctcattgcaaataacgtaccagtcatattcgagattaagcacctgagccagctgataggcattaacgctcccgagctcctgaaaatgatttacagcccttccaatttttaccgggaattcgagatcgccaagcggaccggaggcaaacgcaaaatttctaccccatacccctcactgaaaaagtgtcagagttggatctacgagaatatcctgaagaatcgcacaatcagcccgtatgcgcatggatatgtgcaaacaaggtctatcatcacgaatgctaaaatgcacgtcggcaagaacaacttactgaagatggacatcaaaaatttcttcccatcaatcagtatcaactgggtgatcgtgtttttcaaaaagttgggctatgcccatgatatatctttttacttggctagtctgtgctgtctgaataacagactaccacagggggcagtgacttctccctgcctttctaacattctcaccctcagcttagataatcgtttgggcaagctgagtgaaaaataccaggtcacatacaccagatacgcagacgacctgttctttttcggagaaaaaatccctcttagcttgattaagtcagtgactaacatagttacgtcctatggacttaacgtgaacattgagaaaacccacctgatcagggcttcaaagcgaaagattgttactggtgtcgccgtacataatgatgttatcaccctgcctagggcgtataagaaaaacatagccaacaccttttaccacattaagaagcacggttatctctcccacatctccaagttaaaagtgaaaaacccctattacctcgagagcctcatcgggaaacttaatttttggcagcaaatcgagcctgataatgagtttgtgaagaactcgatttcttatctaaagaagctgaagaaacagtga

SEQ ID NO: 9284 - RNA, 1050 nt, synthetic construct
  source 1..1050: mol_type = other RNA
atgaaaaacgaatttctgattagtccattgaggcagaatctcgatgattggaaagactttttcaatgacagagggcttgaagaatccttaatcaacgactacatctcatatatcaagcccctgctcaggaataacgtgcctgtaatattcgagattcaacatttgagtctgctgattggcgtgccagttatagagttgaaaaagatgatcttcagccctaatcatttttaccgcaccttcgagatacctaaaaagagtgggggctcccggcagatcacaacaccgtatccgtccctgaaaaggtgccaaaaatggatctacaacaatatcctgaagaagaatagagtccatcagaatgcccatgggtacgtcttgagcaaatcaattctctccaacgccgccacccatgtcaaccagaagaatatcataaagattgacatcaaggacttctttcccagcttgaaaataaactgggtcgttaactatttcaagagacttggatacagccacgatatttctttctatctgtctagtctatgctgtctgaataattctctcccccagggtgcggtgacttctccctatctgtctaacattctgactctttcccttgatcggaagttaagcaaatatgcagaaaatcacggtctgaattatagccggtatgccgacgatatttttctgtcgggcaactttgtgccactcgattgtttctccgaggttaaaaagatcattaagggatacgggtttaacataaataacggcaaaagccgattcctgaatgagaacaaacgtaagatcgtgaccggaatcgctgtgcacaacgaattcatgacgctcccccgaacaaaaaagaaggagctgatgaacgtgttttaccacattaagaagtatggctacatctcacacgtagcaaagatgaagatcaaaaacccttactacatcgactcacttatcggacgcttcggtttttggaaacagattgagccaaataataccttagtgattcactgcctcgcttacctaaagaacattaagtcgaacatctga

SEQ ID NO: 9285 - RNA, 1035 nt, synthetic construct
  source 1..1035: mol_type = other RNA
atgtcccatgaaatcgagcaggtgaaaacaccaaaacaatggcgtctgtattttgatgatatcggactgaaggaggagtacatcgagctttatattgacatcgttgaaaggctgtacaagaacaaaaacccaatcatcttcgagatagaacatttctctaaactggtgggcgtagaggtgcaaaccttattttcaatgatattcagcgaagagaacttctatcggcagttcgctatcaaaaagaagctggggggcgaaagaatcatcactattccgagccccagtctgatgcttgtgcagagatggatctataaatacattctgaagaccaagaaggtccattatgccgctcacgggtttaacttcaacaaatcaatcatcacgaacgccaaaatgcacgtcgggcacaaagtttttctgaagatcgacctgaaggacttctttccttcgattccaatatcttggatcgtgaactactttaatcaacagggctatccccccaaaatatcctactatctagcaagcttttgtactttcaatgaatgcttgcctcagggcgcaccaactagtcccatactttccaacattttgttctaccaactagacaagaagttgtacaagtacagcaagaagaataatctcacctataccaggtatgcggacgacctcattttttctggagactatattcctctgaaattccggaattttgtcatatacctcattaagcagtacggttttaaagtaaaccctaagaagacaagtctcaaagtgaatgccggacagaacattgttacaggcatcctgattaaggatgatatcttcgtgcctaaaaaatacaaacgcaagattagacaggagatgttctacatcaataagtatgacttactctctcacatctcaaacgccaatattaaggatccgaattacatttactccttgcaggggaggattaactttgtcatttccgtggaacccgagaatgaggaattcatacgctacaaaaatgagattgatcgaatcatcaagggttga

SEQ ID NO: 9286 - RNA, 1038 nt, synthetic construct
  source 1..1038: mol_type = other RNA
atgtcatatacgatagaaagtgtcaaaactccgaaagagtggcttatttattttgaggatatggggatcaaggaggagtacatcagtatctacattgagataatcgagaagctatacaaaaacaagaaccccattatcttcgaaatcgaacacttcagcaaactggtgggggtcgaagtcgacgtgctgctgtctatgattttcagcaagaagaacttttaccgacagttcaagattaagaaaaagcttggaggcgacaggctgattacagtgccttccccaagcctgatgatggttcagaaatggatttacaacaacatactcattgacaagaagatccactatagcgcccatggctttaactttaacaagtccattatcaccaacgcgaaaatgcatgttggacataaggttttcctgaagatagacctgaaagatttctttccatccattcctatcaattggatcatcaactactttaagcagcaaggatatcccccaaagattgctttttatttggcaagtctctgcacactggataattcattacctcagggggctcccacctctcccattctctcaaatatcctgttctataaccttgacaagaccctctacaagttcagtaagaaaaacaaccttacatacacaaggtacgcagatgacctcgtcttctctggtgactacatctctttgaaatttcgtaacttcgtgattttcctgatcaagaaatacggctttaaggtcaactccaaaaaaaccagcttgaaaattaacgccggtcagaatatagtaactggaattctcgtaaaggattccgtgttcgtgccaaagaaatataaaagaaaactgcggcaagagatgttcttcatcaataagtttggcatcttgagccacatagccacttcgaatatccgcgatcctaattatttatattccctaatggggcggatcaattttgtgctgtctgtggaacccaataatgaagagtttatagagtaccagaacaaaatcaaggccatcattaagaaaggctga

SEQ ID NO: 9287 - RNA, 1041 nt, synthetic construct
  source 1..1041: mol_type = other RNA
atgttatattccatcgaacctgttaagtctccgcaggaatggagaacatacttcgacaatatcggattaaaggaggagtatattgagatctatctccagatcatcgaggagttgtatagaaagaagaatcctatcatcttcgaaattgagcacttctccaagctagtcggcgtggaagtgaccgtgctgctgagcatgatttttagcaaggagaaattctaccgccagtttaaaatcccgaaaaaaaaaggtggcgagcgcactatcacagtccccagcccatccctgatgttggtgcagaaatggatctacaactacattctcatcaacaagaaaatccattactccgctcacggcttcaacttcaatcgatccataataactaacgctaaaatgcatgtagggaataaggcattcctgaagattgatctgaaagatttctttccctctatacctattggctggatagtcaattactttaagcagcaaggttatccacccaaaatcagtttctacctggcctcactgtgcactctcaaagatagtcttccacagggggcccctacatcgcccattctcagcaatattatcttctacaaccttgacaaggtgctgtacaagttttcaaaaaaaaacgcccttacctataccaggtatgcagatgaccttgtattcagcgggaagtatatcagtctgaagtttaggaacttcgtgatcttcctgattcggaaatacggatttcaaataaacagcaagaagacgtctttgaaggtcaatgccggccaaaacattatcacaggaatactagtcaaggacaccatttttgttcctaaaaagtataagcggaagctgcgacaggagatgttttacattaagaaatttgggctgctctctcacatagcgactaccaatattcgggacccaaattatgtgtattcactgatgggacgtttaaactttgtgttgaccgttgaacccgagaacgaagaattcatcgaataccagaattacatcaagaggattctcaaaaaagctgattga

SEQ ID NO: 9288 - RNA, 1020 nt, synthetic construct
  source 1..1020: mol_type = other RNA
atggacaaaaaggagatcaagaagtggacaaactatttcctggatgtgggcttaaaggacgaatatatcatcgagtaccaggacctgattaccaatttaattaagaatgacgtgccagtcatctttgagattgatcatctgtccaagttggtaggcatcaatgtcagcacgctgtacgccatgattttcagtactgaaaaattctaccggacttttgaaattcccaaaaagaacggaggcatgcgcactataacgacaccccataagtctctgaaactggtacagaaatggatacaccacaacatattgaaatacaagtacgtgcacaaatcagctcatgggttcgtcaaaaataggtccatcattaccaatgcactgatccataaggagagtaaagtgttcctgcaactagacatcaagaacttttttcctagtattccactgaactggataatcaactatttctacaagcttggctattcaaagaagatttcattttacctcgcaaagttgtgttgttatgagaatagcctatgccaaggcgcgcctacatcccctatactgagcaatcttgtgttctttgccctggataagaagcttaatcactatgctgacaagaacaacataatctacacaagatacgccgacgacatcgttttttctggtgataacatcccactctctttcaagaacttctgcatctttctcatcaaggatttcgggttcaaaatcaactcgaaaaagaccaaattgaagatcgaggtcggacagaatatcattgccggtatacagatcaaggattccgatatttgggttcccaaaaaatacaagaagaaactcacccaggaactgtattacattcagaagtatgggctgatttctcacatcagcaaacgtcgaattaaagacccgaactatgtttattccttactcgggaaagtgaattttattcttagtgtggagcccggaaataccaaatttctcgaatacaagaacctgctcaatagcatcattaaatga

SEQ ID NO: 9289 - RNA, 1020 nt, synthetic construct
  source 1..1020: mol_type = other RNA
atgacaaagcacatcgccaagaactggactaagtattttgaggatataggactgaaagacgaatacattgaggaatattccgaagtgatcaagaaactcgtcggaaacaatgtccccgtgattttcgaaatcgaacacctgagtaaactcgtggggattaacgtttccaccttatattcaatgatcttcagtacggagaaattctatcgttcatttgatattctccagaagaatggagagaatagacgaataacaactcccttcaaaagcttaaagaaggttcagaaatggatttaccagagtatactgaaacaaggctacatccataaatctgcccatgggttcgtagagaagaaaagcattattaccaatgcctccgtgcacaaaagctctaaagtttttctgcaactggatatacggaagtttttcccatctatccctctctcctgggtgattaattacttccataagctcggctattctaagaaactttccttttatctggctaaactatgttgctataaggaaagcttggcacagggcgctccaaccagccctgctctgagtaatttgatcttctttggccttgacaaaaagttgaacaactacgccattaagaacaatattctctacacaaggtacgcagatgacatggtattttcaggtaccgagatcagcctgaacttcaagaatttctgcatcttccttataaagaagtacggatttaaggtgaactccgaaaaaacacgcctgaagataaacgtcaatcagaatatcatcactggcgtccagattaagaataataacatctttgcgccgaaaaagtacaaaagggagctgattcaggacctatactacatcaagaagtttggtcttatctctcacgtctcgaaaaagagaattaaagaccctaactatgtgtacagcttgttagggaaaattaacttcgtgctgtcaatcgaacccgagaatctggagtttatcaactataagaacatcctgaagaacatcatagagtga

SEQ ID NO: 9290 - RNA, 1017 nt, synthetic construct
  source 1..1017: mol_type = other RNA
atgtctaataaggctaaagagtgggtggcctatttcaatgatgtgggactccaagaggcctacattaatgagtatgggctggtcgtggagaaactcctgaagaacaaagttcccgtgattttcgaaattgaacacttgtctaagctggttggtatcaatgtaaaaactctgtacagcatgattttcagccctgaaaagttttatcgggagtttgagatcccgaaaaagaaaggaggtactagaaagatcaacgccccctttaaatccttaaaaaaggtccagcaatggatctacatcaacatcctcaaagtgaagaataagaacgcatatgctcacggctttcttgacgggaaaagtatcatcacaaatgcacgcgaacacattaatagctccgtgtttttacatctggacatcaaagactttttcagcagtatacctataggctggattgtgaatttcttctattctctgggctatagcaaaaaaatatccttctacctgtcgcgtctgtgttgctttaaggactgcctggtgcaggggtcttcatgtagtccagcattgtccaacatactccttgtcaaccttgatcggaagttaaacaaatatgcgttgaagaacaaccttaagtacagcaggtatgccgatgatctggtgttttcagggaactacatttcactctcttttaggaatttctgcagctttttgatcaaaaactacggcttcaagattaacaccaaaaaaacacgactcaaagtcaatgcctcccagaatataattacgggcattcagatcaagggtaatatcttgtcagtgcctaagcagtataagagaaagctaaaacaggagatctactacattgagaagtacggattcatttcccatgttaacaagaagaagatcaagaacccagactacctcgctagtctgatcggacgcgtaaatttcgtcctgaatgttgagcccaacaacctggaattcaccgaatacaagaagatactatcgaatctgatccagtga

SEQ ID NO: 9291 - RNA, 1023 nt, synthetic construct
  source 1..1023: mol_type = other RNA
atgcaactctctcagtgggagacatattttcaggacattgggattagcgagcagtacattgacgaatacttggagattatttcgaaactctccaagaagaaattgcccattatcttcgagattgaacaattctccaaacttgtcgggatcgagctgaatatactgtacaagatgatattctcacccgagagcttctaccacgagttttatatcaaaaagaagaagggcgggcgtaggaagatagtggtccctttcccctcattactgctcattcaacgatggatttacaagaatatcctgctcaagtgcacatgtcacagcaacatccacggattcatacagaagaagtctatcatcactaacgccaaggcacatattgggggaagagatttcctgaaactggatcttcaaaacttctttccctctatcagtctgaattgggtggtgaggtattttaatgaactagggtacccgaagaagatatcattttacctggctcgcttatgttgctacgaagagggtctaggtcagggagccccaaccagccctttcttgtctaacctgttgttattttccctggacaaacgcctcaacaatctggcgaaaaagaatgagagcacttatacacggtacgctgacgatattgtgtttagcggtgaaaagatcaccaagggattttatagtctcgttgaaagtatcgtaggagatttcggcctcactctgaatgagtccaaaacccagctccggaaaaataaaacccagaacatcattacgggcatagttgtagtgaatgatggcattaaaatccctaagacctacaagaagaagatcagacaggagatctactatatcaacaaatatggcctgatgtcccatctgtctaaaatcaggaacaaaaacccaacatatctactttccttgcttggcaaaatcaattatgtcctttcagtggagaatgacaaccaggaatttaaagactaccagaagaagatggaaaacttcatcaaaaacccactgaactga

SEQ ID NO: 9292 - RNA, 1014 nt, synthetic construct
  source 1..1014: mol_type = other RNA
atgaaactcaagtcccctaaggagtgggagggctatataaagagtcgggggctggagccagaattagagaagacactttcagcatacgcatcaaatctgtcttctaaaaacttgcctgttatcttcgagctagaacatttgtccaacatattagacatcgaacatgacgagatgcgcgttatggtgaatgggagcgactggttttatagagagtttgagattcccaagcgcaggggtggtgtccgcgtgataaaagtgccctattccagcctgatgcacgcccaatactggctgaaagaggccattctcgacaaagaattcatccactctaaagctcacggcttcgctaacggaaagagcatcaaaagtcatgtggagtgccattgtcactctctccacattctcaaactcgatatcaaggattttttcccgacctttaaaaagagctgggtagccaactactttaaccagctgggctacgcaccgaatgtggctttctatctggctaatcttactaccgataccgtgagtcttgtgcagggagcgccaactagccctgttctgtccaacatcctttttcgtaaagccgatcgggcattaaataagatcgcggtcaaatacgaactttcttactcaagatacgccgacgatatgtgtttttccggcaattacattcccaagaagctgttgcggctcgttgagcgtattctaagatatttcgggttccagttgaattcgaggaaaacgtatctggggcctgtgaacggttgccacattacaggcattaaggtcgtcgacggccagttgaaggtcagtaggaagctgaagagagaactgcgcaaacaaatacacttcattgggaagtatggactgctctcacatgtgaacaagaaacggatccgagatgtattcttcgtggagcgactgatgggacagctcaatttctggaagtttatcgaacccgagcacgaatttccaatcgaagccctaagcctgctgaggcagaagctgtga

SEQ ID NO: 9293 - RNA, 1095 nt, synthetic construct
  source 1..1095: mol_type = other RNA
atgagagcggccaaccgaaagttatttgatcatttgctgtttctcctgacaaatatgtcgaaacagaaagagatcaacaaatggaagacattcttcaagaatcggggcctctcagaagagatttctgacaagtacattaactacatcacaaagctgcttgagaaccgaaccccaataatcttcgagtttaatcacttggcactgctgctaggaagacagcccttctacctcgcctccgtggttaatgcacctaacaatcactatcgtagcttcaagctgaaaaaaagaagcggcggctttagggagattaccacacccttcccggcgcttctcgagatgcaatactggatcttcaacaacatcctaaaaaacgttagtatcaacccttgcgctcacggctttgctcacaagaaatctatcattacgaatgccaccttacatgccggccagaatgaattgctgaaactggatctgaaagacttctttccgagcatcaacatcaatcgcattatttatgtgttcaagtccctggggtaccccaatgaaatagcattctatctcgcatctatttgttcctacgaagaatcacttccacagggggcccctactagcccagtgctgtccaacatcattgccaaacagctggataagcgcctgattaacctggctaagaaatacaacctcaaatttacccggtatgctgacgatctcacttttagtggaaaaaacattccagcaaagttcattgagtatatcaaggtcatcatagaagaagaggggttcgaccttaacgaggctaagactaggttatacaagtcaaatcgtaagagaatcgtgaccggaatcagtgtgttggaaaaggagataaagatacccagggagtacaaacggaacctgcgccaggaactacactttatcttcaagtatagcttcgagtctcatataaagaagaagaagattcggaaatccaattatcttgagagcctgattggtaaagtaaatttttggttgtcagtcgaacccaagaatggttttgccctggacgccaaaaaaaggctctttgagatctacaagaattattaccctcaacagtga

SEQ ID NO: 9294 - RNA, 1035 nt, synthetic construct
  source 1..1035: mol_type = other RNA
atgaccagcgacgccattatcgagaagtggaacaatttctttactcggaagggcattaaccagaccttacacgacaagtatatagagtacatcaaaattctcgtcaagaacaatgtgcctataatctttgacttcaatcacttgcgactgctcatgggacgatcggatctgtattttactagcgtaattaatagccctgagaaccactaccgtagttttaagcttaaaaaacggaacggggggtttagagaaatattggccccttatcccgctttgctggaaatgcaatactggatctacaataacattctcaagaaaatcccgatcagcccctactctcatggcttcgcccataaaaagtccatcatcaccaatgctaagattcatttagggcagaaagaactgctgaagcttgatttgaaggacttcttcccatccataaagatcaacagaatcatctatgtgttcaaatccctgggctacacaaatcaagtcgccttttacctcgctagtctgtgctcatataatgaaacacttccacagggcgcacccacgtcaccataccttagcaacattatcgcaaaaaaactcgacaaaaggttaattaggctgtctaagaagtacaagctacattataccaggtatgctgatgatctgacgttctcaggtgattctatcccagccaaactgatcgagtacattaataacatagtgaacagcgagggatttacattgaacagtgagaaaactcgcctctacaagcatggtgggaaacgcattgttaccggaatttccgtgaacggaaaggagctgaaactacctaaggattataagagaaacctacggcaggagctgtacttcataatgaaatatggttacgagtcacacatcaagaagaaaaagatccgcaaggttaactatctgaatattcttctcggcaaggtgaatttctggctgtctgtcgaaccctccaataaattcgcgctggacgcacacagttttctgctcgaaacatataaaaagcacaataagtga

SEQ ID NO: 9295 - RNA, 1020 nt, synthetic construct
  source 1..1020: mol_type = other RNA
atggctaaagaccttattaaggagtggtacgatttctttactgtcaagggaattgagccccagctgcgcgacatttacatcgattatatctcactcctatcagagaataacgtgccaatcatctttgaatttaaccacctggcattattattgggcaggaaacagcattacctggcctccgtagttaacagccctgagaatcattaccgtgaatttaagctgcctaagcgaaagggggggtatagggagattagtgccccgtatcctgcactcatggagatgcaatactggatctaccagaacatcctgaagtctatccggatacactccagtgcgcacggattcatcaatagcaagtctattatcaccaacgccaagatacacaccggccagacagagctgctcaagctggacctgaaggacttctttccaagcatttctctgaatagaatcatttccgtgttcaaaaatgtgggttatccaaaccagatagctttttaccttgccaaaatctgcacttatgaagagtgtctgcctcaaggagcccccacatcaccctgcctgtccaatattatcgccaaaaacctggataaaaggctaatgaaattggccaagagcctgaacctgaggtacacgcgctatgctgatgacctcacatttagtggaaataagatccccgcaaaagtgatagagtacatcagcactataattgtcgatgagggcttcgtgattaatcaggacaagacccggttgtataagaacaagggtcagagaattgtgaccgggatctccgttctggagaaagaacttaaactcccgcgggaatacaagcgcgtccttcgacaggaactgttcttcatcgaaaagtacggcttaaaatcgcatttggctaagaagaaacagagaaaagcgaactatatcttcagccttataggcaagctgaatttttggctctctattgaaccagaaaatcaattcgcactcaaaaacattgagaaattgaagctcatcctaaactga

SEQ ID NO: 9296 - RNA, 1023 nt, synthetic construct
  source 1..1023: mol_type = other RNA
atgaaagatgaccagtactcccagtggaaaaagtattacgagagccgaggaatcctgccagagattcaggacaaactcctcaactacgctaagatccacatagataataacacacccgtgatctttaatttcgagcatctaacactgcttctgggacgtgagaagaattatctgtcctcagtagtgaattcccctgactcgcactatcggaagtttaagataaagaagagatcagggggcgagagagaaataaccgccccatacttgtcattgttggagatgcaatactggatttacaggaacatcctcatcaatgttaagattcactatgccgcgcacggctttgcacaggataaatctatcatcacgaacagtagaaaccatcttggtcagaaacacctcctgaaaatggatttaaaagacttcttcccttccataaagctgaacaggatcatttacattttcaagagcctcggctatccaaacattatcgccttttacctggcaagtatctgctcttataagggccatcttccacagggatcacccacctcccccatactcagcaacattgtttctattaccctggacaatcgcctggtcaaatttgcccggaaaatgaaattgagatacagcaggtatgctgacgaccttactttcagtggtgataagatcccgacaaattacattaagtacatcaccgacatcatcaatgatgaagggtttgaagtgaatgatactaagacaaagctgtatcttaaggccggtaaacgaattgtgactggaattagcgtgatagggaatgatcctaaactgcctagggagtataaacggaaactcaaacaagaattgcactacattttcacctacgggatcggctctcatatggccaaaaagaagattaagaagatcaactacctgtatcgcatcattggcaaagtcaacttctggctgaacatagaacccgacaacgagtatgctcgcaacgcaaaggctaagttactattactgatcgacaattga

SEQ ID NO: 9297 - RNA, 1020 nt, synthetic construct
  source 1..1020: mol_type = other RNA
atgtctaacaaagagactttcaataaatggcagagttatctagagagccgaagggttcaggaggatgtgaaagaacaatacctttcatacatccggatcctcctggataagaatgttcctatcatcttcacttttgaccacctgtcccttttactaggaaggagcaaaaattacctcgcttctgtagtcaattcacctgacaaccattatagagaattcaagatcaagaagcggagtggcggatttagaaaaatcaccaccccattccccgctctgctcgaaatgcagtactggatctacaacaacattttaaagaagatccccattcatagttcggcccacggttttacacacaaaaagtccatcattacgaattccaagattcacgcaggcgaaaatcatctcctgaaaatagaccttaaggacttttttcccaatattgacatcaaccgaatcattttcatctttaaggaactgggctaccctaacattatagcgttttatttggctcagatttgttgctttgacggcaccctgccgcaaggagccccaacatcccccattctgagcaacatcgtaaccagacgcttcgataagagactgatacatttagcaaagaagttcaacttgaagtacacccgttatgcagacgatttgacattctcagggagcacgatttctgccatttttatatcttacgtgaacgacattgtgatcgatgagggtttcgtgataaatgattccaagactaggttgtatcagaagaaaagtaaacgcatagtgacagggatcagcgttattgagaaagagatcaagatcccacgcaactataaacgggatctcaagcaggaactgcactatatcttcaaattcgggctcaaatctcacatgtcaaagaacaagataaggaaagccaattacctgttcgtgatccttggcaaagtcaatttttggctgagcgtcgagcctaagaacgaatacgccctcgaggccaaaactaagctgaaagagctgatttga

SEQ ID NO: 9298 - RNA, 1053 nt, synthetic construct
  source 1..1053: mol_type = other RNA
atgacgaaaaaagagattttacgggaatggagactgtatttcgaaaataggcaggttagaaaggacatttacgagaagtacattgtatacatcggagttctgttggagaacaatgtgcccattattttcaatttcgaccatctctgccttcttcttgggcgaagcaatgagtatttgagttccgtcattaattgtagttctaaccacttccgagactttgaaatcaagaagagatcagggggacaccgggccattacagcaccttatccagccctcatggaaatgcagtactggatatacaacaatattctcaaagccatacccataaattcctcagcacacgggtttactcataagaagtccattatcactaactctaacatccataaaggacagaaggaactgcttaagctggacctcaaaaacttttttccgtcgattagcatcaacaggatcatctacatcttcaaacagctgggctaccctaataacatcgccttctacctctccagcatctgctgttatgataatttcctaccacagggtgctccaacatctccaatattaagtaacatcgtaagccgcaagttggataagaggcttattaccctcgctaaaaagtttgccctgaaatataccagatatgcggatgatctaaccttttcaggcgatattatccctgctaaattcatcgactatgttacagctatcgtgtgcgacgaggggttcgaagtgaatataaacaagacacgcttgtacaagtccaaaggcaaacgtatcgtgactggtatatcagtgagtggagacgtcatcaaggtgccccgcgattataagaggaagttgaaactggaactgcactttattaagaagtatggcctggagtctcacatcgccaaaaagaaaatacggaagtacaactacctgttcagcctggtgggcaaagtcaacttttggctgagcgtggagcctaagaatcaggaggcactggattatcaaattctgctgaacgagtacgtcaaaaagatccaacagcccttagacatcaccctctga

SEQ ID NO: 9299 - RNA, 1095 nt, synthetic construct
  source 1..1095: mol_type = other RNA
atgcttaagcataagaaagaggtggcacaccacttgtttttggacatgacaaagaaccaaatctacgagtcctggaagtgcttcttcattgagcgcggccttgatgaaaaatatagcagaccatatctagtgtacatcaaaaagatgttgtctaatgggttgcctattatattcgaaacggagcacctgagccttctactgggacggagtgcttcatatctgaactcagtggccttctctccttcatcccactaccgccagttcaaactgaagaaaagaagtggaggctttaggactattgacgttccttatccggctttactggaatgtcagtattggatctaccgtaatatcttatccgtggttcctctgaattactgtgctcatgggtttgtccccaaaaaaagtatcatcactaacgcaaaggtccatcttggtcaaaatgtcctcttaaaactggacatcgaagatttctttccaagcatctctaaagatcgagtaataggcgtatttaactttctcgggtaccccccaaaggtgtcatacttcctcgcatctctgtgttgccttaatgaatgcgttccccaaggggcccctaccagtccgaccttgtctaatattatatcctacaacctggacaagaggatcctggccttctccaaaaattttgagcttaagtacaccaggtatgccgatgacctggccatctctggtaagaacctcccaacaaagtatattgattacctccgggtcatcgtggaagatgagggatttaaaattaacgtgagtaagacccagctgtttactagacagagcaagcggattctgacaggcgtcagcattggcagcggcaagctgaaagcgcccaaagaatataaacgagtgctgtttcaggagctcttctacattaagaagttcggtctaaattcccacatatcgaagatgaaaatccgcaatcccaactatatacagagcctcgtgggaaagctgaattatatcctgtcaattgagaaggacaacttcaaagctattaactatctcaactacctcaaggagaactacaattcccagattatcaagatagacatctactga

SEQ ID NO: 9300 - RNA, 1053 nt, synthetic construct
  source 1..1053: mol_type = other RNA
atgacgaaccacaaaattatctacaacaagtgggaggactacttctcaaatcggggactggaaaaaaacttgctagacagttatctggtttacatcgacggactcctgaccaataacctccctataatttttgagtccgagcacttaagtcttctgcttgggaggaacgaggtgtaccttaactcagtcgtcttctccaccgagctccattaccgggattttaaactgagaaagagaaaaggcgggttcagaatcatctctgtaccctatcctgccctgctcgaatgccagaagtggatccataagaacatactgtccaaggtcaagatatctccctacgcccatggctttgccaagaagaagtcgatcgttaccaatgcccgaaagcatactaaccaggagcaccttttaaagatcgatctaaaggatttcttcccaagcatcaagaagggtcgtgtgatagctatgttttgcaagctcggatactctacagaggtgtccttttatcttgcgtccatatgttgtaaaatggactgcctgccacaaggtgctcccacttctcctagcatcagcaatattattgcaaagagcttggataataggctattcgctctcagccagaaatttgaaattcggtatacaagatacgccgacgatctggcattctcaggcggtaacatcccagcaaggttcattgattatgtgacagaaatcgtcaccactgaatcattcgagatcaataatagtaagactcaactgcacaaaagcaaggggaaacgcattatcaccggcgttgccgtgaatggagaaattgtaaaagcgcctaagtcttacaaacgaaaattgtttcagacgctgtactacatcgaaatttttggcttaaacagccacaggacaaaattgaaaattcgcaaccccaactatttggagtccctgatagggaaactgaattatgtgctcactattgaaccggacaattctaaggctaaaaactatctgaccatgctgattgagatcgacaagagtcgcacacacaattcggtgtataaatga

SEQ ID NO: 9301 - RNA, 1041 nt, synthetic construct
  source 1..1041: mol_type = other RNA
atgagtaaaaaaaggattctgagcaactggtctaatttctttgagcagagaggtatccctgaggacattcgggaaatatacctcaggtatattaagaagctgcttgtgaaggacgtgccaatcatatttgatttcaatcacctgtccaaactggtgggacggcagcagtggtatctggcatcagtcgttaataacacttcatctcactaccgaacattcaatctgaaaaaaagatccggagggtttcgggagatcagtgtcccctaccccgccttactgggcgttcagtactgggtgtataagaatatcctgcagaagattccaatcaataacagctctcatggcttcgcgaaaaacaagagcattatcacaaacagcaaaatccacctaggacagtctaatctcctgaagatggatttgaaagattttttcccatccatacacctggcccgtgttatcaaggtgttcaaagctctgggctacacgaccaaggtcagttactatttagcatccgtttgctgtattaatgattgcttaccccagggggctcccacctcacctatactttctaacattatttccttcgaccttgatcgacgcctgtatttgttcgccaagaagtttaacctcaagtactcaagatatgccgacgatcttaccttttcgggcgaaaatatcaacgtcaagatgattcactacatcagcgagattatcgtatcggaaggttttatcgtgaacgacaaaaaaaccaggctgcacaaggaatccgctaaacgcatagtaacagggatctctgtggcaggaagcgagctcaagctgcctaagaaatataaacgcgacctcaagcaagaactctattacataaacaagtacgggatccatagtcatgtgagctcagtgaacattaaacatactaactacatcgacgtgttgattggcaagcttaatttctggctatccgtagagcctggtgacgagtttgtggtcgagcaactcaagatgttgtacagtattaagtatccagaaagcatcccgaaatga

SEQ ID NO: 9302 - RNA, 1026 nt, synthetic construct
  source 1..1026: mol_type = other RNA
atgagcaagaaagacctgtttttctggaactcatcctttactaaggctaagatcaatgatgagatcaagcaaaactatctgagatatattgaggtgctgctgaacaacaaagtccctatcatttttgacttctttcacctcacacttctgttgggtcgcaattcaaaatacctatcgtctgttgtgaatagcaatatttcacattaccgagagtttgaaatccctaaaaaaaagggcggaacccgcaagatcaccgcaccctatcccgccctcttggattgccagaggtggatttacaacaacatcctcaagaacattaagattcacccctgcgcgcagggtttcacaaagaaaaagagcattatcacgaacgcgaagatacatgtgaaccaagacgaattcctcaagatcgatatcaaggattttttcccgtccataactatcaaccaggtgattaatatcttcaaatcctttgggtacacacagaaggttagcttctatttagcctccatatgctgttacgaccagaaccttccccagggcgctcctacaagtcctattctatctaatttagtcgctattaccctggacaaaagacttttcgcattcgccaagaaatttgacctgaagtatactcggtacgccgacgatttggccttttctggaaaaaagataaccagcaaacaccttgagtatatcaaagagatcatttcagagtgtggattcgaggctaacgacgaaaagaccttcctgcaacagaaaaagagtaaaaggattatcaccgggataagtatcagcgataatacgattaaggtgccaaagcaatataaacggaaactgaaacaggaagtgcattttatccgtaaatttggcgcattgaatgtcatacggaggaataagatcaagaatccaaattacctctactctatcattgggaagctgaatttttggatgtccgtagaaccaaataatcagttcgccaagaaagcatacaacgatctgaagcagttcataaactacaactga

SEQ ID NO: 9303 - RNA, 1020 nt, synthetic construct
  source 1..1020: mol_type = other RNA
atgagcaacaaaataatccagggttggaaaagttttttcattaaggccaagatttccgtcgaagcccgggagatctacctgaagtatatcagtacactcttatccaataaggttccgatcatttttgacttctatcatctgaccctgttgctcggaaggaactcggagtatctcgcctcagtgattaatagcaacacatcacattaccgcgaatttcagatcccaaaaaagctggggggctttagaaccatcctggctccataccccgcgctcatggacatgcagaactggatttacaagaacatcttaaacgatgtgaagatacacccatgcgcgcaagggttcactaataagaagtcaattgtcacgaatgcaaagattcacatcaatcagaaggaattcctaaagattgaccttgagaatttcttccctacaatcacaataaatcaggtaatcaacgtgttcaagaatcttggttacactcataaggtgtccttctatctggccagcatctgctgttataataagaatctgcctcagggagctcctacgtctcccattctcagtaacattattgcacttacccttgataaaaggctcttcgcattagcccagaaattcaatctcaaatatacccgatacgccgatgaccttgcctttagcggcgatgagataaacctgaagcacattgactacattaagaacataatcaacgagtgtgggtttactctaaatgaggctaaaaccgtgctgcaaaagaacaagaacaaacggatattgaccggcatttccatcgctggcgaaactgtcaaagtgcccaaaaactataaacgcaaactgaaacaggaagttcactttatcaggaaatttggcatcctgaactatatccgtagaaataagatcaagaaccccaattacttgtactctatcctgggaaaattgaatttctggctgtctgtagagcctaagaacgagtttgcaaaaaaagcctacaatgatctgaagcaacaaatacagtga

SEQ ID NO: 9304 - RNA, 1029 nt, synthetic construct
  source 1..1029: mol_type = other RNA
atgagtaagctgaagctgtacaattactggtatagcaacttcgagaagagcgggatcaaatccgagttcgtcgaaaaatatatggcatatgtctctaagctgttaaacaacaatgtgcccatcatttttgactttaatcacctctgcctgctgttgggtcgaaacggccactacttggcctcagttgtgaattctaatgtatcccactaccggatatttcagatccccaaacgttcggggggacataggaacataagcgctccttatcccgccctcctcgaatgtcagtcctggatttacgaaaatatcctggcaaagattaagatccaccccgccgcccaagggtttaccacgaaaaagtccatcattacaaacgccaagatacacataaaccaaaaccatttcctcaagatcgacctgaaagacttttttccttccatcactatcaatcaggtgattaacgtgttcaagtcaattggatacaccaacaaagttgcctattatcttgctagcatctgttgctgtgaaaacgtcctgccacaaggcgctcctacatctccagccttgtccaacatagtaggtaagacattagataaacggctctacagtttcgctaggacttacgacctgaaatatagcagatatgcggatgatcttgcatttagtggcgagcagattccatcaaagtttattgagtacatcagcgacattatccgatcttgcggattctctgttaatgaccggaaaacaatccttcagcagcagaaaaatcgcagacgcataatcaccggcattagtatctcggatgatgctataaagatccctagagagtacaagagaaaacttaagcaggagatccactgtattcgcaagttcgggatttcaagccatatcaggaggcaaaagattaagaaaaccgactacctgctgtgcgtgattggcaaagtgaaattctggctatctgtggaaccggagaatcagttcgcaactcatgccctcaatgatttgctaaacatcgcgcagcagtga

SEQ ID NO: 9305 - RNA, 1065 nt, synthetic construct
  source 1..1065: mol_type = other RNA
atgaataccagggagcagaatattatcctgaagaattgggaacagttctataacagcagaggagtcgagcccgagctgattaaagtgtacatgagttatgtggagaaacttgtgaatcagtctctgcctcctatctttgatttccggcacctgtcacttttgctgaacattaacgagtatgacttagcgagtatcgtgaacagccccagcaactattatcgcacattcgatatacctaagagaaatggaggctttcgtaccattaccgccccttacccctcattgaaaaatatccagaagtggatttaccacaacattctctccaatattaagatacatggctgcgctcatgggttcgccacttcaaggtccattctcactaacgcaaatgtccacattaatcaaaagtgcctcctcaagatagacttgaaagacttttttccctccatcccaatgtcttatgtcctccagctgtttaagtcgctcggatatgcaccgaaggttgcgttttatttgtcgagtctgtgttgttacgacgaatgtttggcccaagggtccccggtgagcccagctatatctaacatcgtagctaaacacttagatcgccggctttaccgaatcgcaaagaagtataatcttaactacagcaggtacgctgatgatatcgccttcagcggggaaagcataaacgtaaagttcatcgagtacatcaaagagataattacagattgcgggtttttcgttaatgaaaacaagatcaggctgtataaagaatacggcaacaaaatcctgacgggaatctctctagccaccggtgtgccaagactgccacgggactaccgacgctctctggagaaagagctctttttcatctacaagtacggcatcaaaggtcacatcagtcataacaaaatccggaaatccaattacctggagtcaattattggcaaggtgagatattggctgatgatcgaacccaacaatacattcgcccagcaaatgtacgaaaagctatatgcagagtacaagcttcagctgaacacttccgacattgaagttttatga

SEQ ID NO: 9306 - RNA, 1047 nt, synthetic construct
  source 1..1047: mol_type = other RNA
atgactgacttgcagctgcaaaaaatgatggaactgtggaaggcctactatagatcacgcgggattgccccggagtttgcaaatcagtgtctcgcctacgctcgttcacttctcaaacaggatatgcctgtgatcttcgatttgcctcacctgtgcctactgctcggcctagacgtgagttacctgcattccatcgtgtacggtgctgataagcactatcggaactttttcatcaggaaaaaaagcggaggcgtgcgtgagctgagtgcaccacactataccctaaaatacgtgcagacttggatatatgagaacatcctctctaaggtgaaggttaactactgcgcccacggattctgccctaagaagagtattgtaaccaacgccagggtccacgttagtaataaatacctgttgaaactcgatctgaaggatttttttccctccattacccagaatcaggtgattaatgttttcaggagcctgggctacagcaatcacgtcgcattttatctgggctctatttgttgtgttgacggccaccttccacaaggggcacccacatctccagcgctttcaaacattattgctcatcacctggataaccgcctcctgggggtggctaagaaaatgggctacaagtatacgcggtatgctgacgacctcgctttctccggagacttaatcaagcccgtgttcgtccagtacgtcgtgcgaatcatctcggaatgccatttcatagtcaatgcctccaaggtgaaactgtacaaaggaaacggggcgaagatactgacaggagtatccttagccaatggtcaaatccgcgtccccagagagtataggcggaaacttgaacaagagctttactacatcagcaactatggtttaggcgagcatataagacgccggagaatcaagaatcctcattatctggagagcgtaattgggaagacagaattttggctgatgttggagccagaaaatgaattcgcaaagcagtctctggagtacttgcgagccctctacaaccagaaatataaccagtga

SEQ ID NO: 9307 - RNA, 1044 nt, synthetic construct
  source 1..1044: mol_type = other RNA
atgatcaagaagtatccacacgagtggaaaaagtattttgactctcgctgtattcctcagaatgtgcaggatgagtacttgtcttacattaagaacctgcatgaccaagatattcccatcatatttgaaatagagcatcttgctctgctgcttggaatggagatcagcgtgctgaatcgcatgatatttggtacaaaaagtttctatcggacgtttgaaataccaaagaaatccaaggatagcgttagaattatcgacgccccttatccctctttattgtctgtccagcagtggattctaaagaacatcttgaagaacattcacatcgatgattcagcccacgcgtatatgaagaagaagtcaatactcactaacgtcacccctcacctgaacaataaagtcctcctgaaaatcgacctcaagaatttcttccccaacatagaaaaaaaccgaattatcgctgtattcctcaagctgggctacacacaaaacatttcctttgccctggcatctctatgcaccttaaataaccacttgcctcagggcgcacccacgagtccgacactttcaaacattattgcttataggctggatcggaggctttccagcctgtgcaaaaagagcgacatggtgtatactcggtacgccgacgacatggtgatcaccagtaagtacattagccttaaaacaaaggacctgattatcactatcatcgaagattgtggtttcatcgtgaataaggataaaacctacttatccaccaatcagaacaaacgaatcatcactggaatatccatccaagacggcactaccaaaattccaaggaagctcaaaagagagatcaaacaggagatgtactatctgaataaatacgggttctactcccatatcaacaagcgcaaaattacaaatcccttttacttggaaaggatcagagggcagatcctcttctggaatttcattgaatcagatagtaccctggcaaaggagatgctgtcggacatcaatcgtatcattgagatagttgagaacctcagccagtga

SEQ ID NO: 9308 - RNA, 1032 nt, synthetic construct
  source 1..1032: mol_type = other RNA
atgaacaatactaaaatcatctcgatcaaggagtggaagagcttcttcaagagccgcggaattgagcagtcacttattaacgaatacatttccaacatcgagaaattaaaggacaagaatctgccaattatctttgaaatagagcacctgtcatacttagtcaatatcaacattgagatcctcaataagatgatcttctctaataagagcttctaccaggaatttaagattcccaaaaggaataaaggagagtttcgtgagatccatgcaccctatcccagcctgaaatgtgttcaggattggatctataacaacattctacagtacgcaaagatccattacaacgcccacggctacgtgaaaaacaagagtatcaagacaaacgctaagaaacacctgaacaagaaggagctgttcaaaatagacctgaaagacttctttcctactattaagataccgaggatcattgaacaatttaaacggctcggttattccaaaaatatgagtctgtgcctggccaccttgtgctgtcagaatgattatctgacacagggcagccctacttctcctgccttatccaatctggtggcttacaaactggataaaagacttacagccctcgctaaacggaataatttggtctatacacgctatgtggatgatattgcgatctcaggggacgatatccatcactttctccagaaacttatttgcgagataatcgaagaggagggttttattgtgaactacgagaagacctatctgaacaaggaaaacagcaataagagactcttgacgggcataataattaaggatgacaagctgaccattccacgagaaaccaagaggaaactcaaacaagagatctattacatcagtaagttcgggataaagtctcaccttatctccatcaataacaagaatccctactactatgaatctctcttgggaaaactacaatactggaaattcattgaaccaacctccaaagacgtagacaagctgatcaagattcttaacgactcaatatga

SEQ ID NO: 9309 - RNA, 1056 nt, synthetic construct
  source 1..1056: mol_type = other RNA
atggacgaacaaattgacagcacagccgatagatgggtggagcatctgggcggaaccattaagtcacgcccattcagagaggcttgcacagcctacgcatccaggttagttgagaacggctttccggtcgtgttcaatctccagcatttggcgaaagtgaccgggcttaagacgagagtcgttggcagccaagtttttagaaccgaacggtactataggaagtttagcattcctaaaaggactggagggctgaggactatccataccccctacccgtccctgctactatgtcagaggtggattaactaccgggtgctcaccggaatccgggtgcacaagcacgctcatgggttcgtgagtggccggagcgtgctgtcgaatgctctgccacacctccagaaaagatggatgcttaagatggatatcaaggactttttcccttccatctccatacgcaggatcgtaccaatttttcggaggtgcgggtattctcgagacgtgtcatacttcctgtccagacagtgttgcctcgaggacgtccttccccaaggcgctgctactagtccaactctgagtaatattgtcttgaagcgcactgatagtcggctcacagctttagccgagtctttcgccgccacctacacgcgttacgccgatgacttgacattctctggggattatctccccgcacgaataatagacatcgtatcaaggattgtcactgatgaaggattccgcgtgaacaccgcgaaaacgagactggttggccctaaaggccgcaagatcgtgactggtgtgagcgtctctggtgcatctccccgactgccaagacagacaaaacgggtgcttcggcaggaattgtttcacctgcacaccaagggttatgcaaagcacaccgccgtccgccagatcctggatcctttgtatgccgagcgactgctggggaaactgtcattctggctgcagatcgagcccgacagcccttttgcgcgtcaggccctcgactggatggcagaagtacgcggaacattacaagttcttggtcgtcatacatga

SEQ ID NO: 9310 - RNA, 1029 nt, synthetic construct
  source 1..1029: mol_type = other RNA
atggaaaaagatgagatccagctttggaataagaacattagcgaagccgtaagttctaaacggtgggtcaaggcttattcaaaatacatagacgtgctgtccgaaaactccgtgccggtgatttttgagatcgatcacttggccgagatcctgggcttacggagcgatctgctggtgagggccgttaacagcgtggaaagattctaccgcccattcgaaattcctaaaagtagcggcggaacacgaaagatcaacgcaccctatcccgtgctgcttgatatccagcgttggatcggagcccatatattgagtcaggtcagaatctccgaacaggcacacggatttgtaaagaataggagcatcatccgaaacgcaagagagcatctcggtaaggaatgtatgctgaaaatggacatctccgacttcttccccgcgatatctcttaagcgggtgatcacaattttcctgtttctggggtactcaccttctgttagctattatctctctgtcctttgctgcctcgagaatcaattgccccaaggtggggcagcctcaccacagatctgtaatatcatcgctaccccgctggataggcgcctgatgtcactcgctctagcttactctttaaattacacacgatacgccgacgacctgacgttttcggggcgctacatccctattaagttcatcaaaattgtggagtccatcgccagcgatgagggctttgagattaataacaagaaaaccaagctcatgagagctaaaggccggcggattgtgactggaataagcattgggaccggggagttgaaactaccaaaaagtactaagaggtccttaaggcaggaagtctactggttggaacgtaatggtatttttgcggagagtggaagagacggcatattcgaccctctttatgtcgaccgcctcctcggcaagctgaacttctggcgctctattgagccagagaacacctatgttattgagaagattgataggctgaaggaactgatcatatcagagtcctga

SEQ ID NO: 9311 - RNA, 1053 nt, synthetic construct
  source 1..1053: mol_type = other RNA
atgtccgccaaaaaccggctgggatctagtgcttggagaaaacattttgacagcatcggatgcccatcggatcttaagagtacgtatttggcctatatcgatcgaatgaccggacgggggttcccccccattctggacttcgggcatctggctagcctccttggacgcactccagcttatctggccagcgcaatcaatggcaccaagtgtcactacagacagttcgtcattccaaaaagacgcggtggagcccgaacaatctcagctccgtatcccgctctgctcgaatgtcagcagtggataaatcgagagatcctcgagcacatagacgtgcactctgctgcccacggctttcgtagaaagcggtcaattgcgactaatgccagccagcacctgaacaaggcctgtctgctcaaaatggacattaaggacttcttccccagcataaagctgaggagggtcattgccgtgtttcgcgacttagggtatcctaaaaacatttccgtgtacttgggcaggctctgctcactcgatgggcaattgcctcagggcgcagcaacctctcctgccatgtctaacatcatcgcgaagcagctggattgccggctactgggtgtcgcaaagaaatggagactgaggtacacaaggtatgctgacgacctttgcttctcgggccctcatatctccatccagttccctaagctggtgagcaggatatgtgaagaagagggcttacagattaatgcatccaaaacacagctctgccggtctaaggggagacgcattgtaaccggactttctgtttccggcgaacgtttacgagtaccccgggcgtttaaaagagaggttcgtcaagagatgcactacatcaaggttcacgggtactggtcccatgtgagtaagcgcaagatccgcaacccattctacttgcaatcattgtacggcaaactaatgttttggaggtggattgaaccggataatagtttcgtgaacagcgcctttgatgtcctgcggaatctggtgcatgagaacggtgagtttgagaaagattga

SEQ ID NO: 9312 - RNA, 1044 nt, synthetic construct
  source 1..1044: mol_type = other RNA
atgattgaaaaaaacataaacatcgagccatgggctaatctgatcgctcgccgggttaggcgccctagcattagaaccgcagcgcttaaatatattgagcgtttaatcgccgtgggcgtcccacccattttcgactttgaacacttatcagagctggtaggtgtgcaccgtgccatcctcgctggattcgttgagtctgctggcagcttttacagaacgtttaaaatccccaagcagtccggtggttttcgcgaaatttcttccccggtgccttcgttgctcatggtccagcggtggatcaaggaaaacatcctggatgaaataccagtccacgacgccgcccacgggtttgtgaaggggaaatccgtggtgaccttcgcgcagccccatgtaaataaggctgcactgcttcatatcgacgtatcggactttttccctagcattgatttgaagagggtttacgtgttgttcaggaatataggatatgcccccaatgtcagcctcttcctcgccagactgtgctgtgtgaacgggcgattaccgcaaggggccccaactagtcctagcatctccaacattattttctcaagtatcgatgctcggctcattggactgggttgcgttgccaagctggactatactagatacgcagacaacattgtcttttctgggaattacatcaacatcaagttcctagacatcgtgagtgagatccttagcgagaactctttcaaagtgaaccggaaaaagacatttctgagtacaaaaaaaggcaagaggataattgcgggaatctcagtgtccggcgagcggattagcctcccacgagacacccgccgaaatctcaggcaacaggtccatgggctgctgaagttcggcttttttgagcatacagcccacatcggagatttggatcctatatacgcagagagagtcctgggccgcctgctattctggaagtacgtggaacccaataattcatatgttgcatcctctatacaggccctgaggggcatgcagatggatcttgattctcaggtgtga

SEQ ID NO: 9313 - RNA, 1134 nt, synthetic construct
  source 1..1134: mol_type = other RNA
atggatgggatcctcataacgatactgattatcaccggctttcttatctacaagatgatcagcagctctagaaaacaggagggttacaagaggtggaaggccaccgctagcgggggtaaggaggagagcgcctcaaagtctgagagcgggcacggagcttggttaagacgagcactgggggttacagcgccgcagtctccttatgttcccaaatttgacgacgagtccgtagtctggtgcgcctcactgctaggcgtggaggctaacaagctcaaagaaatcctcgagaatattccgacacactaccatgaattttgggtgcgtaagcggagaggagggtatcgcatgatttcagccccccttaaggaactgcaaagtatccagactaccattaacagccgcatcttgtctagtgtgactaccatccaccccgcggccgttggctttaggtgtggaagaagtgtagtggataacgcctcacctcatctcggaaagcgttacgtcctgaagatggatattcacgacttcttcttctccattcggtcccctcgcgtaaaggccaccttcgaaaaaatgggttacccagctaacgtcgcaaaagtgttccgcactctgtgctgcctacacaactccctcccacaaggagcacccaccagccctgccctctctaatatcgtcggctatgagatggacaaaaaactggctgcactggccgcggagtacggcttaacttatacaaggtacgctgatgacttaacattctcgggggatgtgttccccaaagaacagattatcccacgcatcaagcagattattcgggacgagaagtttgagccaaatcataaaaagacccggtttttgcacgaatatgaccgaaaaatcataacaggcgtgtccgtttcctctggcgtgaagttgacgattccaaagactaggaaaagggagatccggaaaaacgtctacttcatactgacaaaaggccttgtggagcatcagcggagaattggtagtaatgatcctgcctatcttaaaaggttgattggagaactgtgttattggcgatccatcgaacccgacaatacctacgtgagtgattcaataatcgcactgaagagactggaaaagcattactga

SEQ ID NO: 9314 - RNA, 1131 nt, synthetic construct
  source 1..1131: mol_type = other RNA
atggatggcattctgattacaatcattgtcattacagccttcctggtttataaaatgatctcctcaagcagaaagcaagaggggtataagagatggaaagctacatcaagtggcaaggaggaaaaaaccaccaaagtaaagtgggagcacggtgcctggctgcgacatgcactgggggaaactgttccacgcgtgcagtacgtgcagaggttcgacgagtccgccgtcgtgtggtgtgccaacctgctcggcgtcgagactgctcaactaaaggagattctccgtgatgtctcggagcattaccgtgagttttggatgcggaaaaggaaaggcggctacaggatgatctctgccccggataaagaacttcagagtatacaaacgacgattaattcacggatcctgtcttctgtgacaatgattcaccctgctgccgtggggttcagatccggtcacagcgtagtagataatgcttcaccacatctcggcaagcgatgcgtgctcaagatggacattcacgacttctttttttccattaggagccggagggtcaaaaaaacctttgagaaaatcggatatccggagaatgtgtccaaggtgttgggtgttctctgttgcctgtatcggcatcttcctcagggcgctccaacctctcctgcacttagcaacatcgtcggctatgagatggacaagaagctagcggccttagcggtggaatacggattgacctatacaagatacgcagacgatctgaccttcagcggagacgtgtttcccaaggaacagataatcccacggataaagcagattattcgcgatgaaaagtttgaacccaatcacaaaaagactagcttcatcaacgagtacggtcggaagatcatcaccggggtgtccgtttcttcgggagccaaacttactatccccaaagctcgcaaaagggaaatacgtaagaatgtctacttcatcctcactaaaggactggcagaacaccagagacgaatcggaagtagcgatcccgtgtacctgaagcgcctgatcggggaattgtgctattggagatccatcgagcctgacaacgcatacgtttctgacagtataaaccgcttaaagtgtttggagaaggggtactga

SEQ ID NO: 9315 - RNA, 1131 nt, synthetic construct
  source 1..1131: mol_type = other RNA
atgaataagatcctgattaccatcctgatcattacagggttcctgatatacaaaatgatctcttcttcccgacgccaggagggctacaagcgatggaaagctactgggggagggaaagaggagaaggtggacaagactaagtgggaacggggcagctggttatctcatgccatgggcgtaacaaccccagtcgccccatatacccctaggtttgagaaagaagcagtaatctggtgcgccgccctcctcggagttgaagtgaatcgcttggaggaaattctgaataacgtctcaggtcactaccaggaattttggatgcggaagagaagcggcggatacagaatgatttccgcccccgataaggatctccaagccattcagagcacgatctattcacgcatcctgagctccgtgacaatcgtgcatccggtggccgtgggattccgatgcggtaggtctgttgtcgataacgctgcgccacatcttggcaagcggtatgcgctgaaaatggacatccacgacttttttggtagtatccgtagccccagagtgagacagacctttaagaagattggttatcctgagaatgtgagtaaggtgcttggagccctatgttgtttgcacagacacctaccccaaggagcaccaacaagtccggctctgtccaacatcgtggggtatgaaatggatcgcaaattggcagcactggctgcggaatatgggctgacttacactagatacgccgacgacctcacgttcagcggggacgttttccctaaagagcagataattcctcaggtaaagaggattattagggacgaaaaattcgagcccaatcacaagaaaacccattttatgaaccagtcttcacgcaagatcatcaccggcgtctccgtcgcttcaggagttaaactcaccatacccaagtccaagaaaagggagatacgtaaaaacgtgtacttcattctcacaaaggggcttgcagagcatcaacggcggatcggcagtcacgatccagcttatctgaaacggctgataggcatgttgtgctactggcgtgccatcgagcctgataacacttacgcttcggacagcattgcagccttaaaaaggcttgagaagggctactga

SEQ ID NO: 9316 - RNA, 1134 nt, synthetic construct
  source 1..1134: mol_type = other RNA
atggacggtcttctcatcaccattctgatagtcacagggttcctcgtgtataagatgattagctcctctaggaagcaggaaggctacaagaggtggaaggctacggggtctggagacacagcgaacgaagaaaccgcgggtaataaatggaagcatggagcctggctgcgacatgccctcggtgtgacgactccaaaggcccgcacctatccagtatttgatgaggaggccgtggtgtggtgcgccggacttctaggcgttgaagcggtccgcctgaaagagatcttacaggatgtttcctcacactaccgcgagttctggattcgtaagcgaaagggcgggtaccgtatgattagtgcccccgacaaagaactgaagtcaatacaggatactatctatcaccgcatcttactgcccgtaaacgtgcaccccgtagcaaccggctttcgcaggcaacactcgatcgtggataatgtcagaccccacctcggaaaaagatgtgtgctgaagactgatatccacgactttttcctgagcatacgttctccacgagttaaacaaacctttgagaacattgggtaccctaagaacatttccaaggttctgggggagttatgctgccggagacggcatctgcctcagggagcatcaacatctcctgctctgagcaatatcattgcatatgagatggataggaagctggctgctatggccgaagaattcggccttgcctacacccggtatgcagacgacttgaccttttccggcgacgtgttcccgaaagagcaggtgctcgtcagagtcaaagagataatcagagaggaaaagtttgagccgaatcatgaaaagacccgattcttgaacgaatacgaccgcaaaattatcacagggatcagcgtgagtagcggcgtgaaactaactataccaaaagcacggaaaagagagattaggaaaaacgtgtacttcatcctgacaaagggtctggctgagcaccagaggagaatcggctcacatgatcctgcctatctcaaacggttgattggcacactttgttactggaggagtatcgagcccgataatacttatgtcagcgactccatcgctgccttgaagcggctccagaagggagactga

SEQ ID NO: 9317 - RNA, 1185 nt, synthetic construct
  source 1..1185: mol_type = other RNA
atgaacaccacaatttatatctctaagtactccagttcttcattcttcatccctatcgacacaatgaatggcattctgatcgcagtcttcatcgtgacgtgcctgcttgtgtacaaaattatatcctcctctaggaaacaggaaggttacaaaagatggaaagccggcaatagagacaatactgagcacactgctaacgccgggaccacacgtaagggatggtttagccagttattcgaaacttccgccccccggatctccccttggtttaaagaggaggccatctcccagtgcgccaatcttctgggagtggaggaggtaaagctcaaggagattctgaaagacgtgagtgctcactatcgagaattctggatcggcaaaaggagagggggttaccggatgatctctgcacccgacgatgagctcaagcccattcagggggctatcaaccacaggattctaagctttgtcaacgtccatccggcagctaccggatttcgctgtaaaatgagcatagcggataatgtgcggccccacttaggcaagcagtgcgtcctcaagaccgacatacacgattttttttcctctatccgaagcccaagagtgcggaacacattcgaagctatggggtaccccccagacattgccaaggttctggggaccctttgttgtctacatagatgcttacctcagggcgcgtctacatcgccagccctgtcaaacattatcagctatgagatggataagaaattgtcagccctggccgctaagtacggcctgacctatacgcggtatgctgatgatctgaccttcagcggaaatgtgttcccaggagagcagattctgtcccaagtaaaacaaatcgttcgcgaggaaaagtttgaactcaaccataagaagacaaggttcttgaaggagcatagtcgtaagataattaccggtgtttcgatatcttcaggagtgaagctcactattccgaaagcacgcaaaagggaaatccgcaagaacgtccactatattctgactaaaggcttggcagaacaccaaaggcgaatcgggagccatgaccctgcgtaccttaagagactgattggcacgctgtgttactggcgcagtatcgagcctgacaatgcctacgtgagtgattcaataactgcactcaagagcttggaaaaaaaatattga

SEQ ID NO: 9318 - RNA, 1122 nt, synthetic construct
  source 1..1122: mol_type = other RNA
atgaatggcattttgatcgctgttctgattgtaaccggactgctaatttacaagataatctcatcctcccggaaacaggaggggtataagaggtggaaggcaggaaatcgatctaacactgaggacacaactgatactgaaaccacacgtaaaggatggttcagccggtattttggcaccagtgcgctcatcacaattccgtggttcgatgaggaagctgtggtgaagtgtgcaaatttgctgggcgtggaggaggctgttctgaaagagatcttaaaggatataccgggccattaccgggagttttggataggcaaaagaaagggcggttataggatgatctctgcccctgacaaggatctgaaggccattcaagatacgataaatcacagagtcctcagcttcgtcaacttgcaccccgccgctacggggttccgatgtaaaatgtctatctctgataacgtgcggccacacctcggcaagccctatgtgcttaaaacagacattcatgacttctttgggagcattcgcgggctcagggtgcgcaaaatgttcgaaaacatgggctatccacccaaaattgcgcgtgtacttgcggccctgtgctgcgtcaggcgatgtcttccccaaggtgcttcgactagccctgccctgtcaaatatcatcagctacgagatggacaaaaagctcgccgccttagcaaccgagtataacttagtgtacactcggtacgcagacgacctgacatttagcggtgacgtgtttccagcccagcagatcctgcctctcatcaaacagatcattcgcgaagagaagtttgaaatcaaccataagaagaccagattcctctcagggcacaagagaaaaatcatcaccggtgtctccattagttcaggggttaagttgaccatcccaaaagctaaaaaacgggaaatacgcaagaacgtgcacttcatcctgacaaagggacttgccgaacaccagcgcaggattggatcccatgatcctgcatacctgaagaggctgatcggaatactatgctattggagaagtattgagcccgacaatgcatacgtcagtgattccattgccgctctgaagggcctggaaaaagagtactga

SEQ ID NO: 9319 - RNA, 1116 nt, synthetic construct
  source 1..1116: mol_type = other RNA
atggagctgttgttctgtatagtgactgttatcaccgctcttctggtcttcattatcatccggagtagtaaatctcaggagggctataagcggtggaaagccgggaactacgtgtctgacaccccttatgcaaaggaaaaaaagacaagcgccttgtttcctagatctttgttcggaaaagatgccaatttcttcggagccaaaaggtttaaagctgaagctgtttcatggtgcgccaatctcctggcagtcgaggaggacgctctcagggaggtcctggactatgtgcctcgccaatataagctgttttacattcggaagcgctccggcgggttccgtgcaattactgctccagaagataagttaagagtgatgcagcagaccatctaccaacggatcctgctgcttgcccacgttcacccagcggtaaccgggttctgcccaggcaaatccgtagcagataatgctcaggcacatctcggcagaaagaacgtgctcaaggtggacattcacgatttttttccttcgatcagaagccccaaagtccgcgcagctttccgggagatgggttattccggaccgattgccaaggtgctgggagagttatgttgctgctacaagtgtttgccacagggagcaccaacatcccccgccctgagtaatataattgcgtatccgatggacaaaaagatgatggctcttgccgacgagtacgggctagtgtacaccaggtatgccgatgacttaacattcagcggcgactacctgcccaaagacgaggtgctggcgcgtatccatggcatagtaagggaagaagggtttacgattaatgccaaaaagacacgctttctgtcagagtacaaaagaaagatcatcactggggtgtccgtcagctcaggcgaaaaaatgacgatacccaaggtgaagaagagggagattcgaaagaacgtccactacgtgctaaccaagggactcgttggtcaccaggaacatattggtagcacagatcccgtctacctgaagcgactgttgggcaacctctgttactggcgatctatcgaacctgataacaggtatgttagcgatagtatcactgcccttaaacgcctcatgtga

SEQ ID NO: 9320 - RNA, 1116 nt, synthetic construct
  source 1..1116: mol_type = other RNA
atggaactactcctcgccatcgttatagtggtaacaggctggctggtgttcagtattatccgaagcagtaagggccaagagggttataaacgttggaaagccggtaactacgcaggcgagaatccttatgctaaggagaaaaaggagtccgttagcagcctcaaaaacatattcggcagaaaggccgtagcctttgggtccaagagattcgatgcgggcgctgtgtcttggtgcgccagtctgcttggcgtgaaggaagacacactccgggaagtgttggactatgtacctaggcagtacacgcagttttatattaagaagcggtcagggggtgtgcgcattatcaccgctccacaggggcaactccgtgtaatgcagcagaccatttaccaaagggtcctgttactggccaatgttcatccagccgtgaccggattctgccccgggaaatcagtgtctgataacgcgcgcgtccacctgggaagaaaaaatgtgctgaaggtggatttgcacgacttctttccgagcattcggtcgccgaaagtgcgggcgacctttcgcgaaatgggctacagtagacctatagccaaggtcctagccgagttatgttgttgcaatcgctgtctgccccagggagctccaacttctccagctttgtccaatattatcgcatatcctatggataagaagatgatggcattagcagacgagtacggactggtctacactcggtacgcagacgatcttactttctccggggacttcctgccaaaggataaggttctgtcgaggatcgatcaggttattcgagaggaaggatttactatgaacgtgaaaaagactcgctttctgcccgagcataagagaaaaattatcacaggcgtcagcgtgtcctctggcacaaagatgaccatccctaagacgaaaaaaagggaaatcaggaaaaatgtgcactacgtcttgaccaaaggtctggcttctcatcaggagcacatagggtccacagaccccgtctacctgaaaaggcttctcggaaacctgtgctattggagaagcatcgaacccgacaaccgatatgtttcagacagcatcgccgctcttaagtcactcatgtga

SEQ ID NO: 9321 - RNA, 1113 nt, synthetic construct
  source 1..1113: mol_type = other RNA
atggaactgcttctcgggatagtgattgtggtgacatgctggatggtggtcaggatcatccgcagctcaaaaaatcaagaaggctacaagagatggcgggctggtaactacgcctctgaaaacccatatgcgaaggagaaagcatccggtcccctctcgcagggatttttttccaaacgcatcaggacatcaggggctaggcgctttgatgacggcgccatcaggtggtgtgctaacctgctggcgacggaggaaagtcgcctacgagaggtcctcgattatatcccaaggcagtacacatgtttccatgtgcgaaaaaggtccggtggcttccgctacatctctgcccctgccggggacttccgaagcatgcagcagaccatttaccataggatcctgttactggccaatattcaccccgcagtaaccggcttctgcccaggcaagtccgttagcgacaatgcacgtgtccacttaggcagaaagaacgtgctgaaagtagatttgcacgactttttccccagtattcgctcaccaagagtaagagctgcctttcgggagatgggatactccagaccgatagctaaagtgctggccgaactgtgctgtctgagatgctgtctgcctcaaggggcccctacctctccagccctttctaacatcatcgcttaccctatggacaaaaagatgatggcgttagccggcgaatacggtcttgtgtatactagatatgcagatgatttgactttcagtggggactatctccctaaagacgaggtgctcgttagaattcatcgtataattcgcgaagagggatttaccatgaatgttaagaagacccggttcctgtccgagcataagcgtaagattattactggcgtcagcgttagcagtggaaagaagatgaccctgcccaaggttaagaagcgggagatacggaaaaacgtgcactacgtcttgactaagggactggtggggcaccaggagcacatcggcagcacggatccggtctatctaaaacgactcttgggaagcctctgctattggaggtcaatcgagcccgataatcggtacgtgtctgactcaattacagcactgaaacggcttatgtga

SEQ ID NO: 9322 - RNA, 1080 nt, synthetic construct
  source 1..1080: mol_type = other RNA
atgactgtaatcctcgttactatcctgatcttcatttgtggcatgatcctcctgataatcagagagaagaagaaagagaaagacctgctgaatcggcacttgcctaatgacaactcgtttagaaatggcagtgtgttttatcatactggtatttgtaggcaggcagtgtatgacccggaagccttgaagtggtgcgccaccttcctgaacattggcgaaaaggaactatcatccttcctgcatcaccctagcgagtggtacagcctgttctggctggctaagcgaggagggggctaccgaatgatagccgcgcccaagaaggagcttaaagctgtgcatcggaccatctacgagaagatactgatcaattctgagatccaccccagtgccactggctttcgcaggaataaatccattgtggagaacgtgaggcctcacctagggaacgcccaagttcttaaggttgacattcatgacttctttggttccatccgcaaacacacggttcgtcgtacattcaagcagcttggatacgaatctggtgtagctaaaatcctggcagccctgtgctgcaaatccggacgcctgccacaaggggcccctacaagtccagcattgtctaatattatcgtcgcaggaatggatgaacagctcgcggctataagcagaagcgtcgggttgacttatacacggtacgctgatgacttgaccttttcagggaatctctccagtcatcatgcctttttagcgcaggtggaaaaggtcgtcgcagagcacaaattcgccttaaacagaaaaaagacacgcttccttgatatgtcacaccggaagatcattacagggatttccgtgagcagcggtaccaagcttaccatcccaaaggtgtttaggcgggagattcgaaagcaggtctatcacgtgctgaccaaaggcctggctgaacaccagaaatatattggctcttcagatcccgcatacctcaaaaggctcataggaagattaagctactggcatgccgtagagcccgataacacgtatgtgatccgctctctaaaagctctcaaggaactgaaccactga

SEQ ID NO: 9323 - RNA, 1167 nt, synthetic construct
  source 1..1167: mol_type = other RNA
atgaacatcaacattgtaatcctgattatcgtcttaggactgtggttgttgtacaagttgttttcctcagggcgtaaggacgattataacaggaatacttcctcatacaatcgcaatgctgataactacgacaagggggaagagaagaagaagaaccataggaagttcatcttcagtttcctgcagagagaaaaaaataagacagaggtgaaagcgaaaagacaaggttttctgaccagaattttctcgactcccctcccttttgacgatgcagcgatcacctggtgtgctaacttcctgatcgtcgagaagaaaacactgatcgagatcctgaaggatacctcagatcactatacacacttcaaactgggaaaacggagtggcgggtatcgcacgattagcgccccaaataagactctgctcaacattcagcgcgtgatctacaaaaggattctgctatctgtcaacttgaatcctgcctccatgggttttcgacagaacatttccgtggctcataatgccaaagcccacctcggaaataagcagattctcaaagtagacatcgttgacttttttggctccattaaaaagcaaaggataattgagacgttcgggaaaattggctatccctctaatatcagcgaggtgctggcagaactctgcaccctcgagggcaagttaccccagggtgctgccaccagcccgactttatctaacattgtggcccatgaaatggacgtcaagcttgtgagcatcgcccagaaaaataatcttacctacacacgctatgcagacgaccttacgtttagcggagagaatatctttttcgagctgatatttagtgagatcaacaacatagtccgggaaggcaagtttatcatacagcgtaagaagaccaggttcctaaccgagaaaagacggaaaatagttacaggtatatcagtgagttccggcaaaaaacttatgatcccaaaagccaagaaacgagaaatccggaagaatgttcactacattcttactaagggcctggctgaacaccaacggttcattgggagcactgatccttcttacatgaaaagactcatgggatacttgaacttctggctgatggtggagccagataacgaatatgtgaagaagtctataacagcactgaagaagatctga

SEQ ID NO: 9324 - RNA, 1167 nt, synthetic construct
  source 1..1167: mol_type = other RNA
atgaacaccattcttgttatcctcatcatcgctctcgggttatggctgctttataagctatttaactctggaggcaaagatgattataacaggaacacatccggctataacaggaacgccgacaattacgatagaggagaaacgaagaaggagaataacaaaaagtcaatcttctctttcctgcacaaaaagaaaagcaacacagaaaaaaaggctaaaaggcagagcatcttcgctcgtatattctccgagcccttgccttttgacgatggcgcaataacatggtgtgccaattttctgatcatcgacaagaataccctcattgggattctaaaagacactagcgatcattattcccattttaagctggggaagcgatcaggcggctacagaaccatttccgcccctgatgctactctgctgaatgttcagaagatcatctacaagcgcattctgctctcagtgaacgtccacccagccagcatgggtttccgtcagaatattagcgttacgcacaacgcgaaaacccatttaggtaataagcagatcttgaaggcagacatcacggatttcttcgggtcaattaagaagcaccgcatcattaaagcttttaggagaatcggatatccggccaatatcagtcaagtgctggccgagttgtgcacattggagaacaaattaccccagggtgcggtcactagtcctaccctttcgaatattatagcctacgacatggacatgaaactggcttccgtcgcagaaaaatctaatctgacttacacccgatacgcagatgaccttactttcagtggcgagaacatcagttttgaactgaccctgtccgagatagacaggattattcgcgaggagaaatttgtgctgcagcggaagaagacaagattcctcacagaaaagaagagaaagatcgtaacaggcataagcgtctcttctggagagaaactgatgataccaaaggcaaaaaagcgggaagtgcgcaaaaacgtacattatattctcaccaaggggctggccgaacaccaacggtttattagttccactgacccatcttacatgaaacggctaatgggatatttgaatttctggctcatggtggaacccgataatgagtacgtgaaaaaaagcatcgcggcccttaagaaggtgtga

SEQ ID NO: 9325 - RNA, 1083 nt, synthetic construct
  source 1..1083: mol_type = other RNA
atgaatattatccttgtggtcttctttatcgtactgatgctctggttgctgtttcggttgttaaacttcgatggaaacaacgtggatgtggagaagaaagaaaacggctccgtgttaaaagctaaaaagcagtctttcctcgcccggattttcagcaagcccctcccttatgatgacgaagctataacttggtgcgctaatttcctaatcatagacaagaataccctgatctccattttgagaaatacttctgcgtattactcacatttcaaactggcgaaacgtagtggcggctacagaaccatcagtgcacctaatgaagccatgttgaacatccaaaggatcatctataagagaacactgctgactgtcaacattcatccagcctcaatggggttccgcaagaatttttccgtgactcacaatgcaaaggctcacctcggcaataaccacattttgaaggtggatctctttgacttctttggctcaatcaagaaggacagagttatcaagacatttgagaagatcgggtatcctgtgaacattagccaggtcctcgccgagctatgtactctgggaggaaaattaccacagggcgcccccacaagcccgactcttagcaacattatcgcatttaacatggacatagaacttgcttcaatcgcacagaagaattctctgaggtacacacgctacgccgacgatcttaccttttcgggaacggatatagccttcgagcccctgctgacagacatcgatgtaattattcggaaggagaactttatcattcagaggaaaaagacacgtttcctgaccgaaaagaaacgaaaaatagtgaccggggtcagcattagttccgggcagaaaatgaccattcctcgggccaagcgacgcgagataagaaaaaatatgcactacatcctgaccaagggtctggtcgagcatcagcgcttccggggttctacggacccagtttatctacaaaggctgatgggttacctgaacttttggcttatggttgagcccgagaatgaatacgtgaagaggtccatcgcagctctcaaaaaactcaaaattacctga

SEQ ID NO: 9326 - RNA, 1146 nt, synthetic construct
  source 1..1146: mol_type = other RNA
atgaacaccacactgattatcctgctaatttgcttagggctctggctcctttataaagttctgaattacagaggtggggatgtcgacaattataaccgaaatattgactcctacgacaaaggagagaaaaacaaatctaagtccaggatcttctcttccaggaagtctgactccgacttcagcagtaatcctgccaaaaagcagggcttctttgcccggttattcagtgtccagctgccatttgatgacgaggcaataacctggtgtgcaaactttctgatcattgaaaaggacgtcttgatcggaatccttcggaatacgtcacagcattactcgcactttcgaatcagcaagcgctcaggtggtgtgcggatcatttctgcgcctagccccgccctcatgagcttgcagaagaccatctacaagagaattttggtatccgtgaatattcacccagcggccactgggtttaggtccaatacaagtatcgtacagaatgccaaagctcatcttggaaaaagccagatccttaaggtggacatcaccaacttcttcgggtcaatcaaaaagaggaaggtcataaaagtctttgagaacataggatatccccccaacatatcacaggtgctggctgaactgtgcaccctggacaacaaattaccgcagggggctccaacttcccctgtgctgagcaacatcattgcctcggacgttgatgtgaagcttgctgccctgagccaaaagaaagagctctcatatactagatacgcagatgatttgaccttcagtggctctaacattgatttcgaaacaacgctagccgaaattgacgaaattctgtttaaggagcggttcatcatccaaagaaagaaaaccaggcatataactgagaaacgccgcaaaattgttacaggaatcagtatctcttccggcgagaagatgacaattcctaagagcaccaaacgcgagctcagaaagaacgtgtactttatacagactaagggcctggctgagcaccaacgtttcattggctctactgatcccacatatttgaagcgtatcataggccaactgtcattctggcacatggtggaaccagataatgattttgtgaagaagagcctcagtgcactcaaaaagctgtga

SEQ ID NO: 9327 - RNA, 1173 nt, synthetic construct
  source 1..1173: mol_type = other RNA
atgaatattgctctcgtgattttgatcattttcctggtcctgtggatcttttacaagctcctgaattactccggaggagacgaatactctagggatacacgtaactacaacaggaaccctgataactatgacaagggtgaagaggtaaaaacaaccccgaaaaaaagcattttctcagtgttttccagggagaaaaaagttaaacaggcaaagaggcagagctttttcgagcggatctttagcgctcccctgccattcgatgacgccgcgattacttggtgtgccaatttcctggctgtcgagaagaatgaactcattgacattcttaagaacacgagtatccagtactcacacttcaagctaggtaaacgttctggcgggtgccggaccatcagtgcaccaaacaacgtactcctgaatatccaaaagaccatctacaagcgcatactgttgtccgtttccatacacagcgctgccactgggttcagacaaaatgtgtcggtgatccataatgcgaaggtccatctggggaagacgcaaatcattaaagtcgatcttgctgacttctttgggagtataaagaaaccccggatcattacagcctttgagaagattggataccccagtaacatcagtaaagtgctggcagaactttgcagccttgacggcaaactgccacagggggcggcaacttcccctacactctctaacataatcgcttatgacatggatgtgaaacttatagccttggcccgaaaacataatttaacatactcgcgctatgccgacgatttgactttcagcggcgaggatatcgcatttgagctgttcttgtccgaaatcgatggtattgtgcgggaggaaaagtttgtgatccagagaaagaaaacccgctttctcaccgagaataagaagaagataatcaccggagtttctgtctcctcaggcgagaagctgaccatccctaaaagcaagaaacgagagataagaaagaacgtgcactatattctcacaaaaggtctagccggccaccagaagtttattggatcaactgaccctagctatctgaagagaattgtaggctatctaaacttctggttaatggttgaacccgactccgaatatgtgaagaagtcattaatcgccctgtctaagctgcagggcaaatcttga

SEQ ID NO: 9328 - RNA, 1164 nt, synthetic construct
  source 1..1164: mol_type = other RNA
atgaacatcctgttgggcattctggccatcgcactgctgtatctcctgtacaagttgttctataagaagcgcggagacgagtattcacgcgatacatctgggtacgaccgcgggaccaattcgaacgagaaggaagagaggcctaaagaccagccaaaaaagtccgtcttcagtttttttggccggaagaatattgaaaaaccgcaaatcgccaagcgtcaggggttgatagccaggctgttcctggccccattgccctttgacgataaagccattacgtggtgcgccaatttccttgtgattgagaagaacatcctgatcgatatacttagggacacctctaaatattactctagattcaggctgggaaagcggagcggaggttttagagagatatcagcccccgtcacagctctgctgaatatccagaagaccatttacaagagaacactactctccgcaaacgtacatactagttgtaccggcttccgacaaaacgtgtccgttgttgacaacgcgaaaccgcacctcgggaagccccacgtcctcaaagtggacatcgtggattttttcggtagcattaagaagagccggataatcaaagtgtttgagtcctttggctacccaagtaatatatcacaagtactggccgagctgtgcagctttgaaggcaaacttcctcagggcgctgcgactagcccagcactgtcaaatattgtggcatatgatatggacgtgaagcttatgagtatcgctcagaagcacaacttcacgtacacacgctacgctgatgatttaacattctctggcgagaatattctattcgaggaagtcttatctgaagtgaacaatatcgtgaaggatgaaaaattcgtgatccagagaaagaagaccagattcctgactgagaaaaaaaggaagattgtaaccggtatcagcatctcatccgggaagaaactcatgatccctaaaagtaagaagcgagaagtgcggaaaaacgtccattatatcctcactaaaggactcaccgaccatcagcgttttattggtagcactgacccttcttatttgaaacggctgctcggatacctaaacttttggttaatggttgaacccgacaatgattacgttaagaaatccattgcttccctgaaaaagctttga

SEQ ID NO: 9329 - RNA, 1083 nt, synthetic construct
  source 1..1083: mol_type = other RNA
atggacatcctcatatacttcgccattgccatcattatcatttgggcaatcttcaaattgctgaattacgacaattcagccgaaaaagacaagacaagaatcaacaacaaacctcagagtccagggctgtggcagcggattacagcccctcacgtgccatacgataaccaaagtttaagctggtgctctaaattgctggcggtggatgttgttgaactcaagaaaatcctggcctacagggacattcactataaatctttccgcattggaaaacggtctgggggctatcgcactatcagcgcaccaaacgagcagttactgaacattcagaaaaccatctacaaccgcatcctgcttcccgtgggtctgcatccagcagcaactggatttaggaaggacacctcaatcaaagataatgctaagccccatctcggcaagcgactggttctaaaaatggatatcgtcgacttcttcggctccatccatgagtatagagtacgaaaaatcttccaggctattggataccccgtcaatgtctctgacgtgttggctgccctctgctgtctcagacagcgtctcccgcaaggtgcacccacaagccctgccctgagcaatatagctgcccttgagatggataagaaattggccgctctggctaccaagtataaccttacctacagcaggtatgcggacgacatgacctttagtggtgatgagtttgagaaggacaagctgataaaaatagtgaccaaggccgtgcaatcggaaaactttgcagtaaagaggtccaagacgcgctatatgggagaaaagcagcggaagattgtcactgggatttccattagctcaggcgagaagatgactatacccaaatcaaaaaagagacaggtccgacagcaagtgcactatattctgacgagggggcttgatgcccaccagcgtcacatcggcaataatgatcctgcttacctaaagcggctcgtgggctacctgaatttttggttatccgtggaaccggagaaccggtacgtgagaaactccatcaaggctctggcgaagataaagacagtagggatcgtttga

SEQ ID NO: 9330 - RNA, 1164 nt, synthetic construct
  source 1..1164: mol_type = other RNA
atgacaggtcttgtcatcatcagcgtcgctgtaattatcatttggctgatctacaagtacagtcgcaaagaagatgactattctaggaccacggaccactacaatcggaacccgaaggggtataacaaagagattaatacgtctccttcttatgccaataatcgtaaacactctacaccccctcccaaggtggagaagaaggggatattctcacagctgttcgagagaaagccaagcctgcccttcgatgataaggctataacctggtgtgccaacttcttatcagtggacgaaaacgcgctgcggttaattctcgcctaccagagtaactattacaagaaattcctattgggcaagaggagcgggggttacaggacaataagtgcaccacaggaaccactgataagcattcagcgcaccatctacaggcggatcctggctcctgttaatatccatccagcagctaccgggtttcggcataagaaatcagtcgcggataatgcccgcccccacctcggaaaagactacatgctcaaagttgacatcatcgatttttttggctcgattaaacgtgacactatacgcaagacatttcagaagatcggttatcccctaaatattgcagaagtgctcactttcctgtgctgcttgcgaggccaactccctcaaggagcccccacttcccctgccctttccaacattgtggcctatgagatggatcagcagctgtatgccttggcaacagaaaataacctgacctacaccagatacgcagacgatattactttatccggaaactccttggccaaagatgagatcctgcccgctattcagagaattgtgggcgaagctcgatttaggataaagcacaagaagacccggtatatgaccccaaacagaagaaagatcatcacaggcatcagcgtgagctcaggcgaaaagctgaccatcccgaaaacaactaaacgtgagattcggaaaaacgttcatttcatcacgactcgcggactcaatcgccaccagcaacacattaaatcccaagacccttcctatctgaaacgactgatagggcagctctgtttttggcatagtattgagccacagaacgagtacgtgcagaagtctcttgacgtacttaagaagatcgagaaaaggatcagatga

SEQ ID NO: 9331 - RNA, 1092 nt, synthetic construct
  source 1..1092: mol_type = other RNA
atgactactaccctcctcacaacactggctattctctttgggatcctcatgctggtgttgacccttagggaaaagcagagggagcggaggaaactttccggttccacacctgacgcgccctacagacaacagccaccacccgccaaccccccatctacagatcgagatccattgaatgacatatatggagcagatgcgattgctcggtgcgcggcccaactgtgcactactgagggcgagctcagggacgtactacgcgacatcagatgggctggctatactacattctggatggccaaacgccggggtgggtaccgcaatatcgaagccccaaatccgcaccttaaagccattcagagagcaattctggacagacttttgacccctctacccgtgcataccgccgctacgggctttaggcctgggttgagcatcgcagataatgcaaggccgcatctgggccgacgacgtgctctaaagactgatctgcatgatttcttcggatccattcgcagacccgcaatccgccgggtctttagggatatgggctttgatgcacacatcaccaaagtcctggttgacctgtgctcacaccggaacagattacctcaaggagccccgactagccccgccttatccaacttggtcgcagccaagatggacgaaagacttaccgctctgtcactccgccgcggcttaacgtacaccaggtatgctgacgacctgacattttcgggcgacagtttcaatagaaatgagttgattgcggacatcaagcacattgccgcctgtgatggtttcaccctcaacgcaaaaaagacgaggctcatggcttctagccgccgaatagtgaccggactgtcaataggaagtggtgagaagctgacactgccccgtgaacggaaacgagagatacggaagaacgtgcatttcgtactgaagtacggggtgaccgagcacagagagcggatccattctagcgatcctgcctatgtgaagcggctcatcggggaactttgtttctggcgtagtatcgaacctgagcacccatttgttaaccgtgctctgagacagctgcgcgccctgaggtga

SEQ ID NO: 9332 - RNA, 1032 nt, synthetic construct
  source 1..1032: mol_type = other RNA
atgaaggagcattatcagatttggctaaaggccatcgaagagtccaatactatgagcgagaacgacaagaacgcattctcaaaagtggtaattgctctctccaaatctggcgccccagtgattttcaatgtcaagcacctggctctcctgattggcgtcgatttccgggccctaaaacggatgttatatgtcagagacaggttttaccgctctttcagcataaagaaacgcaatgggggtgagcggctgatcgaggcaccttaccctagcttaaagatggttcagcgatggatactggacaacatccttgttcccagtgcgttcgtacatccctgctcggtggggtttattagcaagaaaaccatcacagataacgcccggccacacctgggacattcagtgctcctgaagatggatatcaaggattttttccccagcgtaaccgaagagttagtgagatcctacttctccaacctcgggtaccgcagcgatcttgcctccacgctggcctatctgtgttgcaaagacggacgccttccccagggaagtcctacttcaccaatgctcagtaacgtcctgttttatgagatggacaatcaactctctaagattgctttctgggacggtctttcttataccagatacgctgacgacctggccttttcaggggatagaatacggatctccatcatcgataacgtggctgccatagtccttaagtacggcctccgaatcaataatgagaagacaaggcgctccggcagcacctctagaaaaattattactggcgtttccgtgtcttcaggagaaaagttgacaattcctcgtgaagttaaacgagtcatcaggcaaaaagtgttttacgtgctcaaatacggcttgacagaccacctgaagcacatccagtcgcgtgatttgctggcaggctacaggctgctggggctgctagcgtattggcacagtgtggagccggaaaataaatatgtgttggacagtagcaaggcactgggagaaatgttgaggggtgaatga

SEQ ID NO: 9333 - RNA, 1068 nt, synthetic construct
  source 1..1068: mol_type = other RNA
atggtatggaaactgctgaagagtcttttttctacgtctttccataaggaagatgtgccagacgttcacgccgacacccaggtgcagaacaacaaaatcaactctaagtcactgaggccttctgtcgaatatctccttactaaagacctaggtcacctgtgtgaacttctcgagatcgataataaaacccagttagccccaattctactgcaccccgaggagtactaccgaacatttcgtattcccaaacgcaatggcaaaagtcgattgatttccgctcccttcacgccactgtacaggatccagaagaagatttacgagaagatcttgatccatgcccgggtccacagcgctgcaaaagggttttgcataaataccagcattgtgcataacgcaaaggagcacttacacgcaaaggatctgctgaaagtagacattaggaatttcttccctagcattcatcagagtcgcgtggtggctatattccggaatctcgggtatgagtacactttggcttatcagctcgcgtatctgtgctgtctgaatggaaagctcccacaagggtcccctacatcccctgccctgtctaacctagctctgttaagattggatagtaaactttcggagatagccggcaacagacagctcatttatacacgttacgccgacgatctcagcttctccggtaatatccttagcaagaacgaacttctcgctgagatctcaaaaaccgttcaggaggaaaagtttatcctgaacaagaagaagaccagatttatcaccggagcaaaaaggaagatcattactggcatctcgatttcaagcggaaagctgacaattcccaagtccaaaaagagagagatccgcaaagtgatctactatataaagactcgcggcatagccaagcatttgttgcacattaattccaaagatgcagaagactggtacctggagaaaatcctcggctatctgtcattttggcgggccgtcgaaccggaaaacgcgtacgttttacagtctgtgaagtatatccaaagcctgcggaaacaactgctgtacaaaaagtga

SEQ ID NO: 9334 - RNA, 1026 nt, synthetic construct
  source 1..1026: mol_type = other RNA
atgaatgagcagcaaaataatatagagatctggtaccacgagatagataaggcaaatgatttaacaagcaggcagaattcctatgccaaaaagtatgtggccacacttttgaagaataatgcggtagttatcttcgatttgtatcatttggcctgcctgatcggcatcaagtaccacatactactgaagatgtctcatagcagtaagcacttttactacgacttcaccattaaaaagagaaacggcgacgaccgtgttatatcagctccatttccgagcctgaaatacacccagaagtggatttaccaaaacatcctggcaaaagcccccatttccccgcatgccaaagggttcgtgccaaatctgagcctcctgaataacgctgaaccccaccttcatcaaaacgccatattacagatggacattgccaacttttttccatcgatcagctggaagagggtctataacgtgttcaagaacatcggttataataaccggatctccgccgctctcacaaatctatgctgtaaacacaacagtctgcctcagggagctccaactagtcctatactcagcaacattatcctgtcgaagctcgacaaacgcctttccaaactcgcagagaaacactcccttacttatactagatacgctgatgacattacattctctgggtatattatccccaatgagctgatcaacatcataagctacatcattgaagatgaaggatttattgtgaacaacaacaagacgagaattgcgcgcggaaacaagaagaaaatcgtcaccgggatttctgtgaattctgaatacctgaccatccctaggaaaaagaagcgggagatccggcaggcaatttactatatcaaaaccaaaggcctctcctctcatatggagaatatcaataacagtgaccctatttacatctatcgattattgggttacctgaatttttggaagttcattgagcccgaaaactcatatgtcatcgattcaatccgcattattaagtcacagctgtga

SEQ ID NO: 9335 - RNA, 1077 nt, synthetic construct
  source 1..1077: mol_type = other RNA
atgtcatatgacagcgaggagaacattgaacagaagctgaaaattatccgaaagtacagcaaacagaaaaatcactacgaatcgctcctgaaggatatctcaatcatggaacagaaaggatccatcctgattatcaataacaagcacctggctgacctcgtgggtatttccttcgacgggatcttgaagatcattaacagcagtcaaagcttttattacagcttctctatccccaaaaagaatggcgggtatagagtgatctcaatgcccttcccctcactgatgaaagttcaacgttggatatacgaaaatgtcttgttgaagcaccagattcataaggtagccaagggcttcgtgaaagagttatctatcaaggataatgcatctgaacacttgggatccaaggagcttctcaagatggacatccaggacttttttcctagtattagcaaaaagcgcattatctccatattcaaacgcctgggctacaacaataaagtttcttattcgctggccagcatctgttgcctcaaccagtgccttcctcagggagcaccaacatcccccaccctgagcaacatcatagcctacaagttagataatcggatccagggcttagcgaataaattcaacattatctacaccaggtacgcagatgatctgacatttagtggtgatacattccctccgtttttttattccactatacagagaatcctcctggaagagggcttcaacgtcaataaggacaagaccagactaattaaagaaggtcgccagaagattgtgactgggatatctatcagttccgacaaaatgaccatcccaaaaattaaaaagcgggagatcaggcatgctgtctatttcattctcaagcgagggctatttgctcaccaacaagccattggaaactatgacccaatatacatcgataggattattggctaccttcatttctggcagttcgtagagcctgagaatgagtttgtgcggaaaagtattatcgagataaagacgaaccttgcctcactggaagaggagtttaaggtgtatatagactctaacctgaagtactga

SEQ ID NO: 9336 - RNA, 1071 nt, synthetic construct
  source 1..1071: mol_type = other RNA
atgtacgaggccctcaacaactgggatctgtacttagacagtaagataaaggacgcaaaagttagatctgtgttaaagaagtacgttaagaacttgctgtcaaataacaccgtgatcattttcgagttcaatcacctgagtaagctcctgggcatagaaaaatcctacctcagccgactggtcttcggcactcactatttttaccagagctttaccattcccaagtctaatggggaggaaagactgatcaacgcccccaaggatattctgctggacattcagcggtggatttactataacatcttgaagggtatttccctcaatgacaattgcgtcgggtatagagagggatattccattcgcaacaatgtcgaaaagcatctgaataaagagtacctattgaagctagacctgaaggactttttccctagcatcaatattgagagggtaatcgctgtgtttaaaaatctgggctatactccatccatttcttacattctcgcttctatctgtacacttgatggatacctgcctcagggctcgcccacaagcccatgtctttctaatattattgccaaaaggcttgatgcgaggatcaatggtctgtgcaagaaattcgacctggactatagcagatatgccgatgatattacgatttcagggaataagttgccaaaaaagatgatctcctacatagagaacatcatagtggacgaaggttttgaaatcaacctaaacaaaaagcggctgctgtacaaaaacaaccaacgtatcattaccggcgtgtcaatctccagcgggtaccttaccatccctaaaaaaaagaaacgcgagttacgacaaatcatgttctatattgagtgctatggactgagtaaccatttgtttaaaaaggggctcaacgatcctatctatctcgaacgcataataggctacctttacttttggaaattcctcgagcccaacaacaaggatatcatcaggtatttcagtatcatcaagaaggagatgatcaaacagaatgaatacttcacagactttcggatcccgaatttcgaatttataggatga

SEQ ID NO: 9337 - RNA, 915 nt, synthetic construct
  source 1..915: mol_type = other RNA
atgaaccaggatctagattattggttcttctttatcgacaagagcttcagaaagatcaaggtgcggaaggccctgaaaatatacgtggagaaaattctgagcaccaacagtccaatcattttcgaattcaaccatctttccctcctgttgggcatagagaaggattatctcgccaagatcgcaaacaaaagcgctctcttttatcacgagtttcacatccctaaaagaaatggggaactgaggatcattaacagtcccaatacaatccttctgggcattcagaggtggatttatcagaatatcctgagccatattcagctgcacgagtcttgcacaggatttcgcaaagactacaacattaagcataacgcgagcaaacacttaaactctaacgtaatcctgaaaatggaccttaaagacttttttccctcaattaacaagcgacgcgtcatttcagtctttaagaacatcggttatacccggaatatttcgtacaccttggcatcattatgttgtaaggacgactctctaccacaaggtgccccgacttctcctttcctgagtaatatcatagctaaacgcctcgaccggaggttgaatgctctgtgccagaagttcaatttgaattacacaagatacgccgatgatctgaccatctccggagatacgatatccaagaagcttataagctatatctccgatatcattaacgacgaggggtttatcgtgaatcaggataaaactaggctcctctacaaaaataatcgtaagatcatcactggaatcagtatttcctctgacaaactgacaattcccaagaaacgtaagcgggaaattcgacactcaatttacttcatcaagaagtacggcatattcgaacatgttaacagacaacagaaagtggacataatctga

SEQ ID NO: 9338 - RNA, 1074 nt, synthetic construct
  source 1..1074: mol_type = other RNA
atggaaaccgccaaatacaaccttaatatccagagactgatagaagataccttccggggagagaaaaccctcaatgccttgaatatatactccaagggcctgattaacaagaatcttcctatcatcctctctaaggaccacctcgctagcttgctaggccacccattaaatctgatcaacaacgtaatctactcaccagaatctttctatcggtccttctatatccctaaaaagaacaataacggtaagcgagtaatccacgcccccaaggggatccttctggacctgcagcagaagatttacgagtacatactcagtgctatacctgttcacgaaaaagcgacgggctacgtcgcaaacaagactataaaagataacgctattccacatctgaataccaatgaaatcctcaaggtggacctgaaagactttttcccctccattaactttaaccgagtgatcaatgtctttctgaaagccggctacactagggatattagtttcagcctcgcacgcatctgcacattgcataattcgctacctcaaggtgccccaaccagcccgatcctaagtaacctcatcattaagcgtttagatattcgccttgagaagctctctaaaaaactgaagctgaactatacaaggtatgctgacgacctgacatttagcggagattccattaccatttcattccttcattacgtgaagagcattattaattccgagggatttaaggtcaataagaagaaattgcggatcctgcgcaagtctcacaagaaagtgatcactgggattagtattacgaacaacgaactgaaagtgcccagggagaaaaagagaatagtgaggcaggccgtttactttattaagaaacacgggttccttaatcacttggagcatatagacagattcgaccccatcatgctggaaaagctcctgggctatgcgtattattggaaattcattgaggatagcgagtcctctaagtcaatcatctctgttctgaagctggagatcgcaaaattgaactccagcacatcaaatttacatactcacctggagtttgtgaaatga

SEQ ID NO: 9339 - RNA, 1083 nt, synthetic construct
  source 1..1083: mol_type = other RNA
atgaaggtggtcagcccctcatccttcttcaccatcatgacacaggagcaggagtttgagatcaataaatggaatggattcatcagcgagaacattaaaggggataagacgaagaaagcccttagcctatacgttgagaaactgattcaaaaggataccgtggttatcattgactttaaccatctggccatgcttcttggtattcaagcaaatactttcgcatccatcatcgctaatacagagagcttttattacaacttcgaaatacccaaaaggtctggaggcacccggactatatctgcgccataccccgtgcttttaaacgcacagaagtggatttatgacaacatcctgaacaaaatcaaggtgcatgataacgccaaaggttttataaagaagacatcaattgccgacaatgcccgagtgcacttagatcgcgactacatcctgaaaatggacatcgaaaacttttttccttccattaagatgaaccgggtgatgtccatcttccgaaatctcgggtataccaaaaagatatcctactacctatcgtctatttgctgtctccacggatttttgcctcagggagcagtcacttcaccttgcttgagtaacattatcgctaaaagaatggatgctcggatcaccggactcgccgctaggttcgcgctcaactatacgcgctacgccgacgatttcacactgagtggggacattctgccacccaaaattatcgactatattgaggaaatcgtgaatcaggaaggcttcctgatcaataagaagaagacctcactcatcggtaaagggaagcagaagataataactggcatttctatctccagtggcgagctgaagatccctagggagaagaagcgtgaggtgagacagagcgttcactacgtcctgcgcaatggcttatttgaacatcaaaagcacattgactcttttgatccgatctatgtagaaagactgctggggtatctgttcttctggttgagtgtagaaccagacaataattttgtcaagagctccataagcaaactcaaagattacacaaaagtcttggatggcattaactga

SEQ ID NO: 9340 - RNA, 1041 nt, synthetic construct
  source 1..1041: mol_type = other RNA
atgaacgacaacaaaaatatcctcgtgaaagaatgggacgcatttatttctgagaacatcaggggcgctaaaacacagattgccgtcaagacgtacgtgaataagctgatatccaacaataccgtggtgattcttgactttaatcacttggctctcttgctaggcatcgaagttgatgttctggcccgcattacatcacacagcgagagcttctactacgactttgaaatccccaaaagggatggcaaatctcgtaacattagcgcgccttatccagtacttctgcagagtcagcggtggatatacaaaaatatcctgtctaagcagcctatccatgactgctctaaggggttcaaaaagaatacctccatagtcgacaacgcaaaagtgcacctcaaccagaagattctcttaaagatggatatagaggacttcttcccctctattaaactgaaccgggtaatcagcgtgtttcgcgtgctcgggtatactaagaagatttcatactatcttgccagcatttgctgttataagggggctcttccacaaggcggagtcacttcgccctccctctccaacattattaccaagagattagattaccgcctgaatggtttagccagcaagtttgacctgaagtacactcgatacgcagacgatttcacattcagtggtgaatatctaccgatcaagatcatagactacattaagtccatcgtctctaatgagggatttaagatcaaggatagcaagacaaagatgataggttccaagcgacagaaaatcgttaccggcatctcaatctcctcagggaaaatgactatcccaagaaaaaccaagagggagctgagaaagaacgtgcattatttgctgaaaaatggactgagcaaacatttggagcacaatcggattaatgatcccatctacacggagagaatgatcggatatctgcatttctggcacagtgtggaacctaacaacaaatatgtcaaagagagtctgaaaaagctcaaagattacagtatccaactggattcatga

SEQ ID NO: 9341 - RNA, 951 nt, synthetic construct
  source 1..951: mol_type = other RNA
atgcagatcgattcacacgtacacatgcttctcggcattagtaccgaggaggaattgagcgtgctgtctagaattatagctagcccaagcaatttttatcgggagttcaaagtgcccaaaaagagcggtggaacacgcaccattagctcaccgtacccgtctttagccatcatccagagtaacatcctcaataacctttttttcccatttgaggctaattcttccgcctacgcttatgtgaaaggcaaaagcgctattgatcatgcacgaatccatgtcaacgggagtgaactgttaaagttggatatcaaggacttctttccctctatttctcggcaaatggtctttgaggccctgcaaagatcaggcgccaaggccgacgtttgcttctacacgagtttgatttgcatcctagataatgggttgcctcagggggcctgtacatcccccgcactgagcaatctggtgttttcacctatcgatgtgaggctgactggcctggcgaatttcttcggcctgaagtactcgcgatacgctgacgacctggcgttctcaggggagtttattcctcgtgatttggcatcccttgtcggagagattctcctggaatacgactttcacctcaaccacaaaaagacccagttaaaactggcggggaggaaaaagatagtgactggcgtgtctatttcctccggtcaggtcagagctccaaagtccttcaaaaggaagctacgcgcccagatttatgaacttgagaagaacatcggaagtctggcaaggctgcccgacttcgacccacttatatatgaacgcctcatcggacggataaactatctgctacaaatcgagcctgaaaacaattatgcaaaggtaaaaaaggcctacctcagcaagtgtcatcaggacttcctcggtctggttgatgaacagatcatctccgcctttgtttga

SEQ ID NO: 9342 - RNA, 954 nt, synthetic construct
  source 1..954: mol_type = other RNA
atgcagatggacagccatatccttaaattgctggggatatcctcaaaggaaaaccttgccatcctctcacgtatcattgcttctcctccatctttctatcgcgaattcaagatccccaagcggagcggaggtgtccggactatatctgcaccatatccttccctgtcttacatccagagtaacattttcaactcgttcctaagctccgtagagtgtaatctctcagcctacgcgtatgttaagggtaaatccgcaattgatcacgctcgcgtgcatattaacggaaaagaactcttgaagctggatataaaggatttctttccaagcatcagcaaacagatggtctttgaagctctgcaaagagaaggcggcgagaattctgcctgcttttatatctccaacctgtgcacattaaacgatgagttgccacagggggcctgtacctctcccgttctgagtaatctagtattttccccgatcgacattcggctaagtgccctggctaagtttctcgggatcgactactccaggtacgcggatgaccttgctttctctggcgactttatccctcgcgacctggcatccctggtgggcaagattatactggagtacgggttctttttgaacgaaaaaaaaacccagttcaagcttgacggccgaaagaagattgtgacaggagtttcaatttcgagtggtgagctcaaagcaccccgggtgttcaagaggaaactcagggcacagatttacgaactggagcgaaatgtgagcaatttagccaggctgcctagctttgaccccttggtgtacgagagactgctcggaagactgaattatctgttgcaaatcgagccggaaaatcagtatgccaaagccaagaaaaagaccatcagtgagagccaccagagattcctgggcctcgtggatgagcagcaagtcgtctcacttctgttatga

SEQ ID NO: 9343 - RNA, 948 nt, synthetic construct
  source 1..948: mol_type = other RNA
atggaatttgaagtgtatcccattctggggattggtagcgtggaagagcgtgccatcctgtcgaggatcatagctgaccctcccagcttctaccgacggttcaacatccctaagagacgcggaggagtgagagtgattcacagccctttcccatccctggccaatgtgcaaaagtctattctgactaacgtgcttgcagacataccagtctcagaatacgcatttgcctatgtcagtgggcgcaatgcaattctgcacgctaaagtgcacagggagagccctgagctgctgaaactcgacatcaataggtttttcccctcgatcacgcggcagatggtttttgaggcgctgcagtctcatggattgagctctaaggtgtcatatttcctctcttggctttgcacacataagaacgagcttccccagggcgcctgtacatccccagtcctcagcaatatcgtctttagcactatggactttcgtctttcccgccttgccagtgaagtaggcctaagctactccaggtacgctgatgatatggctttctccgggggctacgtacccagaaacttatcacggtccatctctaaaattctgttggagggtggcttctacctgaacgagtccaaaacccagttaaagctagccgggagtaaaaagattttggttggggtcagtatctccaccggatgcctaaaggccccaaaggaattcaaacgaaagctgagggcccagatctacgagctcgagaaacactcaggaaatttgagtgaagtgaacgattttgacccgctgatctatgagcgggttctgggtcggataaactatctcttgcagatagagccggataatagatatgctctcgaaaaaaagagagaattatctgagatgcatcaacgcttcctctctctgggcgcaggcttttcagaggcgctgaattggatgtga

SEQ ID NO: 9344 - RNA, 969 nt, synthetic construct
  source 1..969: mol_type = other RNA
atggataatattgagtctcagattgaagtgtccgggctgatggccttgtacagagatttaaacctctccgtcgaggatctagctattgtgtcccgtatgattgcccgaactgacctgttttaccggtcctttcggatccccaagcgaagaggcgggacacgcttaataagtagcccctatccgaccctcgacaaaattcaaaagagcattctgcagaatgtactggaagactatctgccacatgattctgcctatgcctacgttaaaaacaagtgcgctgtgggccatgccagatatcaccttggtagccgggagatccttcagcttgatattaaggagtatttcccttcgatctccagacagatgatcttcggagccctatcccgcaatggctgcgatcccaagaaggcttcatacatctcaatactctgcactctgaagaatgcactccctcagggagcatgtacaagccctatgctttcaaacctggtgttttttccgatcgatgtacggttctcaaaactggcatcgagtttgcgcctgagatacagcaggtacgcggacgacatagtttttagcggtggaaaggtgccaagggacttaccaggcctggtgaggaaaatcctgctggaccaccacttttgtctgaacgaagataagacccagttcaaaattttcggggctaagaaaatcataacgggagtcagcatctctagtggtgtcctcaaagcacctaaggcgttcaaacgtaatttgagggctcaaattcatgagctagaacggaacaaattccacctgtctagtcagaaggagtttgaccccctggtttttgagcgcatcctcgggagggtgaactacttgctccaaatcgagccagacaatattttcgcccttcagaagaaaaaggtcctctctttccatcaccaggaattcttgggcctgatcgatgacttttgtctggacatctga

SEQ ID NO: 9345 - RNA, 969 nt, synthetic construct
  source 1..969: mol_type = other RNA
atggacaacattgaggatatctactcctatcagggagatgtccaggccttgtgtatggctttggagctcgatcatacgcagtccctgatactgccgagggcaatcgctcgaccagatctgttctatagattcttctctattccaaagaggaccggcggtctgcggaaaattcgcgccccctatccagcgctggcatctattcagaagaggatcctcgactgtctcctggctgagaagcatgttcaccacctctcatttgcttacgtaaagaataaatcagcgatcgataacgccaaggtccatcttacaagcaaggagattctgaaactggacatccaagattacttccctagcatcgactctcagatggttatagaggctctcatgagaaatggcttctccagcgcaaccgccttttatatatccaggctatgtacagtggacggagcactccctcagggcgcttgcactagtccgatccttagcaatctcgtgtttaatcccatcgacaatcgacttgcaaagttggccgaaaggctgaaccttcgctactcacgttacgccgacgacatcgtcattagtggggagcgggtgccccgcaacctgataaaccttatccgaaagattctgatcgagcggcggttcagtctaaacgaaaaaaaatgccagttgaaactgtctggctcaaagaaaattataaccggtgtatcgattagttccggagtgatgaaggcccctaaagcctttaagagagagctgcgcagccagatctttgccttagaaaaatattccggcgacttaagcaaattgagagaattcgatcccttatttttcgaaagagtggtggggcgtctgaattacctactccaaatcgaaccctacaacgagtacgctcggaaaaagaaggcgactatttgctcttatcaccaaaagctgctggggctgcacccaatggcccaacctcagtga

SEQ ID NO: 9346 - RNA, 969 nt, synthetic construct
  source 1..969: mol_type = other RNA
atgacctctttaagcgcctttgcaactgatctgaacctgtgggagattaaggacttctccattcagatcctgtacgggattctcgcagattcttcaaaatattatcggagcttcgagattcccaagcgtagaggaggcaataggactatccacagtccatacccggttctggcgcagatccagaaggagttgttgttgattctacaagaccggtgcgggactagcgaatatgcatacgcttactgccgggggaaaaatgcaattatgcatgcttctgcccatctgggctgtgacgagctcctcacagtggatgtggaaaactttttcggctccaccacgcgacagcaggttcaccaagccctgctgggagcctcattcgagaacgactttgcacatttggcatcattggtagccaccctccacggcgtccttccacagggtgcttccacatcccccctcttaagcaatgtggtgttcagaccccttgacggacgcttagctaggctcgccagccatcttcagataaaatacacccggtacgctgacgatctagcatttagtggtgataagatccctagaaatctccctaagctgatcggaaaaatcatctctgagaaggggtataaactgaatcccggaaagacagccctgaaaataaggggggccaagaaaattataaccggcgtctcaattagcagtggcacgtccaaggcgccacgacagtttgtcagggccactcgtgccgctgtgcacaaccttgaaaagaacatcggaaagctgagtgctaccaacattctggaccctcttgcctatgaacgcacactgggtaagataaattattggctgcagatcgaacctcacaactactacgccgctaaaaagaaaaaaatcctgtcggaggctcaccaacgctttcttgaactcggcgcgggtttcaacctggataattatatcgagaatagagcctga

SEQ ID NO: 9347 - RNA, 969 nt, synthetic construct
  source 1..969: mol_type = other RNA
atgacaatcctttctctgttttccgctaccatgaacctgtgggagattgaggatttcagcactcagatcctagggggaatcctggccgacagcgaaaagtactataggtcttttcaattacccaagcggaaggggggcatgcgggaaattaactccccgtaccccgtcctagctcagatacaacaggcgttgactaaatatcttcgcgatcagtgcttcgtgagtgagcatgcatacgcctattgcagaggtcgaaatgccgtaatgcatgcaaccagccacctgggatgtgacgaattgctcactgtggacattcacgacttttttggatccattacacgccagcagattcaccagtcgttgctgaagaattcaatcgatgcttcctattcccatatcatatcagtcctcgccacccggaaaggcattttaccccaaggtgcgcccacgtctcctctgcttagtaatatcgttttcagccccctcgatctgaggtttagccggctcgccatcaagctgggcataaactatagcaggtatgccgatgatttggctttttctggaccaaggatccctagaaatctgccaaagctcgtagaaaagattctgtctgaaaagaactacaagctgaatccgcaaaagaccacactgaaaattaaaggcgctaagaagatcattaccggggtgagtatcagtggtggcacgcctaaacctccaagaaaattcgtgcgctcagtcagagcagaggtgtaccaggtggagaaaaatattaacaagctgagctctctcagcacaatagaccctctatcatacgagcgtgttttagggaagcttaactattggctccagatcgagccacacaacaaatacgccttggacaaaaaaaacctgatcagtgaggcacaccagaatttccttaatctgtcctcatccttcgaccgaaacgaatacctccagcagctgatctga

SEQ ID NO: 9348 - RNA, 969 nt, synthetic construct
  source 1..969: mol_type = other RNA
atggacatcctggagagcttttccaaagaactgaacctgttctccctcgacggtttttcagtccagctcctggctggcgccatagcagactcttctaagttctatcggtcttttaagatacctaagagacggggtggaaaccgcgagattagtgcaccctttcctttcctggccaacatccagaaggccatcgcgaataaactgagagatagaatccccagttcggacaatgcctttgcttacagggaaggacgaaacgctatcatgcatgccagtacgcaccttgggaacagggagctcttgaccgtggatattcgggatttcttcggctcaattacacgtcagcagatccatcagtcattgttggagtgcaattttgatgggaacttctcccacatttcttccctgctaagcactttacacggaacactgccccaggggggttgtgctagcccaattctatctaatctcgtgttctacagcctggacataaggctcgcccgcctagccagcgctttagacattacttactccaggtacgcagatgatctggccttttctggcgattatatcccacgaaatctgcctagaatggtggaaaagatcatcaaggaaaagggatttgcgttgaacaacgagaagaccaagcttaaaatcttcggcgcccgcaagattattaccggggtcagtatatccagcgggaaaccgaaagctccacggcaatttgtgcgagcacttcgcgctgaggttcatgcccttgagaacaacaaaaataggttgcactcacttacagtgttcgaccccctgcggtacgagagagtactgggcaaactgaattattggctccaaattgaacctaacaatagttacgccatagaaaagcgtatcggaatcagcatcgcacaccagaaattcctgggcttatccgcgaatttcaaactcgaggactatattcaactcgttgcatga

SEQ ID NO: 9349 - RNA, 975 nt, synthetic construct
  source 1..975: mol_type = other RNA
atgcctgaaagcgaggacttgctggcgctgctgaacatctgtgaaatcgagtcgtccaacacccccgtcctgttctctgtcttgggcagtcctgataagttttaccgtagctttaaaatccccaagcggaacggaggttttcgcgtgatagacagtccttatccttcactagagataatccagagaagtatactgcggaatgtgctctccaacttcccagcacacccgaacgcgtatgctttcataaaggggcgtaatgccattactcacgcctcacatcacttagcctgtcgagagctcattaccctcgatatcaaagacttctttccaagcatcacccgccagatggttatagatgcactaattgagaacggcctggccaatggggtggctaattatatcagcctgctctgctgcctgaatggcacacttccacagggggcatgcacaagccccgccttgtctaatctggttttcgaaaggatcgatgagcgactctcacggttagctaagaccctcaagctgaaatactctagatacgccgacgatctggccttttccggcgatgccattcctagggacatgccacaactgatcgagagaatcctcgagtcacgggatctgaagctaaacaaggaaaaaattcgccttaagattgctggcgctaagaagatcattactggtgtatccatttccagtggaacactgaaagcacccagagaattcaaaaggctcctgaggacgcagatttatgaattagagaagaatatcgacgacatcagccaaatgcgctcgttcgatccccttgtgtacgaaagagtgcttgggcggttgaactacttgctgcagattgagcccaaaaatgcttttgccctgcagaaaaaagccagcttgtcccagcatcatcaaaggtttcttgcactctcttctggacagtggccagcgcttttcccggacgcagacctggccgcttga

SEQ ID NO: 9350 - RNA, 945 nt, synthetic construct
  source 1..945: mol_type = other RNA
atgacaattaatgatgaaacccttgcggaactggtaagacacctcgagattgatgaacaccttctcctgaccctcgtggctgccatctctagtcccaataagttctataggtcattcgctatcccaaaaaggagaggagggatccgagagatcgagtcaccataccctagcctgggatccatccagaaggccattttgcgcaaaatacttgatggctttagtgtccatccctgtgcccacgcctttacgcgtaaaaaaaaggctctggaccacgctgcataccaccttggctgcaaagagctgattacattggacatcaagaacttctttccttccatcacccggcaaatggtatttcaggccctcaataacagcggcttatccagtcatttctctttctatatatcgctgctgtgttgcttaaacgacgtgctccctcaaggagcttgcacaagtccagcgctgtccaacgtcgtttttagccagctcgacgaacgcctacaccggttagcaatacatctgggtctaaagtatagcaggtacgcagacgatttggcctttagcggcgagaaaatcccgagaaatatgatcaagaccgttcagaaagttctcgccacaaaggggttcgaactcaatactgagaaaacgcggctaaaggtctttggtgcaaagaagatcattactggggtgtccatcactagcggcattccaaaggcccccagatcattcaaacgatccttgcgcgtgaagattcatgaactggagaaacatattgacaacttggcttctatgaagaagtttgatcccctggtgttcgagaggaccctcgggaagctgaattacctgcttcaaatagaacctggaaacgagttcgcactgaaaaaaaaaaagcttctgtctgagcagcaccagaagttcctgtctctgggtcggcaggtgcagtga

SEQ ID NO: 9351 - RNA, 933 nt, synthetic construct
  source 1..933: mol_type = other RNA
tccctgaaaaacatcctgtctaagtttgagatcccaataagccgcgaaaacgtgagcatcttcaacaagatgatttcagagccctcggcattctatcgagaatttaagattccgaaacgcaaaggtggcattagaaccattacagccccatacccaaccctgagctacattcagaagctcattagcgagcggtatctgactaaagtcaaccccagcgaacacgccttcgcttatgtgaaaggccggtccgtagttgatcacgccagggtgcatctcaactccacagagctcttgacagttgacattaagtcctttttcgacagtatccggcagcagactatatttgagatctaccaatctctcggcctttcgtactctgaagctgcctatctgacccgcatttccactctaaatggcgggttacctcagggggcctgcacctcacctatcctgagcaatatcgcgttttaccctttggatgttagacttaacaatctcgcagaaaagctgggcttaaagtattcaaggtacgctgacgacctggcattttcaggaaccgtcgtgcccaagaatctgcatcgtacgattgatagtataatcaagtcctacaacttcgaactgaatcagtcaaaaacgaaatataagctcgaaaagagcaagaaaatcattaccggtgtgtccatctctagtggagtcttaaaggccccaaaaagtttcaagcgagcgctaagagctgaagtgtacaaactggagaaatacaaagataatctgtctgacatggatgggttcgagccccttatctatgagaaaaccataggaaagttgaacttcgtgttgcaagtagagcctaacaatctctatgcacaggagaagaggaaaacacttatcagtgactacaaggtcttttctagcaaggccactaatctgatctga

SEQ ID NO: 9352 - RNA, 933 nt, synthetic construct
  source 1..933: mol_type = other RNA
atgcattacaataacgatttcagcattttcatccagaacctcggactcgaggcttcccatgagacacgcgctatcgtatcctccatcatacatgccagcgaaaaccactatcgatcctttaatatacctaagaggaagggaggctatcgtaaaattgatagcccatatcctacgctgaaacacctccacggcgttattctggacgtgtttcaggacaaacttaagtgccacaaaaattcgtttgcgttcatgaaaggtaacagtgccatcggtcatgcaaagcaccacctcgattgtgaagagctcctgacagttgacatcgagaacttctttccaagcatatctagacagatgatattcgaagtcctacacagcgtgggcatgaagactaacgattccaactacatctcttatatctgcaccttgcggaactctttacctcaaggggcctcgacctcaccaatccttagtaatgccgtgttttaccctattgatattatactggaacagatcgctcttaagtttgacctgaaatatagtcggtacgcagacgatctcgcatttagcggaattaatattccccgaaatctgccctcactgatcgagaaaattcttatgaatagggggtttaacctaaacaaatccaaaaccaagttgaagatcaagggagccaggaagatcatcactggcattagtatttcatcaggcaaactgaaggtgccgcggtcttttaaaagagacttacgcgccaatgtcttcgagttagaaaagttcaaacataacctgttcgagatgaacaatttcgaccccttgatctatgagagaacaatcgggaagctgaattacttgctgcaagtggaacccgaaagcaagtacgctaaaattaagattaagctgctgctggagtcttacaaggacttccagctctcttga

SEQ ID NO: 9353 - RNA, 939 nt, synthetic construct
  source 1..939: mol_type = other RNA
atgacagacaacaatattgtgaatttgctggaggtcatctcaatcaagaatacctcccacaacataaaaatcattaccaacatcctgaactcaaacaaaaactattaccgcttcttctccataactaaacggaaggggggcgtcagggagatctcttctccatatcccaccttgaaattcattcaacagaacatcaagaagaacatattggaaaagatcgtggtaaatgacaatgcctatgcctacattaagaataagtcctacattgaccatgcaaaaatacactgcgatagcaatgaactcctcacactggatatcaaagactttttccctaacatttaccgacaggatgttttcaacattttttctcagtacgggttttgtgatctgcagagcaattatctatcatacctgtgcaccctaaataatacactgcctcagggtgcttgtactagtcccattatctccaacatcatctttaacaagatcgacaaccggttatataagcttgctctttcttttggactgaaatattctaggtatgccgatgacttagccttttccggtaagaagattccgtcaaagatcatcaaattggtggctctcatcctggaggaatacgatttcatcgttaacgagagcaaaaccaaactgaagaagaagggcagtaaaaaaatcataactggggtgagcataagtaacggagaaattaaagcccctaagagttttaaacgtaatctgagagcggtgatttacgagctcgagaagaataaagacaacatcttcaaaatgccaaacttcgaaccacttatttacgaaaaaacgattggcaaactgaattatctcctgcaaatcgagcccgagaataagtacgcaaaggaaaagaaggagaagctcatatcgaattacaaggagttcattagcagccccatgctttga

SEQ ID NO: 9354 - RNA, 912 nt, synthetic construct
  source 1..912: mol_type = other RNA
atgaataaagataacctgtttgagttactcgaaatcgacgagtcctttattaacgctgttaatgccatctcctatagccccgagcatttctacagaaaattccacatcccaaagaaaaagggagggtttagagaaattcatgctccctatcctagtcttctggctttacaaaagatcatcagcgaaaaaatccagccttatttgaaaatccaccgaagctgcttttcataccggaaaaacatcagcttcattgacaacgccgcccaccatctcggaagtaaagaaatcctgtccctcgacattgaggacttcttcggcaatatatcccgccagaaagtgttcgacgtcttaagtcagtcgggcttcaataaccacctgagcaatgagattacttatctggtcacctacaaagattatctaccacagggagcccctacatcccccatcatctctaactcaatcttctacaagatagatgcgcgactgtataaattgagcgagaagctgaatcttaagtactccaggtatgccgacgatattacaatttctggtgaaaagatcccgtctaattttccgcgttacattgaggatatattgttgcaacatggcttctcactgaacaaggggaagacgcgcctgaaaaaaggtcaccagaagaagattataacaggcgtatcaataacctctgggcgggtgatggctcctaggatatttaagagaaatctgaggaccgagatttatcacctcgagcgcaacaattacgcaatctctagtcccatcgatccaatgctgtacgaacggctcatcggcaaacttaactttcttctccaggtggaaccagagaacacttacgcaattgaaaagaagaaggcactaattgagaagtacaagaagattatcctgatgatctga

SEQ ID NO: 9355 - RNA, 906 nt, synthetic construct
  source 1..906: mol_type = other RNA
atgaaccaggacatcttcgagtttctggccatttctgaacaacaaagcccaaatctgttcgccatctcacatagtccatcttctttctatcgcacctttagaatcaaaaaaagaagcggtggctacagggagttaaagtcgccctaccccctactattagaactccaaaggataatcttagagaagtcatctcagctcctgaagatacatgacgtgtgcttctcctaccggaaggaaaagtccttcattgataacgccaaatatcatttgaacggagagtgcatcctgacgatggatattgaagattttttcgggagtataacccggcagatggtcctggacacatttttgtttaacggtttgacactggagctgagtcagcagctttcttacctgactacctgtaataattcgctcccccagggggctccaacttcaccaattctgtccaatgccattttttatcgtatagatgtgagacttagcgctctgagcaaaagccttgggctgaagtattcacgctacgcggacgacctcgtattctctggcaaaaacatccctaaaaacttccctagttacatcagcaatatccttaggcagcacggctttagcttgaataacgagaagactaagctgaaactcaagtctagccggaaaatcattaccggaatttccatttcctctggaacactcaaagtgcccaagccgttcaagagaagcctacggtccctgatccacaatttcgaaaggagttccttttccgtttccagctcacgcaaccctatgatttttgaggagataatcggcaagctgaactacctcttgcaggtcgaacctcacaataactatgcacaggaaaagcgaaaactgttcctttcagagtaccgaaagtttatcagttattga

SEQ ID NO: 9356 - RNA, 1029 nt, synthetic construct
  source 1..1029: mol_type = other RNA
atgacggatgaaactctcgctggagcgcttagggaaaggggcgtcccagtgcgatggatcgatgcttatgagagttatgcacagcgactcacagagaacggggtaccggtcatcttcgaactgaaacatctggccatcctgaccgagatcgacttgagttttgttctctcttgcgtctacgccacaaatattcactaccgaatcttcattatccccaagaagacaggtggtaccagagagatatgcgcccctctaccagcccttctaagtatccagaggtggattaatcaccaaattctggagaagttcgcggtgagtgagttcgctcacgcatacgtgaatggacgctctatcgtttcacacgcccagaaccacagaagcgggagagtgcttctgaagatggatcttcaaaatttctttggatctatcaccttgtccatggtgttgggcatttttagggccgctggttactcacgtaatttaagcttcgacctggctaaaatttgtactttaggcgattttgcacctcagggcgcagctacatcaccaagcattagcaacattatcttctaccatatcgaccaggcgattggctcgatctgtgccaaaaacgagttaatctatagccggtattctgacgacatatgcatttctggcaggcatatctcaaaggagataattgcaacgctgcgcgaactcatcgaatccaatggctttgctatcaatgataaaaagaccaagctggccaccagcgcagggagacggatcgtgaccgggatatccattgggtccggacgtatgctgcctactcgcgctttccgcaaggacgtcaagcggaggttggcccggatccggaagataggggtgaactccgccatggtagaggacggagatccctttgttctggacagactggtcggtaaactgcatttttggagccacattgaccccgataacaaaagaatacgcgtggccctcaacgaaatgatttccctcgccaaaggagaatcgcagactactggcacatga

SEQ ID NO: 9357 - RNA, 1026 nt, synthetic construct
  source 1..1026: mol_type = other RNA
atgatcaactctgatccgctggaaagtgcgcttgttgagctccgcgtgcccagccattggattaaatcctacttgcagtacagagatcgactggagagctccggctttccctgtatcttcgaactggaccatctggcttaccacctttcattcgagccttccgccctaagagtcctggtgcacaatccccaggggtcttataactttatcgagattccgaagaaacgcggtggaatacggaaaattagcgcacctttacccgcattactgtacgcccaaaggtggattaagaacaatattgtcgacaagctcaatatagatgaaagtgcccatgcttacgtgcgtacacggtcgatcgtcacccacgcacggcttcacattgaaggacgtgtcatctatagaacagatataagggacttctttggttccatctcattcgactctgtggtaagtctcatctacagtctggggtattcccaggacgttctgtttgatattgccagcatctgctgcttgcatggcagtctccctcagggcgcctctacctcgccagctctctccaacgttattttctataaaactgacagggctttgtccacgctggccagctcttttgggctgagatatagccgctacgcggatgacctctgtttttcaggagaacacattccacgaaagttcattgataagagcacctccatcttgaacgcagacggatacatcctcaattctgagaaaacacggcttgaaacaagcagatcacgcagagtcatttgcggcctgagcataggtgatgggagggtaaagccagtgaagtcattccgcagggctgtgagagccgagactaacaactttttaaagcaaactaaggagcgctctgtggtatattgggaagttaccccattctttatcgaccggcttctgggccgactaaatttctggaaatcagtggagcctgacaataaatggatagtggagcacgaacagatcgtgcggcgtaggatcaggaccatcctggagatgtga

SEQ ID NO: 9358 - RNA, 933 nt, synthetic construct
  source 1..933: mol_type = other RNA
atgtacagggctggccagattctttctctcattcatgagatttgtgaaaagtctggtctacctaaagataaaatcactgccttggcctataggaatcgcccacgctatcgtattttccatatacacactgggaaaaagcagcgactcattaaagcccccattccaagcctcagagcagcccagaaggcccttgctgctatcataagcgagaagctcaagcctgaggagtgcgctcatggctatgtgactgacaggagcgtgatcacccacgccgcgagtcacctgggcaaaaaagccttctttaagacagacatcgttgactgcttcggaagtattaattttcccgaaatagccaacaccctacgagaggcaaaatacaacagcgttgactcatttattgcagcttccatcgcgacggatgaaggctccctgcctcaaggggctccgagttctcccctgttatgcaaccttgttctgcggtccgtggaccgtccactgtctaaactggccgataagttgtgtgccacatatacccggtacggagatgatattgtcatgagcgcagacgattttgacatcaacatcatctcaatcgtaaggaatgtactgtccagacacggctttaagatgaatgaggacaaaacctacatcgcaatcgaacctcagcaaaacatcattaccggaatcagtatcgcaacagggtaccccaaggtgcggaagtcattcaagcgccaggtgagattagaaacacacctgctgctgaagaagggaatagtctcatacctcgagtccgatggttatatcgaccccttcgccgcggatagagtcttgggtaagctgacgtggtggtcgcacgtggaaccagacgctgagttcccgaaaaagcattctataatgattcggagcatgatgaaagaggtggctcgcgggtga

SEQ ID NO: 9359 - RNA, 1005 nt, synthetic construct
  source 1..1005: mol_type = other RNA
atgaatacagttaacgaatgggcggagttctttagggatcaacaggtgcctgaggatctgatactgaggtacctgccatatatagagagacttctgacgaagaatgtcccgattattttcgagggtaagcacttgcggaaacttttaggaatcgagagctccatgttgcgcagcttagtgttcaatgggtccgctttttaccggtctttctccatccccaaaaggtctggcggcgagcgaacgatcactgccccatatccagagcttgccaatgcacaggcctggattaagcaggagatcctagacaacctgaaagccacccccagcgcgactgcatatgttcaagggaagtcgatcctggaaaacgccaacgaacacgtaggcaagaagatgctgctgaaactggacgtcgaagattttttcgggtccatagacgtgaagaaaattaccgctatttttgagtcatgcggatacaccaacaaagtgtcttatctcctggccagtatttgtaccttagatggtagccttccccagggcgcacctaccagtcctcagctatccaatctggcttcaatccccctcgacaatcgtatccatgccttggccaaaaagttggaactcacatacacacgctacgccgacgacattgcattgtcaggagagttcattcatagtaacgttatctcctacgtggaagatatcctcaagtcagagggcctgaagctgaacagtaataagactcagctcaagcagcccgggaaaaggaagatactcacaggaatcagcgtatctagcgagaagccaatgattcctagagcgtataagagacaactacgggctgaagtctttaacgccctgcataaagctcagcacgaacttccattcgatcctctcaacatagaacgcctgatcggtaaacttaatttcgtgctgcacgtggaaccggagaaccagtttgcacgaagatctctggaggctctcaaacaaaaaaagatcgctccctga

SEQ ID NO: 9360 - RNA, 1029 nt, synthetic construct
  source 1..1029: mol_type = other RNA
atgaccgagattatcaaatcaagctgggatcatcttgttggcaccaagagccctgacggacgacagaaagagattttcaagaagtacattcaggacctggagaagaatggtctacccgtgatatttgagtttgaacactttgcgtatctcctcggaatgaccacaagtactctggcccaaactatcatcaatccggaaaagagctacagatccttccacattaagaaaaaaagagggggctcacggctcatcaatgcaccctatcctctaatctcgtatatccagaaatggataaacaccaacatcctcagtaaaatcaagaaccatgaatcctccttcgcctacaaaaagaattctaatgcctacttgcacgctctgcagcacatagacaccaacgaaacactgaaggtcgatattgtagacttcttcgggagcatcaagaaaatcgatattgttcgcctgttcagagaactgggctatgcagataatgtgagtctgtatctggcttctgcttgcacatatgccaactcattaccacaaggggcagtgacgtccccaaatttgagcaatatcatcttctactctctcgataacaggttttatcacttggccattaaacttaaccttacttactcaaggtacgctgacgacttattcttttcaggtgagaaaatcccatctaacctgtacaagtctatcaagagtattctccaatctagtggcttcagcattaacaaggagaaaacacggcatatcactaatggcaaacagaagatcattacggggctcgccgtgaaggaaaattccgtgcggatacccaaatcctaccgcaggaaattttgtcaggaggcctacatttttatcaagaacgagaagtccaatagcagcatggagaacattaatttcgatcctatactgattgaccgtttgatcggaaaagcgaactatattcttaaagtcgagaagaacaacgaacgaataatgaagttactgaagcagctgaatgaaataaagctgaacaccttttga

SEQ ID NO: 9361 - RNA, 1035 nt, synthetic construct
  source 1..1035: mol_type = other RNA
atgaaccagctgtcctacgaaacatggttagattttctaaagaaggaagggtacggacataaacagtcggaaaaactggccgcctacgcacacaaactggcctcaaacaatgtacccattatcttcgaaatagaacatctggcaaagttactcggagtggaactgagcctgttgtcgcgcatttacggggtgagttcctacttttaccggtccttctctattaaaaaaagatcagggggagcccgcaacatcaagctaccataccctaagctgaagtatattcagcagtggattaagcaagagatcttggataatctaacagtggacgagaatgctttcgcatatgtcaagggaaaatccaacatcgagaatgctaagctgcacattggctccaatgagctcttgaaactggacattaaggatttctttggaaacgtgaaggtggagtctatcgaatcaatctttcgatcttgcggctatactgatgacgtaagttatctcctcgcccgtctgtgcacatgttttgggttcctgccacaaggcgcacccacctctcctacgctttccaacctcgttttacaggcgttggacaagaacctcgctcattttgcgaatatcaactcacttaccttctctagatatgccgacgatatttttcttagcggcaaactgatcaccaaggagataaaacaagacgctgtcgaaattgtcgaaaagagcggcctgccgatcaatcacaacaaaactaaaatcatcagggggaacacctgtaaaataattacaggcttgatcgtcaccgacagtactgtgagagtgccaaagaagatcaggcgagagttccggaagaatagcttcttcatgctcaaaaataagagtagccagatggatggttctagggccaagctcaaccctctgctgattgatgagataataggcgttggtaactacatcatccgggtggagcccagcaataagtatgttgagagcgtccttggtgagcttcaggagctgaaaaaagacctgtttggtaagtga

SEQ ID NO: 9362 - RNA, 1032 nt, synthetic construct
  source 1..1032: mol_type = other RNA
atgaagcccatctacgacaagtggtttaattttctcaaggccagtaatctgtcattacagcaatctgaagccctcgccaagtacgcttcccgactggaaaatagtaattttccggtcatttttgagcaaaaacacttcagcaaactgctcggtctagagcttaacctgcttagccgtatgactggcgcttctagcaatttctaccgctccttcgaatttaagaagaagaaaggcggcattagagctataagatccccatacccaaaactggcgtatgtgcagaagtggattaagaaagaaatccttgaagaaatccccatttccaagagcgcattcgcatacgtcaagggaaggtcccatatagacaacgccaaaaaacacatcggaagcaaagacctgtttaagatcgacataatcgactttttcgaccagattaagttcgaaaagatctataacgcctttattgcttgcgggtattctcataaggtgagtttcgacctgacacagttatgtactttctggggaaagttgccccagggtgcaccaacctctccttccttgtccaatatcgtcttgaagaaactggatgatgagctctttaatgtgtgcaaggcctcgtcactcacctacacaaggtatgccgacgatattagcgtgtctgggatagagatctctcctaagatcagaaacgagatcattgaggtagtcgagaacaacgggtatcccgtgaatcacaagaaaacctatttcgctcagggtaaagccaaaaaagtggttacagggctgattgttaccgatagcgaggtgcgcgtgtcaaaatcgatgcggcgggatttcaggaagaagtcatttttcctgttgaaaaacggagtaaacgagctcaatggcaaaaataagcctatcaacccactgtatatcgatgagattataggcctagcaagttacatcctgaaagtcgaacctaacaataagtacgttgcgacggagctgaagaacctcaaaaaactgaagcaggatttattccttaactga

SEQ ID NO: 9363 - RNA, 1032 nt, synthetic construct
  source 1..1032: mol_type = other RNA
atggcagataacaatctggatcgaaagatcttctttaagaaaaatggcctatcggagagccagagtataaagttggacatctatgctaagaacctcgaatctaaaaatctgcctatcatctacgaactcaaacatttgtcaaaattgctgggaatggaatatgctctgctgtcgcggatgtctgggatcaatcggttcttttacaggagcttctccattaaaaagcgcaacgggggccgtcgcataatcaattccccttaccctaagatttcctatgtgcagaactggataaaagacaagatcctctcacaagtgcccatttccaacaatgcctatgcatacgtcaatggcctctctcacattgagcatgcgagacagcacattggaagcgatgttttccttaagattgacctcctggattttttcggccagatttccgaccagagagtcaagaagattttttctgagttaggatacacagacaagttgagtcttcaactcgcgcggctatgcacttgtaatagcagcattgctcagggagccccatcctcacccatcctgagcaatatcgtactgaaagaactggacgaaactctgtttacgatcgccaatagcaactctattttatacacacgctatgcagatgacatctattttagtggaaaacacgtgtcaaaaggcttcttctcaaaaatcaagggcgtgattaacaacttcggtatggtcatcaacgaggagaagagcaagatatacaagtctcaccacaagaaaatcgtaaccggtataatcgtgaaccagaaagagattcgagccccaaagcatatgaggaggagatttagaaccgagtcctacattcttctcaaagataagttcaaggttttcaacggggagagggggctgtttaacccgaactacatagacgagattctggggttaggtatgtacatcctgagtgttgaaccccagaatgcctatgtgatcaagatcgtgaaaagtcttaaagccctgaaaaaggaatttgctcaatattga

SEQ ID NO: 9364 - RNA, 1032 nt, synthetic construct
  source 1..1032: mol_type = other RNA
atgatggaacagagccggtggtttaagtttttcatagagaacgacctcaataagagccaggcccagctccttaccaaatacgcgcagattctagaactgaagagcctgcccgtgatctttgagcttgagcacttaagtaaactgctcggagttgaattgtcacttctgtcaagaatttgtacactcaatgaacggttctaccgattgttctccttagaaaagaaacatgagggatttagacacattgagtcaccctatcctaagctgaaatacatacaaaggtggatcaatgataacattctgtccgtgctcgccgtgcacgacaatgtgtattcatacctccagggtaagtcgcatatcgataatgctaaaatgcacattggctgtaagcagatgctgaagctggacttagtgaacttctttgggcatatcactatttcccaaattgagaaagtcttcatcgaatgcggatatacaaaggacttgtccaacaaactggccaagatctgtacctactatgatcaccttcctcagggggctcccacctctccagcactgtccaatatcatcttctacgagctggattgcatcctttacgacatctcccagtccaacggtttaatttatactcggtatgccgacgatctgtgctttagcggcgacaatattagtcagtacgttgtggacgacattttgtcacacctgaagtctcatggctttagtatcaacgatgaaaaaagcagactgctaacgggcaaccagaggaaggtcgtaacagggcttctggtgcaatctgatacaatcagggtcccaaaaaaggttcgacgcaagttccgtaaagattcttactacctcatcaagaacggatatgacaacctcggtaatgagcgcctgttcaatctattggaagtagatgagctgataggcatagggagttacatcaaaaaagtcgagccgcaaaatagctatgtgtctaatgcattgattgagctcaacaacataaagaactctctgatgactagtaccagctga

SEQ ID NO: 9365 - RNA, 1032 nt, synthetic construct
  source 1..1032: mol_type = other RNA
atggtgtttcaggagtcccgatggttccaattcttcattgagcacaagttgtctagcagacaggctgccttgctgaccgagtacgccattaacctggaatgtaattcggtgcctgtcatctttgagatcgaacatctttccaaactgttgggaatcgaactgtctttagtgagcagaatgacaggcgtgagcaatctgttttaccggcagttcccactaaaaaagagatcaggcggaataagaacaatagaatcgccctatccaaagctagcttatgttcagcgctggataaagaatcacatcctcgaaattaaaccgatctcttccaacgccctcgcgtacgtgcaggggtcctctcacatcgaaaatgcaaaacgacacatcggggccaaagaactcctcaagatcgaccttgttgactttttcgagtacatcaaactatctacggtcaagtcaatattcactgagtgtgggtatactgaaaaggtgtcccaccagctggctaagctctgcacacttcgggacaggctcccacaaggagccccttcaagtcccgttatttccaaccttgtgttggtggagctggacaagaggctccagagcatttctaagaagcatgaactggtctacacccgctatgctgatgatctgtgcttcagcggccatgcaatttcagatgagttctttagtctggtgaaagatgagattgaaagtgaagggtttgtagtgaaccaaaacaaaagcggggttgtacggggacacaaacgcaagctgataaccggattagtcgtgtccgagtacggcgtcagggtgcccaagaaaatgcggagggagtatcgtaaacaagcacattacatgctgaaaaatggcattgagcagttaaacggtaatatgggtatgctgaatccccttcatattgatgaggtcatcggcaagggtcagtacatcctgagcgttgagcctggcaacgcctatgtaaaagacagtctgtgcatgctgctcaagctgaagaacaagttgcttatcaagtga

SEQ ID NO: 9366 - RNA, 1029 nt, synthetic construct
  source 1..1029: mol_type = other RNA
atggcttatcaagagagccgatggtttaaatttttcaacgagcaacagttgtccgcaaaccaagccacccttttggctaaatatgcacagacccttgaatccaattcagtgccagtgatttttgaaatcgagcatctcagcaaactcctgggcatggagctgagcctgctgagtcggatgaccggggccagctcgctgttttacaggcagttctccctgaaaaagagaagcggaggcgtccggttcattgacagcccctaccccaaacttgcctacgtccagaggtggatcaagaacaatatcctggagacacgcccagtcagttctagtgctttcgcctacgtgcagggaggtagccacatagagaacgcacgaaagcacattggggccaaagagttactcaagatcgacctggtagattttttcgggcacatttccttctctagcatcgtcagtatatttgaagagtgtgggtactcaagatctgtctccacacagctcgccaagctgtgtactttgtggggcaaacttcctcagggggcgcctacttcacccgtgatctcaaatctggttctcctggcccttgataagcgtttgcaaaatctctccgataagaacggcttagtgttcacaaggtacgctgatgacctgtgcttttctgggaacgaaattaccgaagaattctattcctctgtttatgacactttggagaatgagggctttgtggtgaatgagaagaagtctggattcgttctgggtaataagagaaaactcattacgggactggtagtgtctgaaagcggagttagggtgccaaaaaagatgcgccgcgaataccggaaacaggcgcattacatgataaagaacggcatagagcagctgaacggagaactaggcatcttcgacccgctctatatcgatgaagtcatcggcaagggtcagtatattttaagtgtagagcctgataatgcatatgtgaaagagtcgctatgcaaactgtcaaagcttaagtccgacctgctagtgtga

SEQ ID NO: 9367 - RNA, 1035 nt, synthetic construct
  source 1..1035: mol_type = other RNA
atgacagaagaaaaatccccatggtacgagtttttcttgaagaataacatcggatcccggcaagccaccgcgttatctgagtatgctagtaggctggattgtaacggggtccccgttatttttgaaatgaagcacttcagcaagatcctcggactagagttttcacttctgagcagaatgtgcggagtcaactcttactattaccgggccttctacattaaaaagaggcgaggcggtgtccgggtgatccagtctccctatccgaaactgtcctatgtgcagggctggattaaggataatatactcgacaaaaaccggatcagcaaacatgcttttgcatacagcaaaggcaaatcgcatatagataatgccaaatgtcacattggaagtagcgagttgttgaaaatcgacctggagaacttcttcgaccaaatttccataagtgcagtccaggaaatctttctgcgctttgggtacaccgaaaacatatcatttaaactcgccaagctctgcactcttagggacacattaccacagggtgctccctcaagccccgcaatttccaacattttcctatacgagctggacaacttccttgccagttattcagagatcaacaagctgacgtatacccgctatgcggatgatattgtcttttccggcgagcgaatttctaatgagtctatcgtggatatcaagaaatacatcacatcctacgggctgaagataaatgagaagaagagtagattggtgaagggtgcccagagaaagatcgtaactggcatcctggttggcgacaccgacgtgagagtaccaaaaaaactgaagcgtcaatatagggcccaggcttttaacatcattgaaaatggtttctcggtgttcgatgggagcatcgggaagcctaatcctctctacattgacgaggtgttcggcaagggacagtacatcctttccgttgagccttggaataagaaagtggtggaactgcagtcttcactgcgcgagctcatgaaggaaatgagcgaaaatatttga

SEQ ID NO: 9368 - RNA, 1035 nt, synthetic construct
  source 1..1035: mol_type = other RNA
atgtcttccgagtatattcggtggctggactacctgagaagcaatggtgtacaaaataaacaagccaggatactagcagaatatgcgcacaatctagttaagagtaatctgcccgtcatcttcgaaatcgagcatttctctaagctgcttgggatcgaactttccctgctctcacggatgagtggtgccagctccctgttttataggggcttctcaatccctaagaaacggaaaggagtgaggaagatagacagtccttatccaaaacttgcatacgtgcagctgtggatcaagtctaacattctggaaagactgcccatttcggacaatgcctacgcgtacaccaagggtcgatctcatatccagaacgctagagcccacatcggcgccaaggagttgctcaagctggacatgcgtgattttttcaaccgcattagcaggttgcaggtggagcaggtctttctcaagtgcgggtattcagataacgtggctagcgtattgagcaatctctgctcctacaacggagtccttccacagggcgcctctacctcccccattcttagtaacattgtgctgaaggagttggatgacgtcatacagcacgttgctgagaagtattctcttatctacacaaggtacgcagatgacatcaccctctcgggaaatagcatcagcaaaaacgtgtgtaacgaagttatgcaatacatagaggaattcggcttgccggttaatgaggaaaaagtacatctgctgaaacagaacgataaaaagatcgtcacagggctgatcgtgactgactcatctctccgtgtgtccaagcagatgcgcagagcttaccggcaggaaagttactatctgattaaaaacggagagacgcaatttgatggctccactaaaccattaaagcccctatatctcgacgaggtgattggcaaagggtcctacattttacaggtggagcctgagaatgactatgtccgaaatacactgcgcgatctgagcaaattaaagtcacgcctctttagcaacgtgtga

SEQ ID NO: 9369 - RNA, 1035 nt, synthetic construct
  source 1..1035: mol_type = other RNA
atgtcacctgagtacatccgttggctggattacttatgtagcaacggggtccacactaaacaggcgaacgtgcttgctgaatatgccaataacctggccatttccaacctgcccgtcatcttcgaggtggagcacctttctaagctcctgggaatcgagctggggctgcttagcaggatgtccggcgctcctagcctgttctacagatcttttcgcatccctaaaaagagaggcggtgttcggggcattaggtccccataccctaaactcgcttatgtccaaagttggttgaaggaaaatatcttagagtgtcttaccatctccgacaacgcatacgcctacaccaagggccgctcacatattgagaacgccagagcccacattggtgcgcgcgagttactcaagctggacatcaaagactttttcaatcggatatccaagagccaggtacgacaagtttatataaactgtgggtacgctgagaacgtagcatccgtcctgagtaatctatgcacatataatggaactctaccccagggtgcctgcaccagtcccatcttgagcaatataatactgaaggaactggacgagacactgcaggatatcagtggccagtattcattgacttatacccgatatgcagacgacattacgttctctggaaattcgatctctgacgatgtctgctccgaactcattcaccatattgaggaatttgggttgccagtgaacgaagataaggtgcggctcctcaagccaaaggacaaaaaaatagtgacaggactcatcgtgacagataggtcactcagggtgtctaaaaagatgagacgcgcataccggcaagaaagctactacctcattcgtaaccgggagcgacagtttgatggaagcatcaaacccctaaagccgctgtacttggatgaagtgattggcagagggagttatattctgcatatcgagccaaacaatgactatgttagggattcgctgaaggaacttctggagttgaaatcacagctgttctctaatagctga

SEQ ID NO: 9370 - RNA, 1035 nt, synthetic construct
  source 1..1035: mol_type = other RNA
atgtctccggagtataaaaagtggttcgaattcctttgcacaaacgatgtgtcagaaaagcaggccacacttctagcggcctatgcagacaggttgctcaaatctaatctgcccgtgatttttgagattgaacacctgagcaaactgctcggcatagaactgagcctcttaagtcggatgtcaggaatgcctccctttttttatcgtaactttcagattcccaagaaacgagagggttttagagagatttgctcaccttacccaaaacttgcgtacgtccagtcttggctgaaagagaatatcctggatggactcactatctccgataacgcttacgcttacaccgagggacgatctaacatccgcaatgcccgggcacatattggtgcacgcgaacttttgaagctggacatcagaaacttcttctataacatcaagactttgcaggtcaagagggtgtacctgaattgcgggtactccaacaatgtcgctagcgtactctctaacctgtgtacgtacaatggccgtttgcctcagggggcctgtacaagtccaatactcagtaatatcatcctgaaggaactggatgacgctctccagaacatctcagagaaatattccctgacctatactagatacgccgacgacctaacctttagtgggaattcgattagcgatgatgtgcaaaatgaaatcaaggccaacatcgaaggcttcgggctaccaataaatgaggacaaggtgcggttactcaagcccaaccaacgcaaggttgtcaccggcctgcttgttggtgatagctccctgagggttccgaagaaaatgaggcgcgcataccggcaggagtcatattacctgatcaaaagcgggaaaagtcaattcgatggcagcattaaaccattaaagcctctgtacttggacgaggtaattggcaggggatcctatatattgcaggtggagcccgataacgactatgtgagagactctctcaaggagctgtccaagctgaaatcccaccttttcagcattgactga

SEQ ID NO: 9371 - RNA, 1038 nt, synthetic construct
  source 1..1038: mol_type = other RNA
atgaaatctaatgagcgggaatggatcgatttctttattgagcgcaaggtagacttaaatcaggcaaaaatcctgaccagctacgcaataaacctgcaggaaaagagcctccccgtgatctttgagatcgagcacttcagcaagcttctcgggattgaactaagccttgcgtcaaggatcgttacaaaacctgaacgattctaccgggtgttcaatgtcaagaagagacgtggtggatcacgtgtgatttcatctccttaccccaagctgtactacgtgcaatcttggatcaaagataacattctccagaagattcgggtacatgagtcagcctttgcctataaaaagaacactagccacatcgacaatgccagggtacactgtttttcggacgaaatgttgaaggtggacatctccaaattcttcgacaatattctcaagtccaacattgtggacatatttgtgaagtgcgggtactccaaaaaactttccgagcaattggcctcattttgttcgcaaggagatcatctgcctcaaggggctccaacaagcccagtcatatctaacatcttcatgttcgagctggacaatagactctccaaggtcgccgaggagaacaacttgaagtatagtcggtacgcagatgatatctgcttttccggaaagagaatctctcagaaccttctggagctggttaaccgcgctataactgattatggatttcagctgaacaaccgcaagaccaggctgtataagagccaggacgtgaaaagtgttaccggcatcgtcgtgagtaatggcaagttgcgaacacccaaaagaattagaagggaattcagggctgactgccaccatttactgtctaatggttacctccagttcaatggcgaactgggcgtgtttaatccgctgatgttggatgaggttattggcaaagggcgctatatactgagtgtggagccagaaaaccagttcgtctctgatcagatgtccaaactggctacgcttcggagcaaatatctctccctaagtttatga

SEQ ID NO: 9372 - RNA, 1038 nt, synthetic construct
  source 1..1038: mol_type = other RNA
atgaaaattaatgaaaaaaggtggatcgacttcttcattaaaaacaacgtggacctggaacaggccaagatcttgaccctatatgcagtcaatatacagaaaaagtccctgccagtaatttttgagatcgagcacttctccaaattgctgggaattgaactgtctctggcttcccgcatcgccacgaaacctgaaagattctaccgacttttcaatatctcgaaaaagcgagggggaagccgcgccatttcaagcccctaccccaagttgaactacatccagctgtggattaaggaaaacatactcgaaaagtgtcctattcacgatagcgccttcgcatatcggaagaatagaagtcatatagacaacgcacgtatgcactgcgacgcgatagagatgctcaaggtcgacatctctggctttttcgataacatatctgcctcatatatcgtaaagatcttcgagaaatgcggatatagtaagaagctatcagagcaattagctaacttttgttctcactctgatctacttccccagggtgctccgacatccccaataattagcaacattcatatgtacgagcttgacaagaaactctcagatgtgtcctcagagcataatctcatttacactagatatgctgacgatatctgtttttccgggagggagatcagcgttaatctcctgaacatcgtgaataagctggtcaacgagcacggccttaagttgaataaaaacaaaactcggctgtacaagagccagcatatcaaaagtgtgacaggcattatcattagtgatggcaagctgcgcacccctaaaaaaatcaggagggagtttcggttggattgccattacctgcttaagtacgggtatctgcaattcaacggagaatttggcccatttaatcccctgctcctggacgaggttatcggtaaggggagatacatcctgtctgtggagcctgaaaaccacttcgtgaagtgccagttaagcaaactcattaccctccggaattcctatttatcgtttaatgaatga

SEQ ID NO: 9373 - RNA, 1029 nt, synthetic construct
  source 1..1029: mol_type = other RNA
atgttgaatttcagtcaatggaagtcattcctccagtctgaggggatttctgagcaacagagcgagcacctggccaactatgctgaaagattggcaaataggggcttcccagttatcttcgaattagaacatctgagtcgcctgctgggtgtggaaaagaactacctttaccgtgtgatgttcaaagggagcgagttttacaggacctttgaaataaacggacgacgcaagaaacgattgatctccagcccctacccaatacttagttacattcagtcctggattaaagaacagattctggagaagttcgtggtaagcgaacatgcctatggctatgtgaagtccagatctatcctagataatgcaaagtttcatctcggctgcacagagctcctcaaactggacatcaaggattactttgctcacatttcccgggctatggtcaaccgcgttttcaatgaggccggctttacccccaagctttcgtaccagctgtccaagctgtgttgcgtttatggctctttgccacaaggagctccctcaagtccgaccctaagcaacctggtcatgagggagttagatcagagcctgttctatctctcagacttctacaacatcaagttttcacgctacgccgacgatcttgcatttagtggtaaggccataccttctgattttatcgtaaaagccgtcaagcagatcgagaactatggcttcatgctgaaccacgaaaaattcacgcaccgtaagattaatcaagggaaaatgatttctgggctctccatttcaggtgactttgtcagagtgcctaagaagactaggcgggagttcagacagaaacaccactatatgatgcttaacaaagagaaatccttcaatggcgtgcatggagactttgacctgttgagcctagacaagttaatcgggctcggacagtttatcaaattcatcgagcctaacaatacttttgtgatccgggcggtggatgacctgaatctgctgaagaaagaaatattccggacaggatga

SEQ ID NO: 9374 - RNA, 1029 nt, synthetic construct
  source 1..1029: mol_type = other RNA
atgttgaactctagtcaatggaagagctttttagtgaacgaaggaataagtgtggagcagagtgacctgctcgctaattacactgagcagctgacgagttccggtttcccggttatcttcgaactagagcactttgccgtgctgttgggtgtggagaagaattacctctacagaatgatgtataagtcaagagagttttacaggactttcaagatctccggcaaaaagaagaagcgtctcatcaacttcccttacccaattctgtcttacgtgcaaagctggataaaggagcacatccttgaaaacatcgaagtctcagaacaggcttatgggtatgtcaaaagccgatccatcttggataatgcaaagctgcacctggggtgcacacagctgcttaaattggacttcaaggactttttcggccacattagcatccatgatgtgaagcgggttttcagggacgttggatttacaccaaagctctcatatcagatggccaagatttgctcagtaaatgggtgtctaccccaaggagcgccctctagtcctattctttctaatcttatcatgcggaaactggataacgaactggcccatctcagcaagttccacaatattaagttttcccgctacgcagacgatttagctttctcaggtgaaatcattcctagctcgttcatcgtcatgattgtcaaaataattgagtccaacggatttaccctgaaccataagaaattcgcccataaaaagtccggccagaaaaaaatggtgaccggcttatgtatcaccggcgatcgggttcgcgtgctgaaaaagacacgacgcgaatttaggcagaagcatcactatctgatgctcaataaagagaaatctttcaacggggactacggagacttggatgtgctatatctggataagattatcggcctggggagatttattaaattcatcgagcccaataacacctttgtctccaaagcagtggaggaccttgcctctctcaaaaaggagctgtttagcatagtatga

SEQ ID NO: 9375 - RNA, 1041 nt, synthetic construct
  source 1..1041: mol_type = other RNA
atgagcgctaattatcagattaaagattgggaggagctcatcaacaactcttccttatcaaagaaggagaagaaggaaaaactattcttcatcaggtccgcctaccacaacggagtaccagtcattctggatcttgaccatttagctcatctgttggggcttaaggtgggggtgctgtcagcgatgatcaaaaagcctctgagattttatcggcagttcaagatccccaagaaacggggcgggtttcgtgacattgtgaccccttatgagagcttacttgaagttcaacaatggatcgtggaacacgtactgagcaaattccaggtacacgacgcagcacatgcttatgtcaaaaagcgcaatatcgcccagaatgccagtattcatgtgggttgtgatgaaatgctcaaaatcgacctgaaggactttttcccatccattaagataccccgagtccgggaattgtttaacagggttggttactctaaagaagtgagttactacctcacaaatctctgttgcttgaacggatcaattccccagggggcagcttccagcccgatgatctcaaacatcatactgttcaacctggacaaacgcctgtcggttttcagtaagaatcacggagtcaaatacagccgttatgcggatgacctggtcttcagtggcaactttcagtcttttggtttcaagaacctggttatcatgaatattgaggacgagggatttaaagccaacaccgataaaacaagagaatactgcgaaggccacaggaagatgattactggcattgtggtggagaaagatcgcattcgcctccctaaggccaagaggcgggagatcagaaccgaagtgtattttcttatgaagtacggcattttcgaccaagtgaaacgatataacgatatctactacgccgatagggtgctgggcagattgaattactggaagcagatcgagcccaataatgagtacgtcatagactctataaagtccatcaagaaactctatgaggagacgctaaagcagataagcacttga

SEQ ID NO: 9376 - RNA, 1032 nt, synthetic construct
  source 1..1032: mol_type = other RNA
atgaaggtggagtataaaatctcggactgggaggatctgattaatgagagctcactgacgaaaaaagaaaaggtagagaagatgctgttcataaagaaggcttacgacaataatgtccctgtgatattggacttggaccacctttctcatctctttggactcaaaaaagggatagtcgcctccatgatcaatagcagccagagcttttatagagagttcaagatcccaaaaaagcgtggcggttaccgcgacattgtgaccccttaccagagtctgctggaggcccagcagtggattattgaacacatcctgtccaaattcaaggtacatgatgccgctcacgcttacgtgaagaagcggaacgtcgccatgaatgcaatgaggcatatagggtgtgatgaaatgctaaaaatagacctcaaagacttctttccctctattaagatcccacgcgtccgggagctatttaatagagtgggttattctaaggcggttgccggatatttgacaaagctttgctgcctgaatggttcaattcctcaaggcgcagccacttcccccatgatctccaatattatcctgaatagtctggacaggaggctttatgtgcttagcaagaacattggcgtgaaatacagtcgatatgcagatgatttggtgttttcaggggaacacatcccccacgaatttgctctcaacgtggtgaagaacattgaggattatggcttcaacatcaacattgttaagtccaggcactacaagtcacaacagagaaaaatgattaccggaatagttgtcggcgatgacaacatccgcctcccgaaggtcaaacgtcgagaaatcaagaaggaggtacattacttaaagaaattcggggtgctggatcaggttaaacggtataacgacatctactacatcgatcgggtgttaggaagactgagtttctggaaacagatcgagccagacaacatctacgttctcaacagcatcaaagaaattaagaagatgtacgaagagttcctgaaatcttga

SEQ ID NO: 9377 - RNA, 1050 nt, synthetic construct
  source 1..1050: mol_type = other RNA
atgtcatacacaatcaatgattggaagaagactatagagacgtctaatctgtccaaaatcgagaagattgagcggatgcagtatgtagaaagtgccttcaaaaacaaggtccccgtcattatcgacactaaacacctgagccagctactcggactgaagatcggagtgctcacctctatggtccagagcccgtcaagcttctaccgggaatttaagatacctaagaggaaaggtggatatcgcgacattgtcaccccatacaaaagcttgctcgaagtgcagcaatggatagccaaacacattttaagttgcttcgagatacacccttcggcttacgcatatgtgaaaggcaagaatatagcccaaaatgcaaagctccatatcggtagctctgaaatgctcaaaatcgatctaaaggacttctttccatcaatcaaaattccccgcgttcgagaactcttcaagaggctgggctacaacaaggaggtgacttactacctgtccaaattatgctgtctgaaggaacaattaccacagggcgccgcttcctcccccttgatcagcaacattatactgagcaacctggacaagaggctgttcaagttcgcctcgaacaaccaacttatctatagtagatatgcggatgacttggtgttttcaggggacgctatcccatctgactttcggatccttgtggctatgaacatccaggatgaagggttttcccttaatcctgataaaaccatcgaatattctgagaatcagcgaaaactgattacaggcgttgttgtaaagaaggattccattagactgcctaaagatttgaggcgcgagattaaacagcaggcacattatattctgaagtttggcattctcgaccaggtcaagagatacaatgacattttctacgtggatagaatccttgggcgtcttagttattggaaacagatcgagcccaagaacgagtacgtgatcaataccctgaaggagattatcctgatgtacaaagagacaatgaataacatccagaacaacgatgacggagagtga

SEQ ID NO: 9378 - RNA, 1041 nt, synthetic construct
  source 1..1041: mol_type = other RNA
atggacaacaattataagtacgaagattggaaagagatcattgaatcgtctaatctgccgaacgaagttaaagtggaccggatggatcttgtcaggaatctctataagaacaatgtacccgttatcgtggacctgaaacacctgagcaacctactgggaattaagtacactgtcttggcgtccatgatttttagtacgagttctttttaccgagagttcaaaatccctaaaaagtccggcggtttacgtacaatagttacgccatataaaagcctcttgactgtgcagaaatggatcgtcaaaaacattttgtcccaattcaagatccacgatgacgcttatgcctatgtcaaaaatcgaaatatcgccctgaacgccaaacagcatattgggaacccagaaatgttaaaaattgacctcaaggacttctttcacaccattaaaataccccgcgtcagggagctgttcaacaggctgggttattccaaggaagtcgctggctacctgtcaaatctgtgttgccttaatgaggcacttcctcagggcgcaggctcctctcctatcatatctaacattatcctcagaaccttagataacagactgtcaaatatcgcctctaagtcagagattgtgtattcaagatacgctgatgacctcgtgttcagcgggagcaagattccactcgatttcgaggtagttctgacccagaagataaatgactttggattcaagctcaatctgaagaaaaccaagttctacaagaagggggatcgcaaacttgtgactggagtggtagtgaatagtgatggcattcggctgcccaaaagtaaacgcaagcagatcaagaaggaggtgtactatctgaagaaatacgggatccaggaccaagtgtttagacataacgacgtgttttacattgaccggatcctaggaaagcttagcttttggaagcagatagaacccaagaacgagttcgtgttgacaagcatcatcgagatcaggaatatgtacgataaaaccatgaagaacaacaaggattga

SEQ ID NO: 9379 - RNA, 1158 nt, synthetic construct
  source 1..1158: mol_type = other RNA
atgattaaggcccctaaaagcttttataggaccttcaaaatcccaaaaaagagaggcggcaccaggacaattgtgaccccgcacaattccctaaaagagatccagcgatggatactggacaatattctgagtcaattcatgattcacgaggctgcctttgcttacgaggttaagaaaaatgtggccatgaatgccagcattcatttagggcaggatgaaatgctcaaaatcgatctcaaggacttttttcccagtatcaagtctcccagaatccgggaactgttcacaagggtgggatattcaaaggaggttagttacttcctcaacgccctgtgctcacttgacggatgtttgccccaaggggcagtcaccagccctaagatcagcaacatcatcctctattaccttgataagaacctgtctaccctgtgccacaataacgaggtgaagtatagccgctacgctgatgacttggtgttctccgcgaacgagctccccattaatcttaaatcaatagtcagctcttccatcatcgagaacggttttgagatcaactacgctaaactgacagaatactcctctgagcagaggaaactcgtgactgggattgtgataaaagagaaaggactgacgctgccaagatcgaagaaactgtcaatcagaaacgacgtgtttttcctcctgaaatatggcatcgaagatcagatccagaaatacaacgacattttttatctggatcgggtacaaggccgcttatcgtactggaagcagatagagccaaacaataagttcgtactggattctattgacaagttgaagtcccttcataaggattacctaaaccaggcactggacaagttgaattttctcaagattcagaagacgaatcctctcaacaattacaaggaatacattcaccaggtcgctttcgttgcctctggtttgaaaatacagatccagatcgaagatctgcgccagagcatgaattacttaggctatcgtactaaaaagggagcaaagtatctaaaaggacgaggctttcatcggcttatagggctgacattcaagtggctggagaagcaaaataagaacgaagaagccgacaaggtcgcgttgactttcattaacgcagacggtagttattcctataaaaaatga

SEQ ID NO: 9380 - RNA, 1047 nt, synthetic construct
  source 1..1047: mol_type = other RNA
atgaaaaacaactactccattgaggattgggagaaacatattctcgagaacaccgaggcaaatgggttagagcgagtgtactacctggaaactgtgaaaatcgcctatcagaataatgtgcctgtaatcctggacgtcaaccatctcgccaaactgttaggacttaaggtgggcatcgtgaccagcatgatatatggaccccatagcttctaccggacgttcgatattccaaagaagaagggtggcgtacgtaccatagtggcaccgtacacctcactgctgtattgtcaacgttggataagcgatgaaatcctgtccagatttttcgtgcacgacgcagcttatgcctataggcccaatagaaacattgttatgaatgcggagaaacacgtgggccagaagtacatgcttaagcttgatttggttgacttctttggaaatatcactgaaagtcgcgtcaggagtctgtttcaggagaatggctatgacaaggggatgtctttttttctcgctgggctgtgttgcctggatggagtgttgcctcaaggggctgcgacttctccttccatcagcaatatcgtactgaacgaactcgatcacaagttcgattatctgtgcgacaagtatggagtggtctatacccgctacgctgacgacttggtcttctccagtgactctcccctggaccacatcgtggatcacataggggacattattaaaggtgagggcttcacagtaaacatcgaaaagtcgaaaatttacacagccggtgccaataagttagttacaggcttggcagttcaggaagaccgggtgcggctgccaaaacggaaacgcagaaagatcaggcaggaagtgtactttgttaagaagaacggtatcatgaaggaggtcgaaagatcttcagatttgtttgccctagagcgagtcctgggcaaactttacttctggaagcaggtcgagcccaacaacgaatacgtgctcggggagattctggaactaaagaaaatgcgaaaagagctcctcaggagccttacatcatcctga

SEQ ID NO: 9381 - RNA, 1050 nt, synthetic construct
  source 1..1050: mol_type = other RNA
atgattaaatggagtgagaagttggcatccaatactagtaaacccaccgagttaacagaggcattgatcaagtactccaaaaagttggaaaaacagggttttcctgtgatttttgatcttgcccatctcgcgctgatactcggcatcgagaagttgacccttgcctctatcgtaaattcatcctctaagttctaccggagttttaaaatccctaagcgtcggcacaatacatttcgagagattaattccccctaccctgtgctaaagaagatccaagactggattaaagttgaaatcctggagaaaatcgaaatgtctcaccactgctatagctatcggaaaaatgtttccatcatagacaatgccagcgtccatctcggtaacgaagtgctgtataaactggacctggtggacttttttgacaacattaaagaggacagaatcctcagtatattcctgaactgtggctattcatataaagtcagctatttccttacctcactgtgtcttctgacgacaaagctaccacagggagcttcaacctctccgataatttcgaacataatcgctaagaggctggataagagactgtccgccctttgcagcaaatacaaaattaactatagccgctactctgatgatattactatctccggcaaattcgtaccaccattcctgcgactgatcattaagaacataatcgctgatgaggattttatcgtgaaccagaataaagagatcctcatcaatggactcaacaagaagaagatagtgaccgggatctcaattacaaacaacgttctgaagattccacgcgaaagcaagagaatcatcaaacaggaagtgttcaagttcctgaagtacgactttatgattaatcccaatgaacaggagttcgatccttacttcactgagaggctcatcggaaagctgaattactggattaatgtggaaaaggggaacgagaaccccattttcttattgcgcagtgtcattgagaaaaacaagttattcatgagcaggattatccaagaagactttaactcttga

SEQ ID NO: 9382 - RNA, 945 nt, synthetic construct
  source 1..945: mol_type = other RNA
atgaacgagatttatcccaacattaagtcaattagggacctgagcatagccacagaaatcccaattaagaagatcgcgggaatgatctttagttccgagaaccactatagaattttcagcctccctaaacgcaattcagacggggtgagggtgatccattctccctatcccaatttatataaagtccagcgattcatcctggagcagattctcagaaacgtcgatggcaacaattattgctacagttacaaatcaggcgtgtccataaaggacaacgcaatgaggcatataggaaccaaagtgttctacaaaatagatctcgagaactttttcgagaacatcggttttaaaaaggtgattcgtgtctttaggaattgtggctacagcgatggtgtgtcttatatgctcacaaagctgtgcttgtgcaataacgggatcccccaaggagctcctacatccccattgttgagcaatattgtaaccagtaagcttgacaagcggctgagcggattatcgaccaaggaaaatttaacttactctcggtacgccgatgatctatttttctccggggaatacatctcaactaaatgtcgggaactgatcaaaacgattgtggaacaggagggcctaatcgtcaataacaaaaaggagctgttggtgatcggctaccacaagaaaaaaatcgttaccggtctgtccgtcactgagaagaatatttctctgacacgcaattacaagagagagctgcgacttaacgtgtataaatacctgaagtacaaccacaaggttaatccttataacgttgacttcgatcctctttacaaggagaaactcctggggcagctgtatttttggaaattcatcgaagaggacaatgaaatcccgaatattcttatcgaaaaggtacgcaacaaggaaattatatatccagacctggagctctga

SEQ ID NO: 9383 - RNA, 1053 nt, synthetic construct
  source 1..1053: mol_type = other RNA
atgaagctgagttcaggatcagattggagaaaatactttgaggaaatcgggctggagagcgctcgtagcgcggaactgtgtagatatgctgccaccctggccgattcatctctccccgtgattttttccttcgagcatttggctgcgctcctggggcggactagacatcacctcgcgtccattatcttcgcctcagaacaccactacaggtcctttgatctaatcaaaaggagaggaggtactcggttaatagaggccccctacccttcacttttggagtgccagagatggatcctgaagaacattctgctgaagattcctacctcgaataatgtacattcttacctacacggcaaaaacataaaaacaaacgcactcgtacacgtcggggagaacagcatcctgaagatggacttacgaaatttctttcatagcatagagatgacccgcgtgcttaaactgttcgaaagtttggggtatgctccggagatagcctatttcctggccaaactgtgcgtgttgagggaccgacttccacaaggcgcagcaacttcccctatgctatctaatatcatcgcaagtacactcgactctaggctgaactctcttgctaagtcgcagaatctgaagtattctaggtacgccgatgacttagttttctccggcaacgatatttctccggcctttgtgggcgaaattcgcagcatttgtgaaggtgagggattctatgttaatgaggaaaagacgaagctcaaaacagggtccagccgtaagatcatcacgggcttgatcgtcggtgagaagaaggtcagcctgccacgaacatacaagcgcgaggtgcgccagcaggtgtattacattatcaagatgggccccctcgaatacctcaaaagaaatcgcctttcccctaccgcacttagtagtctggctggacggctggccttctggaacagcatcgaaccagacaacccatttgttcgggaatccttgcccattctgatgcggctcatgagcggagagcaaaatgagactcggaggataaaaaacacctga

SEQ ID NO: 9384 - RNA, 1041 nt, synthetic construct
  source 1..1041: mol_type = other RNA
atgaagccctccgaaagcatcagcaagtggcatgatctccttaaggctgcgcctctgaacgaggatttgaaggacgctttgagcctctacatcagaagcatcatcaagagcgggtttccagttatcctaaatgtagaacacctgtcacatctagtgaggatagagtatatctttcttaagcgtatgatgaactcaagtgagtctttttactacgagttcgaaatccccaaacgaaggggagggaaacgtgtgattgaaaagccttatcccacactcatccttgtccagaaatggatcctccggcatatcctgcaaaaaaaggccgtacacaggtccgcctttggctttgtcaagggtaagagcatgattgataatgctaagtgtcacatcaacgggaagagcctgctgacaatcgatttaaaagacttcttccctaacattaagcttcctagagttatttccctctttcagagaattggatacccgtatcacatttcatacattctggcatccctgtgcgtcaagaatggccgcttaccgcagggagcacccaccagtccatacatatctaatctcgtgacccataaactggacagtcggttagacaagctgtgcgacaaattcgacatttgctatactcgctatgccgatgacatggctttctcgggcggcacaataaacctgactttcgtgaacttggtccggtctataattgccgatgaggggttcatcgtgaatgagggaaaagtgaaactcatccacggtttcgacaaacggaaaattattaccggcgtttccatatcctctaagaaaacaacgataccaaaatcaaccaagcgaaagtggaagctggaattgttttatctcattaagaacggcctggatgcccaaatgaaagtcctaaggatcaatgacccactgtaccttgaccgctgtattggtaagctgaatttctggctgcaggtggaacccgataacaaatttgccagagcatctttggatactgtgaccgagatgaagaaactgcgcagtatcgagtga

SEQ ID NO: 9385 - RNA, 1032 nt, synthetic construct
  source 1..1032: mol_type = other RNA
atgaatcgggattattggatcgaatatatcaacctgaacatccaggacgaggagaagagacttatttactacgaactgctaaataggctcatagaaaacagcctgccaatcctcttaaagtttgagaacttcgaatttctgttcaagatcaagaaggaaatcttggcactcatttataaggacagtaggaagttttaccgcaccttcacaatccccaagaggaacggatcgcttcgtttcatacaaagccccctcccactactgcagtacattcagagatacattctcgacgagatcctgtctaaaataattacgcataacaacgcattcggcttcgtaaagcataaatcaatagttgacaacgtgaagcctcacttgaattcccacaccttactaaaactggacattgacaacttcttcccctctatcaagataaaacgtgttatcagcatctttcagagattaggttacagtaatcggatttccttcctgctggctaaattttgctgttacgatgactcacttccacagggtgctcctactagcccttatctcagcaatatcatcgcaaaacggctggactctaggttgtataatttggcgaaagagcaccatctgaaatattctcgatacgccgatgatatgacattttcgggcaatcacatctccaagaatttcatcgattttgcttacaagatcctcattgacgaagggttcacaccaaactacactaagagtaaacttattgtgggccgcggacggaagattattactgggctgtccatatccaacaaaaagattaccattcctcgcaacaaaaagcgcgagttgagatccaaagcctattcagtgctgtcaagcgatgccaagtacaaaatcaattacgccgctatcgacgatcccatctttgtcgagcgactgattgggcagttttctttctggaattttgtggagccggataacctgtatgccgtcaatacccttaagctgctcaaagaatatagtagccaactggataatttgatagagtga

SEQ ID NO: 9386 - RNA, 1044 nt, synthetic construct
  source 1..1044: mol_type = other RNA
atgagaatcctgaatacaatcgaatcatgggaagcctacttcgaggacgtttgtcttcgcgaggatattgccgccgcccacctgaagattatctcagcccagttgaaaagcggtgtgccagtcatatttgatgtcgagcatctgagcctcctactgggagtctcttccacgtatctggcgtcggccgtatccgtgccccggtatcactacagagactttgcaattcctaagaagagaggaggcgtacggaccatttccgcccctagagcggcgttaaaaggcgtgcagcgctggattctggacaatatactcaactgcttccttcctcataaatgtgcattcgggttcagagctaagaagagcattctcaatcacgcccgtacccattgtactgctgggagaatattgaagttggatgtagccgagttttttccctctatcaaactggatcgggttatcggcctgtttaagagctttgggtacacccccggcgtggcttttactctcgcctctctgtgctgcctagaccgccagttgccgcaaggtgcaccaacatcgcccgccatcagtaatctggtttgccggaggcttgacaaccgactgcacgccttcgcatccaagaacaggttcaggtacagtcgatacgctgatgatattgcgctctcaggacgcgacctgaactccagtgtgattcagatcataagaggcatcctcgcagaagaagggttcgctctgagggacgataaaacccgtatctatggcgtgcactcaaaacggatcttaacaggtcttagcgcttccctcgacggcgtgaagctgccaagggaggatcgccgccaactgaggtctgtgtgccatcagattcggaagttcggatttctgagctacttggctaacaataaaatcagggacccaatgtttctcgcccgattaataggacggttctctttctggtgttatatcgagcctgagaacgctttcgctagcgaagccctagcacacctgaggggggtcgagagacagtttcttgcagcaaggagttga

SEQ ID NO: 9387 - RNA, 1017 nt, synthetic construct
  source 1..1017: mol_type = other RNA
atgagagcactcacctctctagattcctggattgactatttcaaggatgttggactgtctgacgatgtggtcgagaagcacgcccggtatgtgggggagctgcttgccaggagcttgcccgtgatattcgatgtccagcacctgtgcctcctgctgggtgtaagcgagcgcttcgccgctgtggtactcaacgcttcacaaagttcttatagggagtttaagatcccgaaaagaagcggcggcagccggacaatcatcgcacctcggcgtgcccttaaagactgtcagaggtggattctggacaacattttagcacgtgtaggtgtgcacgccgctgctaaaggattcgttcagcgtagatccacaaagtcgcactgtagacctcacctcggcagggagtctctcttgaagttggactttcaggatttctttccctccataaagaagcgacgcgtcatcgcactgtttagatctatggggtactcagatagtgtgagcctgtacttagccgccttctgctgctttggtgaggtactaccacagggcggagtcacctcgcctgccatttctaatttaatatgtcggagactcgatgcaagactgtccgctctggcctcaagtaaacggtggcgctacagccgctatgctgacgacctggtcctgtccggcaggaatctgaattacgcagtggtgggcattgtggccaaaatcgctaaggaggaagggttccgacttaatgacggtaagactcggctatatcggggggaagcacgacccatcgtgaccggactggtgcttggagaatccgccctggcggtgccacgaacatttaaaagggaggtggtcaaacaagctcattacgtccttacttacggcgttctgagccatagtgccaagaccaaatccaggaacccatacctcgttcccacgttgctcgggaagctcaactattggatccatattgaacctgaaaaccagagagcggttaggctgcgcgaccgcttgtcagcgctttga

SEQ ID NO: 9388 - RNA, 1059 nt, synthetic construct
  source 1..1059: mol_type = other RNA
atgaatgcttatgaaggcatgccagccagtatacctggactgcgcgtctggaggaagtattttgaagatcgagggctttcatctgaggtcgtggagctgtacatgggatatattgcgcctctataccgccgcaggctgcctgtgatctttgagtgggaacatttagggaagctgctgggaagaacgccacactacctggcaacagcgatcgcatcacccgctgctttttatcggacattccgtattccgaagaaatgcggcgggttcagggaaattcaggctccacacagatccctgctcgactgccagcggtggattgttgagaacatactcaagagggtacccgcccacgagtgtgcaatcggatatgtccaagggaagagcattatcgattacgtcaccccccacctccagtccgccgatatcttcgtaaccgatatttccgactttttccccagcatcaaaatccagagagtgatcggcctttttcaagggtttggctactccaattctgtttcgtacgccctggccagtatctgttgtttgggtggtgccctaccacaaggcgctcccacttctccttatctttctaacttgatctgcaagcatatggacaaaagattgtccggctacgcccgcaagcagaacatgatttatacccggtatgccgacgacatatgttttagcagccaggccatacggagcgtgaacaaaaatacaattcggcgtataatcttcgagtccgggttcagtgttaacaatctgaaaactcgaacttacatcggtaactcaacatcaaaaattgtggccggcatcaatttgagtggaggcaaaagaaccctccccaaagatttcacgaggccgttactgaccgaagtgtactacatcgaaaagttcggatatattagccaccgcaagaaaaagaagataaaggaccctctgcatcttatgcggctcctcgggagagcagcttactggaggtgggtggatccaggttctgagaaggcacagtactgctatggactgctggctggcatcttacgagagattgcgatttga

SEQ ID NO: 9389 - RNA, 1053 nt, synthetic construct
  source 1..1053: mol_type = other RNA
atgtatgattttgtgccagctccccttcctagcctgcataaatggcggaagttttttatctcaaggggagtgcctgaacctcgtatccaggagctactcatttacattaagccgctcgtgaagaaccgagttccagtaattttcaatctagaacacctcgggagattgctcggccgaaaaaccgggtatctcgccaaaatcataaatagcaacgagcatttctacaggagtttccaaattccaaagaaaaatggagcccacaggatcattaatgctccctacccttcacttctggaatgtcagagatggataaacgataatatcttgagcatcgtgaagatacacgattgcgccaaagggtacctgaagaacactagtattatcgaccatgttgagccccacctgggaaacaacgtcgtgctccttttagacctgaaagacttcttcccaaatatcacaatcaatcggattatacccgtcttcagaaatctcggttactctcagcaggtcagcctggcattgagcaaaatatgtaccctcaatgacatccttcctcagggagctgcttccagtcccagcctgtccaacatcatttgcaaccgtctggacaagaggatagcatgttatagtgagaaaaacgacatcaactacacacggtatgccgatgatttatgcttttcttctaaacacatcgagccccacaagattaagatgatcctgaagatcatcaatagcgaaggctttctgattaactcctccaagtatagactgctgggcccgcagtcttcccagaaaataatcaccgggattaatatctcaaacggcgcaatgaagatctctaatacgtataaacgcgagctatccctggccatgtactgcattaaaaagtttggtattcgctctcatcttcaaaagttaaagattcgggatacctactatttggactcgttgtatggcaagattaattactggctgaacatcgaatcgacaaacaaaaaggcgaaattctacaagatgttcgtgcgctcactgatgcaaacttacgagccatga

SEQ ID NO: 9390 - RNA, 1059 nt, synthetic construct
  source 1..1059: mol_type = other RNA
atgaaacgttcgcttacacaggtctgggagagttacttcgaggagattggcctggacactgagctgagcgcaaaatacattccctacatcgctcgatgcgcagacgctaagatacctcctatctttgagcaggaccatctggcacaactcttgggtcttgagctccccatgatgttatctatggttttcggcaccaaaagcttctaccggtcctttagcattcctaagcggagcggaggacggcgggaaattgtggctccttatccgagcctgctggaagcccagagatggattgcggaaaatatactggactcagtcaaggtgtcagtttgtgctaccggtttcaggagaggcaaatccattctcgataatgcccgactgcattgtgagcgagatcagattctcaagatcgacatcaaagacttctttccgtcgattagcttccagaggatcatgagggtgttcaccagcataggctacccaaacgaggtcgcctatcttctgtccaagatctgcaccctcggggatagtttgccacagggcgccgcaacgtctcctacactttctaatatagtctgccgcaggatggacgttagattttataaggtctgcaaaaggcacagactgcggtacacccgctatgccgatgatatcgccgtatccgggaagtctataccatctgggattgcccgtttattctttgagatcatcgaagatgaagggtttgaggtgaaccagcaaaaggtgcgatttctcggaaaggctgatcgcaaaatcatcacgggattggacatcacatccggggtgcccagagtaccacggaagttcagacgcgagctaaagaaggatgtgtattttgtatggagtgccggtttgtcaactcacgtgtcccgcagaaaaatcttcaacccccagtacattgaccacctaatgggaaggattgaattctggcgtcaagtcgaacccgaatgtgtgcagctggcgactgtgcagcgcagggttaacgagatcgtgagtcagcaaaaatcctattcaggcacatctaagtttcagctgtga

SEQ ID NO: 9391 - RNA, 1038 nt, synthetic construct
  source 1..1038: mol_type = other RNA
atgaacgacaacctactgtacaagtggcaccagtatttcgaggacatcgggctgagatcggacctggtacgcagctacacaccctacatccggagatgtatttccaacggcgtaccacccatatttgagagcagtcacttagctgttttggtcgggaggaaccctgctgacctgtcagcaatgggatttggagccaagtcttattaccgcagcttcaaaatcagaaaaagatccggcggacttcgggagatccaggcaccctacccctccttattagaagtgcaaaggtggatcgttggcgaagttctaagttcagtcaggcttccggtttgcagtactggataccgggagggggtgagcattctggataatgctctggtgcattgcggccgcaaggaggttctgaaaatcgacctgaaggacttctttccatcaattggattttctcgtgtggtgaaggtgttcattgactttggctatccatctaacgtggcctttttgctcgcgaatctctgtacccttgatagaaaacttccgcaaggcgccgcttcctctcccctgctttcgaacattatctgccgcgacctcgatcagcgcattatgaagatttgtaaatcccgtaggttgagatacacaaggtacgcggatgatatcgtcatcagtggcaaggccatacctaaaggcatacggcgactctttttcgaagtcattgccagcgagggtttccaggtgaatgagaagaaagtccgatttctgtgcgagggtgataagaaaatcgtgacggggctggatatcaccagcgggaagcctcggccaactcggcaattccgcagagatctgaaacgagacgtgtatttcgtctggtctagcgggctgtcctcacacgtggcacggaggaggattttcttccctaattatatagagcagttggaaggtagagcccgtttttgggaacatatcgaacctgacaatgtacagatgaagaagaccatggagcgagtcgtggaactcaggaagctctatggacgccagcggtga

SEQ ID NO: 9392 - RNA, 1032 nt, synthetic construct
  source 1..1032: mol_type = other RNA
atgaatcagaattcgatccagcaatggagctcatatctggaagacataggtatctatcccgatcttagggagcagtacatcgagtacgtaaaaaaatgcgtgaggtttggagtccctcctatatttgaacggacacaccttagtatgctgactggacgccacctcggggacctgatgtccatgattttcgccaccgagaagttctaccgcgagtttaagctgagaaaacggtctggcggttatcgacggatactcgccccctacccctccctgctggaagtccagcaatggattaaggacaacattctgtccaagtacgagttgcagaactgtgtcaccggatttcgtgacggatattcaatcgttgataatgcacgaatgcactgcgggagagacattctaatcaagattgacattagagacttcttcccgtcaattaacttcaaccaaatcatgggagtgtttcataaagccggctacgcgaataacgtttgcttttatctctcccgtttgacgactcttgacaatcagttacctcagggggcagccacttctccatctttatccaatatagtttgtcggaacatggataagcggttcctgctgttgagcaaaaaccacagacttcgctatacacgctacgccgatgacatcagcatttctggtaagcatatttctgatgggatgatcagactgttcttcgagatagtggaatcagaaggctttcgaattaataccgacaaattcaggatcctgaatgctaacgacaaaaagatcgtgacaggcctcgatatttccagtggccgaccacgggtaaccagagagttcaggagggatctccagcgggatatctattttgtctggagccaaggcctggctgctcatattgcacgtaggcgcatctttttcccaaattacgtggatcacctcacagggcgcgtgaacttttggaggagcgtggagcccgaaagcgctcagttgaaaaaggtgatcaacagactaaagatcatcaggagtcagtacatgatatga

SEQ ID NO: 9393 - RNA, 1047 nt, synthetic construct
  source 1..1047: mol_type = other RNA
atggcaactattccttatcagcgcgaacatctgtcacgctggaaagcctatctctcagacataggggttcgcgacgacctcaaggctatttacctttttcacgtgaaaaagagcctggagaagggggtgccacctatctttgaacacgagcagctagctctgttgttggggattgatgtcgcccatctcatgaggatgctgtttggtcaaaaatccttctacagagaatttagtctcaaaaaaaggtctggtggatacaggactatcagagcccccctgccaacattactggagtgccagagatggattaacagcaatatcttatctgctgtgcaactggcgcagcctgcaatgggttttagggaaagacattctatagtcgataacgcccgcattcactgtggccgggaggagctctacaaaattgacctcaaggacttcttcccgagtatcggctttcggagagtgatgggggccttcgtgtcccttaactatccaaaacatgtggcgttctttctgtccacaatctgtacagtcgatgatgaactgccccagggcgccgctacaagtcccactttgtcgaatattatctgtaacaggctggacatgagattgcgagcaatatgccgcaaacgaaagctccgttatacgaggtacgccgacgacatcaccatctctggaaacaagatcaccgatgagcttaagtggatcgttcacaagattgtagaagatgaaggattcgtgataaatcgagagaagatccggcacgtgttcgcaggagagaaaaagattgtaaccggcttagacattaccagcggcgtcgtcagaatcccccggcagtacaggcgcgaggtaatgaaggatgtgtatttcgtttggtcctcaggcctgagcaaccacatggccaagaatcgtgctttcgagccgaattatatcgctcagctggcagggcggctgcagttttggaaacatgtggagccagaaaatcctcagatgctgaagtgccttaagcggttcaaatccgttatgctaagctaccaaaagtga

SEQ ID NO: 9394 - RNA, 1035 nt, synthetic construct
  source 1..1035: mol_type = other RNA
atgtctaaatccagtgttgagaaatgggaggcctacttttccgatctgggcattaaccaggattacattcgggaatacatcgactatgcaggacctatgcttagggctggcgtgcccccaatatttgaggatgtacacttatcactgctaatcggtagggatctgggcaccttgtacgccatggttttcgggacaggaaaattttatcggagcttcaccattagaaagcgccgtggcggtaagagactgattcagtccccatacccctccatgctggagtgtcaaaaatggatatccgagcacatccttcagaaatctcaagtgtcgaggtgtgccacaggcttcagacggaatcaaagtatcttgcggaatgcatctctgcactgcaaacgggacgtcctcctgaagctagacatcaaggatttttttcccagtatctcagtgaatcgcgtgatagacatctttaacagctttggcttccctccaaatatttctttcctgctcggaaggctgtgcactctcaacgggagattaccccagggggcagcgacttctcctatcgtgtcaaacattatttgcaagcagatggacgaccgcctctatagcctctgcttgagcaagaaccttagatatacccgttatgctgatgacattgccatctcgggagtgcagatcgaggtgggaacaaactacttaatacgagagatcatcaacgcggaagggttcctgatcaacgaagaaaaaacacgcatttgtggacctagggacaaaaagattgtcacgggcctggacatcaccgccggtaaaccaagactcactcgatcctaccgcagagaacttcagcgggatgtctatttcgtttggagcgcagggctggccagccatttgtctaagcgcaagatattcaatcccaattacatggaacatctgcagggtaagatcgctttctgggagtcaattgagccggaaagtgctcagatgaagaagtgtaaggatcgagtaagcaagattaggaggctcatgaataaaatgtga

SEQ ID NO: 9395 - RNA, 957 nt, synthetic construct
  source 1..957: mol_type = other RNA
atggcgtatgtggagccccttgtgagaaatagggtgcctgtgatctttggattcaagtccctctccgatcttctgggaatcgaggagagcaccctgagctccattattaacagcagctcttcattttacaggagtttcaagatcccgaagagatcgggcggacgacggcagattgatgctccataccccagcctcctgcattgccaacgttggatcgcacagaccattctaccctcttgtaaggtgtcatctgtagcacacgcttatctgcctgagaggagtatcctcacgaacgcaagagttcactgcggcgcacagttcctcctcaagatggactttaaagacttctttccatctatctccgagagaaggcttgtcggcctgttttctagcttagggtattcaactctggtatcggtctatctggcgaagatctgtacattgaaaggcgccacccctcaagggtcacctgcatccccaatgttgtcaaatgttgtggcccggcgcttcgatctgagattggtgggttatgctcggagtcgaggcctgaagtatactcggtacgccgacgacatagccatcagcggagaaatggatgccgacgaagtgcagagtttcgttacaacttgtgctgtatccgagggattccgcattaatcataagaaaacacgctacgtcgagagtggtcagaaaatggtcgtgacaggcctggatataagcaccgggacgccacggccgaccagaaaatttaggcgcgaggtggaaaaggacgtcttttacatatggcggtatggtgtggccgggcatgttaacgctgaaaaaatttacgatccctcttacattcttcgcctgaaagggaagctggatttctgggcccagatcgaacccgaccacccacgactcgtccgttgccgagaaaggttcttgtccgctgcccccgactacttacctctatga

SEQ ID NO: 9396 - RNA, 1152 nt, synthetic construct
  source 1..1152: mol_type = other RNA
atgaatgatgtggatgagaaagtgtccccgccgccaatgagcattgatctggagcaatgggccgcattttttcttgataaagcaaaaggcaaccagcagctcatctcggggtatttgcattttcttaagcactgtaagcagaaggacatccctccaatttttgaggataatcacctatcccagctgctgggaatcaacatccgggacctcgccttctatctgtctggtgcccagggtcgttaccgaagctttcacatacctaaaagaaaggggggtgtgcggttgatcaatacccccactcctctgctgctccatattcaacagtggattctctcaaagattctgtacaaactccctgtgagcgaattcgctcatggcggggtgcccggaaggtccatcttctccaatgccaaagcccacctcggcgccagatgcgtgctcagaattgatctgaagggattctttgacacagtccctctggcgcttgggatctctatcttcagagctgctggttacagtcctaacgtcagccgttcactggctctcctgtgcttcgagaatggctgtcttccccagggagcagccacgagtagcaccctggccaacctggcagccaacagcttagacaagaggctctcagcattggctaaaaagtatggactgtcttatacacggtacgtagacgacctgacattcagtggcaggtccatcggcccaagattcgccatagcagtcaaaagtattgtggaacaatgccgctttgtggtgaacccccgcaagacccagcttatgagagggtctagcccaaaattcgtaacaggcttagccgttggaggccagaccttgagggtcccacgcgcttttcgacggaatgtgaagaaccaggcattccaactggtgaagaggggcgttgctggacaccttttggctactggggataatgatcctctaattctcgaacgcgttgctgggaaactggccttctggttgcaggcggaaccagaatcaaagaccgcgcggcaactatgtgcggcattagccgagtaccgaaagactgttgacactgatgtctctttaccgcagcccaggcgcatagtacccatcaactaccccgacgagctgttttccgacatagacctgtttacgacctga

SEQ ID NO: 9397 - RNA, 1140 nt, synthetic construct
  source 1..1140: mol_type = other RNA
atgaattatgttaaccttaaagtcagtcccccaattatgccgatcagcgtcgaagactggcgggccttcttctctctgtcagtcaaacgcgattctaaactggtggaagggtatataaggttcattgaactctgcgaaaacaagggccttccacccatcttcgaggagcgtcacctggctcatctgattggaatcccatactccaacatggcctattttttttctgtggcatccggacgctaccggacatttaccatcccaaagaggcgaggcggcagaagggaaataaatgtgcctacgcccctgctgttggctatccagcaatggattctccataacatcctatacaagctgccaatgtctgagtttgctcatggtggcgtaccaggccggagcatcctctccaatgcccgtgctcaccttggggccaaagccgtcctgagagtggaccttaaacagtttttcgattcagtggaatttccgattggaatccccattttcgaagccgcaggctatagtcccaagatgtccaagagcctcgcgttactgtgctttgagaatgggcgactccctcaaggggctgccacctctagcacactggccaacctggcggccatcagcctggatattcgcttgtccaaactcgccaataagttcgagttgacttacaccagatacgtggacgacttgaccttctcaggtcggtcgattggccccgggttcatctcagctgttgagggagtggtggaacagtgtcggttcgtggttaacgccgaaaagacccagctggcaagaggaaagtcccccaaattcgtaacgggtctggcagtaggtggagatcgactccggatacctcgcgcatttcggagggaggtgaggaatcaggcttttcagatcactagacgtggggtccagaatcacctcgaggccatcgaaagtagtgaccctttgatcattgagaaggttcttggccaattagcgttttggctacaggtggagccagagagcgcaatggctcgcaagctgttcgcaaacctgtcgttataccgaaggactgtcagcacagacactctgctacctcctcccagaaggataatacagatcggcacaatgcctattgatgagagacgcaaagagtga

SEQ ID NO: 9398 - RNA, 1104 nt, synthetic construct
  source 1..1104: mol_type = other RNA
atgagcgacaccgccgaacagtggcgagcattcttccaggagcacgtcaagcaggacacggccctggtgagagggtatctcgctttcattgaccagtgcattgtacggaatctgcctatcatcttcgaagagaggcatctgagccggctgatcggcgtcgactaccgggatatggccttttatttcacttcatctggggggcgatataggcaattcagaatacccaagaggctcgggggtactagggaaatcaacgtgccatcacccctcctgctagccattcaacagtggatacttcgaaacgtgctgtacaaactgccgatcacagatgccgctcacggaggtgtacccggacgttccattatcacgaacgccggtggacatttgggggctaggtcagtgctaaagatggatttacgaggcttctttgataccatattgctccctagaggtgtggctatttttgagtctgctggctacagtcctcatttgtctcgtagcctggctctgctctgttttgagggcgggagactccctcaaggagccgcaactagccccgcgcttgcaaatcttgcagcggtcgctctcgacgggagacttgaagccctggcacagaaatttggtttaatatactccaggtacgttgacgatttgacatttagcgggcattcaattggcgtgagattttccgcgatcgttcaggatattgttgaggacactggctttgtagttaattccgataaaacccggctgatgcgcggacagtcgccgaagttcgtgacaggactggctgtcggaggaggccgcttaagggtgcccagagcattcaagcgcgacgtgcggaaccgcgcattccagctggccaaacgtggcgtggagaggcaccttgaagccaccgagtcttccgacccactggtcctggagcaggtgaccggccaactggccttctggctacaggtcgagccagaaagcaagactgcccggcagctgtttgatgccttgaccgaatatcgcagaggcatgacaacaagtgtgaaactccctgacccacgccgggtcgctagtatcgacgattcccactggcgggttatccgcgatcactga

SEQ ID NO: 9399 - RNA, 1119 nt, synthetic construct
  source 1..1119: mol_type = other RNA
atggacatggtagttgaggactggagtagcttttttagtaaggaaattggaaagggaagcaatctacgcggtagatcgcgaattctggtggacggctatatggcatttatcaaacactgcgccgatctcggggtgccacctatattcgagaatacacacctccgcttactgcttggcctggacgcggcccattttggggccttgcttaccgagcatccagggcggtatcgtaaattcaccatcccgaaaagaagcggtggcgaaagagtgatttcatctccaaacccggccttactccacgttcagaagtggatcttgcggcaaattctggacaacgccgaagtctctgatttcgcacacggcggaattgagggccgaagcatagttactaacgctagggagcacctgggggctgaagccctgttaaagctcgatatcgccgacttttacggctctgttgggttcggattcgggatctcgaccttccagaggttcggataccccagaaacgtggctctttctttgacacagttttgtttcgatggcggatctttgcctcagggtgcagcaacatccgcttcccttgcaaatctgtcatgtagactgctcgatcgtcgctgccatggcctggccaagaagtacaacctgacctatagtcggtactttgacgacatctcattttctgggtccttcataaatgaaagactggtggaaatcgtctccgaaatcgcaatggagagcggttttgaactgaacaagcgcaaaactcggcttctcctgggaaagagtactaagtatgtgaccggcatctccgtgggcggtgacaggctacgactgcccaaaaaaacaaggcgcgctattcgtaatagcgcctacctgttaacgaagactggggacgtgcaaggattcgccgagagcgcgaaagatcctctgatcattgaaaccgtcctgggccaggtagcgttttggcggcatgtcgaacctgaggacgatgtcgctgaggagctcttccaggcccttgtagagctcaggcgggagacggatgtgcccgtggaactccctgctccatggaggccctcccccataccagagttggatctagagaaagtgtcagattga

SEQ ID NO: 9400 - RNA, 1104 nt, synthetic construct
  source 1..1104: mol_type = other RNA
atgtcagaatctagcagtgaaatcgccctaaagtggttgaccctgtgggatgagaagattcgacacaggaagtggttattcgactcttattcccggtatgtaggcaatctcgtcaggaatgggtttcccccagtgttcgagatgagacactttgcagcacttgtgggactggaggagacaacaatagcttggatgctagaaaaaaacgcgggattttaccgcaccctccagattccaaaaagactggggggtgtgcgagagatttcggctccgagccctaccttactgcatgtacagcggtggatcctccgaaatatcctggacaaagtgaaaccgcatgactgctgttatggatacataccccagaagtcagctattgagaatgccaagcaacacctgggcagcaaaacagtgttgaagatggatctggccaacttctttcctagtattgaactgcgtcgaggaatcgcgatcttccgcgccatcggatacaccggccgggtttcttactgcctggcactcctgtgcttcaaagatggcaaacttccacaggggggcgctgcatccccatctatttctaacatagtcggcaaacgcatggacctgaggctcagtactcttgccagcagaaataatctgcgctacactaggtacgccgatgatatgacgttctccggggatgaaatcagctggaagtttgtggctgccgtggagctgatcgcccgtgaagagggcttctgtgttaaccgggagaagacccgtttgatcagggagggaagagcaaaggtcatcactggtgtttcaattagcagtggggaggctcggctacctagacgcacagtgagagatattaagaacgaagcgtacaacatacttcggaacggcctcgagcagcacgctgagaggacccataattttgaccccatcgccattgaaaggctgctcggtagaatcaacttctggttgcaagtcgaacctacgaaccagactgcattgaattataggtatcggctgctcgagtatcagaagtttctggacgcccacggcctgggtttgcccgaagacagatccgaccgctcccttatattagggggaccctcatga

SEQ ID NO: 9401 - RNA, 1086 nt, synthetic construct
  source 1..1086: mol_type = other RNA
atgaccgatagcattcgaacaatcgcatcaaactttcaggtggacgttcgtcagtggcagagtttcttcgaggaaaatggatccagaaggaaaagactgatcgccggctaccttcacttcatcgaagagatggcgtcccggggccttccacccatcttcgagggcagccatctcggaaaactgctaggaactacccctgttgaatttggccggctgacgagtgcacccgaacaccactacagatcttttaccataccaaagcggtcaggggacgaaaggactatcctcgctcccacccccctgcttctgcattgccagaggtgggtcgacgcttttatcctccgtaagttcccgacacactccgcagcccatgggtacgtggtaggccggtctaatatcacgaacgctcgagtgcatataggcaatgcccagattctctgtttggacattgcgaattttttcgagagtgtcggggtcaaaaagataaccgagattttctatgaagctggttatccacctaatgtggccttcctgctggccaggttatgctcctatatgggccaccttcctcagggaggggcctcttccccacaactaagcaacattgtgatgcgtgatttcgacgctaccatgcaaacttttgcagagaagagggggctcaggtttagccgatacgttgacgacattgcattatcaggtgatcgagtgagtgatcaggatatacaagctgtggaggaggcactggaagagacaggtttaacactgaacccccataaaatcagattccagcgcggacgcaagaaaatcgtgactgggattagcattggcagcggacgcatgttgctccctagagagctgcgcagacggtttcgcaaccaagcttttctggccctgaaaaacctggccgatgcggtggatgccgaccctattgcccttgagcgccacttgggtcggttcgcctattggaaatctgtcgaaccggataataagagggtacagatggtcttcgacagattgaatgagttgaagaacatcctggttaagcgggacacatcgctgtcagacaaggatggctttctctcttga

SEQ ID NO: 9402 - RNA, 1038 nt, synthetic construct
  source 1..1038: mol_type = other RNA
atgattgactccattaggaccatagcttccaattttcggatagacgtgaatgattggcgcagctttttcgagattcacggagggaggcagaagcgcttgatagcaggttatctggccttcgtggaagagatggccacacacggcctcccgcccattttcgaggggcgacatcttaggaaactactcggagccacacaggctgaatttggatcgatgacgtctaatcctgagagtcattaccggagctttacaatccctaagagaaatgggggtgagcggaccatccttaccccaactcccctgctgctatactgccagagatggatcgatctttttatcctgcggaagatccccgtgcatgatgccgcacacggctacatcgccggacgttcaaatataagcaacgcgaaaatccatctgggctccgcccaactgttgtctgtcgacatcagcaactttttcgagaacgtgaacgctggcaaggttgcatacgtgttccagtccgctggatatcctccggccgtcgtcttcttgctgaccagactttgcacctataagggccacttgccacagggggctgccagttcaccccagttgtccaacctcgtgatgagagggtttgatgagactctgcagtcatacgcaaacgtccgcggcttaaggtatagcaggtacgtcgacgacattgtgctttctgggaggcacatcggcccaaacgacgttaacgctgtggaggaagcactgaagcaggtaggcctcgctctaaacccaaagaaaattcacttccaacgaggacgcaaaaagatcgttacaggtatctctatcggaagtggtcgactgctgctccccagagagctccggaggcgttaccgcaatgagactttcctcacactgaaaaacattaccgcggccactgaaagagatcctattgcgctcgaaagacatctggggcagctggcatattggacgaatattgaacctggcaatgaacgggccttacacctgttaaaacaagtacgctcagtgagcacttgttga

SEQ ID NO: 9403 - RNA, 1086 nt, synthetic construct
  source 1..1086: mol_type = other RNA
atgaccgactctattaggagtgccgctagcagctatgagctggatattgaactgtggagttccttctatagcaaacgcgtagaaagaaacaagcagttggtggcaggatatctcaagttcatcgctgagatggcagacagaggcataccaccaatttttgaaggccatcacctggccaaactactgggcctttccctggcagagctgagtcgcttcaccgcaaaccccgagaagcagtacagaactttcgaaattcctaagaggagtgggggagcccgtgagataagcacaccctctcctgaattattggagtgccagaggtggatcgattggtatatactgaggcgcctgccagtccatgattgcgcccatggatacgtgacagggagaagcaaccgatccaatgccgtgacccacataggctcccgccaggtgctccacctcgatattagggacttctttgggtccataaagtttcggcgggtgatctctatctttcttaaatccggatacccgcgtaatgtcgcttttctgctagcacgcttgtgcacacaaggtggctgtgttccccaagggggtgcttcttctccccagttgtcgaacgtggtcatgtacgatctggacttggaaatcgccgagttttgtaaaagcaatggcctgatctactcacggtacgtggacgatatcgccatctcaggggacctcatccggacaactcacattgcggagatctcaaggattctcctggaaagcgggttcttactgaacgagaagaagacttctcttcagcggggtcgaaaaaaaatcgttacgggagttagtatcggctccggcaatccgaaggtacccagacagatgaggcgtcatttcaagaaccaggccttcattgcgctcaaaaatttagagcacggtgagcaaattgatgaaatgtcagaccctattcactttgagagatgtctgggacagctatcctattggtcgatgatcgaaccagagaacgaaaaggtcgccaaactgattgacgaaatcaagaatcgactttcagacctcgaggctagacttcggcctagccgcgctacccgatga

SEQ ID NO: 9404 - RNA, 1047 nt, synthetic construct
  source 1..1047: mol_type = other RNA
atgagtaaatcatcagaagaatggcgccatttctttgaagaaaggggcgtgaaggataaaaaagcgctcttggggtatttgcagtacattgaggaaattgaggcaaaaggtctgcccccgatttttgagatgcaacatctctctgagctgatcggagtgaataagtcctacatcgccgctgttactaaggacagttctgctttttatagagactttgaggttaagaaacgatccggaggcgttagggttatctctgcccctcatcccacactgctgctctgtcagcgatggatcaacggtgagatactgcagcacgtgcctatacacgactcagcatttgggttcgcccagggccgttccgtggtggataacgccaagatgcacatcagtggcaatcaccttctgggaatggacatcaaggattttttccccagcattcacatagatactgtgagggatacctttctaggtcttggctaccctccgaacgtgtcggctatcatggcaagattgtgctgtaaagacgggcggctcccacagggagcacctacatcaccagccatcagtaacctggtgtgccggaacatggacaaagagatctcagatctggtcaagcctcggagtctcatctatacacgctatgccgacgacatcagcgtctctggcgaagatttgggctccgatgtgctggggaagattgagttcattcttaagtccttcgggttcctggtcaacgagggaaagacgcgcattagcaagggcgggcacaagaaaatagtgaccggaatatccattgggaccggaaggccaaagttacccaggaaagaggtaagatccatcaaggcggacgcccatgccttgttaagctacggtctattatcttacattgagcggagcgaaaagccagatccactggtcgtagaaagactgatgggccgcgtggctttctggcttcaagtcgaacccgagaattctaccgctgtaaaactgaaaagcaatctccaggacctcagcaatcagatggaccgtggccggttcagactgtga

SEQ ID NO: 9405 - RNA, 1056 nt, synthetic construct
  source 1..1056: mol_type = other RNA
atgactgactttaattatgacgaatggcagtcgttctaccatgagagagttaagggggagcacgggctccaacttgtgagagggtacctcgctcatgcggccgctttgtccgccagaaacctacctcctatttttgagttcagccacttagcagccctgttgggagtcgacaaagtgacactggccaccatctgccactctccccataattactaccggactttcgcaattccaaagagaacaggcggccgccgggaaatatcagtccctcggccaatcctgatgaaactccagcgatggattttggctaacatcgtggagttggttaatgtgcatgacgctgcccacggcttcctgaagaatcggtccatcgtaactaatgcacgccagcacctgggctgtaacgagctgctgaaaatcgatattctgaacttcttcccatctatctctagcggcaaggtgcgaagtctgtttgccgagctcggctattccggttcagttgcaagcgctctcacccgaatatgcacaaaaaatgacgggcttccgcaaggagctcccaccagtccggctatatcaaacttagccgcaaaagcttttgatgtccgcatcgctgaccactgtgccgaagaggggctgacgtatacacgctacgccgacgatatcgccatttccggtgagaggatcgcccctcatgtgcggggaaaaatcattcagatcctcgccgataccgaactcaagattcaccccgtcaagagccgtctattcgggcccaaagataggaagattatcgccggcataagtattagctcaggaaagctgatgccacctaaggactttgtgaggtctgttcgtaaagatgtataccatgtgacgaccaagggtctgttagcacacatggcggcaattgaaaacttcgaccccatatatctggagaggcttcttggcaggatcgcattctggaagcacgtcactaaaaacagcgatcagtccctgagagcggaatttgcgttgaagcagtatatggtggtgagtggacttgccggagaatttcagtga

SEQ ID NO: 9406 - RNA, 1140 nt, synthetic construct
  source 1..1140: mol_type = other RNA
atgaataacgtgaaggattgggaagagttcctcaggacacacctgagtcacgaacagcagcagctggagggagctatcggctacgtaaagcatttaatctcccaaagcctgcccccgatattcggtgaaaagcatttctccatcctcactggcgtgtcagagatctttcttaggaagctagccgataacagtgcccactattatcgcactttctcgatacctaagcggaaaggcgggtttcggaatatctcagtcccctcgcctaccctgttgcacgttcagagatggattgtcgcgaacatccttagaaagatacccgttcatgaggctgtgcacgggtacgtggcaagccgaagcgtaattaccaatgctaaggtccatagggaacaggagtctatactccggattgacatcaaagactttttccccacaatagagtcacagcaggtgcaggcactgttcgcagctattggataccggcccgagttatctgtcctgatgagtgacctgtgctgtcgcaataacgtgctacctcaaggggccgcaacctccccagctattagcaactgggcatttgcgccgttggatcgcaaactcaaggagttgtcccagaaatattcataccaatataccagatacgccgacgacatctttataagcggtaagcatatccacgatagaattgaatctgaggttgcccagatcctcctggaacaaaaattccgcattaatcgagccaaaacgcgatttatgggacctaacaggccaaagattcttgccggcgtgtctatcgcctccggccgtttgtgtctgccacgggagaaaaagagggaaatcaagcagaacgcctactatatcattaaatacggacttttcgagcactgcaattggaaagcaagtcgcgatccccttatcctggagaagctgttggggaaaattaacttctggctgatggtggaaccaaaaaacccaacagccttagaactccagcaaaaactgcgtgccatttccctcgaatttgataatagcctgtgggagaagttcgagcctaagagggcgcgggacatccaggacatttttaagcctactcccgctgctaactttgaattcccaagctctatgagaaattctaagtcctga

SEQ ID NO: 9407 - RNA, 1062 nt, synthetic construct
  source 1..1062: mol_type = other RNA
atgaagcagtcgaagtataaatccgtgttgtgcggcgacctagtgcccgtccagccctactcgcaatttcttcaggaaaaaaccttccggtggccccttaaatatgcagccaaaagaggtttgatcgcctatgcagagagactggagtcccaggggctgccagtaatcctcgacattcagcatctcgcttggcattcaggactcgaagctaaattcatcgccagcgtggccctggataatagaagatactactccacacgcacaataccaaagcgccgaggaggggaacgatccttattcgtgcctcggccttttttagccggactacaaaggtggattctcgacgagattttatcaaagtttgggctgcaccaaagcgctttcggcttcgttaaaggcagaaggacgctcgataacgctcgacttcacgcagccagtaaatgtatcctgaaggtcgacattagggatttttttgggagtatcaagtatgcctccgtcagtgacatctttctgggcgctggatactctcctaaggtttcttactacctcagcaggatatgtactttggatgatgtaattccacagggggcccctacctccccctctatctcaaacatagccatgaggcaagtggacattcagattgcggaattctgtgctcagaataggctactgttcagtagatatgctgatgacatctgcctctctggcgactccatcccggaaagcgccttccctttcctgtcagattgcctgagcaagtttggccttgaaatcgcagaggagaagactgtgctggcgttcgaggggcagaagaagatcatcacaggcatcagcatctcatctggcgagctgcgcctgccaaaggtttatcgtcgggaacttcggaaaaccattcactacatttgccgctttggtctgaagagtcataagaacaaagcgggaatatctgaccccatctaccgctatcgtctgctgggacaggtggagtactggctgtccattgaaccgaataacagcatagcattgttgggtcgggagattctcaaagagagccggtga

SEQ ID NO: 9408 - RNA, 1062 nt, synthetic construct
  source 1..1062: mol_type = other RNA
atgatcggtactatcatcctatgcgggaaccccgtgccggtccaactctactctgaatttttgcgagagagaacattcagatggcccctgaaaagcgcagccaagagaggattagtcgtctatgccgaacgactggagaataaaaatcttccggtgatcctcgatatgcagcatttgtcttggcacaccgggattaagtcacagtttatcgcgaatgttgtgttggatggggccaggtattaccgctcaaaggttattcctaagcgtagaggcggcgagcggatcttatttgtgccccgtcccttcctggcaggactgcagaggtggattctagacgaggccctcagcaagctgaagcctcactgctccgctttcgggttcataaaaggccgcggcatcgtcgagaacgctaaagtgcacgttaacagcaaatgcatcgtgaaagtggacataaaggacttctttggatccgtgagctatgtcaccgtatacgatatcttccttcaggctgggtatagtcctaagatcagctacttcctgtctaacatctgtaccctgaacgatgctcttccacaaggcgcacccaccagcccagctctgtccaatatggctatgttccaagccgacacacagattgccgaattctgctctcagaatgcactgttgtttactaggtatgcagatgacatatgtcttagtggtgatctgattccagagagcgcatttccatttctcagtgactgtctggccaagtttggctacgaagtggctgaagacaaaacggtgctcgcgtttgctggacaaaagaaaatcgttacaggaatctccatttcctctggaaaattaaagcttcctaaagagcagaggcgcaagttgagacaggccatacattatatctccaagcatggcattaactcgcacctggccaatctcgcaattctggacccaatttaccgctaccggctcgccggtcagatagatttctggctgtcaatcgagcctgacaacgaagtagcgaagctggggaggcggattattcggtcaactattagtgccggctga

SEQ ID NO: 9409 - RNA, 945 nt, synthetic construct
  source 1..945: mol_type = other RNA
atggagctcaagttctcttttccccctccagccatccaaactctcgctgacctcgccgatgtactgaatgtcgagaggtggtgtctcggaaaagcaattaattccagcaggtcattttaccgcgttttccagttgccgaaacgctccggtggctaccggtctatatctgcacccgtgccatccctgctgagcgtgcagaagatcatttacaagtccatactcagtagcgtcgtatgttctgacagagcccacgggttcctgtcgggaaggagcgtgagaagccacgccgaggttcatcttaatgggcgagatttcctacttaccgacatcgaaaacttttccgatagcattaagattgaggacgtggttagcatcttcagcaagattgggtatgtgcatgagatcgctagtgctctggccttattatgcaccctggacggatctctgcctcagggatcgcctacatcacccgtcctgtccaatatatattccattaggctggacaatcggctgtcaaacatttgcagtgatttgaacatctcctatagtcggtatgcagatgacatggtgtttagtggggacaaaatgagcctcggctttctgcgcctcgcgcagtctattataaactcagagggtcttaacctaaatagtaagaagaccatgtttgccaaatctccctccaggctgataattacaggcatctctatttcaaacagaactttgaagttgcctaaagaaacgaaacgagctttaagattcaaagcgcactttattgcacgcaacggcatcctgtcagaactggaacgtcaagagacagccgatccgttttacatcgatcgtatcatcggccagctttgcttctggtcattcatcgagccagaaaatcggttccccaaaatttacaagaacgtgatcaagaacatcatcaacaataatccaagctga

SEQ ID NO: 9410 - RNA, 966 nt, synthetic construct
  source 1..966: mol_type = other RNA
atggtaggtcgaatcgaactgccattcagaacaatacgcgggcttgcgcggcaagccgaagttaggcactctgtgctcagggctgtgctgtcaaagatcgaaagcaactatcgccttgtccgcattcctaaggccactcccggggagtacagatcgctctcaatcccaaaacccactctaaagcagattcagcgtacaatatacgactccgcattgaaaggaatcgcgatctcctccagcgctcatgcctatgcacctggccgctctattgtgtcgcacgcgcggattcacgccggaagcacagacttcatacagatcgacataaaagagttcttcccgagtgtgagcccagctagggttagagtactgttcgatgagttggggtttggcagcgacgtcgcccaagcactgacagctctctgtacgtttcagggcggtcttcctcagggcgctcccacttcccctagtatttctaatgcaatcttgaaacacctcgatgaggatttggacgcctacgccgtcagtagaagctgcagatattcccgttacgctgacgatctcgttatctcaggtagctctctcgacgtcgccgactttgaagccaccatagcactggtggcaaaacatggattccgcatcaatgatagaaagtctaggctgatgatgaacccatctaaggtaatcattaccgggatcagtatttccagtggggtccttaaggtgcccaaatctttcaagaggcagctgcggcagatgtcacaccggctgttagtctcccctcagctgaccattagcgaggatggacatgtggacccttttctgtttgatcgggtgatcggccgactgaccttttggcgaatggttgagccagaagccgtgtttccccggcgccaaattgagctattagtgtcaagatatccctccggcgttgtgtcaagcaggccagagaggctgccgttcgtgtga

SEQ ID NO: 9411 - RNA, 936 nt, synthetic construct
  source 1..936: mol_type = other RNA
atgttcgaggagaacttggccatcggatccctgacacagctgagcctggccagtggaattccttccagtgtgatatcttccctggtattcgaacgagaggggagatatagaaagcactttattgctaagagagacgggggcgctcggaccatctctgtgccacttcctgccctattacaggttcagaagaccataaataaagagatcttgagtaccgtggatattcatgacgcggccgttgggttccgcaagcaccacagcatcatcgatcatgtcaaaccgcatctcggtaacaagaagtttgcaaagttcgacattaaagactgttttggcagtatagcctttaacgcagttttttcgatttacctgcggatcacaaatgaccccgccttagccaattccctcagcgagttgagcacagatgagggtaagctcccccagggcgcggctacttcaccatctttgtgcaacatctcattaaaattcctcgacgaacgcatcttcggactttgtcaacggcttggactgacttatacccggtacgctgatgatctgcttattagcggcactaagctcgacctctatatatatcgcacgctgaaatcgtacattgaagattgcggcttcctgacaaacgagaaatcccgcctgatggaagatcctcagaggctgatcatctgcggtatttctattagcgagtcagacctcaaattgccaaaacaaaagaagagggatattcgtcaggctgcccactttctggtgaatcgtcctatcgtgagcgaatccatttctgacgaactgtttgacccattccacgtcgacagggtcctagggagactgcagttctggcgattcgtggaacccgaggcagaatttcccatcaagtacattccgatcatcaaagagaggatcgcatcacagatagatacccaatga

SEQ ID NO: 9412 - RNA, 1044 nt, synthetic construct
  source 1..1044: mol_type = other RNA
atgaccggtgaggatctgcgagagtggagagaactgtacaatagccggatttcagggaatcgagggagagctctcgctgatggctatataaaatatattgagagccttcaggccttgggaatcccacccatcttcgagtttagccacctcgcagacctggtagggattgagtatgaaacccttgccaaagtggcctcaagaccccaggacttctacagaactttcgccattccgaaacgttcaggaggtatccgcaagatcgatacccctaggccaatccttatgcagatccagcggtggctgctggaccagatagtgtctaaatctcgagtctccgaacaagctcatggttttgtagtgggccgcagcataatcactaacgcaagaacacacttgggctgccgtgagctgctgaagatggatcttaaggatttcttcccatccgtcaccgcctctactgttcactatatctttaaggatatgggttacccccctaacgtgtgtcgcgcactgtcccggctagtgaccctcggagcctgtctgcctcaaggagctccaacgagcccggcgctgtccaatatagcatgcgtggaattggatagcaacctgaataatctcgccctcaagtacgacctgacgtacacacgctacgcggacgacttaacttttagcggatcatcaattcctagtgatatgacttctctggtggcaaacctcacctctaaagctgggttttccacaaatgacaagaagaccatcttgtctcccgcggggcacaggaaaatcgtgacaggcattagtattagctccggcgagctgaagcttccccggacctatattcgcaacctgaggcagaggattcacctgctaatcaatcatggcatcctccatcccaacaacgactcgacagcctgggacccattagttctcgacaggctattaggcatggtcagtttctgggtcagtgtctgccctgagtccgaagccgccaaacgggcttacagtgaattgaagaacttcatgatgaagtttcagacagtttga

SEQ ID NO: 9413 - RNA, 972 nt, synthetic construct
  source 1..972: mol_type = other RNA
atgaaatccgacatctggaagtattgcaacaaatcacatacgcgggagttcctgctgtcattgggcctgaccggcaagctcaatctgcctgaggagaaacagctgagcctactctacgggctctccaatcatgccgaagaacattaccaaaaagtacagattccaaaacggaatggaacttggcgtacactgtatgtcccggatagcctgcttaagtacatccagaagcagattctccacaagattctcatgcagttccccgtgtcttcctgcgcttctgcatacaagaagggttgtgcgctgaaagagaatgccgctccgcactctggaaagccaatcgtgttgaaaatggacatctgggacttttttgggaacatcaccttcataagcgtgtatcaacacgcattccctggtgagctgtttcccccctccgttcgaacactccttacgcacctgtgttgttacaaggactttttaccacaaggtgcccccacttcgccttacattagtaaccttgtcttagccccttttgatcattatatggaaaactggtgcaaaggcagaaatattacttacaccaggtattgcgacgatctcaccttctctgggaattttgaaccagagatgttaattcctaaggtaagctccttcctgctgaggatgggcttcgaagttaaccctaaaaagacaaaggtgtgtaggcagggccagcagcagatcatcactgggcttatagtcaacgaaaaagcccaggtgccaaaggcttaccgaagaagcttgagacaggagatttactacattgagaagttcggactgagtgagcacctggcacatatccattcagatctgacacccgagcgctatttggaaaagcttaaaggacgcatccggtatatcttgcagatcaacccccaagataaagtgtttcaagaagctttcacccacctaaataagatacacataagtcactga

SEQ ID NO: 9414 - RNA, 972 nt, synthetic construct
  source 1..972: mol_type = other RNA
atgagttctgacatttggaagtactgtgacaagaaccactcgagagagttcttactgagcttaaatctcaccggcaacctgaacctgacaaaagagaagcagctgagcctcctttacgggcttagcaaccacactgaagagcactaccagaaaatccagatccccaaaaggaatggtgcttggcggaccctgtacgtccctgacagtctgctgaagtacgttcagaagcaaattcttcataaggtcctaacacaactgccggtttcatattgtgcctccgcatacaagaaaggatgctctctcaaggagaatgctgctcctcacacaggcaagtcaattgtcttgaaattggacatactggacttcttcggcaatattacgtatatctctgtgtatcaacacgcgttccccggagagctgtttccacccccagtgcggacactcctggcacatctgtgctgttatcgggattttctcccacagggtgcaccaacttccccgtacataagtaatcttgtgctgttccctttcgatcgatatatggagaggtggtgtaaaaaccagaatattacgtatactcggtactgcgatgatctaaccttttcaggatcctttgaacccgaagccgtgatccgcaaagtttccagcttcttgctgcgtatggggtttgaaatcaatcccaagaagatgaagatctgccctcaaggccagcgccaaataataaccggcatcgtagtgaacgaaaaaacccaggtgcccaaaacctaccgcaggaacctcagacaggagatttactacatcgagaaattcgggctcagcgagcatctggcccatattcacctggacttaactcctgaaaagtatctagaacacttgaaggggaaattgaggtatgtacttcagatcaatccacaggatcgagaatttcaggaggccctcgccagactgaacagaatttgcatctctcattga

SEQ ID NO: 9415 - RNA, 984 nt, synthetic construct
  source 1..984: mol_type = other RNA
atgaattcagatctatggaagtattgcactggaagccagtgccgagacttcttactgtccctgaacctaaccggcaatatgaaattgagcgacgaaaaaaagctggcgttgctctatggactcgctaatcacacacaagaccactacaaaagagttgaaatacccaagaagaccggcggattccggacactgtatgtgccagacagcgtgctcaaatacgtgcagcggcagattctgtccaatgtcctgagtcagtttgccgtatccccttgtgcaacagcatatcagaaagggcactctctcatctgctccgccaaacctcatctgcagaagcccatgcttctgaaactggacatctcggacttctttgggtctatcacgtatatcagtgtttaccaacacgccttccccggcgagatttttccaccctcagtccgcaccctgcttactcatctgtgctgttttcaggatatgttaccgcaaggagctcctacaagcccttacatcagcaatctcgtcctggctccttttgacaaatatatggaaaagtggtgtagggatcgggcaatcacttataccaggtactgtgatgatatgacgtttagtggctccttcagcccagggcaagtgactgccaaagtgcgtgggtttttaggtaggctcggcttccagcttaacccggaaaagaccagagtcattcatcagggtcagaggcagattgtgacaggcattgttgtgaatgagaaagcccagaccgctaaggcctaccgacgcagacttcgccaagagatctactacatcgaaaagttcggaatatacgagcacttgaagaacatacattctagtcagaccccagaaaactatctgaagtctctcgaggggaaaattagatactgcctgcaaataaacccccaggatgtacagcttttgaacccatgggagaagttcaagaagatcaagactgagggtatttcagagtcatga

SEQ ID NO: 9416 - RNA, 975 nt, synthetic construct
  source 1..975: mol_type = other RNA
atggccccaagcctgtggaaatactatacaaaggaacagacacaggactttctcttaagccttcatttgaccgagaatcttacacacacccctacagccgagatggctctcctgtacgcgctcgccaaccatgcggatgagcactacgaaaaaatctcgattcccaaacggaatggcaccaaacgaattctgcatgctccagattccgtcctgaagtatgtgcagactcagattctaagacaggtactcagagagttcccagtgtccggatatgcttgtgcatatcagaagggtatctcacttaggtctaatgcatttcctcaccaggcacagaaactggtgttgaaacttgacatacaggacttcttcgattccataagttatatttccgtgtaccaacacgggttcccttgtgagcggattccggattctgttcgtacgctgctggcccacctgtgctgctataaagaccgtctgccccaaggagcacctaccagcccctacctgtctaacctcgtcatgaagcccttcgatgagtacatgggcaactggtgtagagtgagggagatcgcttacactaggtattgtgacgatatgacgtttagcggagattttcacccgaaggaggtgctgaaaaaggccgaaggcttcttgaatagactaggctttgaactgaatcataagaaaactaggatctgcagtcagaagaaccggcaggagatcaccggcatagtcgccaatgaaaagctgcaggttccaaagaattatcgccggcgcctccgccaagagtgctactacatcaggaaatttgggcttgagaaccatttaagtcacattgagtatactggtgacaagcagaagtacttgcagcgcctcttagggaagatccaatacgtactgcaaattaaccccgaagacggagaattctgcgaatggaagcgatggatcaccaactcatttttcatccacgactga

SEQ ID NO: 9417 - RNA, 975 nt, synthetic construct
  source 1..975: mol_type = other RNA
atgaattctagtctctgcaactactgcacggagaaccagattcaggactttctcctgagtttgcacctcaccggaaccctgacccactccccaaaagccgagttggcgctactttatgggctggctaaccacgctgaggaacactacgagagagtgctgttaccaaaaaaggacggaagcaagcggatattgcacgtgcccgacagcgtgctaaagcatgtgcaaaaacaaatcctgcgccaggtgttaatggagattccggtttcaagctattcttgcgcttatcagaagggctcatctctctctcagaatgccgccccccataaaggacagaagctcctgctgaagctggatattcatgatttcttcgggtcaatctcgtacatttcagtatatcagcacggattcccgtgcgaacgaatccccgaccctgtcaggaccctgttagcccatctgtgttgttacaaggatatgctgccccagggtgcaccagcctccccatacctcagcaacctggttatgaagccttttgatgaatatatgggtaattggtgtagggaacgggagatagcatatacacgttactgtgatgacctaacattctccggtgacttcaatcccaaggaagtttacagaaaggcaaaagggtttctcaatcggcttggctttgaagtgaactccaggaaaactcacatcattagtcagaaaaaccgccaagaagtgactggcatcacagtcaacgaaaaactgcaggtacctaagaattaccgacgccaactcaggcaagagtgctattatatccagaagtttgggctggagaatcatttgaaacaaactggctgtcaggacagctccgctaaataccttcagagacttcttggcaagatcgagtacgtcttgcaggtgaatcctgaggatatggagttccaggagctgaagaaaagaatgaaagtctaccggaagaacgacgaatga

SEQ ID NO: 9418 - RNA, 969 nt, synthetic construct
  source 1..969: mol_type = other RNA
atggagaattctttgtggaagtataacactcataacgattctctagatttcctgcgttcactgcacctgacagacggactaaacctggcctcagacaatcagctcgcattcctctacgctctttcaaatcacgctcagaaccactacagccaagtatttattcccaaaaagaacggaaagaagcggaaattgctgatccccgactatctgttaaagcaagtgcagaccaacatcctgaaacacattttggttcaatttcccgtctcgccatacgcaacggcctacaaaagcggatgtagcactgtgttcaatgcctttccgcacctgaatcagaaactcctcctcaaattggacattcacgatttctttgggagcattacctatatcgacgtgtatcagaaagtgtttaagagtgaactctttccaccatccgtccgcacattactgacacatctatgctgctatcacgacgcccttccccagggtgctccttcttccccttatatttccaatctcatcctgaagcctttcgataactacatagggaactggtgtaagaagcagcagatcacgtacaccaggtattgcgatgatatgactttttcaggcgatttcaatcctgtcctggtgaagaaaaaggttcagagctttctgatgaggttaggcttctctttgaatccggagaaaacccacgtatgtagtcaaaagaaccgccaagaagtcaccggccttgtggtgaatcagaagctccagacttccaaagagtaccggcgaagaattagacaggagtgctactatataaagaaattcgggctgaaggaccatcttgcgcatatcggctacaagaagggtgaaacacattatctccagagcctgaactccaaaatcaattacatactttacgtgaacccaagcgacagtgaattcctgcttctgaaaaaggagctgtcttcctttttccaggtttga

SEQ ID NO: 9419 - RNA, 972 nt, synthetic construct
  source 1..972: mol_type = other RNA
atgcagaatggactatggaaatactgcagctctgcccaggagactgagtacctgctgtcactggacttggcaggagccctgaccgcgtctcgcgagaaacaggcagctcttctgtatgctttgagcaaccacgcagaggaacactacagacgcgtcagaatacccaaaaagcacggcgggttcaggaccctcgatgtgcccgatagacttctcaagtccgtacagcaacgaattcttacacaggtgcttgaacatctcccagtgccagaatgtgccagggcatacagaaaaggcgtctccctgctggaaaatgcggagccacacgccggccaacgatgcgttttgaagctggacatccgcgacttctttggttccattacatacctgtcggtgtattctctggccttccctggtgagttctttcctcctgctgtgcgtactctgctcacccatctctgctgtctccatgattcattgcctcaaggggctcccacctctccctatatctccaacctagttatggccccctttgatagatatatctcgggctggtgcgaggctagggggatcacttacactcggtattgtgacgatctcacgtttagcggggacttcaacccgaacgaggtgaagagcgcagccgagggctttctgttacggctgggctttgaattaaacccagataagacgaggttcttctcaagttctcgtcgccaggaagtaacagggatcgtcgttaatgataggccgcacttaagcaagtcctacagaaggaagctgcgacaggagtggtacttcctgaaaaagtatggaaccgagaatcacctgcagcatatgggatcccccctaacacctgagaagtatcttcagtcactgaaaggtcggattttgtacgtgctcagcatagacccaagtgaccgggaatttgccgacatgctccgcgaattgagcgctgaacggagtagtatttga

SEQ ID NO: 9420 - RNA, 993 nt, synthetic construct
  source 1..993: mol_type = other RNA
atgcattatgatatctggaaatattgtaccaaggatcaatggattcagtacctcttgagcatgaatcttactggtaatttgcgcctgtctgatgagaagaaattagctttgctgtacgagcttagtaatcacgctgaggaacattataccaccattcgcattcccaaacacagtgggggcctgcgcgtaattcggcagcctgacagcctgctgaagtatatccaacggcaaatcctcttcaggattctcgtgcaaatacccgtgtcagactgcgcattcgcctataggaaggggttttcagccgcagacaatgctcgaccacacgcaggcaaagataccgtcctcaaactcgatattcacgacttttacgagaacataactttcatggccgtgtaccagcacgcttttcccgaaactttgttcccgccacctatcagaacgctgcttacccatctgtgttgctacgattcaatcttaccacagggagcgcctacatccccttgtatctctaatctggtcatgcggccatttgacgagacaatgaaacagtggtgcggagaacagggcatcacgtacacgaggtactgtgacgacatgaccttttctgggcacttccccgggaacactgcccaggaagtcatagacaagaccagaggatttcttctgcggttgggcttcgagcttaatcagaagaagactagactgataagaagaggttgcaggcaagaggtgactggctataccgttaacgatcgggtgaggacttcgaaggactatcgccgaaagttaaggcaggagtggtactacattcgtaaatttggactggaagagcacctgaaaacactcctaggtaccagccatgtaacagatgcccagaagaacagctacctgcagtccttcacaggccgaatcgcgcatgttctccgcacagacccgcagaacacagtgttcctagccatccagaaggaagttaaactgatgcgtaactcctga
